United States Patent Application Publication US 2026/0103690 A1 - sequence listing, part 68

SEQ ID NO: 332210 - protein, 341 aa, unidentified
MNALYYIGFDIHKKTIAYCVKRIDGTLIQQGMVAADRKSLRQWQEELPGPWVGAMEATLFTGWVYDFLSPYADALKVAHPEMLKAITASKKKNDRADAEKICDLLRVNLLPECYMAPGELRELRRVLRYRNLVVHTAVKMKNKISGLLMEVGATYDKGRLHGKQYFYDLLERIEDVPDSVKELLRLSRGSIELFTGVQKKLIKALRENHLIRDRVERLMSIPGVGIILALTWVLEIGDPFRFTSARQAISYCGLCSAQRESAGKELRGPISKKRNKHLQTILIEAAKLAPGRNQQLAAIHAKELARGHKNRATLAIARKLVEYMLAVDRRKTDFETVRPAA

SEQ ID NO: 332211 - protein, 343 aa, unidentified
MQSISTISLDIAKSVFQVHGIDAAGQVVIRRQLKRRFVQSFFEKLPPCLVGIEACASSHHWSRELQALGHTVRLMPPAYVKPYVKRQKNDTTDAEAICEAVTRPNMRFVPTKTPAQQSCLMLHRARHLFIRQQTAVINSIRAYFAEFGIVAPVGRRGVEHLLEVAADATDHRLPEVARVCLAALGSQLRALKAQILAFDRRIIAWHRSNATSKRLDAIPGVGPALATALVASIADPKAFRSARDFSAWVGLVPTQNSSGGKDKLGSISKQGDRYLRSLFTAGALAVIRYAKIHGTRHRPWLTALLARRPTKVAAIALANKLARMAWAMMARNERYREPAALTA

SEQ ID NO: 332212 - protein, 343 aa, unidentified
MGEVTTIGLDVAKSVFQIHGVDAAGTVVVRKRISRAKVLEFFSILPSCLVGLEACPSGHHWSRELRALGHTVRLMPPSYVKAYLKRSKNDANDAAAICEAVTRPSMRFVPIKSEQQQSGLILHRSRQLLVRQRTMLSNAIRGHLAELGIISAKGRNGTSELFKIIADEKDGRIPAAARFSLDVLARQHAAIAAEIGAIEKRIHAWHRSSEESRRLEQIPGVGPIVATALVSEVGDWKEFASGRSLAAWIGLVPKQHSTGGKERLGRISKQGNRYLRWLLVTGAMAVIRYARQHGTRRLWLAHIMERRPIKVAAVALANKIARMAWAMMVRGEQFKEPRLLPAA

SEQ ID NO: 332213 - protein, 393 aa, unidentified
MYEYLIPVDVGKFKHWANVMTPDGEIVVPPFPFGNDIRGFKRFHDNVRPYLSKLHLMGMEDTGHYGNCLRLYALDNGIKTAMINPQSTDAMRKASLSTTKTDRQDTLLIGEVLCHPKLCRIVDKKDYENPEVLELTRYKHNLEESCTVQKTKLQACIDLSFPEFNSLGITKYSKTYMRIIGELQSAEKIARTDIRTIRKCISPKHTAGKNASLTAEELKNAAKRSVGHSDSSLEMEIRHLVKLINAMEESIREAETKIEEYSRLLDSPILAIPGISHFSCVCICSEIRDINRFDSPRKLIKYAGVNPIVHESGAFAAKNTRISKKGSKYFRKILYQVIQPVINNNPVFGAYYRKKISEGKGHRCAQGHCIRKLLRVIYHILKTGEPFDPEKLR

SEQ ID NO: 332214 - protein, 400 aa, unidentified
MLSIGIDVSKGKSTVCGMKPGGEIVYTPFEVQHTREGMSELVSLLRSSGEEVRAVLESTGSYHCPVVAALLENGIFVSVVNSLRMKRFCSQSIRKVKTDRIDAMQIALYGLAYWQELQPTRLPENTYRELQLLARQYYQMTSLLIKAKVDFNALCDQVLPGMQELMSDHAGRHKLSDFVLRYHHTAHILKMGETRFRKDYCKWAEKKGYRNCERMAVLIFATAQNGIPVLPNAPSTQIVITEAIRVLHIVEASRDAILTQMQALAKTLPEYSLVREMPCIGDTLAPRLIAEIGDVRRFHSKRALIAYAGIDAPPYQSGKFCANNRHISKRGNRYLRKTGYEVMQSYVMHKPANDPIFTFIEKKRSEGKSGKLAMVAGLNKFLRVYYGKVTELYRSLPAIE

SEQ ID NO: 332215 - protein, 377 aa, unidentified
MNNVRFVGLDVHAETIAVAVAEVNGEVRSLGIIPNRAESVRRLVGKLGRPASLRVCYEAGPTGYVLYWQLSELGVACQVVAPTLVPVKAGDRVKTDRRDAAKLAKCYRAGDLTPVWVPDRAHEALRDLVRARLAARRDQLRARHRLSKFLLRHGRRPPEEIGAWTLKHLQWVRSQVRFEAPAQNATLLDYLHEVEHMAARITRLEQAIDAALPALPATMRALIDGLQSLRGVAKVSAVTLVAELGQLSRFAHPRQLMGCAGIVSREHSSGERIRRGAISKTGHAHLRRIVVEAAWSYRHRPAVGAILAVRQKSAPAAVTALAWKAQHRLHARYVRLMGRGKSKQQTVTAVGRELLGFIWAIGVEIEQHSATPMPRAA

SEQ ID NO: 332216 - protein, 404 aa, unidentified
MWYAGIDWANDHHDTLVIDEKGRQVGSLRVDHSPQGLTRLNTFLEQIVGAASKEQMACIIETTHGLLIAHLLEAGWPVYPVNPRTIDRRRSASGAKTDTTLAYLLAKTGRADLADLHRLSPDSETVTELKELTRDQDALIRMQTRLVNQLTACLKAYYPVALELFAKLPQKSTLLFLQTDPTPQAALTASAAQIQEVLRQAKHPNPRTIAAKIVERLHQPHLQADAVTTRTKARLMLVGSRQLLPLLEQIAQYDKEIATLFLTHEDHALFASLPRAGKRLAPRRLSEIGDDRSRYQDESLLQALGGTSPVLFQSGMYSKAHRRFGCIKPLRNALHQFAWQTTQSEAWARDYYQRKRAEGKSHTVAVRALANVWVRIIFAMWVHHQCYESATFAQAQRQHARKVA

SEQ ID NO: 332217 - protein, 357 aa, unidentified
MSKRLWVGLDVGVHTTSICVLNAAGEPVREETVATSVSNLDAILRPMRRGNIEIVGMEAGATSTHLARGLEKLKYKVALFECRQASAYLGIRQNKTDRNDARSIAELAMSGRGSVSEVTVKNLECQRIRSMLKARQHFLRMRIGCEAGIGSLFNLYGGKLAKSHSAAVLRANTLAELARLRREQHIDLAEDVAPALAIGESLRTYGDHLNRSLAETAQSIEVCRRFMEIPGVGPLTALSFYSAIYDPNRFERNIDVGPYLGLVPRVRQSGASVVRTRISKMGNTMTRQHLSFAAISLLRSSAKDTCLKEWGLMLRERRGRGRARTAVARKLAIVMLAMWKRGTAFDPMAGARTAQDA

SEQ ID NO: 332218 - protein, 355 aa, unidentified
MKYYTSTTEFNCGIDLHARQMYVCVMDRQGKKLVHTNVKNNDFAFFLKLVEPYKQDLTVCCECMFGWYWLADACQAAGLTFVLAHALYVKAIHGGKNKNDRIDSEKLTHLLRSNLIPPAYVYPADKRPLRALLRQRLFYVWRRSELLARIHSHQLAHNRIPAKQTRRTRDPWEEQLLAAEDHPLRQLALRNDRAMIRHFDHQIFQLEEELQRQTKKIASREYALLQTVPGIGENLGLTLLCEIGDIARFPTVKNFLSYCRLVKGTVASAGKIKGLRGAKLGNPYLRGAFGEAAVIAKRDHFRIRPLAQRLETQMNGNKFKANTVVAIKLARAVYFMLKNQTVFDPDRLVAALAKN

SEQ ID NO: 332219 - protein, 351 aa, unidentified
MVWKGAEIVRVMSRQFVLGIDVAKDSLVIFDTKAKKHISIANTEIAVNKICAANQWSPEEYIVGLESTGDYSLLVMKTLVDLGFTVRLLNPILTQAGIKRTVRGTKTDATDSELIAELASKGEGYEVTKTTLNIEKKATTRVERNLTLIGSNLKKLQKSVAHKQEAGVAMHAAETILSILVEQVEEAKAKLWEAIQSPELQNHLQRQEQIIASHIGCGVKLSTIISEEAGDIKRFESSSALVAYAGIDPRVKQSGEMDVRGKMTKRGTNNLRHALYLAANIARMHDPQLKDYFEKKRTGGKHFTVAVCAVARKMCERIYSTVTHDRMYEKREVINEQLAAPLSTENLLTGI

SEQ ID NO: 332220 - protein, 329 aa, unidentified
MEQEYIGIDLHKAFFQVCVVNGRGERQWEQRWPTTDEGIAGLVARCGASSRVAVEASSPTWAFVDRIVNHVGAVHVVDSRKTRLKAGYAAKTDRLDAQRLADALRRDSVVGIYYPPPPIRDLRELCRYRCHLARTQASLKQRIHALLLRQGVREPRVSKLFGKRGTQWLDTLQVSGWAGASLNGLRQLLADVRTQLVPVLATIRTTAVADPIACALDARPGFGPVFSVTLRAEVGIIARFPDGPHLASYAGLVPRVERSGGRQWSGRITKAGSPWLRWVLIEAAIHQLRRHDDFGRWARQLAVRKGILKARVAIARALCDELFDVWPRP

SEQ ID NO: 332221 - protein, 343 aa, unidentified
MEHYVGLDVSLKQTSICVVNQAGSVLREGVVDSDPDAIGAFVSSNAPGVVRIGLETGPTATWLWTELKRLGLPVICIDARHAKAVLKMQINKSDRNDAAGIARIMQTGWFKEVRVKDIDSHSVRALLASRALLVKIKRDLENQIRGLLKNLGLVIGRAKFNVFAVRAEELIEDRPELMAAVRPLLEARKAIEQQVGDLDRKVLKLARDDVQVRRFMTAPGVGPITALCFKATIDDPTRFKRSRSVGAYVGLTTRRHASGEVDWSGRISKCGDAMLRTYLFEAANVLLTRVPKWSALKAWGIRIAKRNGLCKAKVAVARKLAVILHRMWIDGTEFNWSTRKPAA

SEQ ID NO: 332222 - protein, 425 aa, unidentified
MKKTDYLSTLFVGIDIGSRTNVVSAIDFNREYFIRMKPVPNAKEGAEILESLLVDVLSAHHEFKHVIIGMESTGFYGVHIANYLSASDMLSPFGAEVYCLNPKEVAKYKESFNSINKNDGIDSFVIADFARVGRITIKPWRGAQYLALQRLTRHRLHIAECIAREKTYVLNNIFLKFSEFAMLKSEDHPFSNKYGATAEAIIEQYVTNDDIIRASIDELVELIESKSHGRITDPEETAKLLQSAARGSYRLDKVVAKPITLSISSSFNCIRAFEKELKAIEKAIEQTVQGINPLEYQVLKSIPGIGPTYAAGILAEIGTIKAFPNNDALAKYCGIIWKENQSGNFRAEDTKMSKAGNRYLRYYIIEATGSVINHCPEYKAFYGKKFAETTTHQHKRALALTSRKFLRMLFGLLDKTQLYSLEKSR

SEQ ID NO: 332223 - protein, 359 aa, unidentified
MGLTGTTVRTHHHQKEGVHMMNVTRIGIDLAKQVFQVHGVDERGHTVLRRRVARSQVRAVLAQLPTCVVGLEACGSAHHWAREMRALGHDVRLIAPQFVTPYRKNDKNDGNDAEAICEAVGRPHMRFVPVKDVGQQAVLTVHRARQLLIAERTALVNQSRGLLAEFGLIVPAGIGALRRLWPSLLEAPAVPALAREVFTDLADRLRAVDERIAAYDHRVVQLAQQTEPAQRLMQVPGVGPVTATALIATVGNAHAFRNGRQLAAWLGLVPRQHSSGGTRRLGRITKRGDVYLRTLLIHGARAVMRHLARRTDATSRWVTALHARRGFNKAVVALAAKQARILWALLATGRTYQPAVACP

SEQ ID NO: 332224 - protein, 352 aa, unidentified
MEKYIGIDVHSESCTIAVMNSAGRQLRQQVVDTQAKVLIEFLKGLPGNRYVCIEEGQLAEWLVETLEPYTKEMAVVQPKEHQGHKSDAADAWALAERLRVRAKGVYVFKPTRQYRSLREAVRTYGVAVKDMTRAKNRFRSLLRARGVANFDSSIYEAEQRSAWIRKLPTAYRRRAEWFGRQIDSMCEAHEIAESWLKEEAENCPEVERLQTLPGFGPIRAAQVVALVVTPHRFRTTRQFWNYCGLAIVTRASSEWKRGSSRDGWQRVRGNVQTRGLNRNCCSQLKAVFKGAATTVIGKPNPLREHFEQLVANGTKVQLARLTIARRIAAATLAIWKKKEDYDPTKHQSKKPA

SEQ ID NO: 332225 - protein, 323 aa, unidentified
MEVTAATPETFGLHELVARLSRYGEEVTAVIESMNGARFVHDQLELYGWDVEIADAVKVKGLAPLAAKTDRIDARVLAELGRRDLVPAIWLPDPTVRAERERARFRLHLVRHRTALKNRIHATLIAFGHPVPVSDLFGTKGRELLASLAIPEPWATTLLRSLHFVDELDTQIAACEAELRAAGADHPYVPLLMSVPGIAWVLGYTIAAELGDIGRFASPKKLAGYTGLCPLVRQSGRRDDRGPLAKNGPKYLRWALIEAATHAARHPAYRDRYEHTKKRLGRQRGSKVARVEIARELATAIWHMLTRNEPFNPGRSPARPLVA

SEQ ID NO: 332226 - protein, 483 aa, unidentified
MHPQTTNRILQTFDVYRFSFESAGALALDNEYSGFAVVPAHYIAFAERKQARPCRSIYHFGRADMKPTDTQPFTAYVGIDWGDAKHDICLQAAGSDRREFDCIAHQVPRIDEWAKALHQRFGSPIAVALELSKGPIVYALQKYDFLVLFPINPSTLAKYRVTFKPSRAKDDPTDAEMALDLLLHHPERFKPLQPQSVAMRTLLSLTEHRRELVDDKTRLTNRLTDNLKQYYPQVLDWFEQRDTILFCDFLSRWPTLTQVKRARQTTLKAFFYAHNGRRPQVINARLDSIKATVSLTDDRGVIVPCKLRTLTLVAQLRITLQAIDQYDHEIAGLATTLPDYALFQPLPGAGPHLTPRLLVAFGEDRERFQSADEVLKYSGIAPVTERSGKKHWVHWRLQCPTFLRQTFIEWAGQTINKSFWAGAYYRQQREKGSSYQVAVRALAFKWIRILYQCWKTQTPYDETKYLNALRKRGSPLIKNLSLS

SEQ ID NO: 332227 - protein, 315 aa, unidentified
MEYNTVYVGMDVHKDSYSVCCYTYEDDKCKYKRTFSSNYKSILKYLDSMREQYGDNVKFITGYEAGCLGYSLYNDLTAHGVECVIMAPTTMAKTANAGKHKTDRLDSEMIAKCLADRNYHPVHIPTEEDDQVKEYIRMRDDHKIALKKVKQQLLAFCLRRGLRYSDPDSQSKPRNWTQRHIKWLREQVSVLKGEYRDVLEEYLGTFDYLTDKIERLDQKIEELSQRDTYHEKAKRLECFLGVRTLTAMGVISEIGDFNRFESADKFSSCLGMVPGESSSGGSRNMLSITKAGKESRVNNLSNILSFHHSFRIMEV

SEQ ID NO: 332228 - protein, 456 aa, unidentified
MSKRRESRPKKAVPALSPTRPKVAGIDVGSRQHWVCGPDEGTGQANVRVFGTTTAELMALVDWLMELGVESVAMESTSVYWIPLYELLESHGIEAVLVNARQLHNVPGRKTDFHDCQWIQHLHSCGLLRGSFRPGEAIVATRALQRQLANFVEERTRCVQWMQKALDQMNVQVHHAVSDLSGTTGLAIVRAIVVGERDSVRLAAHRDYRCQKSAEEIAKYLVGTWRQEHLFNLESALRLHDAIGALVASYEARLLELIESMQPPERRNLPVPSHPTPAKERQIKSRGNQNTRTALWRYAGVDLTRIDGIGIGSARTVLSEIGPDLSAFKNEDHFVSWLRLCPRTPITGGKPLKKRRNGLGATRVATALRMAASSLRRSKTALGAAYRRYARNKSADLAVFAMARRLAQLVYRMLRYGQDYVDAGEQAYELKFRARRLAGLKEAARSLGYVLAPAAG

SEQ ID NO: 332229 - protein, 395 aa, unidentified
MESLKYGLGIDMAMEKFDVCISVIDKLQHVTIRAQCSFINNKNGFESFIVWVSKNTKLAVPVVYLMEATGIYYEQLAWFLHNKNCSVSVVLPNKAKKYKEALGLKSKNDRIDAKGLAQMACEQNNTIWKPLTSNIYLLRLITRQIQSVAEQSTVLKNQLHALQYGMYRDRAIEKIYQKQLDLLQKNKKDLQLRVEQIVETDEILKKKFNNIGKIKGLGLQSLAVIVAETNGFAAFENIAQLVSYAGYDVVENQSGKRIGKTKISKKGNSHIRRCLHFPAFNMVKYQVALFKNLYERVYEKSKIKMKAYTAVQKKLLEFIYILWKRDEAFDPNYQDKKSRDVEPLPSLALVPQEPAITAGNKQKNIEIIKQKITPDITGVTQDKHPSKYRRMPSLA

SEQ ID NO: 332230 - protein, 428 aa, unidentified
MKYNTQNAKIKSITEKTLIVGIDVGSETHFARAFDWRNYEYSKKPLEFSNTEAGFMTLKAWMADFAEKYGKNVVIPRMEPTGHYWFNLGAYLQDNGMKPVHVNPHHVKKSKELDDNNPNKNDRKDPKTIAALVNEGRFSYPYIPTGIYAEIRSLSNLRLQTQEEITRIKNRIARWFSIYFPEIKDVYRNPDSVSGLMILKEAPLPQDIVKLGVDGINKIWRDAKLRAAGLKRAKTLVTAAEHSIGSQEAPDSARIELKNLLNDYEIYKNREEDLMSLTEEKLSEIPHIDKLLKIKGVGLKTVSGFVAEVGDITRFDNPKQLQKLAGYAIVECSSGKHKGESHISYRGRKRLRYVLYEAAISLIARNEEFKEVHRYYRTRKENPLKKMQSVIAVACKVLRIFYTILTKGVTYDGAKMMQDIKRPQMLAA

SEQ ID NO: 332231 - protein, 482 aa, unidentified
MKTRPSERAKKTTDDAKHVHWHEMNRKQRREMMREIQNEDISLEVVHPDAAGIDIGNESHYVAVPPGRDSLQVRRYGCTTDELKAMAAWLKLLGIRTVAMQSTGVYWIAVFDTLEAAGLEVYLVNARDTKNLPGRKSDVQESQWLMKLHTYGLLRNSFRPSQEVRMMRTYWRQRNDLVRAAASHIQRMQKALTQMNVQLANVLSDITGVTGQAIIKAILGGERDPHKLAAFRDCRVKASEEQIARYLEGNWQEDLLFLLKQEQEAYEFCQQQMAACDRQMEQYLQQRKEPNPDARLPEETRRCRLKKKIHNPQFNLRAELFRITGTDLTQIDGIDVLTAATILSEAGWDMSKFENDDHFVSWLRLCPNNRITGGKVIGKGRLPTNNRASIALRMAASSLRTSKTYLGAQFRRLRTKLGAPIAIKAMAAKLARLVYRMLRYGMKYVDRGAALYELKHRELQVKQLKWKAASLGYQVTPVPAAA

SEQ ID NO: 332232 - protein, 314 aa, unidentified
MTRKDDSKVIRIVHPICCGLDVHKESVSACVIFPDDTGEEQYEIQVFGTFTDDLRRLREWLVAHECPVVAMESTGVYWRPVHNVLEDSVQVVLVNARDMKNVSGRKTDIGDSRWLAGLLRHGLLRSSFIPPQTVRQWRDLTRLRKKYVQSVGDYRKRTHKLFESANIKIDSVVSDLFGVTGRNLMQLLVEDRKALTLSDIQTCVRGKLKGKETELFRSIQGFFTEHHRFILKTILETISMLEAQIETLDHQIRLAMRGYKPLLDRMKEAPGISDVSSCDILAEIGPTLDSFPTDTALVSWSGLCPGNNESAGKR

SEQ ID NO: 332233 - protein, 315 aa, unidentified
MSTETMVGVDVSKAHLEVGVLPSGEVWQEANEATATARLGKRLLRLAPKLVVMEASGGLEIPVVAVLARTGLPVVIVNPRQVREFARATGRLAKTDKIDALILALFGDRVRPEVRPLPDDVAQAFEALLARRRQLVAILAEEKTRLKQARSRPVAEGIKRHIRWLENEIKDVERDLTKGVRDSPVWKAKDNLLRSAPGIGRIVSFTLLGDLPELGRLNRKQIAALAGVAPHAADSGTLRGKRIIWGGRASVRQSLFMAVLAARRCDPGFRTFHDRLICAGKPPKVALVACMRKLLVALNAMVRDATPWNPAVAEN

SEQ ID NO: 332234 - protein, 346 aa, unidentified
MAYYVGLDVSVKETSICIMDDKGVVAARTDVSTDPDLIAHFIAKHALEVERVVHESGILAIWLTRELEKRGVPIICIDARLAHKALSGRINKSDQGDAEGLAQLARTGWFTQVHIRSEASERMRVLIGARERLIRMRKDLEGHVRGVLKVFGVCMKSVQTGKLRKGFRDQLAAAADTDPAIAMMSETFIPLHKTLCIARNALDEEVRNIARESDLARRLMTVPGVGPIVALAYIATLDDEKRFRKSIDVGAFLGLTPKRHQSGEVDWSGKISKCGDCDMRRLLYSAASTLISCTRKPSRLKEWATKLAERKGHKKAAVAASRKIAVILHCLWRNETVFEPGMEGAS

SEQ ID NO: 332235 - protein, 340 aa, unidentified
MNQCNVIAIDLAKNAFQVCGFSKSNKVLFNKPLKRNKLAQFLANQPATSVAMEACYSSHYWARCFEAMGHKVSLLPAQHVTPFVRGNKSDHNDAIAIAEAFQRPHIRPVPIKTVVQQDIQSLHRIRDRLIKQRTAMMNQTRGLLAEYGVIAQQGHKAFITLLHDINEQPLLADSVLLKEQLLEMIDEYHRYTQRIDHIAHQLEGIAKQNPLCQLLLTIPGIGKINSTLLYSAIGDGSQFANARELAVWLGLTPRQYSSGNSFSSGGITKRGNRHLRKQLVHGARAALSRCKNKTDRVSQWANALVARRGFNKACVAMAARIARTSWILLNRKEAYKTISI

SEQ ID NO: 332236 - protein, 411 aa, unidentified
MFCGIDWASDHHDIAVVDESGALKARARIDDTIDGLTELLQMLAEHGDTAESPIPVAIETSHGLLVAALRSTGRPVYAINPMAAARYRDRRTVARKKSDHLDALVLANILRTDADAHRQLPADSELVQAVAVLARAQQNAVWDRTQAGNKLTSHLRQYFPGYLAAVGHRREGIFHPIARVLLAAAPTPQQAAKLTRAQLRALLKKAGRKNTIDAEVERLHTALRAPQMRQLPLVEKAMGRHALALLRQLDAACTSADDLAEATTEAFEEHPDAEIITSFPGLGPLSGARVLAEIGDDRSRFADARGMKAYAGAAPVTRASGKSTVVMARRVKNQRLAGVGYMWAFSAMAHSTGARAHYDRRRNAGDRHTAAQRNLFSRMIGCLHHCLTRRTHFSEDIAFPAPREVHLSLAA

SEQ ID NO: 332237 - protein, 439 aa, unidentified
MKGYLGIDVSKGYADFILLSEELAELESCFQLDDSSKGHAALIDWITVSLKKHQLTELRCGLESTGGFEDNWFSLLLRLGDQLPVRVARLNPSVVKHGAKASLRHTKTDAISAENIASYLVRFDEQVRYQVADNKYRSYRSFYNHISLLNRQKTQLINELKQLLYTSFPELQRFCKSSIPGWVLELLKQYPSASALSKARPEKLCKIKAITAAKASQLIEKATLSVASRHQSTDSFLVKSMASGILQAQQQLALYKEHLEQTCQGPEVDLLATIKGVGRYSAAAIIIQIEDIRRFPSPKHLAGFFGLHPTVDQSGDKKAKSRMSKKGRPALRAALYMCANSAVLFDPHLKSIYARHRAKGNNHKAALVVIMHKLLRIIWGVLSHKKAYNSDIDLKNQQAVKVVVPDKNETENKRRLQDYDEQAPISRIETKKRKAYQSS

SEQ ID NO: 332238 - protein, 383 aa, unidentified
MIPHPIIAPDPYFIIRSGEMEEKKKAVTRFVGIDLGKKTYEVAIVGKGGKVSKSNGKTYPAARQALYNKLQPTDKVALEAGNLAFIFAKEIEKTVGCKVYVLNPSNLALIYGSMKKTDKEDSLKLAHILEDFNEERLPVVPVPSDKEMRRRKILSSYRRTQQERNRDINRLHALFVSQGITTKVRANLADCESRKEAIKELCDIERDEAEHLVVILDLCEKRIDKLEKQIAEEAKEDEVIKRLQSVPGIGLITSFAFASHIAASRFGNASQVSNCLGLVPRVYISGQTVKYGQITKRGNGYLRALLVQAAWALVRSKNGGKLKELYQCMTIEKSKSKKKAIVAVARRLAELLYLIMKDDVRYVKKPFFREIKKSEKATELLSA

SEQ ID NO: 332239 - protein, 410 aa, unidentified
MTGQQVSKVKLSTQHFGDGPTMTKRSSTPADAVLVAIDMSKHRQEVLIERPEGGRRRRMTIMATKADYDRLADELSSIGRPIVVGFEATGNYHRTLAHRLLSAGFELRLISSVALARTREALHNGWDKNDSKDAQVILHMLRIGATQRYVDPLAAGINDLQEMSKTHEAISKAKTQTWHRILTHYLPLYFPEIERFAGNSRSDWFLALLERFPTPASMTALGQEDFTREAWSLVGRKVSKARLINDIYETACASVALPVEEDSVAIAMFRMVIAQARSLIRQRDEIERTAHALLSENRDYQLLRMIPGIGPINALTILAEAGDLRRFAHHRQFLKFCGLDLATCQSGTFRGRTKLSKYGNARLRRTFWMATQVAIRQRDNSFRDKLGRYVAGHGNDPDVNTGIKTGQAPV

SEQ ID NO: 332240 - protein, 395 aa, unidentified
MHSIGIDVGAAQHSVAICRAGNFEAERQVLRIPSTRSGFAELERWIARHGAVERIVLEASGHYWQTLASHLRAAGHPVAVVNPLTAKYFAKRRLQRAKSDPADARTLAALGMVDRPRTAEPLAGAELREAARFTMRLVEEQSRLCNRILRLVDLGFPELAEAFEDPTCKTALALLKVAPTARAAARRSVATLARANRGPGQRALGPTKAAAIHAAARQSIAVRELEQQIAFEMPLLIAQHELLERQIAAAEARVATLLDGELARRLQTIPGVGAASAAALIAEIGDITRFSSFDKLVAFAGVHAAEKSSGKKGADPETSWHMAKTGSPYLRAALFRIAIVGLQHNPVIQAHYARKRAQGKAKMNALGHCMKKALAIVWGVWRGGRDFDPAAPSNG

SEQ ID NO: 332241 - protein, 319 aa, unidentified
MAQNDLVVAGVDVAKDKVDVCIRSLLLRRTFASTAEGRRELASWLRRNKVGKAVMEASGGYEREWAKALRDAKIEVRIVDPKRVRSFARSAGRLAKNDTIDAEMIAWFAETFDEARAQTYDVTREQLQQMVNARQALKDMQSKLTSQDEHAVPAAVQRIHARISKTIAVELVKIEAAITALIQATPRFAELAEIIESVPGLARTTSAALIAAMPELGQVNNKIVASLLGVAPYDDDSGRRRGERHIKGGRRRTRNVFYMACLGAATQHNPVLKAFYDRLVAKGKLKKVALTACMRKLISILNIMIERRQKWDAKRYALS

SEQ ID NO: 332242 - protein, 355 aa, unidentified
MSIVGGLDIHRNQLTFDYVETETGKQERGRIAPADRERLAGWLTRFDTSVAVAFALEGCTGWRYVVDEMRKVGVQAHLAEPADTAALRGPKRRAKTDKADAKHLRELLDAGRLPECYIPPEQVLEWRAVLELYSDLRVEHTGWAQRVHATCFHQGTTSLGVAGVVRGSRARLDHIVEEQLSPMGRLQVNTALSVMEVLDEHLDRLRRRIVATARHVAGARALTEAIYGVGPMTSLALVAWLGGANRFSSSRKAVRFVGLDITVRSSDSKRSPGRLSRQGPQVLGWLLFEAAKTSARDWAPTHAYYDSVRQRYDGNRAALSQARRIVRQAAHILTGLGDGAFTIIGTHQPSTVVAR

SEQ ID NO: 332243 - protein, 315 aa, unidentified
MTTECFVGIDVSKDKVDLAVRPTNEEWQAPLTPGGIAQVVGRMREIAPTVVVLEATGGMERPWVLALAGVGLPVVVCNPRRVRDFARATGHLAKTDKIDARVLAHFAQVVRPPLHPLPGAAVVELSATLARRSQLLEMLTAEKHRLSTAVPVVRAHIERHLAWLARELDAIDHDLQARVQAHPDWQGKDVVLRSVPGVGRVLSTTLLADLPELGRLDRHQIASLAGVAPLNCDSGQRRGKRAIWGGRARVRAVLYMATLAATHWNPTIKAFYHRLCAAGKPKKVALTACMRKLLTILNAMLRDQRCWEAPLLQAA

SEQ ID NO: 332244 - protein, 341 aa, unidentified
MQVTTIGIDLAKNVFQVHGVDANERVVFNKPLRRSQVLPFFAKLAPCLIGMEACASAHYWARELKKLGHNVRLMPAKDVMAYVKRGKNDAIDAAAGCEAVRRPTVRTVLVKTPEQQARLMQHRVRDLLIRQRTQAINALRSHLAELGIVAAQGYEGLRVLLAIVADASDTRLPEDARASLSALVAQIASCQAEIGTIDKRLLAQHRKNVDSKRLETIPGIGFLGASAIVATVPDATIFKKGRHFAAWIGIVSREDSTGGKQRLGPISKQGDRYLRRILIVGAFAVLRRARAHPEKYPWVTQLLARKPAKVVAVAIANKTARIAWAVLTKKEIYRVQTNAAA

SEQ ID NO: 332245 - protein, 340 aa, unidentified
MDKVSMIGLDLAKSVFEVHGRNAAGEVVLRRTLKRGQMEKFFARQPKAVIGMEACGSAHHWARVLSQLGHDVRLMPPAYVKPYVKRNKSDTIDAAACWEAAGRPDMRFVPIKAAEQQAALSLHRGRDLLVRQQTQLVNALRALLSEFGIVAGTGKAGVEHLVEALRAGTLELPADAVIVATALADQRAALQAAADTLERRITAQVKADAKARMLQSAPGVGPLSAHAMLATLPDPTLFKTGRDFAAWLGLTPRLNGTGGKTRTGSITKQGNPPLRRLLVLGATAWLRQASAHPEKASPWLRGMMARRPKKVVAVAQAARTARILWAMLTHNQPYRAQACA

SEQ ID NO: 332246 - protein, 384 aa, unidentified
MYCGIDVSKGKSNVCILDNNKLVVEEFEIKHNKEGFAELENHLKPGIKIGMETTGNYCKTLYNYLKSKYAVCYVDNAQMKVFSKLKNPDKKNDKIDARLIALYLASDFKRIDATRMNELKDLSRLYQKTIKQLTRYKFMFKDQINIIFPEMDQEFELSTGKTIQYLMLKYPGPELIKELSYDEIEQAMTENLSKHGSLTYKDKTLKKIKELAQISVGIKDYPTTCFQETVKMLLFHQEAINNLKKKLEESLKKTPYYKVIDEFGYNIVSLSTIVGEVGDIRRFPTHKHFASYCGFDISEKQSGSYQSHSCYITKRGNRILRCAFYNLVPVHLRYKTELSKFFYRLRDEKGKHAKKCMIATARKLAVQTYYHMLRCHETKDLYSN

SEQ ID NO: 332247 - protein, 422 aa, unidentified
MRNSAARKLKQVPAGYLTIGIDPHKKKHAAVAITEDLIVRTKFKFANSRAGFEQMLENARAEMIKNGCRGVIFAIETGGHFWRNFAYFLEERGIPFRLISQFTLKRMRDGRDLNRRKNDFRDAEMAAGVLRTGDFTETKLPQGVYAELRSAHSAYYRLVKERTRIINLMKGLLDGLFPEFTQVFKNPCGHTALVVLSICPSPAAIASMNEDVFVDVIRSGRQGRLMRKKLRALYQVAQTSIGVKPGADAVATEITLLVSRYYLIEQQVDRLVKSLVRLVDRTEEGKYLLSIPGINYLSAAALLAETGPLKLYQNAKQVIKMAGTNPIESESGGKRRGQTPMSKKGRPRLRYSAWSAVIPLFRHNPDFRAWAKRLRERPVHANPLNGKEVVGAALNRLLRLVYILAKKQEFYRSPQIALVANQ

SEQ ID NO: 332248 - protein, 339 aa, unidentified
MKLYGGIDLHSTNSVVVVLDEQDRVLLERRVTNDLQRVKDLLAPFREALCGVVVESTYNWYWLVDGLMAAGYRVRLANTAAIKQYEGLKYSDDAHDARWLAHLLRLSILPTGYIYPKGARAVRDLARRRMRLVQQRSLNLLAVQTTLERELGRRVSANAIKRTGSEAALLLGVEEPNVGSSLTANLAVMRCLDAQIERLEREIVSQVKLAAQFEPLKSVAGVGQILALTIMLETGEIGRFAKVGNFASYARCVQAKRISNGKKKGEGNAKCGNAYLAWAFVEAAHFAVRYYPKVKRFYERKRAKSNAIVAIKACAHKLARAAYHVMRTQQPFDIDRAFA

SEQ ID NO: 332249 - protein, 377 aa, unidentified
MKKELDLGLDVHKDSIITAVAEAGRHGEVRVTGAISNDLHAVEKRVSRLRKAHGKETQLRACYEAGPCGFGLARRLRQLGVECEVVAPSMTPTRSGDRVKTDKRDARKLARLLRAGELTAIYIPESTDEAIRDLCRARTDAVDDRRRSRHRLKGFLLRHGYRYQGKSAWSAAHERYLRELVLPHPAMKVILEEYLQGIGAAGERIERCEVGMRDLLEKWRLAPAVRALMAMKGFQTVAAMILVSELGEVHRFGHPRQVMAYLGLVPTENTSSDKRRQGRITKCGNAHVRWLLVECAQHYATPPKVSQHLSRGQQGQSREVCAISWRAQHRLHHRYTRLLGRRLQRNKAMVAIARELCGFIWELLRTQSCYQAQSPSV

SEQ ID NO: 332250 - protein, 324 aa, unidentified
MTASALGIDIAKLKFNACLIQQSGKLKHKVFPNTPTGFTQLLEWLSKQGVERVHACLEATGTYGEALALFLHQTGHTVSVINPAAVKAFAQSRLSRTKTDRVDAELIARFCQAQAPPAWTPLPAEVRELQALVRRLESLIEMRVAEENRLSSGLPVDAVRQSVEEHLAYLSEQSKRTEQLIRTHINNHPRLKRQNELLDSIPGIAETTAALLLSEITDITQYRSARQVAAYAGLVPRERQSGSSVRGRTRLSKIGNARLRKALYFPAITALRCSSFFQNWAEGLQERGKCKMTVICAVMRKLVHLAYGVLKTGKPFDPEWVKTA

SEQ ID NO: 332251 - protein, 310 aa, unidentified
MDVFVGIDVSKDRLDVCVRPSGETFAIARDDQGLERLVERLRALSPALVTLEATGGYETVVASALAAAHLPLALVNPRQIRDFARSTGKLAKTDRLDAAAIAHFAEAIRPPARRVADGEAQALGELVARRRQVMEMIVAEKNRRRLAGQRRVLKAIDRHVDLLQAELSELDRDIDGAIRKSAAWQADADLLASVPGVGKATLRTLIAELPELGRLDRRKIAALVGVAPINRDSGLARGRKTIAGGRTPVRTALYMAALVASRANPVIAAHYQKLRTNGKAAKQALTACIRKLIVILNAILRDRKPWSLPA

SEQ ID NO: 332252 - protein, 454 aa, unidentified
MDQKVESLSMEIVNPHAAGIDIGSRSHWVSIGQKEKDIREFGVFNDDLKAIAHWLAENKITTVAMESTGTYWQALYAVLLAHGFQVILCNGKFTKNIKGRKTDIQDCAWIQKLHSIGLLSGSFLPDEATEQLRTYCRHRANLLDMAASTQKKMQKYLRLLNLRLDVVVNDICGLTGLAIIEAICKGETKPQKLAELRHGNCRKSESEIAKALETNGRMDYLFALQQELDMYKIIQTKITACDTEIEKMLSKIIDQDDNKRQHYIDKKSHKRINKNTPKNIDLNIVGYQYFEGVDLMEIEGFSHGTILHLISEVGLEGIKKFQTAKQFASWLRLAPNNKKTGGKIISSKVPKGSNRLKIALRNAANAIGNLKDSTPLRDFFQRINFKKGRVSAISATARKLAVIVWNMVTKGTRYINPEGYLFLDQKRKLGLVKRIQKQIDKFGLTKEQIQLATN

SEQ ID NO: 332253 - protein, 386 aa, unidentified
MEVVVERCCGLDVHQKTVVACTLVGNLSTNRPKKVIKTFGTRTFELQELASWLHDQEISTVLMESTGQYWYPIWNVLEKEGFKLILANPQRIKGIPGRKTDQKDAEWIAQLGRVGLVPQSYVPPTDIQELRSLTRTRTHLIVERTQHKNRIHNILQQGNIKLTGFLSDIYGKTGRKLIDLLLSGEKIEEETVLRCLHSRVKASQRDIVESLKGTLTKAHRFEMQVHFDIIDCLEEQITELSKEIRIRTAPYQEIIDKLIKIPGIKESCVEVILSEIGPDISAFQTQSHLASWAGLCPGSYESGGVRKKAHIGRGNKYLRTALYHAGRTAAHSNSHIFSEFYQRLASRGSKQKAVIATAHKILRVIYRTLESANKKSYCDGLGLTSQ

SEQ ID NO: 332254 - protein, 410 aa, unidentified
MQTMVERGCGLDVHQATVVACLLIVLKNGKVQKQIRTFGTTTRELVSLREWLLSEGCTHVAMESTGVYWKPIYAILEGAFEIVVANAQHVKKVPGRKTDVKDAEWIADLLCHGLLRSSFVPPKPIRELRDLTRYRRKLVESRSAERNRLLKLLESANIKLASVASDVFGVSGLLMLQALVEGKATPHEMAELAKRQMRKKIPELELALEGRVEEHHRFLLRVQLRRLQSVEQDLGVLEQRIQEKLKPYAAQLTLLDEIPGVDWTLAAGIIAEMGVDMSVFGSVSQLASWAGICPGNNESGGKRKSSRIPKGNVYLKTALVEAANAAAKAKGTYLRDKFYRLKARRGYKRAAVAVAHKILVAIYHMFSHQVCYNELGDLYLDKLNKHHLTRNLVHRLERLGYTVTLEQKAA

SEQ ID NO: 332255 - protein, 402 aa, unidentified
MNAVGIDVSKGKSMVAIMRPFGEIVSAPFEIKHTASDINSLVELINSVEGESRIVMEHTGRYYEVLAHQLSEANLFVSAINPKLIKDFDNDSLRKVKSDKADAVKIARYALDKWQNLKQYSVMDELRNQLKTMNRQFSFYMKHKTAMKNNLIGILDQTYPGVNTYFDSPARSDGSQKWVDFASTYWHVDCVRKMSLNAFIDHYQNWCKRKKYNFSQSKAEEIYGKAKELVPVLPKDNITKLIIKQAVNQLNIASATVESLRTLMNETASQLPEYPVVMAMKGVGTSLGPQLMAEIGDVSRFTHKGAITAFAGVDPGVNESGSYEQKNVPTSKRGSSNLRKTLFQVMDALIKTHPQDDLVYQFIDKKRAQGKPYYVYMTAGANKFLRIYYGRVKEYLSSLPES

SEQ ID NO: 332256 - protein, 321 aa, unidentified
MDKITIFVGIDISKDTIDVYDSDTGHFQFENAPKGFSLLKERLSADHWCAMEATGCYHQRLAIYLFEHGIRLSVLNPLVIKRFIQMKLNHVKTDKSDARMIFRYASEQPLSLWVPEAGYVVECKRYQSAIRLYFKQRTALKNMLHSLLTGGRAKDKLVRSIKRQIKNLDKEIGLLEIEMEQLIKLNEQGLYSRLNTIPGIGRKTAMILIVSTNGFRDFESASQVTSFFGLAPNERSSGSSVKGRTRISKIGDPLLRNHLFLCSFTACVHNPQCKALYDRIVGKGKSKKLALIAVCNKLIKQAYGISKSGLDYDRNFVGRLS

SEQ ID NO: 332257 - protein, 299 aa, unidentified
MRRVYYIGLDVHKDNTQMAVLEMRGKEPVAVKVIDSDSNKVAKAILPYQKEGTVHVGYEAGCMGYTLYRVLKGMKIDCQIIAPNKVFRGGNNEKIKTDKRDATAIAWMLRRDEEASIAVPEKEDEAARDLLRCRGDMQDELKRAKQRMLKFLLRQGHIYESTRYWTGKHRKWMKTLVFDMPLDKAVFEQYLWTIESIEERVGRIDAQIQEVAQSPRYEARVRKFRAFKGVDYIIALSLVCEIGDFRRFPTAAAFMSYLGLVPSEYSSGKKRKQGGITKTGNGHIRKLLTEAAWHYTRPV

SEQ ID NO: 332258 - protein, 415 aa, unidentified
MKSSIETTFAAFVGIDWADLKHDVCLQPAGSERRECSVIAHRPEAIERWALSLHERFAGRPIAVCLELAKGPLVHALQRHPFLVLFPVNPTTLAKYREAFCVSGAKDDPTDAEFALELLVMHPEKLQALRPQSAAMRTLEQLVEQRRMLVNEVGRITNRMSAALKEYFPQVLEWFKDKDTLVFCDFLTRWPTLKQAQRARKARLCAFFHEHNVRYPNVIEKRVQAIVAASPLTTDPSVVGPHSLLVSSLVQQLRVLLQSVERFDAEIAAVAPSLPDYELFAVLPGAGPVFAPRLLAAFGEQRERFQNANQAQSYFGVAPVTERSGNKCWVHWRLRCPKFVRQTFVEWAALSIPYSFWAEAYYRQQRNKGASHQAALRALAFKWIRVLYRCWQTRTPYDEATYLNALKRRGSPLVA

SEQ ID NO: 332259 - protein, 377 aa, unidentified
MTKLRFIGLDVHAETIAVAAAEPDGEVRSLGNFANTPESVRKIIGKLGPLEKLRCCYEAGPTGYVLYWQLTQLGVACEVIAPSLVPQKAGDRVKTDRRDAEKLARCHRAGELTAVWVPDAAHEALRDLVRAREAAKKDQLRHRHRLGKFLLRHGKRPQKAGTPWTQKYLNWIRIHVHFPEAALEATVEHYLHEVEHVGERVVKLEKAIDEAVAKAPAEIRSVIEALQALRGVAQTTAATVVCELGSLTRFPNPRQLMGYSGLAPREYSSGNRVQRGAITKAGNAHLRRVLVESAWTYQHRPNVQGRVLRRQKSLALSEEARSIAWKAQQRLHKRYTAMMLRGKHKGQIVTALARELLGFMWAIAVKTESQFGLTKAA

SEQ ID NO: 332260 - protein, 368 aa, unidentified
MNKQAIVHHEGAAALAAAATRISLPPAVIKLGLDIHTRTYVVVAQHDHAALRPPRRFGPAEFVPWVEELLAQGHTVHVVYEACGFGFGLCRALQQAGAHCLVIAPRKLDEQRTGVKTDARDAATLCQRLSRYVDGNTRELAVIRVPSEEEEQQRHIHRQREALVRLRTRLQAQGRGLLVSHSQAAPPHWWRTQTWNRLGKVLPAWLVTRLEVLRPILATLDTQIAALSLELEAAAPPDLPRGLGKLTSVALSREVCDWRRFQNRRQVASYTGLCPGEHSSGNKRVQGSVTKHGNPRLRASLVELAWRLVRFQPTYPPVRTRLGVLAKGARATGAQRKKAIVAVARHLAVDLWRLHTGQGSAQQLGFQN

SEQ ID NO: 332261 - protein, 345 aa, unidentified
MVIGVDTHKEIHVAAAVDWQGTLVGEECFPTTRQGYRLLESWARSLGDVLRVGVECSGSYGSGLTRHLAKNGFTVLEVAFPDKTVRRKRGKDDFIDAEMAAEAAFTGARTVTPKSRDGMVEALRMLQKARSTAVAARRAALQMIRADIISAPEELRDQLRGMTRMQLIRHLVATRPDSTDFKTPLGATKIALKRLAKRYVDLDDEISELDDMIDAILADAAPLLVRLKCVGAQSAAQLMVTVGDNPERLRSEASFAMLCGVAPVPVSSGMTYRHRLNRGGDRQANSAIHIIAIGRLRTDERTKEYIARKMSEGHTKMEAIRCLKRYIAREVYYVIKRQSELVNCS

SEQ ID NO: 332262 - protein, 340 aa, unidentified
MINNFLGIDVSKEHFDVSLSFISKKGKRETRKRKFKNDNTGFQGLLNLLQKHNVEEVKACMESTGCYSEALAEFLHNAGYFVSIVNPYCIKSYARSKLVRQKNDQTDAEIIVDYCQRQEPSRWTPPSPEKKKLKHLYRCSDALKDELTFVNNHLEKKERLHEEVVNAWENLAMNIEQSIETIKNSIRELLRQHKELLEDFQLLLTIPGIGEETAIAILAEIPDIKAFINARQLAAYAGTIPQNITSGSSVYAKPRLSKAGSQTLRKAIYFPAIVAKNHNPIIMTFCERLKEKGKHNMAVVGAAMRKLLHMVFGVLSSKKAFDPDHIKNRKTRLSMKSFLV

SEQ ID NO: 332263 - protein, 325 aa, unidentified
MKNFIIGIDISSKTLDICVKEQQELTHFEIENSQKAILKFFRTYKENQVIVAMENTGRYNWNLFEVLPKFNFKIYVLNPLHLSKSLGLVRGKDDKTDAYRICLFTEKNKEDLTLWEPTTKTIKKLKILITERNSRVKMKRRLLKQQHDYKLMKDVGLDKELAKLNKQFIVQIDKQTKVIEQKIQTIINEDSTLKQQAQLIQSVPGVGKVLSWIMIAKTEGFTKITDPRKMACYAGVVPFEYQSGTSVYRKPRVSMFADKPTKAVLHLGAMSAIRLNNDLRVYYQRKVNEGKNKMLVLNAVRNKIIHRIFAVIKNQEFYKNPLVVS

SEQ ID NO: 332264 - protein, 311 aa, unidentified
MEIQPRFIGIDVSKDQLDICVRPEGEHFRENNNETGIQSLTQRLLALSPEQILIEATGGYETNVVAALAEAKLPVVLINPRQVRDFAKATGRLAKTDRLDADVLAQFAQVLRPQSRLLPDKDQKDLSALMTRRRQLVEMITMEQNRLHTASKSVQPDIRTHIEWLKSRLKDLDRQLDKFIKNSPLWQRKEQILNSVPGIGPVTTRGLLAYLPELGTLSNNKISALVGLAPLNRDSGQFRGKRMAWGGRSYIRSLLYMAALVGTQYNPIPRSFYQRLIQAGKAKKLALTACMRKLLIIINTMVKNDELWQIS

SEQ ID NO: 332265 - protein, 313 aa, unidentified
MTQHLPQTIGIDISKATLDAHAYPAGNDRQFANSAKGHKALITWLGQWPIERIAYEATATYHRALEAALADWPCVKLNPERARRFAQATGTLAKTDRIDAMLLARMAATLQPPVRPAKTKKQAQIAELINARDGLVRDRTALKNRQKNLTVAILKRQCKQRLEQIDRHVDALDAEIATIIAADPALVRRHEILTSIGGLGTLTANQLIATMPELGALENKQAASLAGLAPVARQSGQWKGKSFIRGGRANVRQALYMPALVAARFNPDLKAKYQQLIAQGEPAKIAITAVMRKLIVIANTLLKANRLWVKSIA

SEQ ID NO: 332266 - protein, 401 aa, unidentified
MEGSFAGVDWASEKHDVVVQNAAGEELLAASFAHDEAGLRSLCRQLVRLKVELVAIERPDGVLVERLLDAGLGVLALHPNQVTAARPRFRVSGGKSDGFDAFVLCELARTDHRRFRVLEPDSDQTKALRALCRGREDLVRTRTALSNQLRAELERFWPGAVKIFRSLDSPIALAFLEKYPSPIEARALGEQRLAAFLRHQHYSGGKTPAELLRKLRSAPEGRAGEVEIHTRRQLVLALVALLRPLVAQVKQLERQIAQALAEHPDGELFRPLFRDPKSVITAAELVSEIGDCRARYPSGDALAGDAGQAAVAIESGKRKVARYRWACNKRLRDAVCTLADPTRHWHPWATDHCARAIAPATTTLARSADWAAPGAACSGAVGKTAPRMTRPAIAPSSNTAP

SEQ ID NO: 332267 - protein, 368 aa, unidentified
MKQQTSATTETSGKGRDMIDFAGKTIFIGIDVHKQDWQVGQFYNGLVLGNHRITGSSEELISFLKKRYAGATLKCVYESCAWGFNLQRQLTAAGIECIVVHAGDVPGSDKEKKNKTDKVDAVRLARHHAAGLLQPIYVPDEALQKERNLIRFRKKIVSDLNRSKNRLKSLLKFQGIVIPEHMDTPSWSRNFINWVKEQAATDALLRETVELMLEEVEMQRQLLLKAERKIRKLMSSEKYAEKARKLMSVPGVGPTTSNLFLLEVGDIRRFKGFDQLNNAVGFYPGSNSSGEKDRDTGISKRSHKQLRTMLVEAAWQAVKQDPAMLEAYVQLTKRMKPNQAIIRIARKLLRRMRAVLISGVEYQKGVVK

SEQ ID NO: 332268 - protein, 361 aa, unidentified
MTTSMLIQPEARTVIVGVDTHKHIHVAVAIDTRGIRLGGQSFVADSGGYRALLTWADTHGRIETFGIEGTGSYGAGLARAVRRAGHRVIEVNRGDRHTRHALGKSDTVDAESAARSVLAGQATATPKTGDGVVEMIRQLKVVRDTAGKARTAAMVTLKQIVVNAPPHLREALHALTDHRLLTRCAALRPGPLDTPTAAAKHALRALARRWLALAEEIATHDQHLTRLTTETAPTLLEGFGVGAHTAAQMLIVFGDNPDRIRSEAAFAKLCGACPIPASSGMTTGRHRLYRGGNRQANAALHRTVVVRMRLHQPTVDYVARRTAGGRTRREIIRCLKRFLAREIYQRVRTDFRVRQLATQAA

SEQ ID NO: 332269 - protein, 387 aa, unidentified
MPQSNDLSRSLTALDQDSTLIAVIEMSQSSWLVGAIVPGISRQPLKKLVVEGRELLRLLHRWRDEATKAGRMINRITVAYEAGRDGFWLARWLQGQGIEAHVIHPTSVAVSREHRRAKTDRLDTELLKRAFLGWLRGERGHCSMAMIPTPQEEDAKRPNREREGLVGERTRIVNRMKSTLARLGIRGFKPTLRKAPERLTGLLTPEGVPLPPNTLAELRRDMARLRFVMGQIREIEAARLQQLEQHPEQGPHAMVRLLAQVIGVGIETADMLVHEILSRTLRDRKAVARYAGLTGAPDESGARRREKGLARAGNARVRRGMIQLAWRFLMFQKDSALAQWYRARTADARGTTRKTMIVALARKLLIALWQLVTTGEIPQGVVLRAAA

SEQ ID NO: 332270 - protein, 413 aa, unidentified
MMMENVFPCCAGLDVHKESVEACVRRIEPNGRVHQETHHWGTMTRDLLAMADWMTLQGVTHVAMESTGVFWKPIYNILESRFTMLLVNARHLKQVPGRKSDVRDCQWIAQLLQYGLLKGSFIPPRSQRELRDLTRHRTQLVEEKARTANRIHKVLQDTNIKLSSVASDILGASGRAMLEALITGEEDPVKLADLAQRKLRGKIPDLEKALEGHLTEHHRFMLKLLWKQLAQQEELIAELDGKIGEQTRPFAAEIDRLDAVPGVDRRVAEVMLAEVGPDMEPFPTHANLASWAGMCPGNEESAGKRVRRRITPGNRWLKRTLAQATWAASHTKNTYLASQYRRLAGRRGRKRALIAVGHSILVIFYHMLKAGTSYTDLGGDFFDRLEPQRMIRYYVRRLESLGHKVTLESCTAA

SEQ ID NO: 332271 - protein, 344 aa, unidentified
MQHYVGLDVSVKETSVCIVDKAGRVIREVKVATKPAEILAVLTEEALAIERIGLEAGPLSQWLYSALAEACLPVICVETRHMKAALSAQINKSDRNDARGIAQMMRVGLYRPVHVKTMASQKRRMLLTSRQLLQAKALDIENHLRGTLRNFGLKVGMVGTVKFDARIRELVADHPDLAAIVEPLLIARRVLREQLGVLHRQLLEIVRQDEVCRRLMTTPGVGPVVALTFRATVDVPSRFSNSKAVGAALGLTPRRYQSGDIDRMGGISKSGDAMMREMLFEAALVLMTHSRKWSWLKAWGMKIARHRGMKRAIIAVARRLAVIMHRMWVDGTEFRWTRKEAAAT

SEQ ID NO: 332272 - protein, 358 aa, unidentified
MQAKDTKISFNGQNVYLGIDTHLKSWKVTILLENSVFKTFSQDPCAKVLGKFLRKNFPGATYYSAYEASFCGYSVHRELEKEGIKNIVVNPADIPTTDKDRKQKEDKRDSKKIAKSLRNDDLQGIYIPTIITMEFRTMVRYRKTLVKEVNRNKNRVKSLLYFNGIKVPTELDTTSKHWSARYTKWLKELSFSSKFGNKTLDMLIETTTYYRQKLLEVTRELRNIQEESGYGKKIKLLTSVSGIGIITALTLLSEIEDINRFKNLDTLCSYVGLVPSTNSSGEKELIGDITPRSNKPLRNVIIEAAWVAVRNDPALALKYNQLRQKMEPNKAIIRIAKKLLNRIRYVLKNEQEYVLSVK

SEQ ID NO: 332273 - protein, 352 aa, unidentified
MKYVGLDWAYRTAQWCALDPGGEIAGEGWFAADRDGLARLVLELGDEVTACLEMMSGALWARDELVACGWQVQVADARKVKTVAPLAAKTDKVDARLLAELSRRQLVPALWLPSLDERALRERLRRRMHLVRLRTSAKGRIFGLQTQWGIRISLRRLRRADGMTLLERAGMPAVWRHSISECLALIDFLDARIVALDAELRPFAQADPRAVLLDTIPGVAELLALTIAVEIGEISRFAAPQKLVSYGRLAPRVRQSGEGRPHTGPLNKSGSRLLGWAAVEAAQQAWRESNPWHQLYLDVSRRSRNHNSAKAAVARKILIAAWHMLSRNEPFKPAPRTGATSVPASSRLALAA

SEQ ID NO: 332274 - protein, 347 aa, unidentified
MKHYAGIDVSLNSSSVCVVDESGKIVREVKVPSEPVALIHCIKSLGVRVERIGLEAGPLSQWLYGALRESGLPVELLETRHVKAALSAMPVKTDRNDARGLAQLMRLGWFRPVHCKSMAAQEVRALLTARKLVQSKLYDIEMSLRGILRGFGLKVGPTTSRSFAARINHLAAGHPSLEIVAEALLSTHAAALCAFANLEKNVRQISRADARVRLLMSTPGVGPVVALTYVSAIDDPKRFTSSKRVGAHFGLTPKKYQSGETDISGRISKTGDSSVRAVLYEAAHIILTRPIHGGALKSWAMRLAKRAGMKKAKVALARKLAVVLHRMWVSASTFDFEKANGCMRAAA

SEQ ID NO: 332275 - protein, 346 aa, unidentified
MLYAGLDLSRKRLDFCLLDGAGFAVAEGAAPPDRDGLRTLARRVGQHRQPVFAAVESMNGARFVHDELERHGWRVEVADAVRVRGLAPLACKTDRIDARVLAELCRLDLVPAIWLPDQAARGARERARFRLHLVKHRSSLKNRIHQTLLSFGQPCPLSDLFGVRGRRQLELLELPEPWAGTVDASLRLIDELDREIATLERQLRQLGADHPYVRLLVTVPGIAWVLGYTIAAEIGDINRFSAPAKLSGYTGLCPRVYQSGEHDRRGALTKHGPRYLRWALLEASIHACRHPLYAERYQRTKHRLGRQRGPRVAQVDLARRLAEAIWHMLTRNQPFAPAGAAKVLAA

SEQ ID NO: 332276 - protein, 310 aa, unidentified
MGNIEYEQIVERGCGIDIHKTLLVATISGTGIKEQTREFGSFTEEIEFLRDWLKESGVTHIAMESTGVYWKPVFNILEADFEIILVNARHIKNVPGHKTDKKDSHWIAKLLLSGLLKGSFIPPLPIRELRDLTRYKRKLIEQKSSEKNRIQKILEDGNIKLSSVVSNMSGATAEKIIDAMIAGETDIDRLTSLRHGRMQSSVEELAKSLVGRLTAHHRFMLQLVKKSIKEKEMLIAELDKQIDEHLKANELELSRELLATIPGVGKEGAEYIIAEIGNDMSAFTDEHHLASWAGMCPGNNESAGKKKVPE

SEQ ID NO: 332277 - protein, 345 aa, unidentified
MSQIIRVGMDTSKHIFQLHGVDASEQVVLRKRFGRKAMLAFLAKLPPTVIAIEACGAAHHLARELGKLGHTVKLIAPQLVKPYVPRSKNDGRDAEGLCEAASRPRMRFVPVKTIEQQAALMLLGVRDQLVARRTQLSNTIRGYAAEFGLIEAKGLDKIAALLAATARDDSVPALARELFATLARDYARVQVELKAIEAKLVAWHRANALSRRLAQIPGVGPVTAAALVMKAPDPHAFRSGRLFAAWLGLTPRDHSTAGKTRLGKITRAGDESLRRLLVLGATSVVKQTKGRGRGPRWLLELLERKAPKLAAVALANKMARIAWKLMTTGEDYDSARIDAAVAAAA

SEQ ID NO: 332278 - protein, 383 aa, unidentified
MQPTRIDNFTPAEDVLAVSLELSSGAWKIAFHDGKREKPAIRTVSSESPSNRLKETAQEIEKIKTKWGLGLGIRTVVLYEAGQDGFWIQRALSKLGYEALICDPGSIPVERHARRAKTDRLDAIKLVLCLRAWLRGEVDRMHVITVPSVEDEAQRQLSRDRGVLQKEAMQHRDRMRKLLRTVGCWQSVEGDVAARLAKGEFRCYDGLALSPELHERLRRECERLVLVDQQLSVLEQELAYQLPEGTQERIANLERLKAVGTVGATRLVLELFWRHFDNRRQVGSCVGLVPQPYDSGASRVDQGISKQGNRRVRSLLIEMAWFWVRYQPDSTIAKWYRQRTQSSGQSKRGKRHAIVAVARRLAIALWRYLEHGVVPDGAVLKRS

SEQ ID NO: 332279 - protein, 334 aa, unidentified
MENIALIGIDLGKNSFHIHCQDRHGKAVYRKKFTRPKLFEFLATCPTTTIVMEACGGAHFMVRKLLELGHTPKLISPQFVRPFVKSNKNDFVDAEAICEAASRPSMRFVQPRTESQQAMHTLHRVRESLVRDKVKTTNQMHAFLLEFGISAPKGPTLIRRFAEILEENPLPPYLVRLLQKLRDHYDYLIEQIKELESQLKISLDEDTTAQRLLTIPCVGPLTASLLSTQLGDGKQYGSSRDFAASTGLVPRQHSTGGRNTLLGISKRGNKKLRALLVQCARVYLRTLEYRSGQLADWVRELLLRKNNFIVTCALANKLARIAWALTTRHKAFEA

SEQ ID NO: 332280 - protein, 409 aa, unidentified
MDVVITRCAGLDVHQATVVATIRVPTDQDGRRIVTETFGTMTSDLLALRDWLQAYGVTHVALESTGVYWKPIYYMLEDTFTLLLINMHALKRVPGRKTDVKDSEWLAQLLECGLLQSSFVPPPVIRELRDLTRYRVQQVRDRSQEVNRLCKVLEDAGLKMTSVITDVMGASGRAMLTALVAGTTDALVLADLARGMLRKKLPELQRALQGRFRPHHAFLVQQVLAKIDFLDEALERLTAEIDRRLVPFEPVLAARDTIPGVNRTSASSIVAETGADMRRFPTAGHLCRWAAMCPGHNESAGKRHSGKTRKGNRYLRAALIQTGLSATRKNGSALQARYHRVKRHRGHKKAVVAVGHQILEIAFYIMRDGVTYQELGADYFDRRPAERATRRHVRQLEALGLRVTIERAA

SEQ ID NO: 332281 - protein, 420 aa, unidentified
MPNIEIGVDSMVKENFIYVGIDLHKETHTAVMIDCYNQRLGEITFPNRPAAFPKLVTKVKKCNTDGKEVVYGLENAYGYGRALAVWLIDKGYLVKDVNTAISHRQAKHRGAMYRKSDSDDAEAIALATLNMLDKLPDACPNDAYWSLGQLVHRRDNIMKQRTRLVNQLHEQLCIAYPSYKQFFNDISRPTALYFWEHYPSRKYLKGKSVEDLRAELVPVSHNKCSTKTCEKILDAVASDKVKNNAYQDARDMVTLSIVSDLQHYDSQLTEVDKMLEQMYKMLGCTLTTIPGVNVITAVKILAEIGDIKRFSNANKLAQFAGIAPLHLSSSGKGKDVATKQGNRRLQATIYFLAIQMVQVSSKGTPRNSVVRAYYEKRKAEGKTSQQALICISRRLISIIYGMLKHGTEYRMPVVESAGEK

SEQ ID NO: 332282 - protein, 340 aa, unidentified
MKIAVLGIDLGKNSCSLVGLDQNGQVIVRRRMRRETVIAFASRLPACIVAMEACCGAHHMGRSLAEQGHTVRLMSPEYVRPYVKAQKNDDRDAEAIAEAATRPTMRFVALKSEAQLDMQTLHRVRDRLVAERTSLMNQIRSVLLERGYVVPQGRAKLLGRLAEIVADPACTLSLRMRHLIADMQERWELLDQRIAALDEEFHQHCRSNDQARRLTGIPGIGSLNATALVAAVGDARTFARGRDLAAWLGLVPRQATTGGKPRLLGISKRGSKYLRKMLIQGARAALPTLRNTNTRLGVWLRGLLARAHPNTAVVALAAKMARIVWALLRHERSYQAAAVA

SEQ ID NO: 332283 - protein, 396 aa, unidentified
MDNQVDLNTISGGTPMLYVGIDVAKNKHDVTALNVQGKTVLKPLTFSNTRAGFELLDLSLRQLNQDCLIALEDTGHYAFNLLKFLHEQGYKVYTYNPLLIKEFAKSLSLRKTKTDKKDARIIALKLLSDPNREQFQHDNRKEELKILTRHIHRLKKKQSDWKVQYTRCLDIIFPELDKIVGKNSEYAYQLLTRYPSPQKMLEAGFDNLIEIKRLTASKIQDILSVAPLSIGTTSPAHEFELIEIIENIKHYNRLIDKAEKQANDLMAEINSVITTVTGIGNRLGAVILAEIRNIHAFDNPAQLQAFAGLDPSIYQSGKIDLAGKMVKRGSPHLRWALIQAAKACARFSPAFKAYLRTKLDQGKHYNVAIIHLAKKLIRTLFYLLKNKLPFDEQKVI

SEQ ID NO: 332284 - protein, 419 aa, unidentified
MSFKILKFKCCGLDVHKTWIYACIGITDSNNRTEYKQARFSSFTKGLNELCDWLAKYNCTDVCMESTGKYWIPVFNILEQHNLWVTLSHPKYTKPMKGNKTDRKDAKWICDLYMCGMVKPSFIPPADIRELRDLVRYRYKLTCMITGEKNRAQNCLTVSNLKLDDVFSDVFGKSSRSITEQILQHPGEKFDVAPFVHGRCKTPIEEIQAAVDGAISKEQAVKLRQCLDHIDELNKHISELEQEILRLSDKYEAALNLIRTVPGFDKNPMTAVQMLSEIGGDMSVFPTAKHLVSWAGCCPRNDQSNQKIKSTRISRAGSYFKPVLVQVANALIKSKKHLEFTSRYKRIKARRGHKKAIIAICRMILTAIWHILSDLKPYTPEGFLESHPVKEGKVLSSSQALNFFKQRGYIIKDEPLSVS

SEQ ID NO: 332285 - protein, 370 aa, unidentified
MATTSVGGNVVGIDPHKRTLSACVLSPTGAVLGVEHFKVSGVGHRALEAWIQSFGPVARIGIEGASGLGRHTSVFLTDRDYDVRDVCPTRTAERSRRRRRGKSDSLDAERIARETLAEPRLPRAFKLTEGGGPDPIREMISLWHGARRSVAKIRQQLLGESEALLHQLPEHLRDRLPATKKIRPRLDAASRLVTSVEVDAVNTVRLSLLAGYAEQITVLDAEERRILGELRPLITQAGSNLEELCGIATRSAAELLVEVGDPRRFTEGGFARFNGTAPLPASSAEGDSEPVRHRLNRGGNRRVNAVLHRMAVTQLRCNPQARHIVEDARRRGHTKPEAMRILKRHLSNVVHRRMLHDHKQHSIEPLARSA

SEQ ID NO: 332286 - protein, 357 aa, unidentified
MLGMGDSAPRKGADAMTFVGCDLHTRMQQVAVLDTESGEISEHRLSHEGTAVEEFYAALPRPVTVGIESTGYAVWFHTLMQRLGHTLLVGDAAKIRAMVVRKTKTDRRDALHSLDLLRHDRFPSIWVPDPATRDLRALLTHRMRLVRIRTMVKNGLQAIALNARLACGSKLLRQAGLAQLQALALPPHTARRRDQSLELLAGLTTQIRELDDAITTAALGHPDAPRLITHPGVGALTALTTIVVLGPVSRFHDSKHVVSYVGLAPALHASAEKYHLGRITKQGSPLLRFVLGQAAAHAARMDPDLKQTYAALVHRRGRPKAKVAVARKLLVRLFIMLRDQIDYDEFRRRGRTALVAV

SEQ ID NO: 332287 - protein, 403 aa, unidentified
MIYMDPVIGLDVAKGESQIQAFLQRKETYKQSFKFTHDLPGLQTFHSFYQEVEKVSGQPPAVIFESTGHYHEPVLQFLENHDIAYYLVNPVISFEARKTSLRQVKTDKADAYHLGELYYKEDLEIYQRKTEKALNLRLLTRQHSALTDSYVQIKLQFQVALDQVFPEYHSAFSDLYGKLSLNTLLSYPTALDVHMVSKESIAEDMRHFGARRSQEWFLEKAQQLKEAARRNPFQSQISHGQLVSLRMYINMLFQYQEHLTELLKEMSALAKSFEEYRLIQSVPGIGDKIAATILSEIGDINQFENPKKLVAYAGLDPSVFESGKFKASINRITKRGSSRLRQTLYTAVQCGLAKERNKKLTTFYERKRNEGKPHKVAVIACANKLVHWLHAMLKRQENFVDQA

SEQ ID NO: 332288 - protein, 344 aa, unidentified
MTSMHFIGLDIHKKTISYCVKDVSGTVLSEGTIAATRAQLDDWVKTLPTPWTVAMEATMFTGWIYDHLLPHAAAVKVAHPLMLRAIAAAKKKNDRIDASKICDCLRCDFLPECHMVSAEVRERRRTLRYRKLLVRQNVQLRNKVSQMLMESGVVYNKQKLHKVGYFKELMETNPDISRELKPLLAICRETIVRIGKTESALIRSLRRDPLLHARVERLMTIPAVGPITALTWVLEVDEVARFHSVKQAVSYCGLCGAERSSAETIKRMPISKQRNKHLQSVLIEAAKLAPRLSPELALVYDTEKQKGHANRASIAVARKLVAYLIAVDRSGREFVVAGERRAAA

SEQ ID NO: 332289 - protein, 396 aa, unidentified
MELMDERGRVLARARLPEGVAGMARLHELIGEQLGEDADDAEVVIGTETDRGPWVAALVAAGYTVYGVNPLQASRYRERHGVSGAKSDRGDAHMLTDMVRTDSHQLRAVAGDSPGAGAVKVVARTHKTLIWERTRQVQRLRHQLREYFPAALEAFEDLDAPDALELLGKAPDPAKAAKLTRAQISAALKRARRRDIPGKATAILAALRSAQLGQPPAVTAAYAVTVRSLVAVITVLNEQVKTLQRQVEADFGRHPDAEIYLSQPGLGPVLGARVLGEFGDDPHRYASGKARKNYAGTSPLTRASGKKKMVMARFIRNDRLIDALMAQALSALGSSPGARAFYDAQRADGAEHNAALRKLANRLAGILHGCLKTRTLYDEATAWPHQEKTPQSDIAA

SEQ ID NO: 332290 - protein, 410 aa, unidentified
MKMAGIDVHKKVLMVVVMDTSTPQEKPVRRRFITLPNELQRLLTWLREQGVEEAVMESTAQYWRSVWLELEPHMRLHLAQAFSNRAPRGRKHDFKDAERLVRRLIADELILSFVPSGEQRIWRSMTRMKLQLTRDRVRLQNQIECLLEEMRIKLSIVVSNLLGASGLRILHALAKGETDPRKLAQLGGERLQCTEEQLIDALTGRVQPVHGEMLALQLERLQLIDQQMERLNHMIAAAMKVQQDAVIRLAEVPGLGVDSAQQIIAEVGAQARTFASAAELTSWVGTCPGKDESAEQNHSSRSAKGNKYMRRVLNQAAHAAVCKKGSYFQALFRRLLPRLGYKSAIWAVAHRLCRLVWKILHEGVRFIEQGAEVSPRDKRKRAQMLARALRKLGYEVTITPISQLAPKPAV

SEQ ID NO: 332291 - protein, 412 aa, unidentified
MKRIRDRVAGLDVHRDTVVACCRVVAPNGEAELTKQSFVTTRKGLGELAVFLTDAGVETVAMEATGVYWKSPYYALEGMFPELWLCNAHHVKNVPGRKSDLSDAEWLADVAAHGMVRPSFVPPPPIRELRELTRYRKTQVDARAREIQRLEKVLQDAGIKLTSVASRVWSASSREIIEALIVGNRDPAVLAQMAKGRMRAKIADLEEALAGHFGSHHAIVCRQIIDHIDFLDHAIAALTEEVTTRLVPFEAAVAIVTSIPGMSRTTAEVIVAETGADMKRFATPAQLCAWAGVAPASYESAGKRRPAGTRQGAQWLRRALIESAHAAAHTKGTYLSVQYARIARRRGANKAAVAVANSMLFTVWHLLSTGAFYIDPGADYFERRHDPAIEAKRLARRIEALGFDVSLIEKAA

SEQ ID NO: 332292 - protein, 417 aa, unidentified
MASATLYVGTDISEKVNRTRFYDGSGKEIGARLESVNDLPGSRDLAQEAISRAVLSDAKEILWGLEATNLFWWHLATFLTTNPELLARGLKCYTFNPRQVSKFKESYPYIGKDDWTDAMVIADRLRFGRLPAECYLDERYQPLQRLTRYRRHLVRQLVREKNLALSYVYLKLSAYSIERPLSDTFGATSQQILEGYLTPDEIVAAPIEELAALIKEHSRGRVADPEEVAKVVKQAANRSYALPKSMVEPVNLILSSSLTSVRTLKAQLKPIEKAIATELRATPPQTLQTIPGLGPVFAAGIVSEIGDVRRFEREESLAKFCGLTWRRHQSGEFEGESRPLTKTGNAYLRYYMVEAANSVRLSCPEEFGSYYQKKFAEATRHRHRRALVLTARKLVRLVHSMLRSGRIYQPPATRGSR

SEQ ID NO: 332293 - protein, 340 aa, unidentified
MDVEYAGQRYVGIDLHRRRSVIVQMSPEGERLGVARIDNDPFELARQVASWGESPQVVLEATYGWYWAVDVLAEAGAVVHLAHPLGVKGFAYRRVKNDVRDSSDLADLLRMGRLPEAWIAPPPVRALREVVRHRAKLVALRSGLKAQVHAVLAKQGVSVPVSDLFGVGGQQLLDELRLDPAYNARVVSLRRLIDAFTFEIDVLAARTAADLRSHRGYQAIQAIDGVGPVPAAVFVAEIGDVTRFARPQRLCSWAGMTPRHRESDTKVHRGRITKQGNHLVRWAAVEAVQRLHGGPLGSTRARIAERRGANIAKVAAARKLLTLVYWGLRDGHIRCLARPA

SEQ ID NO: 332294 - protein, 357 aa, unidentified
MGKSIRNLSTVTRVGLDLAKRVFQVHAVDAKGEIVVARKLTRNQLIPFFAELPPCVVAMEARSSAHHSGRALIELGHEVRLLPPAHVKPYVRRNKSDQVDAAAIYEAMSRPGQRFVPVRSIDNQAELMRHRTRELLAGQRTAALNALRGHLAEIGLIAPQGAQHAYGLKRMAADGFNENGEIVVPDCVRGALRSLVGQIDALDEAIGAIDRELAASVKADETAKRLMTIPGVGPVTASAITATIQDASAFASGREFAAFLGLTPRQNSTGGKTRLGRITKMGDRYLRKLLVVGACATLRHRRGHNDALRLWASGMLERKTVKYKFNLTAVALANKVARIVFVLMTRGGLYDGRPVAA

SEQ ID NO: 332295 - protein, 465 aa, unidentified
MKKTVRRPRRLKAQVPPLVARDDAAGVDLGATLVTAALPPSRAGLTVRTFATFTPDLQALVAWFQENGIRTVAMEATSVYWIPLYTMFEDAGIEVCLVNARHLKNVPGRKTDVADAQWLQQLHAVGLLHASFHPPVAIRRLRTLWRQRDSLVREAARQVQLMHKALDQMNLHVHHVLSDLMGESGSRMVAAILAGERDATTLARLRDHRVKASEATLIKALTGDYRPEYLFCLQQAHDSYTHFQTQISSCDREIEAALAQLEAVTDAPAPAPARVTQGKKDKTARKDAHQPKFDLRTQLYRICGVDLTAVPGINLGVATTVVAEVGPKLTGFATSKRFCSWLRVAPDPRVSGGQVIGGKVPRGSPRAARAFRLAAHSLHSSHSPLGDIFRRFRAKLGAAAAITALAHKLARIVYHMLTTREPYDETKVLATTENYRLRQEASLRKRARSLGYQIVPIQPTINAVP

SEQ ID NO: 332296 - protein, 370 aa, unidentified
MKKSIMYVGLDVHKNSIEIAIAESGRRSEVRSYGSIDGTMAALDKVIRKLEAKGDNLSFAYEAGPCGYEIYRHLHSKGYDCIVVAPSMIPRQSGNRIKNDRRDAQMLARLHRAGELTSIHVPSLEDEAMRDLTRAREDAKAVERKAKQRILMFLLRHGHRYGGKTPWSKAHFNWISTLRFPHPAQHIVLQESLDALSECTARVNRLTDQIQQLLPEWRMYPVVKALQALRGVSLVVSATTVAELGDLTRFDHPGELMSYLGLVPSEHSSGESTRRGSITKTGNGHVRRVLVEAAWSYRLPARISPKLHKRQEGISREVCDISWKAQLRLCTRYKRLLAKGKANQLIITAIARELCGFIWAIANEVKTAKA

SEQ ID NO: 332297 - protein, 366 aa, unidentified
MKKISTVQVFGNEIWKEQKLTIGVDLGDRWSFYCVLDEAGKIILEQKVTTTPEAMKQTFGKIPRSLIALETGTHSPWASRLLTELRHEVLVAHAQKVELITKSNRKDDRHDARTLARLARIDPALLGPVRHRSAKAQIHLTVIRARAELVSARTALVNAARGLVKSYGQRLPQCGTQQVNRELAVGLNTELREALEPLLKEIESLNERIPEYDERMEKIAQEVYPEVSLLKQVKGVGTQIALTYVLTIEDPYRFEKSREVGCFLGLKPGRRNSGKSEPQKKISKEGDRYLRTMMVQGAHYILGPFGEDSDLRRWGRKLAERGGKNAKKRAVVAVARKLAVLLHRLWVSGEVYEPLRNSQKAMRAVA

SEQ ID NO: 332298 - protein, 391 aa, unidentified
MSKRFFGFDVHKYHIFAAAVDRDQNVVFKPRKIHVADFEDWAIKNLSQSDEAVIEAMTGTWITYDLLAKHAGRVVVAHPYHVKLIAASFVKTDKRDALALARLLAANIVPEVWVPPQHVRELRSLIYHRNILVRKRAAAKNRVRGILQRYRIIGPAGMAVFDPAYWEEVKVPPIEKLRAQHALEDIEMLTRQISETEEALTRASIAEPWVDDVPFLVQLPGIQLITAMTILSAIGEIGRFPTAKKLVGYAGLGARVYSSGLTYRTGGITKQGRRELRGTMIEAAWNAIKYSPEWRARHEHLAKTTGSRQKAAVAIARKLLVTIWHILSKREVDRNANHNTVGKSMLIWGWKHGLAVSQGLKPAEFAAQQLDKLGIQLEKIQYCSRVYHLQT

SEQ ID NO: 332299 - protein, 418 aa, unidentified
MSHEAEYVALVGIDWADTKHDFCLRATGAEQEEYGVMGHLPEAIDQWAKGLADRFPGRKIAVCLEQSKGSLIYALLKYDHLVLYPINPRMLAKFREALVPSGKKDDPADAQLLLELVSKHREKLKPWRPADEHTRTRQFLVEHRRTLVHDKTRLTNRLTSVLKGYFPQVLCWFAALDAPLVCDFLKRWPTLEAAQKTDDATLRTFFQEHHSYNRAINQQRMDGIRQAIPATTDQAVIRSSVMIVHTLVEQVSCVTEALRRFEKEIDALTRSHADFQLFASLPGAGPVHASRFISALGTDRSRYEHVEDLLTFTGIAPIMERSGKTTVTHFRWFCPKFLRQSFHEFAGQSIQYSRWAQAFYRQQRVRGKDHQASVRSLAFKWTRIIFRLWKNQTPYNERTYVAALQRRGSPLWQVMAAQ

SEQ ID NO: 332300 - protein, 369 aa, unidentified
MSDYIWVGLDVHVNSITAAILEGDSRDAEVVKLNGDLHKVRRLFRRLSKKGPVRSCYEASGAGFVLHRRLKQDGFHCEVIAPSLIPRKPGDRRKCDRLDAVMLVRLYRSGHLTPVHVPDEWQEAVRRLIRLRDAYQWQCKAVKHRIYGILKAHGYIYRAGKSLWTKKHKEWLAKLRRELEGPLQTVLVAELEHLEYLEMQRNALDADIGRYAQQPPYRGMVESLCCLRGVKTLTAMVLLSEIGDINRFPSPRALMAYFGLVPTERSSGERERKGPITKAGNSHARRILVEAAWNNHHRAGADLILNRRRQGQPPEVVAIAVKAQHRLSRKFYRLDQRKQRQIAITAVARELCGFVWAIMKAAPRYRDAA

SEQ ID NO: 332301 - protein, 393 aa, unidentified
MKVTRIGLDIAKQIFELHGVDQRERVVLRKTLKRDRVLEYFAQLEPCKVALEACGGAHYWYREISKLGHTVRLLPTNKVKPYLDGNKNNAHDAAAICEASSRPSMRFVEPKTAAQQDLQALHRVRQVNVRHCTLLANQIRGLLLEYGITVARGLSALNRALPELLEYDEQRLSPMLKQLIAAQWRMLKLHRRQIEAHDRRIAGIAKNDASCRALLKIEGIGPITATALVAVTGKGQQFKNGRHLSAYLGLVPGHSNTGNKTVMLPITKRGNRYLRTLLIHGARSALYAARNKHNSRSLWLQRLKSRRGNNIAAVALANKNARVAWAVLRFGQTYRSDMGHPRQSSATAPQRLQRQSQGRLTLKPHGAPSRVQNRHFPSPPLSGEGRAGKMLLK

SEQ ID NO: 332302 - protein, 357 aa, unidentified
MTIIVGVDMHVKNLVCEIGYGKESPYKKTFANSFCGYKSLFNFINNLKVKYKTEDVLIGYEASGLGYVLYDKAIENGFRCSVLAPTELLRSATGFKKKTDTKDASYIYETLRGHILAGNKLCSIWIPDNEFREDRDLIRCWFDITNKTIKVKIQIQTLLKKNGLKRPAEISSWTKDFMKWIDLEKNNLGYSFRMSMDSLLRQLNFLNEENKYIEEESRKLSEKERYANMCNALLEIKGVGLKTAMTFIVEMGDMNRFQNRKQVGSFIGLVPSTFESGESSDRKGRITRNGPYRLRSSLNQAIWIHLRYNGEEKDYYDRIILKNPKRKKKAIVACMRKLAIRIWHIAKDADNILLEVA

SEQ ID NO: 332303 - protein, 426 aa, unidentified
MNATTNFAATIGLDWADQKHDLWIQPADGSNAQHCHLEQTPEALHEWVAKLRERFGNRPVAIGIETSRGPVISAFMAYDFIVLFPLNPKALKDYRAAFSVSGAKDDCTDAQLIEEFIRLHRDKLKALEPDTVLTRQLAGLVQNRRHLVDERTRLVNQLHAVLKTYYPLAETLLRRQMNTPLAADFLTRWPDLETLQHAEIKTLRAFFYKHHSRSARKMEERISQVQKAKALTSDPAILTPARLLVVALAGMLRPLHQALARLDKEIERAMDQHPDAPIFRSFPGAGPALAPRLLVAYGTNRDRFQDADQVAQLYGVAPVVIQSGNSKTTHIRHRCPKFGRQTFHENAGCALKQEPWARCYYDQHKKRHDDKHHQACRALAYKLNRIYFACWKRREKYDPTRYLRALEKNGSPLHKQLAIPSPVSSE

SEQ ID NO: 332304 - protein, 322 aa, unidentified
MAKHTTICAGIDTGKRKLDVAIEGCRELLQVDNTPEGHKALLAWLRQRRVRRVGIEASGGYEQPVVAELRRKRFVVVVFQPAQVRAYAKFHLQRAKNDKIDAALIAACTAAVRKVHAAPDPRLQPFAEQLTMIDQVNEDIARLKNRIESCRNARIKQLWQEDIARLEMREKAELKALVASIRKRPDLAKRLELINSVDGIGLPTAVAILVRLPEIGKITREQAVALAGLAPYDDDSGKQVGVRHIEGGRKRLRRALYTASLAASFRWNRQLIQLYQRLTAAGKEHKRALVACARKMLIFANTVVARGTPWCDEPPAGPLSVS

SEQ ID NO: 332305 - protein, 342 aa, unidentified
MDYYAGIDVSLEASSVCVIDGSGKIVREAKIASEPEALTLFFRSLGFAVTRIGLEAGPLSQWLYAGLKQAGFAVELLETRHVRDAFKAMAVKTDRKDARGIAQLLRLGWFKPVHCKSAAAQEVRALLTARKLVQSKLYDVEMSLRGILRGFGLKVGPSTPKRFAGRVAELTQDHPVLRAIAQALLAVHEVLLRELCVFEKQVRSLARSDGRVKLLMTTPGVGAIVALTYVSAIDDPGRFSSSKRVGAHFGLTPKKYQSGETDISGRISKAGDGGVRAVLFEAAHIVLTRAVKAGALKSWALKLAKRAGMKKAKVALARKLAVILHRMWCDGTAFDAAKAAAV

SEQ ID NO: 332306 - protein, 313 aa, unidentified
MSELYVGVDVSKEHLDVASSDGTSWRVGNDEAGHQELVTRFSAAPPALVLMEATGGLERALAVQLSAAGVALRIVNARHVRHFAKATGLLAKTDRLDAQALVHFAQTLKPEPRAIQAEQTLALQALIVRRRQLVEMLTMERNRLRTAHRGVRKDLQSSIRWLEKRLAGVDDDIDGALRECGVWREKVELLESVPGIARVISVSLLASLPELGQLNRHQISALAGVAPFNRDSGRWQGRRSIYGGRPLARSALYMAALVGARHNPVLRAFYQRLRAAGKPAKVALTACMRKLLVVLNTMLKNGQRWGDHVQLQA

SEQ ID NO: 332307 - protein, 332 aa, unidentified
MNAVSTLGIDLAKNTFSAHGVDAEGVVTVRRTVSRAKLAELVARLPPCLIGMEACSGAHEWARRFSEAGHTVKLMAPKFVTPYRKSGKNDGNDAEAICEAVGRPNMRFVPIKSVQQQCDLSLHRVRQGFVEERTATLNRIRGLITEFGYVVPLGTERLRREVPDVLERLPARVARCVQDLLEHAERLRSQALEYEREIRSSVQHNELARRAHTRPGIGPITASALVATVGNGHDFRNGRQFSAWLGLVPRQYSTGGKTRLGHITKRGDPYLRTLLVMGARSVLQRAYRETDPLSRWALALQQRRGYHRACVAIAAKNARVAWALLAKGTAAA

SEQ ID NO: 332308 - protein, 346 aa, unidentified
MSYSTTVGIDLAKNIIQISVVSGRGKELSNRSLTRKKFAEFLGRQSLSLVAFEACASAHYWARAAKRHGHTVRIIPARAVAPFRQGHKTDSNDALAVAEAARRSNIKDAPLKSVEQQGLQSIQRSRFLLIQECIALSNHMRGILLEFGVTIPQGFASLLRTIPEVLEDGDNDLPDLYRPTLHRLHTRMLELRADIEAMTKEIDILVKQHPVCNKLTALEGVGPIGALSLYASLGSGAAFSKGREFAAYLGLTPRQHSSGGKTNIVGLSKKIGNRRLRSILIQGALAYVYRMKEPRTQKDRWLKELIDRAGPRRAAVALANKNARTAWAIVTQGSDYQRQPQLEMAA

SEQ ID NO: 332309 - protein, 353 aa, unidentified
MKQTKYIGLDVHQASISIAVRDSSGKLVMESVIETKATTILEFMRGLSGSLWVAFEEGTSATWLHDLLKPHVVKVVVCDPRKNALLKAGNKNDRVDARKLSELLRAGLLTRVYHGGPGVRTLRELGRSYLTITKDLTRVMNRLKGLYRSWAISCAGRKVYSPRHRASWLEQLPESGVRRRAEWLYQQFDTLAQLRREARKELLAESEKHPASQLLREIPRLGPIRAALLIALLQTPHRFRTKRQLWAYCGLALQTRASGEYRFTDGQLSRARQPTVRGLNVNHNHDLKNLFKGAARHGAFDSGAQSCGDRFKDLEKRRTLRSRTLETTIQFERVTRAGAPIAGPKPTGGDSIL

SEQ ID NO: 332310 - protein, 419 aa, unidentified
MKQDNNSQKKKSEPTTKRVKSRGPVRRDTKEVLAELVEKLKEKLDPKTAAATSAGEKHLRGELGPNLDRLTVGVDLGDQWSNYCILGLEGETLAEGQLRTTQEDIAEFFQALNAARVVFEVGTHSPWVQDVICGCGHEVLVANPRLMEGSKRRKRKNDRIDANKLARLGRVDPKSLHPIQHRSREVRQDLVVLRARDALVAARTELINATRGLVKSMGKRLPKSSSPSFAQKAEEAVPVEIREALLPLVRMAAALSDCIQGYDEKIEKLGREKYGHTALLRQVKGVGPITALAYVLTLENPKRFVKSRDVGPYLGLVPKQEDSGESQPQLGISKTGDTMLRKLLVGSAHYILGPFGPDTDLRRYGLRLCERGGKNAKKRAAVAVARKLAVLLHCLWVSGEVYEPLRQGMSATIAPAVAA

SEQ ID NO: 332311 - protein, 339 aa, unidentified
MEKYFIGIDFAKEKFDVVVLQQGRLCDKGEHGQFPNNANGVGMLEKWLRKTCGKDVAMHSVVCGENTGVYSVTAAKRLVMDGYTVCLESALRIKRSMGLTRGKNDKKDARSIAEYAARHRDRLTPYQIPSEASEALKTLFTQRRLFVRQKGDLQRRNRELAGLYKRNPLLDKMLTSDKKVIMAIDAEIEKIERQMKAIIHDNADMLRVYNILTSMKGVALVNAVALIVYTDNFRRFDFDARRICSFWGVAPFANQSGTSLNSTPHVSRYADSYLKSLLSQAALCAMRFCPAINQYAQRLKQKGKHIAIIQNNCKNKMLHILVAMVKNETCYGENKKITA

SEQ ID NO: 332312 - protein, 370 aa, unidentified
MNDNTIYVGLDVHKSTISVAVAEDGRGGEVRNYGVVENRADLLVKLVERLGRRGQRLHFCYEAGPCGYGLYRLLSGLGQDCTVVAPSLIPKRAGERVKTNRRDAAMLARLHRAGELTAVWVPDAAHEAMRDLVRARATAARVLGKARQHLTGFLLRHGQIYAGQRAWTVAHRRWLTTVRFAHPAQQIVLQDYIHAVEDAETRIVRLSEQIEQLFGHWSMAPVVTAIQAMRGVAFINAITIIAEIGDFARFTNPRQLMAYVGLVPSERSTGESVRRGGITKAGNNQARRALIEGAWSYRMQARVSRKLHDRIVGLPKDIRDIAWKAQVRLCARYRRLVATGKKTVVATTAIAREMLGFIWAIARQVQPQSS

SEQ ID NO: 332313 - protein, 345 aa, unidentified
MPIVGGLDIHRKQITFDYLDTATGEVRRGQIAPADRAHLRAWLARFAGRDDAAFALEGCTGWRYVAEELAAAGVTAHVAEPADTAFARGRKRHAKTDKTDSRHLRVLLEQGRLPECWIPPAQILECRALLEAYHDLRREHTAWIERIHAVFFHQGAPRLGEGALRTEHGLAALREAAAIHLSPAGQLQVATALDMLAAIEARMDTLRQQLLHAARHLAGARALQARLYGVGPLAGLAMTCWLGGAGRFSSARKAVRFAGLDVTVYSSDGKRSPGHLSRQGPEILRWVAYEAGKTHGRASAPGHDYYAAVKDRTDGKIAALAQARRLIRQACHILAELGDDALTAA

SEQ ID NO: 332314 - protein, 347 aa, unidentified
MKVTRVGIDLAKEVFQIHGVDGHGKTLLRRKLRRSEMMKFFKGLSACLIGLEACASSHHWARRLSELGHTVKLIAPQFVKPYVKGNKNDANDAEAICEAVGRPSMRFVPIKTVEQQNIQALHRIRTELVRQRTAKVNQIRGLLGEYGIVARQGVAVLRKALPEILEDAENGLMSDFRALLAGLREDLVYLDERVMSLDQTINKLAHSHAEARRLLKLRGVGPITATALIASLGDGQMFQRGRDASAWIGLVPGQHSTGGKDRLLGISKRGDAYLRTLLIHGARSAIKAAKDKEDSLSRWVQNLCNRRNKNIAAVALANKTMRMAWAMLKNGADYQADYRNQAMAQAA

SEQ ID NO: 332315 - protein, 465 aa, unidentified
MARKTKNVKSKDRQRLPRSLKTIYANAAGIDLGSREHWVCGPPREDGTPNVQRFGTTTPELFRLADWLKEQGVKTVAMESTGVYWIPLFEILDNRGLEVLLVNARHISNVPGRKTDMLDCQWIQLLHSCGLLRGSFRPSDDICRLRALIRERNTMVEQRSDWVRRMQKALDQMNVCVHHAVSDITGVTGMAILRAIVEGERDPFALARLRDARCRKSEKQIAEELTGNWRPEHLFNLRQALKMYDQLCAVIEDYDTEILTYITKHQPEQAASPLAPAHSSKSKTRTLAKRGQEPLRQALYAFSGFDLTTIDGIGVDTASVILSELGLDFSMFPDETHFVSYLRLAPNLSISAGKKVPSKFKPTTCTRVSNALRMAALTLRNSKSALGGLYRRIAWRKGASVAIFATARKLAQLIYRLVRYGQAYVDTGTEAYDARFNQRRLKFYTKALKQMGYSLHPLTENTLTA

SEQ ID NO: 332316 - protein, 345 aa, unidentified
MKKVVAGMDLHSNNVMIGIMDMDGKRLAHRKVDCDLKEVVKFLAPYKSRLEKAAVESTFNWYWLVDGLKALDYPVVLANPARIEQYSGLKHADDTNDAFFLAELLRLNILPTGHIYDPDLRPVRDLLRRRMMLVHQRTALMLSFKSLYARTTGLEMGLGRLKELGVKEAQKLYENPANQLIAGMQIQHIDYLSQSIEKIEKVVLDCARHLPFYSKLTTLPGVGKILGMTITMEVGDIKRFASAGEFASYCRTVEAQRTSNDKKKAENNSKCGNKYLAWAFVEAANFARRFSPECRAWFDRKAAKTSNVIATKALACKLAKAAWHVMADGTDYQGTRMFGPAAKNQ

SEQ ID NO: 332317 - protein, 357 aa, unidentified
MKKTYRVQEYVVRGKEIFVGLEDSKRTWKLAVRSEKMIIHQVSMEAKYPVLIGYLRNKFPECMIHLMYEAGFKGFNLYDALTEDGIDCVVIPPHVVTEPKVSRIKTDKRDARRLAKVLEDHDFQDSCYVPDKERREDRQVSRTLIALQKDIVRTRNRVRKLLQFHGIEVGFPDRWGRDEFRALKKLEVSEPLRISLDIFLTQLEQLWAHQVSCRAALRKLCHKERYHKAYTIARSLPGIGWFTAIRFVLELGEDLSRFTSGKKIASFVGLTCSEDSTGETEHKGRITGMGSGFIRSTLVENSWMSIAKDPVLLAKFTRVWHASGSRKKAIVAVARMLIVRYRACLMSGTPYVIGVAA

SEQ ID NO: 332318 - protein, 407 aa, unidentified
MKHVIALDVSKGKRTFAIYDRYKQCELEGELTHTRIDFERLHHRIEEMTVLDKQAPEIVFEATGIYSKPLEKFLATKGHTYCRMNPLEANLQMAKMRRHKTDISDVLELAKTHFSMAREATYQQDDYFEQMRAMTRYYDEIDEEMILLRSRMHAILHLSFPELEQLITPSSALFLNLVQLYPHSAQLRALSKTIIKNRLKENTRKNLSLKRAEEKAIVLLKAAENSYPAIDPSDIRCDQARDYARRIADLMEKKVQLVKQMVTISEGRKEYKVLRSFPGIGDSTACRLIGELGDIRRFKNAKQLNAYAGIDIMRYQSGNMQYRDRINKRGNKKLWKLLFFMICSMLMAKGKPNHFVDYSYTLKKQPQSKPHKVAVVACMNKFLKVTFQLITHGILYDYESALPAQRS

SEQ ID NO: 332319 - protein, 337 aa, unidentified
MEDIIYDHYIAIDWAAKNMAIARMTKKSNKITAIDVPSDIVELQFYLKNLKGTKILAIEETTTSQWLYTELKDYMDKVLICDPYRNSLLQEGPKTDKIDATKLVQLLRANLMKEVFHSTDKFIYLRRIVSGYEDLVKSGVRLKNQRYSMLRVCGKSGYEKKGIKLTSRDEQYVLECLDRQTQNYEEEKKGYEKEFERLARKHPEIRHQKSIPGIGLINAVKIVARVVTPYRFSGKGHYLSYSGLIKHEKMSGGRSYGKKNPRYCRMMKCVYKSGVIAAIGGNNPINDYYEYLISEKGYPAYNARNKACRRLAILSFGVFKSGKKYKLYRRDHVKKGK

SEQ ID NO: 332320 - protein, 460 aa, unidentified
MNTISSSKPLKEDFERRYRKNLEMLNPNAAGLDLHKEEIWVCPGGFQDNYEPEVKTFGTLTGELRKLVAYLKEKKVTAVAMEATGIYWIPVFEMLKNEGFDTCLVNARNIKGVKGRPKSDYADCVWISRLHCYGFLRASFVPDGDVSALQSLWDCRGKIIDDIARYAQRINSELIKMNFRLDMVVSNTLDLTGCRIIEALLSGNHNPHQLLELVDTRVQKTTEECLAAFDGNFQSDHLTVLKVWYQCYRDQQRQLHELNEEIYLMLEKFPKKATKEDLPPEPLNYREDCLEFPYKLRPVLYEIFGTDITQLCGIGASVAMTFLSTVGTDVKAWPTAGHFTSWLALAPMNQVSAGSRKSSKTARSANPLRRALVNTAMIVQRTDSYLGENHRRLKSRLGPATAKVAIARKLAVIIYNILKNDLRTIRYDAEAYQRHRQEKELKNLQKKARRLGYTLSAVSN

SEQ ID NO: 332321 - protein, 377 aa, unidentified
MKNVRFIGLDVHAETIAVAVAEVGGEVRSLGTIPNRPESVRRLIGKLGKASQLRVCYEAGPTGYVLYWQLTELGVACEVVAPTLVPVKAGDRVKTDRRDAEKLARCYRAGDLTGVWVPDAAHEALRDLVRARLAAKGDQLRARNRLSKFLLRQGRRAPEGTTPWTVKYLLWVKQQRFEHAAQEATRRDYLHEVEHVAERIVRLERSIDGAVESMPESQRAVIAGLQSLRGVAKISAVTLVSELGQISRFGSPRQLMGYAGMVSSEYSSGEKVRRGSISKAGNAHLRRIVTEAAWSYRHIPAVGPTLAARQREQSEAVKAMSWRAQHRLHGRYRALLAKGKTKQKVITAVGRELLGFIWAIGVELEATKATKEVRRAA

SEQ ID NO: 332322 - protein, 343 aa, unidentified
MQTVTTIGLDIAKSVFQVHGADAAGNVIVRRQLKRRYVLPFFQKLPPCLIGIEACASSHHWSRELQAVGHTVRLMPPAYVRPYVKRQKNDAADAEAICEAVTRANMRFVATKTPEQQSCLMLHRTRHLFIRQQTAVINAIRAHLAEFGIVAPVGRNGVEQLLDVVADASDKRLPEIARACLLALGAQLRTLKVQILNFDRQIIAWHRSNEASKRLDEIPGVGPALATALVASVADPKAFRSGRNFSAWIGLVPKQHSSGGKDKLGSISKQGDRYLRSLFTAGALAVIRYAKIHGTKHRPWLTALLARRPTKVAAIALANKIARMAWAMMARGDRYKQPVALAA

SEQ ID NO: 332323 - protein, 336 aa, unidentified
MFQLGIDVSKKTLDLCLLREGVKGSVKTRKLQNDINAVNAVIAWLSKQHCKPEDVHIIMEATGVYHESLAYGLHKAGGRISLANPHRAREFARGMGMLTKNDRVDAYMLACYGALKAPEPWLPPPEEVRHLSALLRRRDALVADSTREKNRLEKYLATDTPSVIAESVEAMIGQLNAEIKRLDRLIRSHLNQHPELKKDFDLLTSIKSVGYQLGLNMLVILRSHDFATAEQAAAFLGVVPVEKYSGTSVRGCPKLSKIGPPEIRAKLYLASLCGLRFNPLMKAMYERLCLRGKGKMCAIGALMRKLVHWCYGVLKTQKPFDVGYLSSYARSACKAA

SEQ ID NO: 332324 - protein, 344 aa, unidentified
MTKTPIAVLGIDLGKNSCSLAGLDAAGAVVMRRKMTREGVMAFTAALPACVVAMEACCGAHFLGRVIADQGHTVRLMSPEYVQPYVKAQKTDDRDAEAIAEAATRPTMRFVTLKSEAQLDLQSLHRARERLVLARTALINQLPAVLLERGITLAKGRAVLMRRLEEVGSEGLAVSDRTRRLVEDLLEECDGLSRRIKAYDDELAAVVRSDEQARRLSSIPWVGVINATALLAAVGDGSAFAKARDLASWLGLTPRQHSTGGRTRMLGIRTRGNRYLRKQLIDGARATLPHLAAKPNAMGAWLQQLLARSHPNVVVVALAAKLARIVWAVLRRKALFDHGTVAAA

SEQ ID NO: 332325 - protein, 299 aa, unidentified
MLQAHTLSVGMEGPTEAIAVASVAQEQGADVIALGTLGTRPGAIDPLIRPLQSQSTPRVCVDDAGPCGAGLSRSLTQTGAVGWVVAPSVRPTKAGDRVTTDRRDARPLARRMRSGDLTPVAVPAVHEAAIRDLRRAREATLRDLQAAQVRLTAFWRRQDSRSTGQAPWSPAPRRWRSAGGCPTPAPPMVWQEAVQAVTAPTARWPRREHARHAQVHPWRCAPVVEALQALRGVQCPVAVPPVAALGDLTRCETPRHLRHDLGLTPSESSRGARHHQGRMPPTGQTHARRALVAGAWASR

SEQ ID NO: 332326 - protein, 324 aa, unidentified
MKDITTIGVDLAKNVIQVHGVDQRGKAVLKKQLPRRRFVEFFANLAPCLVGMEACGSAHHWARQLEKLGHQVKLMAPQFVKPYVKTNKNDAADAEAICEAVSRPNMRFVPIKNGEQQAVLALHRARAGFVKARTAQANQIRGLLGEYGIVLPQGIVHVTKRLPAILEDDESELPGAFRRLLVRLGEHLNELDRQVGELEAQIQDWHREDAASRKLAQIPGIGPLTASASVATIGDARSFQNARQLAAWLGLVPRQHSSGGKTLLLGISKRGDAYLRTLLIHGARSVVRVAERKADIPTWLTQLIGRRHKNVAAVALANKNARIV

SEQ ID NO: 332327 - protein, 354 aa, unidentified
MTNYTIGCDAHKRFSQFAVLNSKGQMHQQIRVDHEPNALYIYLSQFSEGTPVAIECVGNWYWIVDEIERAGCLPLMAHAGKAKVMMGNINKTDKLDARGLATLLHNGTLPTVWIPPGETRDERELPRTRMVFTRMRTRLKNRMHATLSKYNLSLNTNSDIFAVKWREELNDAIQALPPETQRCMCQEQELLDHLGGHIHQLEERIRACIQITESMQLLKTEPGVGDILAIVIEREMGSPKRFPDGTHFASYSGTVPSVHASGGKTRYGRMPKQCNHYLKWAFIEAANVTARYHNHPRWRDKHVTRLYERICRRKGHAKAVGAVARHLSEAAFWMLTKNEPYKPPVSKKVLPKPG

SEQ ID NO: 332328 - protein, 388 aa, unidentified
MKAQIVDTLPPVAADHDPVRCLLAIELSKKSWIVAITTALSDKISRYTLDGCDWKGLLELMERVRTRVAREVGRPVEMISCYEAGYDGFWLHRLLERQGVRSHVIDPASVQVDRRARRAKTDHIDAKRLLRSLMAYLRGEPKVWSVLRVPSVAEEDDRRLHRERDRLIAERGQHVNRIKGLCAIHGIYDYEPMRRDRMLRLEQLHNGDGRKLPPRLKAEIARELQRLELILGMLKEIEAERDAIALTENVSAHTNAKKIQNLVKLKAIGAEIATVLTGEVFYRPFNNRLQVASYVGLTPSPFQSGSKCRDQGISKAGNPKARSTMIELAWLWLRHQPDSPLSIWFRERVGTRKGRIRRITIVAVARKLLIALWRYLETGVVPTGAVLN

SEQ ID NO: 332329 - protein, 252 aa, unidentified
MELLPEPDVDQGEDGKTARQGYFQNSPSGFEDFFDGIATGKIAIEASGAWQPVYDWLVERGLDVKLAHPQKTRIIAEMKIKTDCRDSEALADMVRADLIPEVYVPCDDMRELRGTAKQRGNLVQERSKFKNRIKDQLRKEGIEYGERNLWTNSGKQWLKDLEINAVNDFLEVLKTLNDRISKLEEEIEEIAGDMEEARLLRTIPGVSYYTALTIIAEIATVDRFPSPGHLCSYAGLTPSVKQSGSKEVHGPI

SEQ ID NO: 332330 - protein, 345 aa, unidentified
MKKITIGIDFAKEKFDVTVKNVLEGTSCYGQYPNTPAGGRSMVRMVKKFAKGTASEDWLFCGEDTGYYSQTISRYLTEKGYFMWLQNPYAIKRSEGDIRRGKNDKADSAAIADYAHRYEDKARKYELPSEASEQLHMLLTRRDALVRAKKVVQTGVGEMPKREKQGETITLIKASNKRVVKAIDDEIALLEEQMEEIVGKEEEMQKNYEILRSFKGIGIVNSMCFIAYTDNFKKFDLNARSIATYWGVAPFGEDSGKTVYKKPHVSHMCNHWLKAILSNAANSAIKYNSVIIAYYARLEKAGKLEGIRRNNVKNKIIHIITAMIRKGEKFNPEFKFTMEKDTQKR

SEQ ID NO: 332331 - protein, 377 aa, unidentified
MQKPSTIDIDPVIYLAIELSASTWLVVSKIPTSEKTGLHRMEAGNSQALIALIADLRKKVSAKLGVESAVMSCFEAGRDGFWLHRLLSEHGVINHVVEPTSILVNRRARRAKTDRLDAQGLLRILTAHAKGDHDVCSVVHVPTIEEEDAKRQHREREHLVQERVRIENRIAALLTTQGVRKRPSLRSWQKDMEEMRTGDGHPIPPFLRAEVNRLRRRLVMTLEMIREVGAEREQALQKQDDTASRTIQALRQLRGIGDNFAAVLTREVFYRSFENRRQIASYLGLTPTPFQSGGMDRDRRISRAGNARARKTLIQLAWLWLRYQPDSSLACWFRERVGNLQGRTRRIAIVAMARKLLIAIWRYATDGIVPEGAQISI

SEQ ID NO: 332332 - protein, 341 aa, unidentified
MSIVGGLDIHRKQITFDYVDTETGEVRRGQICPADREHLAKWLARFAGQDAHFALEGCTGWRYVAEEIIAAGLTPHLADPAEAAHLRGPKRRAKTDRADARHQRVLLEQGRLPECWVPPSHVLECRALLEAYLDLREQRTGWVQRIHAVLFHHGAPHIAGQQLGTAGGAAALPAAHCSPAGQLQLAIAAQMLLVYDERLHQVRRQLLDRARHTRGAAELTARLYGVGPVTGLALTCWLGGAGRFSSSRKAVRFAGLDITVYSSAGKRSPGHLSRQGPEVLRWCLFEAGKAHARASAPDHAYYAQVKERIDGKRAALSEARKIIRQAVHILDELGDDALTAC

SEQ ID NO: 332333 - protein, 414 aa, unidentified
MELLHERCAALDIGKKDLKACVRTPSPKGKRSRRQEIRTFATTTNALLELRDWLVAEQVSLVVVEATGDYWRGAFYLLEDQLNVILVNSAHAKGLPGRKTDVCDAAWLCQLGECGLLRASFVPPEPIRQLRDLTRYRTTLTAERSREAQRLEKELEDAGIKLSSVATDITGVSGRAMLAALIDGERDPQVLAEMAKTRMRPKIPHLVQALTGNFGEHHAFLCRLHLQRIDELTAAIAELSARIAEQMRPFARQLEHLMTIPGVGQTVAEVIVAETGTDMGRFRTGANLASWAGVCPGHHESAGKRKSGKTRHGDRWLTGALGTAAMAAARTKDTTYLGARYRRLAPRLGKKKALVAIEHSILVAVWHMLTNNVDYHDLGGDYFARLDPERAMRRIIRQANSLGFTVRFDPIQAA

SEQ ID NO: 332334 - protein, 341 aa, unidentified
MVQASTIGLDIAKRVFQAHGADASGHAVFRKRLVRAKLLAFFAAQPPCTVAMEACAGAHHWAREIGKLGHTVRLIPPAYVKPYVKRQKNDTADAEAICEAAQRPSMRFVPVKSEEQQANGVVFRARDLLVRQRTQCINALRGHLAEYGYVVPQGITHADAVIAHIEDPASSVPESARAILTVLVATFQALGAQVQVLDAEITRRAKADPVARRLMTIPGIGPIAATAITALVPAPEGFRAGRDFAAWLGLVPLQRSTGGKQKLGAVSKMGERTIRRLLILGASAVVRWAGQRGAPAGSWLAGMLARKQKMLVTVALANKTARTVWALLVKGGVYKAPVEAA

SEQ ID NO: 332335 - protein, 378 aa, unidentified
MNRIIKIGMDVHTTNYTLCIFEPSFEHDGTVHCITQVKPEIKKIIHVIETFKKKHENEELNIVCGYEAGCLGYSLYHELKEKGIECVILAPTTMKTEKGGRKLKNDYRDAKMIAECLAYGGYSAVHIPTELDNSVKEFIRMRDDIKENLKSIKQQIIAFLTRNGKQFNGKSYWTKKHIDWINIISFSEPLLQDTLKEYMIEYNHLCDRVETLDKQIEEVSLKEEYVEKVQQLQCLIGIKTHTALSLIVETSDFNRFKKGNMYSAYLGLIPGEDSSGNDKNRLGITKAGNSHLRKLLVEAAQGYTRGRVGFKSKDLKARQEKCSSEVVAYADRANERLRRKYCRMILRGKKYNVAKTAIARELACFVWGIMTNHMDLCS

SEQ ID NO: 332336 - protein, 324 aa, unidentified
MLPTLGIDISKASFHVELSLNEKLRHRKFSNRKEGFSELGNWLVKHKVKQVHACLEATGPYGEELASYLYQQGHTVSIVNPLQIKAFGQSELLRNKDDRPDAGLIRRFCEKQRPPAWTPPPAHQRELQALTRHLESLLETRQQQLNRLEGPKPKGVVKSLRKLVAYLDAEIKRTEKQIEDHLDRHPDLKQQCHLLESIPGIGKRTAAKLLAEIEDISHYKSARQVAAYAGLTPKNNRSGTWRGKTRLSKTGNARVRKALFLPAMVAKQHNPIVRTFCQRLARNGKNKMEVIGAAMRKLLHIAFGVLKSGKMFDPDHELLLSSVS

SEQ ID NO: 332337 - protein, 427 aa, unidentified
MNEVDAIRVKEFRQLKKEIRGAEDYLIVGIDVAKDKHHAFFGTATGKTLFKRLLFDNTIEGFERLRIQVEAIKVQNGLRKVVFGLEPTANYHKPLGEHLIKCGDKVVLVSGVAVKRNRELLDGRWDKHDTKDAANVADLISQGKCQYYDHPSMPLRDLRALLALKRRLKKEEHGYRVRIRNNLLAQYFPELDQYFGDSSDSLAIVRWCLNPSFIAGLEYEDFCRLVAPGKRNTPKELRLQAIWKKAVSSIGCAVGEGVEFEAKLMVEGLREIRGNIKATEANIHEICLQFPEYPYLLSIPGFGRDVASKVLGAIGNPFRFDSVKQVLKLAGYDLCACRSGERSDSATPVISKRGKADLRYALYQAALVASTRSKFFISYYTRQLSGREREKGIKTKMKVKLAAKMLVIAWTLMKKREPFNPGHLNIK

SEQ ID NO: 332338 - protein, 421 aa, unidentified
MNELADTQYTAYVGIDWAAAKHDICVQSADDGAREFACISSQPEGIEAWAQDLNQRFGGPIAVALELSKGPIVSALQKYDFFVLYPINPSTLAKYREAFTPSGAKDDPTDAELAVDLITRHAERFSPLKPQSVDMRKLIGLVEQRDKFLSDQGRLVNRLSHALKHYYPQVLEWFREHNTVVFCDFVSQWPTVAQVKRARKASLERFFKSHHVNSAKLIERRITAIKAAMPLTEDPAVIEPHRLQVEMLIEQLRITIKALKRFDDEIKATAQKLPDYDLLFSPLPGAAKVLAPRLLAAFGEDRQRYPQADSLQKYSGIAPVTKRSGKSTWVHWRWQCPTFVRQTFVDWAAQTINKSAWAGAYYRQQRAKGCSYQVAVRALAFKWIRILHRCWQDRTPYDESKYLEALRRKGSPLLKYLAEAA

SEQ ID NO: 332339 - protein, 485 aa, unidentified
MARRLVGIDLGIASAHTVRVRDEAGREVCRRRCEPTVDSLTAIETAALAGASEGTRLEVVIEPTGPAWLPIAVFFTARGHLVFRVSSAKAADLRRFLSRHAKSNGIDADTLARLPLIDPDGLRPLELPDAAAAALDRRVRACDRLTMAAAEHKVRIKDLVRQVMPCTPLTGDLGKADLAVLERYADPRALLRLGRARLTALIVKASNNHQGAARAEQWLAAAHAAVDLYGDHPAVAFTDLAAEIATEVRLLRAIDAELATHAAERETCYRWVDPLQLARSLPGLAEVGGPAMTAVIADPARFPSAAHFKSYLGLAPKASETGDTDRKGQPMSKAGSRLARATLIRAADWARKQDPQFARIYHQQMVQRGAEHLKANCVVAARLAERLWTVMRRRMPYVICDIDATPVTPTQAKQIIADQWTVTEEIRRRRRSSKRRAGKAPQQVLTGHDQKDTRSVRTRQPSPRKSSATRSQTVKQPDPLTTDPR

SEQ ID NO: 332340 - protein, 358 aa, unidentified
MNTQVKKIDFTGQNIYVGFDVHLKSWKVTIMTDHMLHKTFSQDPSPKILHKYLSDNFPGGTYYSAYEAGFCGYWIHNQLVSLGVKSIVVNPSDIPTTHKERVQKEDKRDSRKIARSLRAKELTGIFVPSIKSLEDRNIMRTRKMLVKDLTRYKNRIKSFLHFHGIDLPEIFKNPRSHWSNRFMKWLTEIELDEQSGKFSLTTLINEATHLRNSLLMVNRQIKGLSKTSHYAQDLILLQSVPGIGLLTGMTILTELETMVRFRNIDHLCSYIGLVPSTDSSGEQEKVGDITPRGHHVLRSALIESSWVAVRNDPALLKYYNDYCKRMEPNQAIIRIAKKLLTRIRFVLKNKQIYICTIK

SEQ ID NO: 332341 - protein, 339 aa, unidentified
MAILFVGIDLAKNVFAVHGVDERGKAVLVRPTVQRAKLHELVASLPECTIGMEACSGAHHWARLFKQHGHAVRLMAPKFVSPYRMSGMRGKNDAADAAAICEAVQRPNMHFVPVKSEDEQARLCVHRVRQGFVEQRTATINRLRGLLSEFGIVLPQKAATVRREATAHLEDLPGWANTAVGDSLSEVHRLDERLAEYDRHVSQMAADDERSRRLMQLQGVGCTTASALVSTIGDAHDFKNGRQLAAWLGLVPGQYSSGGKARLGSITKAGDRYLRTLLVLGAKSVLAAAKNKDDRLSRWAMALQARRGYWRAVVAIAAKNARTAWAVLAKGESFRPIQT

SEQ ID NO: 332342 - protein, 341 aa, unidentified
MNPVTLIGIDLGKHHFHLHAQDRTGRMVFRKKLTRSQLLTQLGNFPACTVVMEACAGAHWIARQVASLGHQAKLISPHFVKPFRQGNKTDFADAQAICEAASRPSMRFVHPHTEAQQTLSALHRVREALVRDRTGTINQVHGFLLEFGISLPKGPAILQRLPTVLAQHPDLPPQVIALLERLHTHCKYLDEQIRQFERELTQQLTEDDRSRRLLTIPGIGPITASALTLELSNAGQFATARYFAASLGLVPRQYSTGGKPTLLGISKRGGKNVRRLLVQCARALMQTIHRRTDALGHWVQALRARRHSNVVACALANKLARIAWAILAKGIPYQPRQLSST

SEQ ID NO: 332343 - protein, 313 aa, unidentified
MNSEKYIGLDVHQATIVVAVTDSSGKLIMESILETEAATILQFFAGLRGTLAVTFEEGTWSAWLYDLLNPHVDKLVVCNPRKNALLKDGNKSDRIDARKLAELLRGNQLKPVYHGETGVRMLRELSRSYLTIVQDLSRVMNRLKAVYRSWAIPCAGRDVYLQHLRQQARRELLAESRKHAITARLRQIPYLGPIRSALAVALMQTPHRFRTKRQLWAYSGLALETRISAEYRMVEGQVRRSKKLLSIRGLNKDHNHDLKGLFKGAATMASVRPGPFQDFLARLTLARKIAAITLTLWKKGESFDAKKLKSQAA

SEQ ID NO: 332344 - protein, 388 aa, unidentified
MEAQTVDTLPPVAADHDPVRCLLAIELSKKSWIVAITTALSDKISRYTLDGCDWKGLLELMERIRTRVAREVGRPVEMISCYEAGYDGFWLHRLLERQGVRSHVIDPASVQVDRRARRAKTDHIDAKRLLRSLMAYLRGEPKVWSVLRVPSVAEEDDRRLHRERDRLIAERGQHVNRIKGLCAIHGIYDYEPMRRDRMRRLEQLHTGDGRELPPRLKAEIARELQRLELILGMLKEIEAERDAIALTENVSAHTNAKKIQNLVKLKAIGAEIATVLTGEVFYRPFNNRHQVASYVGLTPSPFQSGPKCREQGISKAGNPKARSTMIELAWLWLRHQPDSPLSIWFRERVGTLKGRIRRITIVAVARKLLIALWRYLETGMVPTGAVLN

SEQ ID NO: 332345 - protein, 345 aa, unidentified
MKVTTAGIDLAKNVFQVHGVDEHGKTVLRKQLKREQVALFFANLPTCLIGLEACGSAHHWARKLQSLGHTVRLVAPQFVKPYVKTNKNDAADAQAICEAVGRPNMRFVPVKNVEQQAVLALHRVRQGFIKARTAQANQIRGLLAEFGLIVPQGIGHIAARVPELIEDASNELPGSFRMLVDQLVDHLKVLDTHVLNLEAKIKAWHRENEISRKLEQIPGIGPVTASALVATIGDAKAFENARQLAAWMGLVPRQNSTGGKTKLLGISKRGDTYLRTLLIHGARSAILAAQRKATNEDSWLGKLLLRRNPNVAAVALANKNARVVWALLAKDRTYRSDLITSAAGA

SEQ ID NO: 332346 - protein, 476 aa, unidentified
MEEYFLGADVSKGYTDFILMDKNKEVKVSSLQLDDTFRDHNKFHQFVCNFFEEHEDAIIYAGFESTGGYEDNWIYFLRKLQKDYPIKVARLNPNSVCNTRKAELAGNVTDQISAKAIAYHLINVLPTIKFNAKSPYASLKRTWTHLRMLKKQKVQLLNQFESLLYISHTQLISDCSSRVPEWLLKLVIEYPTADLLSRGHISKISRIPYITEEKARELKEEAKRSVASATDAISAELLQDVAKTILSYKEKIKKWEDKLVEKCEIDEIKILTTIPNIAEYTAVGLMINMGSVERFDHVKKLASYWGIHPEIKESGDGKWKPGISKKGRSIPRELLFNAVFASLSDEDNYIQKLYKEYVEEKGKSKMSAIGILMHKLTRMIYGMLKNGTNYNPQIDKENRQNSKSKKKSNNNNKRKVRDFDSKAPVSRREKKKRKERIETQDADASFAGSSIPSFSENNIENIMQNLNLEISNISEN

SEQ ID NO: 332347 - protein, 505 aa, unidentified
MAARTTKQQSASSSPPGGKQAQAQAQRRAYNRRKTRAKAKSEARRQKEAAQLEALPVQHPHAAGIDVGSRSHWVCVGFTTEANSGLIQEFPAHTAGLKAIAAFLREHQVNTVAMESTGVYWIPLYELLQAEGFEVLLVDPSYSHQLRGRPKTDRRDCQWIYRLHSVGLLAAAFRPDEKTCQLRAYLRQRANLIRQASRHVQHMQKALEQMNLKLTEVLSDITGVTGRSIIRAILRGTRAAEKLAKYRDKQCKASEAEIARALTGSYRDEHLFELKLAYEAWQFTLGQVEKVDTQIALQLGRMKCDRALPPLKPKARPKRRANSPRFDVRAALYYVVGLDLTEIEGVSELTALTVVSEIGPGVSRFATVKKFCSWLGLCPNWRKTGGRVQSSRTRRGVNRAAQALRLAAQSLHHSQGALGGFLRRMRGRLGTQAALTATAHKLARIVYLALRHGMPYVRQSQEEYAARMREKQIKALRRKARQLGLELVEKPSGSVAAAEAAAEQG

SEQ ID NO: 332348 - protein, 295 aa, unidentified
MVELGIDVSKAKLDCTLLLDVNTLRCRSKSVPNTPDGVKALLHWIERHSGCAVEQVRAALEPTGVYHEASALALYEAGVRVFVVNPAQLRDFAKGHAVRTKTDAKDSLVLALCVAQVKLIPWQPAPAEIRELRALMSRLDAVEGELRAELNRQEKAQIAADPVLVLRSIAQAISFWQAERERLQQAIDEHIDRHPGLKSEQERLLSIPPVGEKTANRMLCMLHGGQFRSASQLAAYLGLVPVEHQSGSSEADPVCPRRAMRACVPLCTWPRSPRSVTTRMCVRSMNACSAAAKPR

SEQ ID NO: 332349 - protein, 502 aa, unidentified
MVPGRRLYIGEALRSSPLDQNPQTASLGGRAQKGWGKEMTGKHEVESSEGSRRQLQGLPVIRRNVAGIDLGSERHWVCAPTVDGSGREIASFGATTPELIRLAEWLKQRQVESVAMESTGVYWIAPHEVLEAQGLQVLLVDTRQLARVPGRDKKTDPTDCEWIQRLHSCGLLRSSFRPEEAVCMLRTLVRDKANLVAEGGDWLRRMQKSLDQMNVRVHRAVSDIDGVTGMAILRAIVGGERDALKLAKLRDPRCSKTEQEIAEQLTGHWREDHLFSLQQALNMYDAVQERIAAYEKEILRKLGDMEREEQRGQTAPPLPNANKTKAIKKRGQEPKRQALYRISGVDITQIDAIGVETVEVVLSEYGPDLSRFPTEKQFVSHVTLAPHVPTSGGKPLRKRKRNSASTRVAAALRMAALSLRHSQTALGAYYRKMSQRLGGDIAVFATARKLATLIYRLLRWGQPYVDEGAQAYETRYRQQRIGRLAATAKQLGYQLAPMLESA

SEQ ID NO: 332350 - protein, 416 aa, unidentified
MARSKSRIDRSVNDHEMIVGIDVAKHQHVARILFPDGSESQPFGFPNHRRGFETFLAWLFSQREKAHCDSLLVGLESTGHYWEPLAFFLEPIPEIRLVQVSPKHVKKTKEVYDNSPGKTDRKDAGVIAMLIQMGRFQRLVLPRGPYAELRGYARLRERKMVELGVQRNLLHSLVDWVFPEYGSLFPKLEGKTSLTILKHYTTPEQILHAGLQSLSQVLHQASHGRLSATFSQRLIEAASSTIGLQEGIEAAAFAIRNIVASVERIQEEIATIEKELTKVLAQIPYVPQLLSIPGVGKISLALLLGEAGDLRRYHKAEELIKLAGLNLFEISSGTHRGRRHISKRGRPLLRKCLFFAALRTVKTGGAFRAVYVRLTQVNRMQKTKALVAISRKLLMLLFALVRDDVAYQPREKLRAA

SEQ ID NO: 332351 - protein, 349 aa, unidentified
MIIIGVDFHPGFQQIAFVDSESGEFQEKRLAHREEAESFYRGLASAGEKIRVGMKSSGYARWFERLLSELQIELWIGDATEIERKRARKQKTDREDAQHILQLILKDDFPKIWVASWENRDLRQQLWHRHRLVQMRTRIMNQLQAVALNEGLSYKKRLWRGSGRQQLEGFQLGLWATRRRRDLLELLDRLNPTIAELSQAAEQEAEKCPEANRLMTHPGVGALTALAFVLILGNAERFECGKQVASYLGLVPLEKSSGKRRRLGHITKQGNSILRFLLVEAAQATVRKNPEWRSKYFHLALRRGRSIAKVAMARRLAIRLYWMWREKKEYQQTRSFGSHAGQPGNLYGA

SEQ ID NO: 332352 - protein, 343 aa, unidentified
MEHYVGLDVSLKQTSICVVNQVGSVVREGVVDSEPEAIAAFVRSKAPGAVRIGLETGPTATWLWTALKQLGLPVICIDARHARAVLKMQINKSDRNDAAGIARIMQTGWFKEVRVKDLGSHSVRALLASRALLVKIKRDLENQIRGLLKNVGLVIGRAKFNVFAVRAEELIEDRPELIAVVGPLLKARQAIEQQTDDLDRKVLKLARHDVQVRRFMTVPGIGPITALCFKATVDDPTRFKRSRSVGAYVGLTTRRHASGEIDWTGRISKCGDAMLRSYLFEAAGVLLTRVPKWSALKAWGMRLAKRNGLRKATVAVARKLAVILHRMWMDRTEFNWSKKEVAA

SEQ ID NO: 332353 - protein, 336 aa, unidentified
MQISTVGLDLAKRVFQIHGVDRDGNVVLRKQLRRAQVLSFLAELPPCLVGMEACGTSHYWAREIGALGHEVRLMPPQYVKPYVKRNKHDPADAEACCEAVGRPSMRFVPVKTEAQQAVLIMHRSRDLLVRQRTQVVNALRGHLAEFGIVEPQGIWHVGRLRARVEDEGAIPEPGRTVLGILVRQLEQLDEHIAQVEAEIVAWHRANPVSQRLAKIPGIGPLTASAIVATVPDPSVFRSGRAFAAWLGLTPRQHSTGGKERLGRISRQGNRSVRQLLIVGAHSALLRSKEIRANAWVQGLLGRCARLKVAVALANKMARIAWAVMAKGESYRRTVPA

SEQ ID NO: 332354 - protein, 344 aa, unidentified
MKITTVGIDLAKNVFAVHGVNEHGRAVLKKVLKRNHVAEFFANLPACVIGMEACASAHYWARKLQAMGHTVRLIAPQFVKPYVKTNKNDAADAEAICEAVARPNMRFVPVKNIEQQSVLSLHRVRQGFVRARTAQANQIRGLLAEFGIVVPKGIGHLERQVPELIEDADNELTGSFRLLMQRLMDHLKELDRQVRELEAQIQAWHRNDNTSRQLARVPGIGPLTASALVASVGDAKSFRSGRQLAAWLGLVPRQNSSGGKNVLLSISKRGDVYLRTLLIHGARSLLQVAKRKECKSSWLHGLLQRRNANVAAVALANKNARIVWALLVHGREFHPDYHAPAATA

SEQ ID NO: 332355 - protein, 469 aa, unidentified
MRTIGIDLGVAGEHKALIADEQGQALSGVISITSEASRLEHLLEVACQGSPAEELQAVMEPTGMAWYPMAVYLSRQGVKNFLVNGQQVADLRKYYKKHAKSDRIDVRVLVKLPVVNPEQLHALELPGAKVLACQRGCKQLDRLVKEHTAIKNRLIAMDRFAWPGLEKQVYSDLFCPAALWFRRHYYSPYQVCRAGVEKIHHEWQKSQLKAEDDGSWIAALVKLAQAVMTLYGPEGEALDYAFLQAEASSEEDFLEMVEQMQHEVKYKVVFPLYRQLHPSRNLESLEGVGEVGAAVYVSFISNPRRFSSLRKLRGWSGMVPNSRQSANSQSNGLKITQAGPRLIKKFAFLDAEVARLRDPQIAAIYYDQMMNKGKHHNQAICTCAAHLLDRILLVLRKDQPFELRDVDGSVVSKAQALEIIAQRYTVPPEVRRRNNKKHRQEATDRQAEKELKVRERGVIGSSQRLLQAR

SEQ ID NO: 332356 - protein, 365 aa, unidentified
MGTKLSKDSIVVGMDIHKYFHTAVALDILGNRQMSESFSNDKLDDFVFWLGKLGTKQHIVVGMEDIGGHGLHVARRLMKEEFDVRYVPAIITDRFRKHSVHREKNDWEDARRVGLAILHRSEEALPASSSIPKNYEEVRTLDLMLSEREMLVREQTILKNVLHNLLHQHYGNGYKQDFSNPFSPQRISWYQQDLSKKSGKQQGYLAESIGRRLKRLAMIQEQVKEITTTITNISKDNQELKLLRGNLKGCGVLTACKIIAEVKTIERFATKDKLARYAGIAPTDHGSAGKIRLHTDFSGNRKLNRAIHTVALFQLGNNGLPQAKAYMARKVAEGKTKRWGLRCLKRQVINRVFAILSKQPIVNIA

SEQ ID NO: 332357 - protein, 401 aa, unidentified
MNPVVGLDVVKGESQVQGFQDKKKPYKASFKVSHTLEELETLLHFLIEIENIAGVRPSVVLESTGHYHTPVIQYVDKHGYLVIIVNPLISYRAKSSSLRKVKTDVIDARHLCELYYKEELEPQKKRGIHLLNLRNLTRQHDNITSIYVQTKLQFHSVLDQVFPEYRGVFGDLYSSVSLFTLLEYPTSKDVLEIDKGTLDKKIHEFCPSRSVKWAESKAEKLIAAAIRNPFQETLYQSHILSIEEMYIKMLMEYQKHLSKLEDKKDALANEIEEFKLLQSIPGIGEKIAATIISEIGEIDLFDNPKKLVAFAGIDPSLFESGRFKGTVNRITKRGSSRLRHALFMAVRSAIRDSRKQKTTDEIIPRNKKLRAFYDKKREEGKPYKVAIIACANKLLIGFTHY

SEQ ID NO: 332358 - protein, 358 aa, unidentified
MQRNKKTFKGQNIYIGIDVHKKNWQVAVITESGYTERLSTAADAKALFKFLKSHYPDGNYRAVYESGFSGFATHYALSDLGVSCVVAHAADIPSSQYELTMKSDRIDAEKLARALRAGLIRGIYVRPKDNLDDRGVLRIRKTIQIQVGGYKTRIKHLLHSNGVELPERFSRSGTHWSRAFIAWLREDVRLLSDTRRSLDLLLLQVETLRANLLEATRRVRALSMTDRYREDCALLMGIPGIGLTVAMTILTEVCDIGRFGNERQFASYLGLVPTSHSSGERVSHGEMTFRGNKHIGPLLVEASWVLIVRDRELGRMYTEYRWRMAGQKAIIKIARKLSNIIFAVLKTRKAYEPYRRDA

SEQ ID NO: 332359 - protein, 333 aa, unidentified
MYVGLDLHKNYLQAAVINSRGILLKEERIPNEDEAIERFFDNSKLKKNRSNEIVIESSSTWYHAYELLSGNPKNHVILSNPVKTKAIVSAKVKTDKVDAATLAQLLRGGYIPECYIPPRHIMDLREMVRYRASLVRTRSSVKNKIHAIVLMKGIKINEECKPFTKQFVEELKQAGDYRIFGYLSVVESLTERIHEVSKKIKNEASQDEASKLLMTVPGIGYYSALLISSEIGDINRFPDSHHLCSYAGLTPTTHSAGGVTYHGAITRSGSKYLRWILTECVHSYVRTEKESNLAKFYLDLSKRKGKSKATVASASKLLRIIYWVLKEKRPYYG

SEQ ID NO: 332360 - protein, 418 aa, unidentified
MNVKARRTKKQVNVENQAINLLSKEELNKKIEVVEKELRSYTWRELETNGKFAKNDKLSFITDDMLIVGCDIGSENHYIRAIDVRGRELSRGAFEFSNTSEGFENAKAWVMALAAKHDKKQIVLGLEPTGHYWFALAAWMISNGISVVQVNPYAVKQSKEIEDNSQLKDDRKDPKLIANLVKDGNYGMPYLPEKVYADMRRLSMFRDQLTEDRIRNINRLHRELKIYFPEYMDAFGKIDGAFTLEVLKVSAIPSDITALGAEGIKNIWHNEKLRGRGYSRANEIVSYAEKSVGLTDGIDAGREAVKWYAEQILKLVACSSGKHKGQTKISHRGRKRLRYWLFQAAKSAVSHADEFKQLHEYYTTRTNNPLKKMQSLVVIACKILRVIYTILKTGTTYDPQKLLEDIKRPTASHAPMAA

SEQ ID NO: 332361 - protein, 385 aa, unidentified
MSPLALDVVTKTDKTPVLGRMLSKYVGRKTSSIENGITKARNHSRQRGNIMRVVFGIDVSKASSEVAILVNGEKVHGYTIPNDAIGFNRLLGDLKTVHQPEIVFEATGVYSRRLQAFFEDNSYTYTRLNPLESKKQLDSLRVRKTDKIDAEKLAMSQFILNRKPSYVQEALYQELRDLSRFYQNLTEDIVCAKNRLHKVLQITFPELENILSAPTGEQYWNLVITFPCNSFVLESDDATLTAIIRQSTAKRISEKRVTYLVDKLTKLANQSYCAVKKTSPVIEEVKYYAGELLRLSEHRQGVVEEMVTLAQSLPEYEILLSIPGIAETTATSIIGELGDIRRFHSANQSNAFIGIDLRHHESGNFLAKEHITKRGNSYDRKILFK

SEQ ID NO: 332362 - protein, 338 aa, unidentified
MIPSPVYVGLDYHTNFIQVCVLDAAGRVLANRRCPNDARAVARWVRRHGRLHRAAIEVCAGAADLAEELIAHHGWSIDLAHPGYVHRMKGSPDKTDYSDARMLADLTRVGYLPKVWLAPESIRELRRLVRYRQQLVDERRAIKLRMRGLLRDLRITAPQAIRPWTKAWLAWLETCDALPTHGRWIMDRHLENLRRLNEAIDEAARRLDEVTSDDVMVNRLREQPGVGPVTAWTLRAELGRFDRFASGKQLSRFCGLSPRNASSGERQADAGLIKAGNRQLRAVIIEAAWRLIRYDQRWRHLALSLRGRGKPSSVVAAAVGNRWIRTLYHEMKPLGLAA

SEQ ID NO: 332363 - protein, 315 aa, unidentified
MKHYTPKFAGIDVSKMHLDVYLHPDGSSHRFPNNKSGWRALQKWLPAYDLQGVVYEATGSYHKGVERYLGEQGFPIARLDARRARRFAEALGVNAKTDPVDARVLAEFGAFLKPATKTLPDPALEQLKELVAARRGLIQQGTRITNKSKTTVSPLLKRQLRLSAKQVKNQITQIDAELRTIATANPTLAARLDIITSIPAIGQVTAMTLLADMPELGDLNDKQAASLMGVAPIARDSGAFAGKRHIRGGRAQVRQAVYMAALVATRYNADMKRKYDTLIKKGKPPKVALTAVMRKLIILANALIRDNRKWAEIRP

SEQ ID NO: 332364 - protein, 400 aa, unidentified
MLSIGIDVSKGKSTVCGMKPGGEIVYAPFEVQHTREGMSDLVSLLRSSGEEVRAVLESTGSYHCPVVTALLENGIFVSVVNSLRMKRFCSQSIRRVKTDQIDAMQIALYGLAYWQELQPTRLPEDTYRELQLLARQYYQMTSMLIKAKVDFNAICDQVLPGMQELMSDHAGRHKLSDFVLRYCHTTHILEMGETRFRKDYCKWAEKKGYRNCERMAALIFATAQNGIPVLPNAPSTQIVITEAIRVLHTVEASRDAILTQMQALAKTLPEYSLVREMPCIGDTLAPRLIAEIGDVRRFHSKRALIAYAGIDAPPYQSGKFCANNRHISKRGNRYLRKTGYEVMQSYVMHKPANDPIFTFIEKKRGEGKSGKLAMVAGLNKFLRVYYGKVTELYRSLPAIE

SEQ ID NO: 332365 - protein, 412 aa, unidentified
MKIVYEVCCGVDVHAKMLVACLIRTNGEKQIRTFSTMTDSLLSLRDWLQAANCTHVAIESTGVYWKRVFNILEDALKVILINPEHARALRGRKTDVKDSEWLADLLRHGLLKPSFIPPPEIRELRELTRYRESLVREQSAVANRIQKVIESGNIKLAQVASDALGVSGRAILRSLARGETDTVKLASLAKGKLKDKELLLRRALAGRLTPNQRFVLKESLNRWDELEAADRRVTKEIDRYLQVRPKLAQARDNLDTIPGLGPRAAEIILAEIGIEMKANFESDAHLASWAGICPGNKRSGGKRFSGRTRKGNTYLRAALVQAAWGATMKKNCYLSSQFFRMVNRLGRKKALVAVAHSLLVIIYHVLERDQTYTELGGDYFDRHNVERQREYFIRRLQMLGLKVSVEEFPEAA

SEQ ID NO: 332366 - protein, 369 aa, unidentified
MEDRITYVGLDVHKEGIVVAVAEGGLRGEVREYGRIANTAAALDRLVRKLGGEGVRLRFCYEAGPCGYGIQRHLSARGHECVVVAPSLIPKRAGDRVKTDRRDAAGLARLHRAGELTAVWVPDAQHEAMRDLVRARLDAVHALRRARQQLSGFLLRQGCHYGRPAWTKLHRRWLAGLKFEQAVHHIVLEDYIAAIEAAEARRDRLTAQIEAMLPDWTLASVVAALQTMRGMALVNAATLIAELGDLSRFANARQLMAYLGLVPSEHSSGASVKRGGLTKAGNKAARRLLIEAAWCYRFPARVSRELRLRQEEQPRPIRGIARKAQLRLCTRYRKLARSGKPANVVTGAIARELAGFIWAIARCVPPAAG

SEQ ID NO: 332367 - protein, 402 aa, unidentified
MNAVGIDVSKDKSMVAIMRPFGEIVSAPFEIKHTASDINSLVELINSVEGESRIVMEHTGRYYEALAHQLSEANLFVSAINPKLIKDFDNDSLRKVKSDKADAIKIARYALDKWQNLKQYNVMDELRNQLKTMNRQFGFYMKHKTAMKNNLIGILDQTYPGVNTYFDSPARSDGSQKWVDFASTYWHVDCVRKMSLNAFIVHYQNWCKRKKYNFSQSKAEEIYGKAKELVPVLPKDDITKLIIKQAVNQLNSASTTVESLRTLMNETASKLPEYPIVMAMKGVGASLGPQLMAEIGDVSRFTHKGAITAFAGVDPGVNESGSYEQKSVPTSKRGSSDLRKTLFQVMDVLIKTHPQDDPVYQFLDKKRAQGKPYYVYMTAGANKFLRIYYGQVKEYLSSLPES

SEQ ID NO: 332368 - protein, 375 aa, unidentified
MILVEPYLQLGRPPVRYQRTSVGLDVHARSVVGVGVDEVTGEVLRRRLCPAPEEVLGWVRSLPGPVKVVYEAGPTGYGLYRALEAAGVLCVVAAPSKLQRPAGDRVQTDYRDAAHLAKLLRLGEVTEVAVPSVEREAARDLVRAFEHARGDVMRSRHRVSKLLLRQGIVYSGGQPWNGVHDAWLRRQRFEQAPLQAAYESAYEAMAMAVARRERLETAIAVMAADSPYTPVVRRLGCLRPIAEVTGFALAVEIGDWTRFTGSSIGSYVGLVPSEHSSGESRAQGAITKTGNGHVRRLLVESAWHHRKPYRGPGRVLQRRWDKAPAPARARGHAGNRRLHHRWEQFAARRKRTVIADVAVARELAGWCWSLAVIDD

SEQ ID NO: 332369 - protein, 346 aa, unidentified
MIIIGCDFHPSWEQVAWLDTETGETAERRLVHAAGEAGPFYRQWPAPTLIGMESTGNCQWLIDLLTELGHEVWIGEAAQIRATMVRQQKTDRRDAAHLLELLVEGRFPRIWVPSSGERDQRQLLIHRYKLVTLRARVKNELQHLALNQGMQKKRKLWSEAGQKLLRELPLKPWASRRREDLLKVLNMLDKQIKPLDEAAKEAAEKSEMERLLMTQPGVGPITSLAFVLTIGDVKRFARGKQVASYLGLIPREYSSGGRQRLGSISKQGNRFLRMLLVEAAQGAVRYDPGFRQEYLHRCHQKAKGVAKVAAARKLAIRLYWMLRIQTPYPEVVRIESSPRVPLVSKS

SEQ ID NO: 332370 - protein, 348 aa, unidentified
MTEAITETIGCDLGDKRSELCILLPNGNVQRPEAVRTTRKAFTEFFTRPRSHVVIEVGQHSRWVSELIERLGHKVTVANPRNVKLISQGNSKRDTTDAELLARLGRADEELLSPVKHRGSEAQADLAVAKSRDVLVRTRARLVNHVRGLVKSLGERLPSCTAESFHRRTKPDLPAALGPALDPIFSVLERLDEQIRTHDKTLAQIAKKYPDVEVISQPKGVGLLTALVFILTLEDKTRFKKSRTVGAFVGFNPRKDQSGETDKQLSITKAGDGFLRRLAVTSANYILGPFGEDSDLRRWGLELAKRGGKNAKKRAKVAVARKLVVLMHRLWVTGEVYEPLGYKRNEAA

SEQ ID NO: 332371 - protein, 389 aa, unidentified
MGNARMPEPATALNHESTIVAVVELSARSWLVGAQVAGVPRQCRQKLAPSAEELLDHLDHLRQRAEKAGKRVSRVVVAYEAGRDGFWLARWLLGRGIEVYVIQPSSVPVDRRARRAKTDALDVEMLLRTTLAWLRGEPRVCSMVPIPSEVEEDGRRPSRERQDLIKERLAITNKIDGVLATLGVGGYRPLRRDRRERLEALRRPGGGPLPEHAKARLTRLLDRLELVLEQIGVLEEARDAVVARDAVPGGEADSLIRKLAGLKGIGPELATLLAWEAFVRPFRDRRALAAYAGLTGTPFDSGDRRREQGIGKAGNRRLRAALVELAWLWLRYQPDSALAAWFRRRTQAAGGRTRKVMIVALARKLFVALWRFCRDGTIPDGAALKTAPA

SEQ ID NO: 332372 - protein, 348 aa, unidentified
MNDFKYHLGIDLHKKTSYWTLMNQKREVLYKKNLITSKEGIEQGIKEMGIAPALVEAAIEPVSQWGWYGELLEKEGLTVHLVDAYKAKLIGGTKLKNDKMDSVALAELMRSDFLPTAYRAPEATRDRREFMRHRAFLVRLRARIRGRVHQILWKHGEQCPYADLFGLKAQTWLRELVLRSPYKEERAELMDMWAETSRRITAHDLSCKELTGRSPQAQLLMSIPGIGLITSLTILAEVGDFSRFKSGEKLASYAGLVSSSYSSGERTRLGHITHRGSVWLRTALVEATNTVNPKWGHLHNFYLRITEKKGSKVARVALARKMLVLSWHLIKNDAYFKASVGHSDSVKR

SEQ ID NO: 332373 - protein, 342 aa, unidentified
MNIIRIGIDIAKHVFYLHGVDAQGNTALRKKLQRHDLLAFFARLAPCLIAMEACSGSHYWGRELRKQGHDVRLISPQFVVAYRNNQKNDYNDAQAICEAASRANMRFVAIKSEEQQAALMVHRIREQCIAERTSKANQIRGHLHEFGVVVPQGVTKIIALLPSLLDDNNLPALLKSLLRDLLDDIHHINQRVDALDKQIHAFVKANDTANRLMTISGIGPITASALVATTGDPHLFKNSRQFTAWLGLVPKQFSSGGKTRLGGITKSGDGYLRKLLIQGARAVLFRSGTHTDQRSLWITQLRSRKPDNVVATALAAKLARTAWAIMTRDETYQVNHTVMTGA

SEQ ID NO: 332374 - protein, 354 aa, unidentified
MSRILAIDLGKFKSVTCLLDTTTNETEFWTMSTDQPYLKAVLKRYKPDLVVIESCTIAGWVHDVCTAKGHELLICNPNQEAWKWKHIKRKTDRDDALKIAKLAALDQLIPVYMPSERQREYRRLVKYRTVVRARGVRIKNNIRVIFQRRGLAMVSGRTAWSLKRLDHIEKYRKPLCDCRPNELWRGELDLELSELMRLRTQHDEVEKKLRELATEDKRVQLLETIPGVGRRTAEVVVACLDDPRRFKNARQVSSYAGLVPRRYQSGLMDRQGRIHKRGPRLLRTALVEAAWIMQRYNPWAKAVYQRICANQKNRKKKAIIAVARKLLVRCWAMLLHETPWNGATTTTLSEAAPA

SEQ ID NO: 332375 - protein, 369 aa, unidentified
MKNRITFVGLDVHKNSIDVAIADSERDGEVRNYGKIGGDLDSLHKVVRKLQSTGATLRFVYEAGPCGYEIYRSLTKQGFDCIVVAPSLIPKKSGDRIKNDRRDALNLARLHRAGELKAIYVPSETDEAMRDLTRAREDAVKAQRIARQTLLSFLLRHGYRYEGKSNWSQAHFNWLADIKFPHPAQQIAFQEYIHSVKELTERVQRLTGQVQELVATWKLAPMVKVLQALRGVSLIVAATTAAELGDLTRFDSAKLLMAYLGLVPSEHSSGNTVRRGGITKTGNGHVRRVLIEAADAYKHPARETRTLLKRLEGLPEEVRKIAWKAQVRLCSRYRKLMARGKSRNSVVTATARELSAFMWAIACAILPAA

SEQ ID NO: 332376 - protein, 273 aa, unidentified
MENNITIGIDLGDKFHIAVVFDGEGNELETAQVTNKKADFSKFFQRYKHARVAMEAGTHSPWISRLLGEMGLTVYVGNPRKLRFIWDSVDKSDARDARILGMVCRIEPRFLHPLQHRNSQAQADLVSIKSRDMLVKSRTQLINHVRGLVKANGERLPKCGTESFAKKCESLVPPELRSVLDAVFQTLFHLNQQIKALDLQIEQLSIERYPETQYLRQVSGVGPITALCFVLTIEDPARFVKSRQVGPFLGLTPRRDQSGDTDKQLPITKAGNT

SEQ ID NO: 332377 - protein, 372 aa, unidentified
MSEIIMVGCDLHDRSMLLRYATGLGEPQQMTCSNTAEGRERMIKKLLSHRDQHQAAKCVFAYEASGLGFGLADELELSGIECHVLSPTHLPKTPKGAKQKTDVRDAQMLLEQLRGHVLAGNALPTVWTPPHRLRDDRELVRARIDAGEELTRVKLKVLSLLKRRGISLPENYQCKWSKAFVRWLHETAAVLCDETRVVVEQLANRYELYRKEIGSLDKAIRTLSQQPRYKVPHRTLREIPGVGLLVAMAFLTEMGDLLRFENRRQIAAFLGVCPSCRESGEVPDRKGRITRQGPSRLRKLLCQAVWVSLKYCDKARADHERIKQGQAKRSKKATVALMRKLAIRMWHAGVSCGVSTELCGRGGPAQTNASVV

SEQ ID NO: 332378 - protein, 340 aa, unidentified
MGIVGALDLHRSQITYHWQDLATGEVHRGRIVPGAREPLRAWLAGFHGADAHFALEATTGWRFVVEELERAGCTPHLGDPAEISTRRGPKRRAKTDRADCEHMTALLLEARLPECWIPPPDILEARTLSRLRKALVDERREWMQRIQAQLYHQGVMPVTSLGAAGRARLNDAELSPAGRRVLAVGLRALEHIEAELSTLDRDLAILARRQPGCRVLRTLYGVGPVTSVAILTELGDCRWFSSSDHAVRYAGLDVTVYESNDRRASGHLSRQGPGVLRWALYEAAQCAARPASPDHAYFAEVAGRLGHNRACLSMARKLCRRAHHLLRELGDDVFLPARAA

SEQ ID NO: 332379 - protein, 457 aa, unidentified
MRKKNKRTPGMEEAHPFSGMSRIHPNAAGVDIGAIEVVACVAGDENTQIVKAFGNYTVDLHALAQWLKSYAIKTVAMESTGVYWIPLFEELERQGFECLLISSRSLRRVAGRKSDISDAQWIQTLHSYGLLEGSFRPQGDLVALRTLLRHRSQLVEHRSPHIQHMQKSLLQMNVQLSQAVTDVTGLTGLKIIRAILAGEREPQVLATLREPGCKKSAEEIGKALTGTWREEHLFVLNQSVMLYDFYTEQIQACDLEIERLYGLTRPNWDSAEVQPLTKRKKNSHSKNLPHNADEVRKHLKRISGVDLSLVDGFGVSLAQTVIMEVGTDMSKFPDEKHFCSWLGLAPKHEISGGKVLKNNTLKTKNRAGQAFRLAANSVKQAECMFGVFYRRLRARLGPAQATVATAHALARVVYRMLKYKVEYEPLSVHEYQKHYEEQQIKYMRKKAAKFGFQLVPT

SEQ ID NO: 332380 - protein, 412 aa, unidentified
MRVIVERCCGLDVHQETVVACLLIGASGDRPTKEVRTFRTVTRDLEALRDWLAAAGVTHVGMESTGVYWRPVYAVLEGHFDLTVGNARHIRNVPGRKTDVKDAEWIADLVRHGLIAKSFVPPRPLREMRELLRYRRKLTESQAAERNRLLKLLETANIKLASILSDVFGVSGRAMLRALIEGRASVEAIADLARGQLRRKRSDLILALEGRMEEHHRFLLATQLRRLEAIEQDIAALDLRINERLEPYRMPHALLMQIPGVDWLVAAVIIAEIGVDMGVFLSVYHLSAWAGVCPGSHESAGRRNSGRARKGNVHLRTMLVGAAISAARTKGSYLKDKFHRLKARRGAMRAALAIAHKILVSAYHMLAKGLPYRDLGEAYLDQIGQSRTVANLKRRLERLGYHVKLERTAQAA

SEQ ID NO: 332381 - protein, 339 aa, unidentified
MKITTVGLDLAKNVFHVVCFNERNKEVKKRMLRRKQLLEFFTQLAPCQVSMEACAGSHYWGRQLRGFGHDVKLIPPQHVKPYLRGNKNDYNDARAIAEAAARPGMPFVGIKTVEEQDMQAIHRMRSQCMRDRTALCNSIRGLLGEYGIVFPKGVATLRKKIPEILEDADNGLSVLFRNLLARRHEQLVELEAYIAFYTKELEAISQQDDACLRLQTVPGFGPIVASAYRSVIGDGRSYARGRGVAASVGLVPRQHSSGGKHVLLGISKRGDKYLRKQLIHGARSVVLQAASKDDPLSRWINRIRKERGWNKAVVALANKMARMGWAILRHGTTYQAPTI

SEQ ID NO: 332382 - protein, 451 aa, unidentified
MRTQKVSKGKMNKLPKHLQHINPCAAGIDIGSRSHFVAVPEGTSEQAVREFESFTDDLQRMADWLIACGVTTVAMESTGIYWIPVFEILESKGLDVKLVNARHVKNVPGRKSDVLDCQWLQRLHTYGLLEGAFRPPEQICTLRGYVRQRMNLVRYAASHIQHMQKALAQMNLRLANVVTDITGKTGMRIIKAILNGERDPLVLAGMRDQRCKNSQETIARSLHGNYRPEHLFSLKQAVDLYVFYQSQITECDQAILSQLATFDVASGSDNYSGTKPPNLDEALQRMSGVDLTKIDGIDTNSALKIIAEIGVDMSRWKSAKHFASWLGLCPGTKVSGGKVLSSKSKQVANRAAATLRMAAFTLFNSKSALGAYLRRQRSRLGAPKAITATAHKLARLVYAMLMHGTAYVDAGQDYYEERYRNRVIQNMKRKAQELGFEIVQIPGLQQKTTTA

SEQ ID NO: 332383 - protein, 321 aa, unidentified
MDDGTNDLVVVGIDVAKDKVDACIRSLSLGRTFPSTPQGRRQLTSWLRRHKVVKAVMEASGGYERDWARTLREARLEVRIVDPKRVRNFARSAGRLAKNDAIDAEMIAWFAETFVEAPGQDHDAAREKLAQIVAARQGLLDLQTRLQNRDEHAEVGPVHKMHERLLKTIALEVERLETAIAALIKATPRFTELAEIIESVPGLASTTSAGVIAMMPELGQVNDKIAGALLGTAPYDDDSGKRRGERHIKGGRRRIRNIFYMACLGASTQHNPVLKAFYRRLIAKGKEKKVALVACMRKLIVILNIMIARGEKWDASRYAVG

SEQ ID NO: 332384 - protein, 407 aa, unidentified
MKYVGVDLHKKSISICVVVLQGRKRKVVARKRFACPDVEGICRFFRELGAFQVVVEATANYEWFVGLVERLAQRVVLAHPKRLRVIAESKYKTDKIDAWMLAEFLALDMIPEAYRPTPRQREHRVLVRYRYYVQKRTVSVRNKMRHILANYNADVQELFTARGLQYLAKQKVSAADRFVLDRLLEEWREHQRRLKEADQALAAFGQKAPVKEKEARRVLETFPLLGPVTADVVLSEVGEAKRLRSLKRAASFAGLAPGFRESAGRRKEGGITKEGPRLLRWAMIQLAWRLVGRTAYWGGIFVQLERRTGKKKAIVAVARRAFCVIVSMLRSGQGYRTPRGGATAGFRRDGKGVQGEEGRRRQTKKPGVSWPRQEAKTQAAVRVEAKPRKKPRASSRRPRRVAPLAHP

SEQ ID NO: 332385 - protein, 343 aa, unidentified
MELYVGLDVSLKETSICVVDGKGEIVSEGTVISEPAAIAEFIKAKADGAKRIGLETGPTTTWLWHELRAFGLPVICIDARHAKAALSMQINKSDRNDAVGLARIMQCGWYKEVQVKSVSCHEIRAVLNSRAQLVKIKRDLENQIRGLLKNLGLIIGKAGGTVFRRRVEELVGRQGLLWEAVRPLLAVREIVRREIAALHRKLLGLARNDVVSRRLMTVPGIGPINALAFCAAIDDPARFRRSRSVGAYFGLTPRRHASGEIDWTGRISKCGDAMVRTYLFEAAGVLLTRVPHWCALKAWGLRLAKRSGLKKAKVAVARKLAVILHRMWRDGTDFIWSTKEAAA

SEQ ID NO: 332386 - protein, 354 aa, unidentified
MQIHTIGVDLGKTVFHLVGLNLRGEVVVRKKCSRSQLLQFTANVQVDLIGMEACAGAHFLGRALREQGHEVRIIPAQYVKPYVKTNKSDFIDAEAIAEAVGRPTMRFVPVKTDDQLDMQSLHRVRERWVIRRTAVINQIRGLLLERGITLRQGRRHLEAALPGILEDATARLSGALRMLISQLKHELEELANFIGEADGTMERTSRENESCRRLLAVPGIGPVTATALIAAIGNGAAFRKGREFSAWVGMVPRESSTGGKQKLLGISKRGNPYLRKLFIQGARAVMLRGTKQSVGLRTWIENIALRKHHNVAAVALANKMARIAWVVLARGEAYRPSLLIDSECNLNGLRMTPA

SEQ ID NO: 332387 - protein, 433 aa, unidentified
MKHHKRSRARVESVVHQLNYQLLVGIDLGQWLHQACVLDINGKFLAEKGFAHSLDGLSATLDWLLNLAGKQAERIAVAIEKPHGAVVETLLDSGISVFSINPKQVDRFRDRHSMSGAKDDRRDAFVLADALRTDGHRFQRLQLPPPEIIAMRELLKTRDQLIKNHVALSSQIRDLLARCWPHLVSLAPKDKALDSFFCELLQLFFDADTAAERSFQTIRALVKKHHIRRVQPEQILDTLKKTPLRVAPGTTDATSAHLKLLLHQLLLVRQHRRDSDQLLEKWFKQQRSTDEPYTDAAIIASFPGVGAFVLASVLSYAHDPVRLRKLDAFRSLGGIAPVTQKSGKRGQKKPKILMRRARSLPLNNALHHWARVAVLREPHFKQHYDRLRARGHSHARALRGVMDRILAIAVAMLRDQTLYDLARRSTTKQLDSS

SEQ ID NO: 332388 - protein, 418 aa, unidentified
MKYFVGIDVSKEFHVVNVIDEDERRVLKNYKFLNSKDGFDSFKSKLSSLSKDKDSFVLGLEATGVYGENLYDFLSLNGYNIKLLNPFQTSRYRQNYTMKSVKNDNIDSLYIALLLKDDRFSSGYVASEEYMALRVLYRNRSSCLKESKEIQKRILSILTVTFPEFEKFINPFSVSGLTLLKKYPTAAHYKGVSTNTLLKLFRHIKGNNFSKAKAKELLALAKTSVYSGKAKEQRAIALNSLIRLYEKYQEEIDTLDKEIDSLLNSDSLSNEDKATIQEAKQRAESIIKNLHTIPGVSTKTISAILGECGDLSRFPTISKLLGFIGLHPTQDSSGKKESFGHLSKRGNSTVKHALYLSSVSCIRHNSELKKLYNDKRAAGKSKKEALIIVSRKLITIIYSIFKSNKPYNPSRVFSMVRQ

SEQ ID NO: 332389 - protein, 340 aa, unidentified
MHYIGLDIHKKTISYCVKDEGGRVCGEGTIAALRPTLDRWMETLPQPWTAAMEATMFTAWVYDHLLPRAAAVKVAHPLMLRAIAAAKKKNDRVDAGKLADCLRCDFLPEAYMAPIAVRERRRILRYRNLLVRQEVQCKNKIAQMLMEAGVSYTKEKLHYRGYFHQLLATNQEIDDSLRPLLRLTRENLVRLRRTESALLRSLRRDPLLVERVKRLMSIPAVGPITALTWVLELGDVKRFPSIKPVISYCGLCSSEDSSAGIAKRTPISKQRNRHLQTVLVEAAHLAPRLHPDLALLYEKEAQKGNRNRATLAVARKLVAYLLAVDRGERIFVMDHSQAAA

SEQ ID NO: 332390 - protein, 352 aa, unidentified
MSNIKYVGMDVHKAITVIVVLNAAGQVESRTQVKTKAENLRDFFRGLSGRVEVVFEEGTQSSWLYQLLKPLVAAVTVCDPRHNKLIGDGNKSDDDDAETLARLLRMREVKAVYKGDCEQQKLKELCRAYENLVEDTTRAQNRLKAIYRGRGIDCSGTEIYRPDQRATYLARLSDEAARFRAESLLDQIESLKELRKQAKSRFLEQVRKHTDYPILATLPGFGAVRIGLLIAIVITPDRFRTKRQFWPYIGLAVVTHSSADYKEVGGRIVKSQKVSTRGLNWNHNPQLKQVFKGAALSALRHEEIRVYYQRLLDQGTRSALARVSVARKLAAITLAVWQRKEKYDPKKITTLS

SEQ ID NO: 332391 - protein, 457 aa, unidentified
MRKSTQKQPAARKQSSFPLLNPDAAGIDVGAREHYVAVPIERDAQPVRHFGAFTKDLHSLAQWLKQCGIKTVAMESTGVYWIPLYQILESYGFKVKLVNARHVKHVPGRKTDVQDCQWLQQLESFGLLTSSFRPEAQICVLRSYMRQREMLIRDASRYIQQMQKALTQMNLKLQHVISDLSGHTGLRIVRAIVAGEREPGKLAALKDRRIKSDVATIAKALSGDYRAEHLFALKQTLELYDYYQQKIAECDAEILKEMQTLETRGSAGVVLKRKPRSRHNAVSFDSQAELYRIMGVDLTCIDGINESTAQLILSELGLDICQKWPTEAQFTSWLGLCPNNEISGGKLLKRGTRKVVNRVANALRMCAQSLLKSKSALGAYARRMRSRKDTPVAITATAHKLARLIYRTLKYGQEYVDAGSDLYEARYTATLVKSLQRKAKSLGYQLVSYQTLEAVVP

SEQ ID NO: 332392 - protein, 355 aa, unidentified
MNDSKFIGLDVHKTSISAAVLDHDGKLVMQSIFATHAAAVLSFIHGVGGSLRVTFEEGTHSSWLYDLLRPQVSEVLVCNPRKNSLLKSGNKSDQIDARKLAELLRAGLVSPVYHGQTSTVTVKELGRTYTALTEDTTRVMSRLKALYRSQAIATEGKKLYTKRRRQQWLKELTQAGRRYRAERMFEQLDALQGFRRQARRDLFVECRKHAATAILTSIPFLGPIRAALLIARVQTPFRFRGKRQFWAYCGLALETRSSADYRLVEGELHRAKKPVFIRGLNLNHNHDLENIFKAAATTASACPGPFRDYYETLLGRGMKPEMARLTLARKIAAISLIVWKKGERFDPEQLKAQAA

SEQ ID NO: 332393 - protein, 322 aa, unidentified
MSQPNQICVGIDVAKGSLDICVGTGNASFTVINGTDGFEKIINTLKSLSVSLILMEATGGLEAPVAYHLQSEGYEIAVVNPRQARDFCRAMGYLAKTDSIDAKALAQMADVINNHPERERFILALPDNERQVLTALVARRRQLVGMLVAERNRLHTTHPAVMKSVECLICALNGELELIDIEIKEHVQKHFVDLSALLRSVKGVGPTTIASLLADVPELGNLTRREICALVGVAPINRDSGKMRGRRSIFGGRASVRTALYMATLCAVRFNPALKTFYTRLVLAGKPKKVALVASMRKLLTIINAMIKKGEEWDNTFHNLAC

SEQ ID NO: 332394 - protein, 358 aa, unidentified
MVQRKELNFEGQNIYIGIDVHLKTWHVSILTESGCLKKHSQQSSAQALFEHLKKHYPNGNYLSAYEAGFSGFSTYYSLLDFGIECLPVHAADIPTGQYESVMKTDAIDSTKIARALKSGLLRGIYIPKKEVLDDRNVMRLRITLKRQLSGYKSRVKHLLYNNGVIYPECFQNSKSHWSKRYLKWVHEDVQLLSESRNSLDLLLRQVELFRKSLLEITRLVRTLSRNGRYGEAYENIVSIPGIGMITGMCLLTEIGDIHRFRNERQFASYLGLVPTSHSSGEKTSHGEMTFRGNKRLGPLLGESALLAIRQDRALAAAYGEYCKRMLPQEAIIRITRKLSNRILIILKSGKKYEHDRCY

SEQ ID NO: 332395 - protein, 411 aa, unidentified
MRRVIGMDIHRTFAEVVFWEDGKLRPAGRISMTRAGLEGFGRSLNEEDEVVLEATGNAMAVVRVLSPHVARVIVANPLQVKAIAHAHVKTDKIDAGVLASLRAANFLPEIWLPDAETERLRRLVARRNQVVRHRTRIKNEVHSILHAHLIPPCPHADLFGRLGRIWLARQVTPDDERAAIERHLRELDRLGEDLGALDREIAQAAIEDPAVKRLLTVTGVNLIVSAGLVAAIGDVRRFPDPQKLVSYVGLNPRVRQSGLGLAQHGRISKRGRSHARAMLVEAAWAASKAPGPLRAFFLRIRARRGHQIAAVAVARKLAVLCWHLLTKDADYQWARPALVANKLRTMELQAGQPVRKGNKRGPAYAYNIKELRDREIELARHAEQAYERFVCQWQRRGNRKQRTGAASEERH

SEQ ID NO: 332396 - protein, 387 aa, unidentified
MPQLNDLSRSLVALDQDSTIIAVVELSQSSWLVGGVLPGIERQPRKKLEPSPERLLGLLHRWRDEAVRAGKEVTRIALAFEAGRDGFWLARWLEARGVEAHVIHPSSVAVSREHRRAKTDRLDTELLKRGFLGWLRGERGHCTMARVPTIAEEDAKRPNRERECLVAERTRIVNRMKATLARLGVRNFKPTLRKAAERLATIHTPEGMPLPPNVLAELQRDMARLGFVVSQIRDIEKARQKRLEQEPETGSHAMVRQLARVVGVGIETADMLVHEVLSRPMRDRKAVARYAGLTGSPDESGAKRREQGLARAGNARVRRGMVQLAWRFLLFQKESALALWYRARTADSRVGPRKTMMVALARKLLIALWRFVTTGEALEGVILRPAG

SEQ ID NO: 332397 - protein, 443 aa, unidentified
MKRKRRTHLRGQRGQAFADQIRGIIPEQILCVSIDVSKDFHVVLLHNGLGEIVTPSFEIDIFRSGFEQFCQAVDEAVADTKAQVTLVGMEPTGHYYENLARHIKETGQKVTIINSFAVKENRRQQMMAHEKDDDIDAAAIGDLLRRGEGSPFRPTTGIYLQLQQLDRARLGEVKVQTMYKNRIIGHLDRIFPGLILTKAAAKERYQPLFTTDFWQCQTLQDLVRICPDPRALAAMSPPVLRAAFHEHGCRMGPATAQRIITYAQKVLWPDQEVVTIRRQLLATDLRTLDDIAARIAGYNEQLQQLLAQTPYQFLIRVKGLTPTRVASLAAAIGDPANYAFAGQVFRRSGLVSGRDDSGARQRQGQGKSVTKTGDVYLRRALNDMLNGLLLHQPLLCAYYHRLKQTKPVGVARVATIRRATGILWATVRDQRADTLVLRGDEMT

SEQ ID NO: 332398 - protein, 355 aa, unidentified
MDNAKYIGMDVHKETISIAVLDSAGKLVMESVIETKAITIVQFIRGLRGELHVTLEEGTWAAWLYDLLKPYVHEVLVCDPRKNALLKAGNKSDQIDARKLAELLYLNRLTTVYHGEHGVRALKELSRSYVTISGDAARVMTRLKAVYRSWAIPCAGKQVYAPRYRAEWLGKIREAGVRRRAEFYYQQLDELRSLRQQVRRELLAESAKHQASKLLCQIPSIGPIRAAQLIAILQTPNRFRSKRQLWAYGGLAIETHSSADHRYVDGQLRASKRPVSLRGLNRNHNHELKNIFKGAAIIAATKAGPFQEFYAALVAKGIRPEMARLTLARKIAAITLIVWKKGVSFDAQHLKPQTA

SEQ ID NO: 332399 - protein, 405 aa, unidentified
MSVHHGAPVTSSTIVVAVDVGKCSAALSVTDAARRRVLGPVGFGMTRFGLAAVVERIGAVVGPSTQVKVGVEAAGHYHRPVLDYRWPAGWELLELNPAHIAEQRRVQGRRRVKTDAIDLEAITELVLAGRGQVITDREVGIGELAAWATHRSRRVATRSATKNQLLGQLDRAFPGLTLALLDVLGTKIGRLIAAEFADPARLAALGVTRLIRFAAARDIQLRRPVAERLVSAAADALPTRDGVVARRVLAADLALLADLDTQIESAEGELATLLPFSPYATLTSVPGWGVVRVSNYAAAVGDPDRWPGPRQIYRAAGLSPMQYESAGKRRDGAISREGSVALRRALIDLGIGLWHTESAAKSYAAGLKSRGKPGGIIACALAHRATRIAYALARDHASYDPSRWS

SEQ ID NO: 332400 - protein, 350 aa, unidentified
MNRTTYGLDIAKSVMQLHWVDGETGEIGRKKLARGGLVDFFARLQPVRVVMEACASAHHRARVLGALGHQVELLPARQVRPFVRSNKDDAADARAIWVAAQQKDIRRVPIKNVEQQAVMSLRHTRQHWVSVRTATINALHGLLYEFGVILPGGKQARLKALRAHRAEIDAKVPAAVQRLIDGQVATLKDIEQRIEQLEAEITVQQKQLDKAIELRRVPGIGVLGATALAATLGDGHAWKSGREFSASLGLVPAHSGAGGKARIGHLSKRGEPYLRTLLIHGARAVIVHAKHKPEWLEQLLARRPPDVAVVALANKMARTAWALVAHGRDYEREWKSTPPPKGCVAQAAAA

SEQ ID NO: 332401 - protein, 320 aa, unidentified
MDDSAVFVGIDVAKAHLDVARRPAGDLWRVANDDAGIAQLVRELEQQPPTLVVVEATGGLEVPVAAALAAARIPVAVINPRQARDFARAVGQLAKTDALDAQLLARFAEVVRPTPRPLPDAQAQHLSALLARRCQLIAMLVAEQQRLPTTLAAIRPRVERHLAWLRDEREAVDRELQQLLRASPVWREREKRLRSVPGFGPVVATTLVAELPELPELGTLNRKQIAALVGVAPFNCESGIRRGRRIIWGGRARVRAALYMGTLVAVRHNPIIQPFYERLLAAGKPKKVALTAAMHKLLLILNAMLRQRVSWQPPAQAAAA

SEQ ID NO: 332402 - protein, 343 aa, unidentified
MQVTTVGLDLAKRIFQVHGVDAAGKVVIRRRLQRSEIAAFFADLPACLVGIEACATAHHWARLIGASGHQVRLIPPSYVKPYVRRSKTDAADAEAICEAVGRPSMRFVPVKSAHQQAALLHHRARDLLVRQRTMLINAIRGHLGEFGIIAPAGRHRVADLVNLLQGADDAEVPALAREALQSLFAELSALEIRIKVVEAVIMREHRSNAVSRRLTTIPGIGPITASALAGTIADPFAFKSGRELAAWIGLVPRQHSSGGKQKMGRVSKQGDRYLRRLLTVGATAVMRRLPGKTDGLSLWVRALLDRRPFRLVSLALANKMARIAWAIMVRPETYKASAMTAAA

SEQ ID NO: 332403 - protein, 401 aa, unidentified
MFCGLDVARENHHAVALNTAGRRLADAPLRNDETALRALFTSLSEHGPVLVIVDQPASIGALAVEVARSMGLDVAYLPGLVMRRLADLHPGEAKTDARDGYVIADAARTLPHTLRRVGPDDETVIALGVLAGYDADLAAEATRLTNRLHDALLHVHPALERLLGRHLRRGGVLDLLAEAGTPQQLQAVGKEGMAAVMAKRSPQLAKTLPTRILAALAEQSVVIAGTAQYGRVISGLAASLRTVLDTRAELAAELEDLLEAHPLAPVLTSMPGVGVRTAIQLLLTLGDGSAFRTAAHLASYAGLAPVTRKSGRSIRGEHPARRGNRDLKRVLYLSAFASLRDPASRAYYDRKRREGKHHVAAVLCLARRRCDVLHAMIRTGQPYRRPTPDPAVTPPAGLAAA

SEQ ID NO: 332404 - protein, 353 aa, unidentified
MNSLTDLREVVDVVIGVDTHVHTHSAAVVDAATGGVLDEITVEATAEGYAELVEFANNHAMLRAWAIEGTGGHGAGLSRTLLESSEIVIELDRPKRAARRNGAKSDPLDAIRAAREAMARPRLGTPRTGGERQALSVLLAARRSAINASTEAQQQVFSLVIAAPEPIRVRFRGQKLAAMLNTAANLRVHASWDTETTSTVVALRTLARRAHAMLKEARELQKALLDIIRSWRPDLLEEFGVGPIGAATVLCAWSHPGRVHSEAAFAMLAGVAPIPANSGQVTTRYRLNRYGDRNLNNALHTVVQSRIQYQPATRDYVARRTAEGKTSREIKRCLARYVAGDLYRQLENGATAA

SEQ ID NO: 332405 - protein, 358 aa, unidentified
MVDKVTEAAVVGGVDTHKDLHVAAVVDQNNKVLGTQYFSTTRQGYRQMLAWMTSFGALKRIGVACTGTYGSGLLRYLQNAGLDVLEVTAPDRMERRKRGKSDTIDAECAAHAAFSGIRTVTPKTRNGMIESLRVLKTCRKTAISARRVALQIIHSNIISAPDELREQLRNMTRMQLIRTLGSWRPDASEYRNVTNVYRISLKSLARRYLELHDEIADLDVMIAAIVDELAPELIKRNAIGYESASQLLITAGDNPQRLRSESGFAALCGVSPVPVSSGKTNRYRLNRGGDRAANSALHIIAIGRLRTDAKTKEYVARRVAEGHTKMEAIRCLKRYISREVYTLLRNQNRRINSIPITA

SEQ ID NO: 332406 - protein, 366 aa, unidentified
MKKISTVATNRNEIFKDHKLTIGLDLGDRSSHYCILNEAGEVILEHSFSTTAKGIHQVFDGIPRSRIALETGTHSPWVSRQLIQMGHEAIVAHARNVRLIGESSRKDDQLDARTLARLARIDPGLLGPVRHRSAKAQIHLTVIRARAVLVSARTALVNAARGLTKSYGERLRKCGTGQMNREIAKGLSQELRDVLGPLFGEIESLNERIAEYDRRIEQIAKEVYPQVALLKQVKGVGTLIALTYVLTLDDPHRFRRSRDAGCFVGLRPGRRNSGMSEPQMHISKEGDRYLRTLMVQGAHYILGPFGQDSDLRRWGLRLAERGGKNAKKRAVIAVARKLAVLLHKLWVSGEVYEPLRNNHKVVSAVA

SEQ ID NO: 332407 - protein, 386 aa, unidentified
MKKVSTVAAKQIRNFSKQKLTIGLDLGDRSSWYCVLDEQGEVVLEQKLGTTPKAMKEGFGGMPLSRIALETGMHSPWVSRALSELGHEVIVAHARNVRLIGESRKKDDRLDAQTLARLARIDPQLLSPVKHRSAKAQADLTVIRARAGLVRARTALVNTARGLAKSYGERLRGCNVRNMNPEKAEALSPELQKALEPLLAGIESLSERIREYNEGIEQLAQQSYPQVALLKQVKGVGTLIALTFLLTLEDAHRFRKSRDVGCYLGLQPGRRNSGQSEPQMHISKEGDPYLRTLLVQGAHHILGPFGADSDLRRWGLRLAERGGKSGKRRAIIAVARKLAVLLHRLWVSGEVYEPLRKQQPESDADGRIKPNHSWKGKAKSPNAEFR

SEQ ID NO: 332408 - protein, 410 aa, unidentified
MIHVGVDIAKLAHWMAAIDDQGVVMLKPVRITQDAEGYRLLANTLRSLGEPDAMVIGLEATGHYWMLMAEEMTRLGYQVRVFNPILSGSATRMTVRGRKSDADDALLIAKVVRDGNFVAMPLPSTEQLRAKQLSRYRQKTVARSANAKKRMQKCLDLVFPEFTTLFSDECCVSALALLSIMPSARLMKDAKSNALAKTLVKCSRGHLNGERIQDIITSAKASIAATRVDEATEMAIRMTVAEITLLQEQIDAYDKELGALNIPGKELLESIPGIGPVLAVVILAEIVTIQRFTTADPRRQLRNRSRGRNGFHRLLAFAGLDARVCESGEWRGTRRMSKRGSVYLRTALYRAAFKAKNHESFKAIWEHHKVYMKQPGKVASSHIARKVLQAVYGVLSRNVPFDPVAFKGVA

SEQ ID NO: 332409 - protein, 315 aa, unidentified
MTATIAQTVGIDISKHALDVYLHPQATTRQFPNTTAGIADFLSWLGQGPIDRVIFEPTGAYHHRLERQLGNAGVPMIKVNPLQARRFAEAIGQRAKTDAVDAAMLARFGALDALQVRPMVSHTLSEMKELLVARRGLVKDRVAASNRNHVHRAPLLKRLADQRLRQVERQIAAIDAALRALCRADAELKARLDILVSIPAIGEATALTMLIEMPELGTIDNKCVASLAGLAPIARDSGQHNGKRYIRGGRAHLRQALYMPALVAIRFNADMKAKYQALIAVGKPPKVAITAIMRKLAILANALLRGQRNWTPRPA

SEQ ID NO: 332410 - protein, 546 aa, unidentified
MTYGVDPTASGGKYPDSPVVLPHRSPSYSMGPGAATKTLVTPSCEGDPVLGDCTLFTARTNRLPSKGNDMRENKYTKKRSKNKHKDPSSSGSSVLLHPDAAGADIHPTVIYIAVPPGRDTRNVRKFSTFTRDLLAAVEWLKQCRVDTVAMESTGVYWIPFYQILNDHGFQVCLVNARHVKNVPGRKTDVTDAQWLQYLHSVGLLRGSFRPPQEICALRSISRHRESLLQMGAVHIQHMQKALDQMNLHLHHVIDDITGVTGLAIIEAILAGERDLKRLAELRHYRIQSSESTIMKALEGDYRREHLFVLRQSLTSWKHIQQQIAECDGELESLTRQLEAKFNRDPVLLAPSPRKKVSKNQPKGEWQQLLAQAFGVDLTAVPSLNTTTVQTFFMELGTDWSCFPTSGHFSSWLNLCPDLELSNGKVVRRHRRITQKRLRCALRMAALSLHRSQSPLGAEFRRRKAQLGPAGAITAMAHKIARIMWHMVTHKTPYDEAVFFAAEKKHQQRQQKNLIKRIESMGYRVTPAQHPGFGATTASPSAPAQVP

SEQ ID NO: 332411 - protein, 343 aa, unidentified
MEHFAGLDVSVKETSICIVDDTGRIVREVKVASEPEALLAVLKSSTYRFKRIGLEAGPLSQWLFSALAEAGLSVICVETRHMRAVLKAQINKTDRNDARGIAQMMRAGLYRPVHVKTLRSQKLRMLLTHRKLLQSKAIAVENDLRGTLRNFGLKVGIVGKLKFEARIKELIENLPDLAVLVEPLLVVRRVLREQLGILHRRVLAIVQDDEVCRRLMTTPGVGPVVALTFRATVDVPARFRNSKTVGAVLGLTPSRYQSGEINRTGAISKCGDEMMRVMLYEAAQSMLVRSAKWSWLKAWAMQIARRRGMKKAIVALARRLAVIMHRIWVDGAEFRWSKNAVAA

SEQ ID NO: 332412 - protein, 402 aa, unidentified
MIFINCLGIDIGKSQSLLAHYKDEVLVKEMVIQNNQNGYRYLKNYIKHLDSLFILFESTGIYSRGMKRFCEIHKIDYLEMNPLEAKFKTSSLRSWKTDKSDAHKLALLAFRMKDSKVQRQSEEIYFELRERARFHLEMEINQNRLKVELVETLHQTFPGLEKLFTNRYSKIALNIAKAFPHPDFVSTLTHDELVEKVLHSTDKGISVNKAHKYVQKLIEIKNNSFPNVDKSSFLLQKVQYLCDKLLIGIEEMKEFDQEMIDLAKNTTEFENIISIPGIGELTAALLIGELGNIREFKTNKQLNAFVGIDIKRYQSGTSKSRDTINKRGNKKARRLLYLIIMNIIRGRNHYQSHIVDYYYKLREQPHGKTHKTAVIASINRLLKTIHYLIVNNKLYDYQKSPH

SEQ ID NO: 332413 - protein, 343 aa, unidentified
MEKISTIGLDIAKNVFQVHGIDEDGTVVVRRQVNRKQLVAFFSRLQPCLVGMEACATAHHWARELVKLGHEVKLMPPRYVKPYVKRNKNDMADAEAICEAVTRPTMRFVAIKTAEHQSVLMLHKTRQLLIRQQTMLINAIRAHLAEFGIIAGTGRTGVEKLLAIIKAGEDDRIPAAARECLVVLYDQLGLVKHHILDADRRIMVAHRSNELSRRLADIPGVGPLIATALATSVPDPRTFRSGRDLAAWIGLVPKQNSTGGKERLGHISKAGNRYLRTMLVVGALSVIRRARQLGYTRRPWLARLLERRSTKVAAVALANKIARIAWAMMAHGTYYQEPDAQTA

SEQ ID NO: 332414 - protein, 316 aa, unidentified
MSKTERAVGIDVSKGLLDVAVLPEGESWSATNDEEGITQVVKRLKSLRPRLVVLEATGGMETAFVGAAATARLPVVVVNPRQVRDFAKSVGALAKTDAIDARVLARFAEAVRPEVRPLKDKEASQLSALIARRRQLVEMLTSEKNRLGSAPEAIHPSLEEHIEWLEQRLTDINGKLRKAIKKSPVWRAKEQLLRTAPGVGAVLSATLVAGLPELGALNRKRIAALVGVAPFNRDSGKYRGKRCIWGGRGSIRAVLYMATLAATRFNPAIRAFYLRLCAAGKEKKVALTACMRKLLTILNAMVKTGTPWQPRCEQTT

SEQ ID NO: 332415 - protein, 367 aa, unidentified
MKKNSTVKQSPKRAKVLARGPITIGVDLGDKSSRYCVLDENGQVQAEGSVATTKKGMAGKFGCLKRCRMVMEVGTHSPWLSRLLSSLGHEVIVANARQVQLISASSRKDDRMDAQTLARLARVDPQLLRPIRHRGEKAQQDLLLIRVRAALVEARTSLVNSARGLAKAMGERLPSCDTDSLGVERLEPLPERLRAQLQPLLRQVESLTKEIQEADRKVEQIARTEYPETQLLRQVSGVGPLIALTFLLTLEDRDRFEKSRDVGCYVGLRPKRSESGESQPQLRITKEGDIYLRKLLVQGAHCILSRRGPDTDLKRWGLRLAERGGKNAKKRAVVAVARKLAVLLHRLWVTAEVYEPLRNSAAKKAAA

SEQ ID NO: 332416 - protein, 415 aa, unidentified
MKEGVTLNNTLFVGIDVAKLTNHVYCLNLNRDKLLSINIPNTQDGANQIETHLLKLLEKHKLTKVIVILESTGIYSAHIATYLSASKYLSLFDIKVYIINPKISRNYRRSFADMDKTDPKDAYVLADIARVGRCDELTPFKGSQRLALERLTRHRLHIAEKLSNEKSYALNNVFLKFSNFETLFSNNFGTTAVDFLLEYKSIDDIINSSLEDLADFIAKSSKNRFDSSTDVAVKIQKAARASYRLDKTTYDPINFSLASSINVIRCYQNELKSIDKAIANQVAGFNHNHYKILTSIPGIGKVYAAGILAEIADINQFDSHSALAKYAGITWRKNQSGKYTSDDTHMTKTGNKYLRYFLIQAANMARMNIPEYRDFYHKKFNEVTTHQHKRALALTARKLIRLIYGLLSTNRLYKL

SEQ ID NO: 332417 - protein, 407 aa, unidentified
MELLVSILKRVIGLDVHQAQITACAIIEEPDGTVRVEQRQFGAFKRDRRELAKWCASFAPDEVVMESTGIYWKSPYAALEAAGILAKVVNARHVKNVPGRKTDVGDAQWLATLARAGLLRNSFVPSSKMRELRLISRQRQKLVGILSSEKNRLHKVLTDGGIRLGVVVSDLHGQSARAMVKAIVDGQSPHEVLKLASKRLKASREELFDALQGELTDSHRFVLDELMRHIEEIEARIGRFDKRLLEGLASEQNALILLQTLPGVDLIGAAMLLVEIGTDMAAFGNADRLASWVGICPGNNESAGKRKSGRVRKGNLYVRRLLCEFAHAASRTKSAFKSKFEALIVRRGHKRSIVALAHKLLRTIFFMLDRGEYYRDSATDYEALSVQRNAARWIKKLISFGFIPKPA

SEQ ID NO: 332418 - protein, 416 aa, unidentified
MKLFIGLDVSSQKLDTCFLTDSKEILFEGSLSNDLIGAGEIKQRILEYQETFGFCQIVIGMESTSVYSFHPAMFFYLDEDLKLLPVEVTVENPYRIKQYSRMFDQDKTDKIDAQIIADYLRVDLHTLSPIKEEVYIGLQRLTRSRYQLVTQMVEAKQHFLENLTYKCNTLSKELANEDNKTSVFGATIMNLLTEDITLDEFSEMPLEAAAELLQKLGKGRFKNPEQLVKSIQKAVRSSYRLGKVTKNSIDLVLGIIANEIKFLKKQIKEIEKAIIALLETIPEAQCLLSVPGLGPVYTAGLIAEIGQIERFDDQSKLAKYAGLTWTKNQSGNSQSENTPLNRSGNRYFRYYLIEATNRVRSTLPEFKEYYQKKKNEVPKHKHKRALVLTGRKFVRLIDALLRNGQFYQQTKVVIEK

SEQ ID NO: 332419 - protein, 402 aa, unidentified
MTVKVGIDVAKQFHWVVIVVAETGKILTSQRTDNDPDSIEELITQLRQAQTDHGDLTAAIDLMGGVATLLTSMLLDAGIRLVHVPGLVVNRARRASKGGETKSDPRDAAAIAEQLRLRDDWREVILDDELTLDLRMLVSRRRELVVDQTRRLARLRETLASFVPGLERAVDVTNLADLRLLARYSTPAEIRRAGRRRITEHLLHAGVRRSYAESLVDKALTAADTQRVVVPGETRLAGFTREFATEAITVRRRVSELDSEITRDLDRHPDAALVRSLPGMGATLTAEFLAEAGDLARFASADELASAAGLAPVLQQSGKMRYLRRASAGNKRLTFIFYQSAFCAIGTDPVSQAFYRRKRAEGKRHHQALIALARRRVNVLFALVQHRELYRAGYPAGAATAA

SEQ ID NO: 332420 - protein, 334 aa, unidentified
MQNITLIGIDLGKHSFHIHCQDKSGKVLLRKKFTRTKLIEFLAGCASSTVVMEACAGAHFMARRIADLGHEAKLISPQFVRPFVKSNKNDFVDAEAICEAASRPSMRFVQPRTEAQQAMRALHRVRESLVSDKVKTTNQMHAFLLEFGISMPTGVAVVKRLSTVLAENELPPYLAQLLMRLHAHYIYLVGQITELEIALEQELSRDETGQRLQTIPGIGPITASVLSSQLGDGKQYSCSRDFAASTGLVPRQYSTGGKNTLLGISKRGDKNLRRLLVQCARSFIQRIENQSGRLADWVRALLARKHSSVVCCALANKLARIAWAITTQQTVFER

SEQ ID NO: 332421 - protein, 415 aa, unidentified
METIHQRVAGLDIHKKNIVVCLRKTSSDGSVEEEIRTFATMTDDLLALGDWLSGQQATHVAMESTGVLWKPIWNILEGYDFQLQLVNARELKQVPGRKSDVRDCQWIAHLLACGLLRSSFVPERGQRQLRDLTRHRAQLQGEHTRCANRIHKVLEDANIKLSSVATDILGKSGRDILAALAAGHDDPAAMAELARGKLRKKIPELKRSLKGHVMEHHQFMLEQLLDHLALLEEQISRFDDRIAEVLRAFLDEETFQRLDQIPGVNRVTIENVVAEIGADMAQFPSAEHLASWAGLSPGNEESAGKRKRSRTTKGNVWLRRALCEAAWAAGRSKDTYFSAEFRRLAGRRGKKRAIIAVAHSLLVVFYYMLKNKPMEYRELGGNYFDMLDPIRLRRHLVKRLESLGYDVTLAERKAA

SEQ ID NO: 332422 - protein, 346 aa, unidentified
MIAIGSDVHKGRCVFAMMGEEGKVKMLEPIECTREAWLKRLGELPPEAEIALEVSTSGYFVMSVLEEAGWLKRAHWVHTAGIDSLRKQKTDRLDARRLARKLAANTADPMPEAWFPPAPIRQLRMLARQRCRIARLRVLTKNRVNSLLQMHGLRPEKSPISAAGRDWIRQQALPAPVEQCFEQLFRLYDFLHSERETSEQNLAAHAALFPEVKLLRTIPGIGHILAAIIWGEVGTLERFPCAAALVNTTGMVSSLYESGEVSIQGHITRQGSAWLRWALITAANCVTRSKSPLGQRYWSLRRAHKKPNVAKTAVACSVARCVYGVLKHGEPFQAERWGRRSGKLEP

SEQ ID NO: 332423 - protein, 340 aa, unidentified
MKIIGCDFHPSFQQIAMVDTETGEQTERRIAREEAGEFYRGLSGSVRVGMEASGNTLWLERLLGELGHELWLGDAGRIRAMEVRKQKTDRRDAELLLRLMIQDRFPRLWIPSQEQRDLRQLLVHRHKLVGMRRQVKNQLQHLALNQGVQQKHKLWTRAGRKLLEELPLEGWTGRRREESLQLLDDLEGRIVPLDQAVKQAAEKDRVAELLQTHPGVGPITALAYAVTLGEIERFQHSRQVVSYLGLNPSEHSSGGRQRLGGISKQGNTMVRSLLVEAGQSAARLDTELKRAYQRLKHRKHSAVAKVMVARKLAVRLYWMWKREQPYAATRMQGSPSHPVA

SEQ ID NO: 332424 - protein, 395 aa, unidentified
MPDLWAGVDIGKRHHHCVVLNADGERLLSRRVGNDETELLQLVGDVLDISSEDVLWAIDMNHGLAALLIGVLLNHGQPIAYLTGRTIHQASATYRGGGKTDARDAFVIADQARIRRDLSLLRPGDEIAVALRILTARRLDVVRDRTRQINRLRAQLLEFFPALERALDLTNQGPITLLTGYQTPSAIRRMGAKRLEAWLKNRKVVGAAALASKAVTAAQGQHTTLPGEKLAAEFVGRLAHAVRTYNAEVDELDARIAARFSQHRDAEVIVSMPGLGPILGAEFIAATGGDLTVFESPDRLAGFAGLAPVAWDSGTVSGNLHRPRRYHRGLQRALFLSALMSIRFCPASRAYYDRKRKEGKGHKQAVLCLARRRTNVLWAMIRDRAPYRGAPPTPS

SEQ ID NO: 332425 - protein, 359 aa, unidentified
MLYLGIDQHARQITISLRDENGDVLQARQVSTQPEKINAYFQRLTRERLRNGESFVAVLEVCGFNDWLIRMLRDYRCHKVILIQPDDRKKRKTDRRDAAALSELLWVNRDRLLHGKPVRGLRQVDIASTPDQENRRLTTLRKDAGGDLTRVINKIKQILRRHNLQWEMPTKTFPTKSAIAWLKQLVLPEIDHLEMNHLLAALEQVEQRMKELEKVIAQRYDTSKQAAILSSMPGMGGGFTAVSLACRVGRVERFPRAHSLANYWGLTPGCRNSGENNKRLGSITKAGSSTARWLLAQLVYKVLRKDARLREWFKRIKRRRGSTIARVAVMRKLATIIWHMLSKGKTYAECRELAAAGKP

SEQ ID NO: 332426 - protein, 428 aa, unidentified
MNKIESTGTEEYAALIGLDWASEKHDIWLWDLATGKSRHRVIEHKPEALADWLSELQSQYPGQRVAVCLEQSRGALIYALMGHAFLDLYPINPVTLAKYREAFTPSRAKDDPSDAKLLAEILRLHRDKLAVWKPDDEQTRLLGFLNEERRKAVNLRTKLVLRLQAALKLYYPQAIQWAGVDLFTPIACDWLLKWPTLETIQRARPQTIRAFYYAHNGRRPDMVEDMIAAIAAAKPLTRDGAVIEANRLTVLMLARQLRALHGSIVEYEEQIAALFKQHPDAFLFENLPGAGPTLAPRLLSAFGVDRTRHPTALEMQTYSGIAPVIERSGKSCWTHWRWNCPKFLRQTFHEFAKSSIIHSAWAHAYYDLQKSRGKGHNAAIRALAFKWIRIIHRCWQTRTPYDEGHYLQALERRGSPLVALIAAPTRVA

SEQ ID NO: 332427 - protein, 335 aa, unidentified
MSHYCGIDLHSNNHVVVVIDEQDKRVFEKRISNDLSLTLKVLSPYQASLQGIAVESTFNWYWLVDGLQEQGYDVSLVNTAAVKQYDGLKYSADHHDAFHLAHLLRLGILPTGYIYPKEQRAIRDLLRRRLLLVRAASTQLVCVQSQIWRSTGLRIKSDELRKADFVSPDIDNYTRQAVTAGLAVYQCIQQQIDGLENTAHQAVKLTDAFKILQTVTGIGKILGLTIMLETGPIERFAGPGNFASYCRCVDSTRMSNGKKKGAGNARAGNKYLSWAFSEAAHFAVRFEPLAQRFYERKKAKTNGIIAIRAVARKLARATWMMLKHQVPYDARLMFP

SEQ ID NO: 332428 - protein, 344 aa, unidentified
MEHYAGLDVSLEQTSVCVVDARGQVVREEKVASEPEALVRSLCAHEPGIIRVGLEAGPLSQWLHAGLVSAGLEVVLLETRHVKAALSAMTVKTDRRDARGIAQLLRLGWYRPVHAKSASAQEVRAVLTGRKLIQGKLLDIENGIRGVLRGFGLKVGPISRGRFEARIRDLVEGQAMLETVVGSMLAARTALQAEFARLHRALLALVRADPVCRQLMSVPGVGAVVAITFRSGVDDPARFRRSRDVGPHFGLTPRKYQSGERDVTGSISKVGDRMVRTALYEAASVMLTRTGRMSPLKSWAMGVARRRGTRKARVALARKLGVVLHRMWVDGTSFRWTSETTARA

SEQ ID NO: 332429 - protein, 425 aa, unidentified
MKNNILSTLFIGIDVSSKTNVLCALDFQGNKLLNLKASNNNPGAESMSKSILDCLNANNLKYAVIALKSTSIYSIHVANFLSSHEDLALFEPKVYCLNPKTISNYRKSFVDIDKTDPLDAYIIADFARCGRITSSPWRGSQFLALQRLTRHRLHLVECITREKTYMVSNIYLKFSQLAVLDKEDKPFFNNYGATSAAILTEFLSLDDITYSPIEDLVDFVKKKGKNRFSDPEATAKLLQKAASDSYRLDKVLYEPLNISIASSFNLIKAFENEIKAIDKAIEKNIKGINTTEYQSLISIPGIGAVLASGILSEIGSINAFDSHDALAKYAGLTWRVNQSGDYTAEDTSMTKTGNKYLRYYLIEAANSVKNYLPEYKEYYNKKFGEVTTHQHKRALALTSRKLVRLIFGLLTKNQIYSRNKVGEIQ

SEQ ID NO: 332430 - protein, 414 aa, unidentified
MDVVHPRCAGVDISKRDAKVCVRIASSGRAKAKSTVTTWGAVTNQVLALRDHLVDEQVTLVVMEATSDYWKPFYYLLEDGPFEVMLVNARHVKNLPGRKTDVSDAAWLAQLGAHGLVRGSFVPPEPIRQLRDLTRTRTTLVRARAKEIQRLEKLLEDAGIKLSSVASDITGVSGRAMLEALIDGQHDPEVLADLAKRRLRSKIPALTEALTGRFNEHHGFLAQLHLDLIDNHTRAIDEVTGRIEVVVEPFRHVRDLLVTIPGISTLVADVIIAETGGDMSRFPTAGHLASWAGTCPGSNESAGRIKSTQTRPGNPYLKGALGIAAMSAARSKDTYLAVKFRRIASRRGPIKAIVALEHAMLIAIWHMITDGIPYSDPGGDYFTRLNPDKAKHRALDQLHKMGYSVTLEPLAVAG

SEQ ID NO: 332431 - protein, 357 aa, unidentified
MKIVGCDLHARQQTIAMVDSESGDFTEKTISHEGNAVREFYAALAGPVVVGIEATGSMQWFLELLEELGIECRVGHPAKIRAKETRKQKHDRRDARLMLDLLIENRFAEIWMPSTAERDLRTLLRDRHQWVRMGTRLQHTLQAIALNHALRKGHALWSAAGQTALEALSLPAYTGQRRTELLSLYMQLQKRIQELDKEVEAQAQPRPQARRLLTHPGVGPVTALATEVFLGDPSRFTTGNQVASYIGMIPCEHTSGKRQRLGKLTKQGNSLLRYLWTEATMHAVGKDPELKRFYRRKLIQKGMGKARIAAARKLGIRLWIMVRDQIDYEEFCRRGKLRQSGEAQAGMPDFNSGPALQ

SEQ ID NO: 332432 - protein, 375 aa, unidentified
MNDHSEAFVAFDTSKLRNAVAVAESGRAGEVRFLGEIENNAAATAKLVKKLAAKYPRLTFCYEAGPTGYGLYWQITKLEHECIVAAPSLIPKKPGDRVKTNRRDAVSLSKLLRAGELTAVWVPDRRHEAMRDLTRARDTAVTELRRTRQRISAFLLRQGLHYPDNKKTWSKAHLDWLMIQQLEYPEQRLVFEELLLAERQGRECLERLEQAIRNAVPDWSLAAVVTGLMAMRGLDLTSASTFLAEIGDLSRFQTPRELMAYLGLVPSEDSTGDTIKRGPITKTGNWRARRTLVECSWSYQHPPRVGRAKQQKVEAAPPAVRRIAWKAQCRLSGRYRALVRRGKRKTVAVTAVARELAGFIWAVSREITTARAATR

SEQ ID NO: 332433 - protein, 456 aa, unidentified
MKTSESSRQQLEGLPVLRRNVAGIDLGSEQHWVCAPTLDGNGRERASFGATTPELIGMAEWLKARQVESVAMESTGVYWIAPHEVLEAQGLQLLLVDTRQLARVPGRDKKTDPTDCEWIQRLHSCGLLRGSFRPEEAVCMLRTLVRDKANLVAESGDWLRRMQKSLDQMNVRVHRAVSDIDGVTGMAILRAIVGGERDAQKLAKLRDQRCSKTEQEIAEQLSGHWREDHLFSLQQALKMYDAVQERIAAYEKEILQRLGEMERDEQRGQTAPPLQNTTKAKTIKKRGQEPMRQALYRMSGVDATHIDAIGVETLEVVLSEYGPDLSRFPTEKQFVSHATLSPHVPTSGGKRVRKRKRNSASTRVAAALRMGALSLRHSQTALGAYYRKMAQRLGGDIAVFATARKLATLIYRLLRWGQPYVDEGAKAYETRYRQQRIGRLAATAKELGYQLAPISA

SEQ ID NO: 332434 - protein, 337 aa, unidentified
MIVIGVDVHKQSLTAVAVDEAGRALAEVTVAAAPELLGWSASLARERLWALEDCRQLTRALERTLVAAGEGLVRVPPKLMAPQRRAGRTRGKSDPIDALAVARAALREPRLDHPRPGEQRLRELKLLVDHRDDLIDERRRAQQRLRWHLHELDPEWAVPLAALERGVWLDRLGRRLARLEQTAQVRIARELVGRCRSLTRMILELDRELQTAAAQTAPALLALPGCGAISASKLLGEIGPIERFESDAQLARHAGVAPLEASSGKHRRHRLDRGGNRQLNCALHRIAVTQARVHPPARAYLERKQAEGKSRREAIRCLKRQLARTVYTTLKNAPLLT

SEQ ID NO: 332435 - protein, 343 aa, unidentified
MDEYDGKQFVGIDLHRRHSVIVRQTSTGERLSAVRIVNDPDSLALQLEEAGEHPDVVLEATYGWYWAVDALQAAGATVHLAHPLGVKGFRYRRVKNDVRDAGDLADLLRMNRLPEAWIAPPPTRELRELVRYRAKLVALRSGLKAQAHAVLAKAGVLIAVSDLFGVEGRQRLARVPLGAAYAQRMSSLLELIDVLDTHERRFAEQIAAKLYDDRGYGAIQQLPGVGPVLGAVFVAEIGDVHRFADPSHLCSWAGLTPQHRESDTVVHRGHITKQGSKLVRWAAVEAIQRQPAGTKISVDRKRIEARRGKNIAKVAAARKLLTLVYYGLRDGHIRALTHQPAAA

SEQ ID NO: 332436 - protein, 367 aa, unidentified
MEKHNTARKSSCGGKRTTGKLTIGLDLGDRSSRYCLLDEQGEVIEEGSLPTTRKGLDRVFGSAGRCRLAMEVGTHSPWVSRYLARLGYEVIVANARRVRLISESSRKDDKLDAKTLARLARIDPELLSPIRHRGVQAQADLMMIRARAVLVQTRTALINAARGLTKSYGERLPSCATYQMGKDQAELLSPAIRAALEPLLAEVETVTERIREYDKQLEQLCQTRYPETKLLKQVHGVGTLIALAFVLTVEDPHRFRKSRAVGCYVGLRPKRRQSGQSRPQLGISKEGDVYLRTLLVQGAHHVLGPFGKDSDLRRWGLKLAAQGGKNAKKRAVVAVARKLAVLLHKLWVSGETYEPLRLANRAQTVAA

SEQ ID NO: 332437 - protein, 349 aa, unidentified
MTLFAGLDVSVRETSVCVVDAAGKVLAERKIATEPDDLIELLRSISSEYGRIGLEAGPLSQWLVNGLADAGLPVVCVETRHMKALLTAQQINKSDRNDARGIAQMMRVGLFKPVHVKTLASQEWRMLLTSRKLLQRKLLDVEADLRGTLRNFGLKVGVVSVGGFEARIRELVEGFHRLAAIMEPMLAVRRVLREQFSVLHRMLLRLVRHDPVCRRLMTAPGVGPVVALTYRAAIDQPQRFLHSKAVGASAGLTPKRFQSGESDYDGGISKAGDVMLRTMLYEAAQSLLTHSGARWSWLRAWGLRVAQRRGMRRATVAVARRLAVILHRMWVDETDFRWSNKTSSAAMAA

SEQ ID NO: 332438 - protein, 469 aa, unidentified
MNNAKKKKHKNNGKQRNGLSQLEQINLNAAGIDIGAEEHYVAVPQGRDPEGEDVRHFNTFTVDLLSLADWLKKCKIDTVAMESTGVYWIPLFEILDSQGFDVKLVNPRSIKNAPGRKTDVLDCQWIQQLHTYGLLQGSFRPDDQICELRSYLRQRSMLISYASHHIQHMQKALEQMNIKLNHVIADVTGVTGMDIIRAIIAGERNPERLAQMRNHRCKNSKSTIAKSLQGNWRSEHIFALKQTVELYDFYKNQIIACESRIQQHLETFDDRSDGKPLPKPPFRSGGSRNKFRFDARTYLYRMTGVDVTRIEGIDTPTALTIISETGIDMSKWPTDKHFASWLALCPGSKTSGGKVLSSRSRPCANRAAHAFRLAAYSLHRSNSALGAFLRRKKSHLGSPKAITATAHKIARIFYNMLKKGTEYVDLGQDYYERCYQDRVITNLKRKAKQFGYNLVNVKEHELLTTYLHI

SEQ ID NO: 332439 - protein, 331 aa, unidentified
MKKIIIGIDVSKLKLDVGHYTSEGRVKSNCVVIENNSTGYNDMLTWFKKKKFKLKDLLICMEHTGIYTDQLTKFLEKKKILYTLQSPLHLSKSLGIVRGKSDEIDAFRLSEYADEKKGKIKVSKRAPENQIRLKQLASERKQAVYALAKVRQTKTEITVHQKSSSQKRKEKQIVLLKKIIVDIEKEIQSVIESDNELLKNYKLLLSIKGIGPVNAYTTIIFTRNFTIFPDARSYTCYVAVAPFPHQSGSSIHKKTSVSKIGNHYLKALLGLAARSAINNDPQIRKYFNRKFNGKKGPESNYGQVLNAIKFKLICRMFAVIKRQTPYISLDF

SEQ ID NO: 332440 - protein, 368 aa, unidentified
MPRIAEPVVPVTGGVDTHADVHVAAAVDQVGRVLGTRGFPADAAGYAGALVWMRGHGELAKVGVEGTGSYGAGLARYLAGCGVEVVEVIRPNRQARRQRGKSGTADAVAAALAALNGEASGVPKSHDGAAESIRMFRVARAGAVKARTQAGNQLRDLILTASEPLRQQLAGQPVGRQVDMAARFRAGDLACPAAGARAAMASVARRHQQLTAEIARLDAALDELVTRAAPAGFLAKKGVATQVAATLLATAGDNPGRVRREASFAALCGASPVDASSGKQLRHRLNRGGDRQANSALWTIAMTRLACDPRTKAYAARRTAEGKTKKEIIRCLKRYIAREIYKALCRPRRPGRPSTPESKQDLSAPVLT

SEQ ID NO: 332441 - protein, 316 aa, unidentified
MNEKLVESFVGIDVSKNTLDLRIEPAGEAMHVAYDDQGIAQVCRRLVEALPTLIVMEATGGLETRLAGELAAKGLPVAVINPRQARDFAKATGQLAKTDRVDAAILCAFARAIRPAVRPLKSADARELDDLVNRRHQLVEIRVQETLRLAAASSKTLQKSLKAHIAWLDKRITKLDHDLKDRLQTSDAWKVKDDLLRGIPGVGDVTSMTMLAKCPELGQLNRREIAKLVGVAPLADDSGKHRGKRFIWGGRADVRAVLYMATVAAMRCNPAIKPFAQRLKMSGKPAKVVIAACMRKLLTIMNAMIKTNSPWTLPTP

SEQ ID NO: 332442 - protein, 445 aa, unidentified
MVRKAKKQRLTIVHPRCAGIDIGSREHWVAVDPERCDQPVQCVTTFTDDLHRLADWLKSVEVEVVAMEATGVYWIPLYEVLDARGFDVHLVNSRATRQVSGRKSDVLDCQWIWQLMSHGLLRGAYRPADAVCSLRSFVRQRAGKVEEQSRCIAHMQKALTQMNIQLDNVVSDLMGKSGATILRAIVAGERDPQKLAKLRDRRLRADEATVARSLHGNWREEHLFALTQALAHYDFLNEQIRACDQQISQALTKLPKLSEDEAPKPVKPLRSPHRTTAQQKDLHQALHAVMGVDLCAIPTLGIDTVLVLAAEIGPDLSRFPNEGHFCSWVAVTPPTHISGGKPLPGRKPKVFNRAGQALRQAAANARRSDSYIGACHRARLARMDSAQAIKATAHQLARLIYAMLTKGQPYVEKGIEAYEALSKDRQLRALKRKASKFGLTLAEAA

SEQ ID NO: 332443 - protein, 345 aa, unidentified
MEIRTIGIDLGKTVFHLVGVNARGGVVVRKKCSRTQLLRFTSKLRACLIGMEACGGSHFLGRGLREQGHDVRLMPAQYVKPYVKTNKNDYIDAEAIAEAVTRPTMRFVPIKSDDQLDLQSLHRVRERWVVRRTAVINQIRGMLLERGITMHKGRKHLEASLPHILEDAENKLSGALRALLTQLQIEMQYLHRQIGESDKLIDRIAGELEPCRRLVAIPGIGPVIATATIAAIGNGAAFKKGRGFAAWLGVVPGEHSTGGKQQLTGTSRRGNKYLRKLFVLGAHTVLLQRTKQSSGLSTWLTSLSERKRKQVATVALANKMARIVWAVLFKGEAYRPPLLPEPVAA

SEQ ID NO: 332444 - protein, 275 aa, unidentified
MKSTIIGIDMAKNVFEVYVEDVTGQVVKRCRLSRKKMLPWFANRASALIGMEACGGGAHYWARELEKLGHTVRLIAPQYVKPWVQTNKSDPADARAICRAVREPGMRFVSIASEAQQAVQAFHRVRSRLMSNRPALVNQIRGILLEYGVAIPKGVGSVRKALPLLLAEERWAPLVRQFLMEQQAELTDWESKLEAVMAQITRESATQPVCQRLEQVRGIGPLGASALWLKVAGQPYQNGRHVAAALGLVPKHTGTGGKIRLGGIVNEGIGISGGC

SEQ ID NO: 332445 - protein, 430 aa, unidentified
MDENNRNRLEEFRQLKKQIRQSEEYLIVGIDIAKDRHHAFFGTATGKTLLRRLVFSNDGEGFRKLLDQAEVLRVRHGLKKVVYGLEPTGNYHKPLGEYLIHMGRAVVLVSGVMVAKNRESLDGRWDKHDDKDSANVADLISQGKCLYYEYPTAQLRGLRGLLSLKKRLKRQEHGYRVRIRNNLIAQYFPEMDSEYGRSEAHGLAIVRWCFPVSEITQLDVAPFIERVTSRRVGMDKRRRLEAIWEKAGESIGCEGVPGLDHEVKVMVEGLRQIREMIKETEQKIDELCNEFPQYEYLLTIPGFGPDVSAKVLGAVGDPDRFLNGKQVLKLAGYDLSADRSGKNSNRAIPEISKRGKADLRYALYQAAFITSTKNRDFMLYYTSKIQGRQKEKGIHTKMLVKLSAKLLVIAWTLMKKREPFNPAYLKAELN

SEQ ID NO: 332446 - protein, 449 aa, unidentified
MSRPRVIDDQEHERVHERAAAIDVAEDTGMVCTRTPHPARPGARRATVQSVRARVNAIRALGRQLHRDGIEIVTLESASGYWRIWFFVLGACGLAVQLVHAAQAKNLPGRPGTGKLDAMWLARLTELGLLRASFVPPKAIRDLRDCTRARTRLVQERTRCWQRLEKLLEAALVKVSSAAGKLTTVSAQDMIKAMIAGQRDPEVLSALARGRMKAKRDDLVRALDGMFDDHHGELAGLLPDQIVFPDARIAQLTARAAELTAAMPAAWGVDGDGTGGPGAGTAPDAPVLPAVARLAEIPGASENLARSIIAEAGLDMTRFPTAAHLVSRAGLCPPARQSGPRSRPGKKGQGGTWLRGSPGQAAVGASRTATFPGERYHRIARRRGKARAQVAVARSILIIIWHLLKNPGARFTDLGHGYYQARTDTGRKIRNHIRQIQALGFDVTITQAA

SEQ ID NO: 332447 - protein, 359 aa, unidentified
MSELTFIGLDVHARSVAAGVLEGSTGEVHGGPAPVVVAELVSWLREQGESVSVAYEAGPTGFGLARACAAAGIPCLVAAPSKIARAPGERVKTDRRDALRLARLLRLGELTAVRVPSPAEEGARDLVRAREDARADLMRARQRLSKLLLRRGLVWDGKAWTGAHERWLAAQRFEERGLVLAYEEGLAAMMSVRARRDALDQAIREEAAKEPWATVVGRLGCLRGVSTLTAFGLATEIGEWQRFDGRSLGAYLGLTPSENSSGERRRQGAITKTGNAHARRLLVEAAWQQRRPLRQPSRELLRRREGQSALVRERAEAAGRRLHRRWRSFDARGKRSTVAAVAVARELAGWCWSLAVMED

SEQ ID NO: 332448 - protein, 425 aa, unidentified
MKITRIAEKINLNQVMDISVDVHKDILNFFFTSAGKEYTDLCSNRTDVIQRRIIKYKKIAKEHGMSNLRIICEPTGQYQNSLLRTARRNGCLTCYVNAESVKKFRVVETNDTGKTDIKDPRVISTLARLNKVIRHRMIGEDYLMLRKLGKIYDETDVEIVRLKGRLNKLMVELFCDYSFKKDFLYSNSGLALIKKYRCNPYRIIKSGFNRFEKTMRHAAPRIQSNTLKRLFEDAQSSVLNELPTGYIEVLQIRFYQLFRDYLNQQKRKEEIIEKMIEILDRLREKDPNIPPPTPGVISAKNIARLLGETGPISDFSSYRKLMRYFGLNIRMRQSGKYHGQNKITKKGRPLGRKVVDNIVLPLVKKDCLYGDYYRVKKEKEKRPGNKAMTIIMRNFLKKFYGWYKSGKAFDEKRFFHSESQYLKAA

SEQ ID NO: 332449 - protein, 332 aa, unidentified
MNAVGIDVSKSKSVIAILRPYGEIVSPPFEIKHISGNIQSLIEQIKSIDGESRIVMEHTGRYYEPLAHELSQANLFVSDINPKLIKDFGDNSLRKVKSDKADAIKIARYALDSWTDLKQYGLMDKIRNQLKTMNRQFTFYTKHKTSMKNNLIGILDQTYTGANTYFDSIARNDGSQKWVDFAATYWHVDCVRKMSLNAFLDHYQKWCKRKKYNFSKAKAEKIYGTAKELIPVLPKNDLTKLLIKQAIEQLNIVSKTVEELRSLMNETASKLPEYPVVMAKKGVGKSLGPQLMAEIGDVTRFTHKGAITAFAGVDPGMNQSGTYDQKSIHASK

SEQ ID NO: 332450 - protein, 368 aa, unidentified
MLKQSHYKVGCDAHKHYSLFAVLDHQGRPVEQTRVNHEPGAIRAFASRFPPGTPVALETVGNWYWIVDEIEQAGCVPLLAHAQMAKKMMGHVHKTDKLDAQGLAILQHLGSLPTVWIAPGQIRDERELPRTRMALSKIRTMLKNRMHSTLAKYALSLDTQSDIYAPKWRPQLMQLICSFPDETRRCMEQELELLDQVQEQIHRLEARILERVQVTPTIQLIQSVPGPAKILSIVIDREVGSIDRFPSPHHFASYSGLVPKVKASGGKTHYGKMIKAANNYLKWAFIEAANVVVRQQHHPSWHQKYVVALFERTRQRKGHAVAVGTVARYLAEATYWVLKKGEPYREPVPQHPVGRKSAVSPKQGQVRT

SEQ ID NO: 332451 - protein, 338 aa, unidentified
MTMYCGIDLHSNNNVICVIDDADHRVCEKKCSNELHEVIAVLSQFKFELKAVAIESTFNWYWLVDGLMAEGFQVELVNTAKVVQYEGLKNTNDRYDAYHLAHLMRLGILPTGYIYPKPYRGLRDLVRKRMQLVQDRTSQIIRFGSMIQMHTGHSLASHHIKTKKFILPVIGDTNVQLALQCHLNLIQSLTLQIKAIERSVLTQLAPHDSFELLKSVPGIGDILGQAILLETGEVDRFQGPGNFASYCRCVESKRTSNGKKKGENNRKNGNKYLAWAFIEAANFAIRLSPKAKAFYQRKQSKTNVIVARKALAHKLSRACYWIMKREVPFDESLIFHKF

SEQ ID NO: 332452 - protein, 316 aa, unidentified
MIVLGIDIAKRKFDCALLLGERFRTKVFENNSSGIELCVNWIARHAGGSVHACIEATGPYAQAVAETLFDAGHRVSLINPARSRAFAQSLGARSKTDAVDARILARLCQALNPEPWMPAPRSVRELQELVRRLDALIQMHTQETNRLGSAHERVRGYIEESIVFLERAIREIKQAINQHIDLHPDLRTQRDLLQSIPGVGVATCAWLIAELNAKRFVCARSAAAFSGLTPAHWLSGSLQRKARLSKHGNAQLRKALYWPAITALRCNPIVRALAQRLSARGKHKMVIIAAAMRKLIHIAFGVLKSGKPFNPALAGA

SEQ ID NO: 332453 - protein, 349 aa, unidentified
MIVLGADMHKGSHSLAAVAAGSGELLGDKVVKVGQPGFAAALAWARELEAERVWALEDCRHVSGSFERFLLVNGERVVRVATRLMAGERRSSRERGKSDLIDAIAVARAALREGVERLPVAQLAGVELDIRLLVDHRERLVRMRTVLNNDVLWHLHDLWPEQTLPGGALLSQKWTARLGRRLARAEQTARIRIARDELRQLRELSRSIDALEREISGLVAEVAPQLLTEPGFGPLTAAKLIGEIAGAQRFATDAKLARAGGVAPIPVSSGKTNRHRLDRGGNRQINTAIHRIAVTRARCHPETRDYIERKRSEGKTNREAIRCLKRHLTRRVYNLLRNPGQAPTTLCLT

SEQ ID NO: 332454 - protein, 388 aa, unidentified
MIYAGIDVSKYKHDCFILSDFGEVVKDVFTFANTADGFAQLKKTLDELGCDNVRIGFESTGHYAINLKLFLEKNGFEFTEINPYLIKKWLEGDSLRQTYTDKICAKAIAGYLCEKEFRPHMTDFYDTFALKQLTRFRSGLVTTRTRYLIQLTNILDCVFPEFKPFFGNRFSVTALYILAHYQSAEKIANMNSQSYDKLRRISRGHFSMHKFVELKALAKNTVGVFNDYYRFQLETVLELFGQIDSKISDVETEIIKAIREINPPTASIRGVGEISAAVIVSEYGDFSRFSCPNKMLAFAGLEPGRYQSGTLAYDGKMVKRGSPHLRCTLMNCASYIHIHNEVFAEYYRKKRNEGKPHRVALNHVAKKLVRIIFALETKGVMFDPELLR

SEQ ID NO: 332455 - protein, 346 aa, unidentified
MMIIGCDFHPSWQQVSWLDTETGETEEQKLVQASGDAERFYRQVAAPALIGMEATGNCHWLVDLLSELGHELWVGDAAQIRASYVRQQKTDKRDAAHILKLLVEGRFPRIWMPSSEVRDLRQLLLHRYKLVIMRARVKNELQHLCLNKGVQRKHKLWSQAGQQILRELPLQPWAGRRRDDLLKLMAMLDQQIEPLDQAVKAEAQRDKMALLLQTQPGVGPITALAYVLTLGDVSRFPRGKQVASYLGLIPREHSSGGRQKLGAITKQGNRMLRMLLVEAAQAAVRYDPGFRREYLHRCHQKPKAVAKVAAARKLAVRLYWMLRTQQPYPAVVRIESSPRVPLVGAS

SEQ ID NO: 332456 - protein, 343 aa, unidentified
MQVSTIGVDLAKNVFQVHGVDSVGKVVITRQLRRKQVIDFFSKIPACLVGMEACGTAHHWAREISKLGHTVRLMPPSYVKGYVKRSKNDAADAAAICEAVTRPSMRFVPIKSADQQALLMSHRTRDLLIRQRTQLINALRAHLAEFGLVAETGREGLAQLAEIITDEGNREALPSAMKQALQAIVDQLAALELQIGALDRAIHAHHRANDMSCRIETVPGIGVIAATAIASTVTDPSNFKSGRDFAAWIGLVPRQHSTGGKERLGGISKQGDRYLRRLLVIGATSVVQHARRHPQKYPWIIRLLARKPAKLVAVAVANKMARIAWAIMAKGGYYRRPELAAAT

SEQ ID NO: 332457 - protein, 312 aa, unidentified
MEYISLGIDISSKRLDCYWSQLNKHQSFDNTSSGIHLLLDKIQQEKPTWIVFEPTGGYEIDLAFHLAEKGIAFSMVQPHRLRSFARSCGKLAKTDKLDAKLMATYGIKMTPKSTILGTKSQQELAGFVTRRRQLVDLLSMERQRIDQGRDPLIQKDIKDHCEYLKQHILNLEKQIQDCIHQDADLEEVSQTLQTFRGIGPTSAAVLLADLPELGHIGPKEISSLVGVAPFNVESGTMTRKSRIRGGRQSVRCMLYMVALVAIRHNTVIKEYYNRLRAQQKPPKVAIVACMHKTLIILNAMARDHFKNKIISL

SEQ ID NO: 332458 - protein, 497 aa, unidentified
MPTKSSIYAHCNPQLIKLFEAAGHPAKVACVALDYAKAQHTALICNGLGDLLKGAFAVDNAPTGAGHLLQQVHSTAKQRRIRPEHVFFGGEDYPSYAENFVRRLRQEKFLVVRVNAWEAKQQRSNFQASSDSLDLLGIARCCLNRRGETVRDLPVAYTNLRIATRDRDQLVRNRTAVSNRIHSYVDRLFPGFLNVQKSGLCPFCKAGLDLMVDRFSPEQLSRRPRQALADWLGRHGVEQPGEVAAQLKQLAKGVLGPAPEQTIMLQRSLAKLVELYRGLDESIALLDRELAYWLARTPGALLTSIGGFGITLAAGWTAELGPPSQWRAVRQLCSYAGVVPKSKQTGGPQKEPVVGPVQQRCNKRLKNVVLQAVEKVRQYGPDDLLQAAQQLEAQGSHVEFALAKRLVRLGKYLALTGTIYRPKALLASDTPKATLVTYYQSLWDKLLKKWKDKGDLKDVFAPEHPLGQWRHMAKELYALELRLPQQRAAQSPSASTP

SEQ ID NO: 332459 - protein, 346 aa, unidentified
MLYVGLDLSRKRLDFDVLLPDGDRRERGAVPPDADGLASLVRRLGDANEPVLATIESMSGARFVHDQLELAGWDVRIADALKVKGLAPLACKPDKIDSWVLAELGRLSLVPEIWLPDPAVRAERERARFRLHLVRHRTALKNRVHSTLITHGVPNPISDLFGTRGRQLLARLSLPEPWRSTTQASLALIDLLDAEVSAIERELRALGVEHRYIPLLITCPGIAWVLAFTITSELGDISRFPTPTKFVGYTGLCPKVDQSGERDWRGPLRKNGPNYLRWALVEAAHTALRHPCYQPTLARQTARHGRKRGRKIAAIEVGRKLAEAIWYMLSRNQPFAPAGAKQVLTA

SEQ ID NO: 332460 - protein, 350 aa, unidentified
MWYVGLDIGLKWHYVVVMDAEGRIHQQQRLPHDPLLIQRFFETLAGPAQVVLEATGNWVAVYERVEPYVQEVVLAHPLKVKAIASARIKTDKIDATTLAHLLRANLIPRAYIPPRAVREWREVVRHRAFLVRLQTRVKNRLHTLLAKRGVTPPGHSDLFGVAGRQWLTSLGLPEPYGAMRTRYLALLERFAHQIREVERTIDQTVHATLEARLLETIPGIGRYLALLILAEIGDIHRFPDPKHLVAYAGLCPSTYASGQTVRHGHLTHQGSPWLRWALVEAACHVWQAPQSRLCHVYHRLCQRRDAKTARIAVARKLCTILFAMLRKQEPYRDCPVSPLDPPRRLDAACR

SEQ ID NO: 332461 - protein, 390 aa, unidentified
MIYVGIDVSKFKHDCVIINSDGEILVDVFQVSNNLEGFTKLKNIILENVPNNDFQKIKVGLESTGHYSNNIINFIHQNSFPLTIFNPLSTNLFRKAQTLRKTKTDKIDAIFIATMLFSDNSKPYSPKSYHMTEIKSLARHRFRLIDYRAKLKISYTRLLDIVFPELASVIWSVHQNSAYSLLLELPTTRDISLCHLTKLTNILSKASKGKYGKDRASEIKELAKNSIGTCSLGVSFELQQTIRLIKNVDDEIKLLDKKVKVMLDELNSPIMSIPGISYVLASIILSEIGDIQCFSTPAKLLAFSGLEPSTHQSGKYTASHSKMVKRGSKYLRWALLQAALLTTNKTQTFKSYFQKKKSEGKHHLVCLSHVAKKLLRVIYHLENTNTAFID

SEQ ID NO: 332462 - protein, 355 aa, unidentified
MNDAKYIGMDVHQATISVAVRDSRGNLVMEAILETKAETILQFIRGLRGSLYVTFEEGTWAAWLHDLLQPHVARVLASDPRKNALLKTGNKSDRIDARKLSELLYLNKLSPVYHGEQGIRTLKELARSYITITRDLTRVMSRLKAIYRSWGIPCAGQQVYAPRHRAEWLAKISEAGVRRRAELYYQQFDALAALRQGTRRELLAEARKHPAMRLLRQIPAIGPIRAALLIALIQTPNRFRTKRQLWAYSGLALRTYTSGEYRFVGGQLKRSKKVLAVRGLNINHNHDLKNIFKGAATRVAATAGPLQHFYEACVARGMKPHLARLTLARKIASITLLVWKKGVRFDAEHLKKQAA

SEQ ID NO: 332463 - protein, 427 aa, unidentified
MPYRIAGIDVHKKMLAVVIADVEVEDEYRFERRRFGSTPEHLRMLCEWLLEQGVEEVVMESTAQYWKPVWGTLERYWKSGCKQREGAGPMSGTLHLAQAQSNRGRRGRKKDFPDAERLVKRFVAQELILSLVPDVEQRLWRTVMRRKQQLTRNRVQLQNRLEALLEEAHIKLSSLVSDLLGASARRMLQAIGEGETQPEVLAAMADQRLQATSAQLCDALGACRELNPVYRRLLKMMLKELRLIEHQVDQLNREMAKLLRQHEDAVQRLAEVPGLGVDSAQQIIAEVGATAAAFPSERHLSSWVGCCPGEEESAGHSKSHRSPKGNRQMRGILNQAANAAVKRKGSIFQILYRRLVPRLGRKRTIWAIAHRLCRLVWMILHRGIRYEEKGPEVTQKAKRVRTAKMIRELRNLGYRVEMATSQLAALS

SEQ ID NO: 332464 - protein, 346 aa, unidentified
MREVIRIGVDTSKHIFQLHGVDAAERPVLRKRLSRKQMLEFFAKLPSTVIGMEVCGAAHYWARELIKLGHEVKLIAPQHVKPYIRRNKNDGRDAEGLCEAMSRPTMRFVPVKTAEQQAALMLAGLREQMVSRRTQLSNMIRGYAAEFGITAAKGLDKLEPLLAQIAQDESVPPLARDLLAQQGRQYAQLQAELKTIEARLKAWHRANPDSRRLAEIPGIGPVGAPELIMKTPDPGAFTSARHYAAWIGLTPKDHSTAGKTRLGKITRAGDERLRSILVAGATSVIKQAMCGRGHPSPWLVALLKRKPPKLAAVALANKNARIAWKLMATGQRYDGARMQAASVAAA

SEQ ID NO: 332465 - protein, 311 aa, unidentified
MSFIGIDVSAKTLDVAVEGGATWQVTNDAVGLATLLAQLGPLAPDLIVVEPTGRYHQLLATTCVAAGLPIAVVNPRQVRDFARSMGQLAKTDRLDAALLARYAARVQPVPRALPDEATRELAALVDRRRQLVDMLKAERQRLEHARASVRGSLTQHIRFLEQALADANTELDQWIEQSPLWQAQDALLQSVPGVGAQTSHLLLAHLPELGTLNRRAIAKLVGIAPLANDSGRFRGQRSCWGGRAEVRSMLYMAALTGARHNPVLRDCYQRLLAAGKPPKLALMACMRRLLVILNTMMQTGRHWEVPTPSTP

SEQ ID NO: 332466 - protein, 312 aa, unidentified
MADMVRLAGIDVSKDKLDVHVVPSGESRTVGYDRRGLAGLRRWLVGLGVAVVAVEASGGYEREVSEVLEEAGLIVHRLNPLRVRRFAQLKGRLAKTDRLDARTIAEFARAYPQERQLRRDPRRERLAEHLLVRRHTQQAILDCINQLEHLRDSRLRRLVTARKASMERTLARLDRCLVVLIAEHADLAELSERLRSVPAVGPVLATTLIALLPELGSLTRRQVASLVGVAPFDRSSGRQIGAKSIQAGRALVRNALYMAAMVASRHNPVIAAFAKRLASKPGKVRLVACMRKLIVTLNAVVRDGSQWQPRTT

SEQ ID NO: 332467 - protein, 360 aa, unidentified
METAYDGRQVVGMDLHRRRSVLVRMTGDGRRLGTARITNSPAELRAQIARAGRSPKVVLEAAYGWYWAADTLAAAGAEVHLAHPLGVKAFTCRRVKNDERDAADLADLLRMGRLPEAWIAPAGVRDLRELTRYGAKLVGLRTSCKDQVHGVLAKLGVPVTCSDIFGVAGSAWPGGLGLPQPYAGKVTSLRQLTGELTTEITMLSGVIGDLLAGDRGYQVIQQLPGIGPVLAAVIIAEIGDVARFRSPAQLCSWAGLTPRHRESDVKVTRGHVTKQGSRLLRWALIEAIQRARADTVTGAVKEAIIARRGKEAKNIAKVAAARRLLTLVFYGLRDGQIRCLSRPPDECGHLIWPRLRPLSA

SEQ ID NO: 332468 - protein, 411 aa, unidentified
MEVVYRRCSGVDVHKESISVCVLLMEDQKVKKQIRRFGTMTRDLLELRLWLQQLGVTHVAMESTGVYWKPVWNLLEDQFELLLVNAQHIKQVPGRKTDIRDCEWIADLLQHGLLRGSYVPKQEQRDLRDLTRYRVRLNEDKVRLANRIQKTLEDANIKLASVATDVLGASGRTMLQAIAAGEDDPEKLAQMARKGLRKKLPQLRLALQGRIRDHHRFLLGQLLEELRFTEDKINELDQRIQQCMLPHHHAISLWTSMPGIRMTTAWSLVAEIGTNPEQFPQGSNLASWAGMCPGNNESAGRRKSGKTRRGNRWLRRALNQAAWAAARTKNTYLAARFHRLAAKRGSKRAIVAIGHKILVLAHYMLQHNTPFRELGAEYYQRLRAPSFSQSLVRRLQRLGFQVTLTPTQQVS

SEQ ID NO: 332469 - protein, 399 aa, unidentified
MLAVGIDISKSKSVAAILNQDGSMHTSPFEFHHTQPELDAFIKYILNSKQSATILMENTGHYHYPVLKAFQEAGLPVCMVNAYQIKKFGDMDLRKAKTDKKDAVRIARYALEKSYSLVPYTSMEQKYEDLRFLARQYNQRMLTLKTNKVFLLNLLDETMPGITNILPLTTRTPETSLSVLFINRFKSYDRIKKMGKSRFLDAFEKIARKSRNRQTKTYGLAIYEAALRNITTRGENEYTLAAQDQCLELVCESQKAADSIILKMKTLAETLPEYAVLRSMAGVGNRLGPLILAEIGDIRRFHSGKALNAYAGNDPPPYQSGTFESYNRHISKRGNAALRKYCFEVMQTLKLTRPQDDPVYLFLLKKEQEGNPYNVAKMAGVDKFLRIYYARAMETLKQQ

SEQ ID NO: 332470 - protein, 418 aa, unidentified
MDNRPPFLYQATVGIDWADQKHDVFVRFTNGDSYRRKIDSRPEAIQEWLLELRSVCAEGKIAIALEQRRGALFYQLCTHLNWIDLYPVNPHSLSSFRLTFFSSRAKDDPIDSQLLEELVRTHADRLRPYRPESVTERKLDQYCRHRRSLLDLATKTELKLISTLKQYFPLAVNLFAAVGMKSDIALSFLSRWPTLSELQRAKAHTVRSFFYAHNSRSQSRIEKRLQQIGQAHNVTDDLALIEPLVLTTKCLVGQLRQFNHAIKEFDHKIKELFKSHPDHFLFANFPGAGEQLAPRLLSLFGSDRARWADATDIQKYSGIAPVIERSGKSVWVHRRLSRPKFICQTFHEFAQQSVQHSSWAKQFYQHQRDSGKSHHSAIRALAFKWIRIICACWKANKPYDESFYLQTLAGKNSPLPST

SEQ ID NO: 332471 - protein, 341 aa, unidentified
MAAYVPIDLHRHRSVVMHMAEDGEVLGWVRLANDPEALVAEVLKAGEAPEVAIEATYGWYWAVDALVAAGARVHLAAPSRLSAFAGRRVKNDQRDCEVLGDLLRAGMLPEAWISPPEVREQRELVRYRAKLVGLRSGLKTQAHAVLAKHGMVVPMADLFGVGGRQLLARLCEHDARFRSPYGQRLESLVVLVDAFDHEIAELTDSIAQTFRGHAGYHAIQALPGVGPVLAAVFVAEIGDVARFASAGHLASWCGLTPRHRESDTTIRRGPITKQGGKLVRWAAVEAAQKLRRDSWLHAERERLATQRNSRAIAKTAIARKLVTLIYYGLRDGEIRCLNRAA

SEQ ID NO: 332472 - protein, 426 aa, unidentified
MIDAVIERCIGIDVGKKFLVACVMTGPANGEARSEIREFGTTVSELRKLREWIQQEACSHAIMESTGSYWKPIFNVLEDVVKVALANPYEVKARRGHKTDPKDAWWLAHLLRHAMITPSFIPPRWQRELRDLTRRRRKVIQAATSEKNRIEKTLEDANVKLSSVLADIFGVSGQLMLEALLKGQADPIQIAQFAKRAAKKKIPQIIAALAEHQMSDHHRLMIRFSLDHLRFLEDQIYQLDQEICKKIREAGYEKHWELLQTVPAVGEPNAATILAEVGPDPRNFANEKHLSCWAGLCPGNNRSAGKNKESHTTEGNRWLRGALTESAWGIAAKKDGHLRYKFWRIAAKSRPKAVVAIAHDLLVLAYFVLQRGTAYEEKRGTPMTEAQKQRLIRHHLRRLGKLGVPVRSGFSSRGPHTPAISLQAKT

SEQ ID NO: 332473 - protein, 344 aa, unidentified
MEHFAGLDVSVNETSVCIVDHTGRIVREVKVKSEPGALLQVLKNATYRFKRIGLEAGPLSQWLYSALAEAGLPVICVETRHMRAVLKAQINKTDRNDARGIAQMMRAGLYRSVHVKTLRSQKLRTLLTHRKLLQSKAIAIENDLRGTLRNFGLKVGIVGKLKFEARIKELVENHPDLAMLVEPLLVVRRVLREQTAVLHRRVLAIVRDDEVCRRLMTVPSVGPVVALTYRATVDVPARFRNSKAVGAVLGLTPCKDQSGERDHTGAISKCGDEMMRVMLYEAAQILLTRTVKWSWLKAWAMQIARRRGMKRAIVALARRLAVILHRIWVDGTEFRWTRQEAAAA

SEQ ID NO: 332474 - protein, 493 aa, unidentified
MVKQGVYPTRSQEVIDFFSKGVLPEKLLIVPIDFAKLDHLVHFCRGTGEFILNSPLTIYNTLEGADYLEKRIGRICRKYHISRNHILIGGEDPPSYVLNFVHHLKSHDFKFVRVNAHEAKKFRTNTRASSDSIDLNGIAQAMLNRRARDIAEFDEIYAALKSASRNRRKLVKQETAFKNQIHKSVDILFPGFLSEKNTRMVPFSSACLWLMEENFSSVKIKRMRMETLIKGLRRNRTTKAEETAKKLKQLSDKVLVPPPELVSYTSKSLAIKIKLFRAIRDSIMMEETEIARCLVQTPGFYLTSFPGIGIVLAGGVVGEYGDPIHWPPADNMASYSGIVPREKQTGGISKQPLKGHLPLDCNRILKDWLLQGAYHVGTTKHPMHKSEGEDGLHRLLEHYRRVENNGGKSRLSTAKLLIKIGRQMVFNERIYLPSDWVRKPAPSEEKLFAYLDVVNKSLDEKWKAYDLSGIDQNKNYLIQWRNYCDELKQSSKT

SEQ ID NO: 332475 - protein, 333 aa, unidentified
MGVDVSKAELVCRVLDEKGQEQGKGSFANGAAGFRKLKKFLLGLDVDGRFHVGMEATGVYHRNLALFLCNSGERLVPGVFNPASVKAFGQSRMSRTKTDGQDALILARYTLELFRDGTFRPWEPERPEVAQLQQLVSRREQLVSMKVSEQNRLHALEEDGGSLPFLVESVRDEILHLEDRIREVEKMIGRHMEGHPKLKADKDLLISIPGIGQITAATWMGHLGDLSRFGNPSQIVAHIGIAPRERQSGSSVRGKPQICRTGLKELRCALYLPVMAAATRLNPVLKSFYERLVTSGKRKKAALIACMNKLVHIIWAIMKSRQPFDPNYALARN

SEQ ID NO: 332476 - protein, 314 aa, unidentified
MKMIEHCYGGIDVSKDRLDVLVLPDRRCFSVDNNAAGWSELVERLHGLSIAAVGIEPSGGYERCVIRILLAAGLSVRRINPNKLRQFARARGVLAKNDRLDAQLIAEYVSIMPTRVVQRDAGTERLAEVVTMRRQLCDEHATVENQAAQVEDVMLRRLNKRRLARLQADIHLLDRRMAEMVAADAVLAQRYELLTTMRGVGPILAFTLIALLPELGQMSRKQIAALVGLAPYDFDSGKLRGHRCIYGGRMPVRNVLYMAALSACRYNPAIKVFHNRLATANKKPKVVIVAVMRKMITILNAMIRDNAAWQPKTA

SEQ ID NO: 332477 - protein, 324 aa, unidentified
MMTPALGIDVSKDRLDAEIAACGKPRSKYFANSPDGWRQLLAWLKELKIKRVHACLEATGRYSLGIALVLWEAGHIVSIVNPAQIHDFARTKLGRNKTDAVDAGHIREYAEIFKPQPWTPPSPAMQRLGELQTIRAGIVSSLTEWKNRCGSGLADDTALALVKATITHFAAQLAEVDKAIAGTINNDPDLSAKRDLLLSISGVGEVLAGLVLSELPGTDVLRSSAQAVAYVGLNPRSHRSGSSIDRPTRISKIGNATLRNALYMPALSAMQHNPVVAALAKRLKAQGRLKGKQIAVAAMRKLLVLCFGVLKSGKPFDPALAMPN

SEQ ID NO: 332478 - protein, 348 aa, unidentified
MTMIGGLDVHRQQITFDYVDDEGLVHWGQIRPATRKTLRDWLAKHCPDGDGEFAMEGCTGWRYVSEELAAAGVRVHLGDPAEVAALRGPKKRAKTDRWDARLLRTLLLEGRFPESWIPPAHVMEVRTLGRLYCALMDERRSWQQRIHAQLFHQGCPPITALLSQAGREALAAAELSAAGRQYLDTAQRRIDELNADIAPLRAQLVAFARHQPGCQALPARPYGVGWLSAAIIWAEIGDARRFRSSDQVVRFAGLDITGYSSDAKRAPGHLARQGSPERRWAAFEAAKCAARPGSPDYVDYHQVAARKEGKRPTLAVERKILRRCYHILRELGATALAAPTAKPNKTAA

SEQ ID NO: 332479 - protein, 387 aa, unidentified
MQASTVDTPTAGHCGTIFVAIELSQKTWLVTLHSPDKGKMSRHKLEGGDHAGLLALIGRERDRAARALGAVPAVASCYEAGYDGFWLHRLLLAAGITNYVFDPASIAVDQRARRVKTDRIDGEKMLRTLMAYLRGEPQVVRIVRVPAAEQEDARRASRERGRLIKEQTAHTTRIKALLRLLGMAVGNPRRRDWLNWLAAQRDWQGQAVPPRMLSEIRHEHARLMLVRERLDEFMQASAAADPAPAAAQMAERSELLLRLKCLGPAFATTLASEVFYKDFRNRREVASYFGLTPSPWQSGGIDRDQGISKAGNPRARCAAIELSWLWLRHQPESALTRWFRSRTHNNASKRNKRIAIVALARKLMVALWHYLTTGLVPEGALLKAAKA

SEQ ID NO: 332480 - protein, 343 aa, unidentified
MQTVTTIGLDIAKSVFQVHGIDAAGQVVIRRQLKRRYVLAFFQKLPPCLIGIEACASSHHWSRELQALGHTVRLMPPAYVKPYVKRQKNDATDAEAICEAVTRANMRFVVTKTPEQQSGLVLHRARHLFIRQQTAVINAIRAHLAEFGIIAPVGRHGVEELLNVVADPNDKRVPEIARACLMAFGAQLRRLKEQILEFDRMIRAWHRSSETSRRLDDCPGVGPVLATALVATVADPKSFRSGRNFSAWIGLVPKQHSSGGKNRLGSISKQGDRYLRGLFVAGALAVIRYAKIHGTKHRPWLTALLARRPTKVAAIALANKIARMAWAMMAKGERYKEPIALAA

SEQ ID NO: 332481 - protein, 328 aa, unidentified
MCTLGIDVSKNKIDLCLLTAGPGGKKKHKVLTNEPAVTRKVVDWLNAQKCVPESVTVVLEATGIYHENLAYGLHEAGVSVCMANPCRVREFAHGMDILNKNDAVDAFVLACYGELKSPAVWVPPSPEVRKLRALLRQRDALREDVQRTVNRLEKANSTSTPQEVIRSLERMKSWLNEELARIEKLITDHTDNDPGLKADLDLLKSIKGVKDQVGREMLALLKDGTFKSASQVAAYLGLTPVEKTSGSSVRGRPHMSKTGPSGVRAKLYVAALTASRWNKQAKAIYERLVAKGKAKKAALGAVMRKLVHLCFGVLKTRLPWDENYVATA

SEQ ID NO: 332482 - protein, 430 aa, unidentified
MEASIATTEAVTAYIGIDWADQKHAIALRSAAEPNKIEHQLIDQKPEALMEWIGGLEQRFGCQGKILVCLEQSRGALIYHLMGYDFFELYPVNPLQLARYRETFSPGGAKDDRPDSELLCELLYCHRERLRALKPDSVLGRKLNFFNQGRREAVDQRNGLSNAIKSQLKVYFPLALELLDQDTSTALAADLVLGWPTLEAIQKQPAHRLRKFFYGHNCRGEQRMLKRLELVQKAKPLTQDSAVIEPAALRVQILARQLKNLLPDIARYEDKIAQLFEAHPDRFLFENLPGAGEALAPRLASAFGSDPQRWESALEIATLSGIAPVRRASGMKSGKKGQRKASVHFRQACPKFLRQSFHEFAGCSIRYCSWAKAHYDALRARGKGHHAAVRAVAFKWIRILFACWKQRTPYDPQRYLQALQRRGSPLAIAC

SEQ ID NO: 332483 - protein, 341 aa, unidentified
MSELHIVGVDLAKRVFHLHGTDLTGNVLFQKKLTRPQFEAFLADLPICMIAMEACGSAHHWGRVATQHGHEVRLVPVQHVKPFVKRHKNDSIDAAAIVMAAMHPATQFVAVKTQDQQAQAMLFRTRELLVGQRVQLTNALRGHFAEHGVVFAQTGQNTKKLLEACWEILDQVPQRVAQLARTYMRHIESAEIEIGILNVKIKRCALQDAESKRLQTMPGVGPQDALAIQAFCPPVTVFSSGRDFAAWLGLVPRQHSTGGKQRLGRITKMGQRDIRRLLIIGATSVIAAAEKKGRCDDPWLANMTSKKPRLVVAVALANRMARRLWAMLTKEKDYEIRGAAA

SEQ ID NO: 332484 - protein, 403 aa, unidentified
MSDMITNHADIDVFIGIDVGKHNHHAVAVDRDGKQLLSKALPQNETKLKTLLTRLSKHGTLLVIVDQPATIGALPVAVAQAEGIMVAYLPGLAMRRIADLHPGEAKTDARDASIIADAARTMPHTLRDIRVADENVAELSMLCGYDDDLAKQATATSNRIRGLLTQIHPGLETVIGPHLDHPAMLALLAKYPTPKALRHAGKHRVETLLRKQAPRAWKRWAAAIFTAMDGQTVVVSGTDAAGLVLPQLATSLAQTRSSRDDVLARIEELVEAHPLFELLTSMPAVGVRTAARILTEVVGKDFESAGHLASYAGLAPVTWRSGTSIRGDHSSRRGNKILKRALFLSAFAALKDPLSRAYYDKKRAEHKKHNQALIALARRRCNVLYAMLRDGAYFHAPEQGTAA

SEQ ID NO: 332485 - protein, 454 aa, unidentified
MAQRNPSVSRGRSSGSSLSLSLTHPNAAGIDIGCASHYCAVPPDRDDEPVREFRSFTGDLERLADWLQACQVDIVAMESTGVYWIPVFELLERRGFTVLLVNARHVKNVSGRKSDVLDCQWLQQLMSFGLLRGAFRPSDEVCVLRALTRQRATVLRSQARYVQHMQKALTQMNLQLANAISDIVGETGQKILRAIVEGERDGHKLAAMKNVRIRADEAEIAASLQGNWRSEHLFALKQALAGFDFCITQLTQCDTEIESQLARLHVRDGDPAKGKKRGRARNAPRFDLRKQLFQMCGVDLTRIDGIDVTTALVVVSETGTDMSRFASDKHFASWLGLCPGTKITGGKVMSGKTKRVANRAAHALKLAAAALRSSHSALGSYYRRLSARMDKGKAVTAAAHKLARLVYAMLSKGQEYTDAGQDYFEERYRQRVLRNLSERARKLGMKMVPDAQTA

SEQ ID NO: 332486 - protein, 339 aa, unidentified
MGQECVIGLDLAKRFFQVHGVDANGKVVVRKRLTREQVLRYFAQLPRCIVGMEACGGSHHWARELAKLGHEPRIMSAHYVKPYVKTNKNDAADAEAICEAVGRPNMRFVAVKSLEQQDVLALHRVRARLVKSRTALVNEIRGLLHESGIVLPKGIQHVRASLPRLLEDLENVLTALQRDMFSDLYTELVDTDERIAKLERQLKAVAAACPSCARLRKIPGIGVLASTALVATVGDARCFRNGRELSAWLGIVPRQHSSGGKERLLGISKRGDSYLRWLLIHGGRAVLRYAAGKDDARSLWLMGLSARRGKLRAAVAQANKIARTAWVVLARGEEYRAAA

SEQ ID NO: 332487 - protein, 343 aa, unidentified
MYFIGLDVHKKTISYCVKDAAGRVHQEGKIGSTRRELDGWIRTMPQPRTIAMEATIFTGWIYDHLLPHAERVQVAHPLMLRAIAASKKKNDRIDAGKIADCVRCDFLPECHMASTEIRERRRTLRYRNLVIKQMVQMKNRISGLLMETGVSYNKQRLHKVGYFAELMTTNEDVHESIRPLLKLSRDMISRSQKLDYALVSSLQRDPVLKERLRRLRTVPGVGPITALTWALEIGDYTRFSSIKRAISYCGLCGDEKSSADKVMRMPISKQRNKHIQRALIEAAKLAPSQSHELALTHARELERGNRNRATLAVARKMVCYMLAVERRQQDFVPAEEFSRTIAV

SEQ ID NO: 332488 - protein, 346 aa, unidentified
MAKSSVAVLGIDLAKNSRSLVGFNQAGTVVLRRRARRETVVGLTAKLPACVVAMEACCGAHHLGRLLAVQGHAVRLMSPEYVRPYVNAQNTNDRDAEAIAEAATRPTMRFVPLKAQEQLDMQSLHRVRSRLVGMRTMLMNQLRAILLERGLAFPQGRRKFETAVGCLLEDPEARVGARIRSLVAEIREEWAGLDRRIDALDREFIAHAHADEAAHRLVSIPGVGPMTATALHAAVDDGSAFASARDLPAWLGLVPRQHTTGGKPKLLGISKRGNAYLRGLFIHGARAALASLSKAEDATGRWLHGLLARAHYNVVVVALAAKLARIAWARLPKEVSFERRLEPALA

SEQ ID NO: 332489 - protein, 340 aa, unidentified
MSIVMGIDQHRAQITAEWIDLVTGEVSRARVRPADRAGVRRFLARFDCTQLEVALEATTGWRFVVEELRAAGAEVHLAEPAETAALRGNKRRAKSDRADARHLRELLLSGRLPESWIATDHILDLRSQVRLRHTLIEQHTEWQQRIQAVLYHHGCPHRRGLMVADGRDWLAAQPLPEAAREQITVALAMLDALELQLAPLSRQLRVYARAQTGCKALIDAYYGIGELCAVTILAELGDCRRFANSRDAVRYGGMDITVYQSDRHRAPGHLSRQGPPALRWALYEAAQVARRPSSPDRAYYEQAAERLGGNRACLALARKLLKRGYHILKELGDEALQPAS

SEQ ID NO: 332490 - protein, 343 aa, unidentified
MEMRVIGIDLGKSVFHLVGMDQHGKVVARKRLSRSQMMVFTAKIPHCLIGMEACCGSHFVGAALTAQGHEVRLMPAQFVKPFLKSNKNDYLDAEAIAEAVQRPNMRFVPIKTDDQLDLQALHRVRDRLVSRRTSVINQLRAFLLERGITFRQGRAYLRKQIPELLEDAEQKLSSRMRQLVDRLWQEWKVLEEQIETLSREIENIAGQDAACQRLLDILGVVPLVATALVAAIGNGAAFTKGRDFAAWLGLVPRKHSTGGKAWLFWISKRGNSYLRRLFIHGARSIVMSLNRDNHAMGKWMSQLEARTHRNVLVVAVANKLARIAWAVLARGDVYRSTPALVAS

SEQ ID NO: 332491 - protein, 425 aa, unidentified
MNYKQNEKINQVKESTLVVGIDIGSTTHYARAFDWRGIELGKVFPFSNSREGFENFKGWMQRLQDKYKKSDVIVGIEPTGHYWFDLGAYLEDEGILLVMVNPYAVKQTKELDDNSQSKNDRKDPKVIAKLVTEGRYCAPYTPDGVYADLRIMVANRKRLIRELTQIKNRFARWFAIYFPEYKEVFGDYEAQSSMMLLKKACTPEAIVELGAKKINQIWRDAKLRAVGMKRATTLCETAKRSIGLKKGSSAAEYEMKLLLADYEYKKAQLDSIMEEIESLCKKIPESEQMLAIKGIGIITIAGFLAEVGDVRRFESPRQIQKLAGLSLRENSSGKHKGQTTISKRGRSKLRAVLFNAAIPLIAKNPEFRSLHEYYTTRANNPLKKKQSVIAISCKLIRVFYAILANGVTYDPEKMISDIHRPPQAA

SEQ ID NO: 332492 - protein, 392 aa, unidentified
MYIVGIDIGKNHHTISIVSPEGKQIGRSLRFATTHKGADSLMSFIFKNIGNSPCVFGMEATGHYWYPIYSFLKAKGYTIYVINPIQSDSLRKMYIRQTKNDSIDSFLIAEVIRFGQFGTTSMADENILAMRQLCRYRDSVISSRTEIKLRIGTIMEQIFPEYEKQFSSLWVSTSMGILEKYLTPENIENAPIDELFEIIKDKSHNKLTMKKAISIREAAADTFGIKIAQDAFSFQLKQLIDRMNFLDKQIEALDCQILEYYEKFDCYLHTIPGIGMIAAATILAEIGDINRFKSSSALVAFAGIDPTVRQSGEFSSTHNHMSKRGSPYLRHAIFLAATTCSFHNSPLNAYYKKKRDQGKHHLTATGAVARKLTTVIYAVLRDSKPYEPKKFC

SEQ ID NO: 332493 - protein, 412 aa, unidentified
MSVALPPAQFFAGLDWAAEVHAVCVTDHAGTVVDRFTIAHTADGIAMLIRRLAKLAEPADVQVGIERPNGRLVDLLLEAGHPVVPVSPNAIKSWRDGEVLSGAKSDAGDAAVIAEYVRLRQHRLRVAVPYCDDTRALRTVVRTRTDLVDMRVAATNQLAALLDDHWPGAKVVFADVESPISLDFLTRYPTPASAAHLGEKRMRAFMTKHKYCGRRSAVALLERLRSAPAGSTGEALTEALRDAVLGLVGVLKALNAAVRDLDRSTAAHLGEHPDGEIFTSLPRSGRINAAQMLAEWGDCRQAYETPDSVAALAGCTPVTKESGKHRAVHFRWACNKRFRVALTTFADNSRHASPWAANIYNNARKTGKDHPHAVRVLARAWIRVIWRCWLDRVPYDPAKHGAAAALNELAAA

SEQ ID NO: 332494 - protein, 352 aa, unidentified
MHDITPDAIVIGVDTHKDAHVAVAINGLGAKLATASFPVTTQGYRQLADWAAGHGAVHTIGIEGTGSYGAGLTRSLTAMGVRVIEVGRVNRQLRRRHGKTDTVDAESAARSVLAGDAQGQPKTGDGAVEMIRHLKIARDTALKARTQAMVTLKTLLINAPQLLRERFIGITGKMTLIRGLAALRPGMPVSPTASAKMALRALAQRWLMLDAEIKEHESVLEVLVRAQAPALMDAPGISTGTIADMLVVLGDNPQRIRSEAAFAKLCGVCPVPASSGKTSRYRLNRGGNRRANAALYRVALVRMRHHLPTREYIKRRTAEGKSPREIRRCLKRYIAREIYQHLCTGKHPAKHS

SEQ ID NO: 332495 - protein, 349 aa, unidentified
MEQNEVILGVDTHLDTHVGAVISDTGRLLGTLSVSTDTAGYLDLLSWANSFGPLRRAGVEGTGTYGAGLARLLRDHEIEVLEVNRPDRAMRRSRGKSDPTDAENAARAVLSGRATAIPKEQSGAAEAMRAVSVARRSAVKAKTQAINQLRALLVSAPQEIRERLLKAKTAECVEGCARLRSLGKTPMLQTLTTTLRLLAKRWLTLAEELKALDSMLESLTSQHARRLRERFGVGPQTAAVLVAVAGDNPERLKSEAALAALCGTSPLQASSGKTVRHRLNRGGDRSANNALWTIAMVRMRSDPRTRAYVERRTKEGMSNKEIHRCLKRYIVRELYPLILADLADSTLAT

SEQ ID NO: 332496 - protein, 346 aa, unidentified
MIVIGIDPHMKSHAAVALDAGSGRRLAETEVATDAAGCEALLAWARRLGEERLIAIEDCRHVSGRLERRLLPHGERLVRVPPKLMAKARASARTPGKSDPIDAECVARAALREPHLPEARLAGPERDVRLLVDHRDDLVGERKRAQSRLRWHLHDLGLDLALPPRALDRYVWLDRVETGLREQAPGMRRRIALELVTRCRELTESIRTLEREIRALMRLLAPELLALPGCSALCAAQLVGQVAGAGRFRSEAAFAMHVGAAPLLASSGKTARHRLNRRGNRRLNSVVHMIAVTQVRMHPPAIAYVARKRAEGMSTREALRCLKRHIARTVFKTMRRAEQARLAVCC

SEQ ID NO: 332497 - protein, 429 aa, unidentified
MNIKPIAGIDVGKFFSEMVIISPSNELFARMRIHHDSNADMRRAIELLKKAEKDFASRPFIVIESTGHYHKILFHFLQKSGFEVSTINPIQTNCIKNFGIRKVKNDKVDARKIALLYRFHELKPTSISNEDIDCLRSLCRQYYKLSDELTAYKNRFISIVDQLMLNFKEVFPNVYSKTAIAVLEECPTPTAIIEADRDKLISIIQNNSRKSLEWATKKYELLVSKAREFEPLSINNAANVTMLGIHIAMIKTLQENLDKILKAIHQLIADDLSKDLPAMALTIQLLQSIPGVGFLSAATIVAEIGDFNAFSKPKKLVAYFGIDPSVRQSGEFTGTHNKMSKRGSRLLRRVLYTIALANIRTKRNNEPCNPVLMEFYKKKSQNKPKKVAIGAVMHKLVFIIFAVLRDRKPFELRSPEQHAKILAKNRTVA

SEQ ID NO: 332498 - protein, 458 aa, unidentified
MARRIWSDRPGLDVVHRDAAGIDIGSREHYVAVGPDRDAEAVRVFGCFTTDLRRMAEWLQRCGIKSVVLQSTGVYWIPVYDVLEQYGLEVWLVNAQDTKNLPGRKSDVQESQWLLKLHTYGLLRRSFRPAPEIRGLRTCWRERGEYVQQAGSCIQRMQKALTEMNIQLATVLSDLSGETGMSIVRSIVAGERDGKRLAEFRDPRVKASKQTIAKSLEGTWLPEQLAVLQRQLGDHIQRQIAACDVDLQAMLQQIPAAKVQQQQSLTPAAAPAGKRKRKKNGKSSKNEPKFNLAAELQRVTGVDLSRIDGIKAMTIMTVISEAGLDMSKWATEDHFVSWIGLSPRNDVSGGKVLKRKTRKVKSRLATALRTSATTLRQSDSYLGAQFRRLRSRLGPPKAITAMAARQARLVYRMLKYGQEYVDKGAVIYEQKYREQQIRFLEKRAAQNGFALVPLHQNA

SEQ ID NO: 332499 - protein, 441 aa, unidentified
MMSIVNPNAAGIDIGSKSHFVAVGPKDDQIKEFGIYSSDHKDIISYMHLHKIATIAMESTGSYWQTLFFELQKAGFEVSLVSGHQTKNLKAKTDVKDAQWIQKLHSLGLLSGCFLPDEQTNRLRIIHRHRKSLVEESAKMTNMMQKSLRLMNLRLDVVLSDITGKSGMLIINAILRGERDGKILSELTDRKVKKSKEEIADALQGHWSEEYLYELKDCFELYGILQEKIQNCDVQIENLLVEFTKDSKNDAKEVVLTKKQIKGKNQPKFNLTKLSYQYYGVDLFAIEGISVNTVLTLITEIGKGIYKFNTAKQFSSFLRLAPSNRISGGKVISSRTPKGANRLALALRNAANTIDRKKEGNLMHFFKRVAYKKGRAAAITATARKLAVIIWNMIVKQVEYNPIPDQDYKLLLKQRAIRSIRNRMNRLNITSSEISDNYQFS

SEQ ID NO: 332500 - protein, 479 aa, unidentified
MTPSKDAFPEPCPPVPTIPEPSVLRPSFSLPLYNPHAAGIDIGEAEHWVAVPPDRAPQPVRRFGTFTADLDALADWLLDCGITTVAMESTGVYWIPVFELLEARGLQVFLIDPRQAQRAPGRPKTDRLDCQWLQRLHAYGLLAAAFRPDDQVCVLRSYLRHRQMLLTYGAHHIQHMHKALQQMNLKLSQVVSDLTGATGMAILKAIIAGERDPLTLAKLRNPHCQHREDEIAKALQGTWRAEHLFALQQAVELYQFYHQQLTVCDQHLQTHLGTFADQSAGQPLPPKPRRHKKANEPHFDARTPLYRLAGVDLTTIEGIEEGTALVILAEIGTDMSRWPSVKHFCSWLGLAPQHNISGGKVLSRPVRPGAHRVAVALRLAARTVHHARTALGAFYRRMRSRLGAPKAITATAHKLARLVYSLLKHGSAYVKQGLDDYESQYRERKVKAMARQAKALGYTLVALGTPEVQSLDAVAAPTS

SEQ ID NO: 332501 - protein, 339 aa, unidentified
MKLYAGIDLHANNNYLAIIDENDTRVYKRKLSNQADVILAELEPFRADMSGVVVESTFNWYWLVDLLMDEGYRLHLANPTAIQKYKGLKHSDDNHDAFWLAHLLRLNILPEGYIYPKEDRPIRDLLRKRGHLVQLRTALINSLQGIISRNCGCSLSASKIKAIKHNHISPLLCGQDDLELSGTISKECIDFLTKKIREIEKTVKEKKKLRRSFFGLQTIPGVGLILALTIMLETGSICRFSKVGQYASYCRKVPSTWTSNNKKKGTGNTKNGNKYLAWAFSEAAEMSRRFNEPAKAFFNRKSIKTNRMVAHAALAHKLARASYYIMRDGVEFNSNKLFA

SEQ ID NO: 332502 - protein, 382 aa, unidentified
MQTIDPVNPTILLAIELSTSTWLVAARVPGLDKPRLSRIDGGDTAALLALISSLRARAACGLDATMGVVCCFEAGRDGFWLHRLLTAHGVVSYVLEPTSILVNRRARRAKTDRLDAEGMLRVLAAYLRGDHQACSMVRVPTPDQEDAKRTHREREHLVQERLRIENRIEALLFTQGIRKRPSLRSWERDLTVLRTGDGRKIPRHLRAELDRLRRRLVLTLELIREVEAERDQVTKTKPQDQAHHKITALCRIRGIGENFAAVLTREVFYRSFDNRRQIASYVGITPMPYQSGGMDRDRRISRAGNPRARTTMIQLAWLWLRYQPDSELAEWFRERVGTLAGRTRRIAIVAMARKLLIALWRYVETGVIPTGAEIRAETTVAA

SEQ ID NO: 332503 - protein, 343 aa, unidentified
MGEVSTIGLDIAKSVFQVHGVDGTGAVVMRKRVGRSKVVEFFSGLSPCLVGIEACPSAHYWSRELQTLGHTVKLMPPSYVKAYLKRSKNDANDAAAICEAVTRPSMRFVPTKTQEQQTGLMLHRTRQLLVRQRTMLSNAIRGHMAELGIIAAKGRNGTAELLQIIADVADDRIPPVARFCLDLLARQYLTLSAEVSTIDKRIHAWHRSCEESRRLEEIPGIGPIVATALVAEIGDWGAFRSGRSLAAWIGLVPKQHSTGGKERLGSITKQGNRYLRWLLVAGAMAVIRYARQHGTKRPWLIRIMDRRPAKVAAVALANKIARIAWAIMVRGERYREPKLLLAA

SEQ ID NO: 332504 - protein, 409 aa, unidentified
MHQPTTTTTTTSTNLREDTDPDAPIRWAGVDWSWSDQAVCVVDETGAAVERFAVPNTTTGLSKMVTTLHRHRVTGVAIERGDGPVVAALLAAGLTVFVIVARQVSALRTRYSTAGNKDDRFDAYLLADVLRTDRRRLTPLTVDTDATVGLRMLIRTRADLVKARVAAHNQLRAHLQLAHPGAVGLFHELAGTVSLAFLDRFPTARHAAWLSEKRLATWLRSARYTRSNTRTAAQLLDHLRQAPPGHPDGPAADAAQVITTELVALLRSLKERISIIETHIEQALDAHTDGAVFTSLPRSGRVRAATLLAEIGDARGRYPTDDALAAAAGISPSTRASGRSHYVAFRRGCNYRLRQALVDFADGSRAGHPWAQNTYARARARGHNHAHAIRILARAWLRIIWRCWTENTP

SEQ ID NO: 332505 - protein, 473 aa, unidentified
MFSWLDFPEGNYPCNKQGCRITDRSGISILSQYIKNKEIFKMSKYINSPVIGIDVAADFSIVAILSPNGDIYRKSIRINHNLEGFNKLVSEIEKVEKEFNMKAATFMESTGVYHLSLFHFLCDNEFDAFTINPLITNSNKNSNIRKVKNDKEDALSIARLCKYQDIKVSGSFDIALYSLKSLCREYYKLTDTKSTYKKKLSNDLRLVFPGYSDIFSDITSKTSFEILKSYPMPMDILSANKDDLINILLKSKKGILYAEDKYSKLINTAKSAKVIGIPSRSLFIKLISDINIIENFENQIELLLSEIKNLLYSSQIPQSILDNIELLKSIPGVGELTAITIIGEIGDIKNFTKPKHLVAFFGLDPSVNESGNFKGDNNPISKRGTSIGRRALYTVALASIRSKRNGNATNPILLDYYKINMNGKRKKVGLIAIMHKLMNYIFSVLRNQKPYEFRNPKLHCKMFLENKATLKVA

SEQ ID NO: 332506 - protein, 423 aa, unidentified
MSYRIAGIDVHKKMLAVVVSDVEFDGEYQFERVRYSSTPEHLRSLAEWLVAQRVEEVVMESTAQYWKPVWGALERYWKPSCEEREGAGPTSGTLHLAQAQSNRGRRGRKKDFPDAERLVKRLVADELVLSFVPDTEQRLWRTVTRRKYQLTRNHVRLQNQLEGLLEECHIKLSSLVSDLLGASARRMLKALAEGETNPVALAVMADKNLRATQSQLCDALGACTELKPVYRRLLKMFLEELQFIDQQISQLDQELANLLSRHHDAVVHLAEIPGLGVDSAQQIIAEVGAGAATFSSAKQLSSWVGACPGEEESAEVSKSHRSPKGNRHMRRILNQTANAAAKSKGTIFEIVYRRLVSRLGHNQTIGAIAHRLCRLIWIILHRGVRYEERGPSVNAKTRRHRTNRMIRELRNLGYRVEPLVTTV

SEQ ID NO: 332507 - protein, 387 aa, unidentified
MIYFIGIDISKYKHDFCIISNTGEVIVENSSFENNQKGFQTLIHLLEPYNKQSVRIAFEATGHYSLNLELFLTNQGYSFMKMNPLVVHNYLKARSLRRTKTDKADSKTIANYLMSVQYIPNSTLLYHTYTLKQLCRSREALIKERSKIAVLLTNQLDLTFPELKVFFNNNFSTTLLYILEKYKNSSHIALMKDYESLRKVSHGRFSYAKFTKLKELAKNTVGYHDENTDLLISTYVSLYNELSNKIDPIDKQISTIIKELNPRILSIPGIGVISAAAIISEYGDVNNFSSPAKMLAYAGLEPSINESGTLQSNGKMVKHGSGHLRYALMNIAMIILRHSPCFYDYYLKKRSEGKCHRVALSHVCKKLIRVIYSLEKYNHIFDPSLLK

SEQ ID NO: 332508 - protein, 403 aa, unidentified
MNAVGIDVSKGKSMVAIMRPFGEIVLKPFEIKHTNNDIQSLVALINSIEGESRIVMEHTGRYYEVLAHQLSKANLFVSAVNPKLIKDFDNDSLRRVKSDKADAIKIARYALDKWQDLRQYSVMDELRNQLKTMNRQFVFYMKHKTAMKNNLIGILDQTYPGVNTYFDSPARNDGSQKWVDFASTYWHIDCVRKMSLNAFIDHYQKWCKRKKYNFSRVKAEEIYGKSKEIVPVLPKDETTKLIIKQAVIQLNNASATVEELRMLMNETATKLPEYSIVMQMKGVGPSLGPQLMAEIGDITRFSHKSAITAFAGVDPGVNESGTYKQKSVRASKKGSPELRRTLFLIMDTLIQLKPQDDPVYQFMAKKKAEGKQYYVYMTAGANKFLRIYYGRVKEYLASLPESE

SEQ ID NO: 332509 - protein, 381 aa, unidentified
MPSMQLRRDDVIVGVDTHKDNHVAVAIDGLGGRLGDIIVPATIAGFEELLAFCLAFVGSAGRLVGFGIEGTGSYGVGLARYLRNQGHDVHEIARPARAAERRLAGKNDTIDAEHAARQLLSGHGLSTPKTADGAVETIRLVKIAYDGAVQARTTAMITLKATLATGSEALRAELEKLTDHKLITACAALEGPAALPPVRRGAPAVVVPADPDVAMRHVLSSMAKRWLSLHEEAKAHAASLKALTAAAAPQLVEAVGVGYDTAAQMLITAGDNANRIKSEAAFAKMCGACPIPAGSGKTNSRHRLYRGGNRQANAALHRVVIVRMRWHQPTIDYVARRTAEGMSKREIIRCLKRYLARELFRLLPAPDTIANPVGKQPQMAA

SEQ ID NO: 332510 - protein, 315 aa, unidentified
METFFSSVAGIDVHKDQITVSVIIGEHGENLLKETWESNTFTEDLENCGRKLISLGIKHVAMESSGIYWRPIYNVWEKMGIIITLGNATHIRNVPGRKTDVKDSQWIAELHRNGLIRPSYIPEEEFRELRSLTRHRRSLVEDIGRTKKRVQKILEDGNIKLSSVISDVFGVTGFKIVTALAKGITDPYVLAKEISTNIKASEKEVIRSLKNTLKGYQIVLLRELLTQYLYLSQLRDNIEKEIDIKMTPYNELVKRLDGIPGVDKISAEEIIAEATTKMGNFKSGKHFAAWAGVAPGNHESAGKKKRQNVDTGTQH

SEQ ID NO: 332511 - protein, 387 aa, unidentified
MSQTVAAPIPAAVDHERTLVLAIEVSNKSWVIAAQVPGLPHTKAKRTIDPEAEALLAAIAAYRARAAATGRSIERVIAVYEAGWSGFWLARWIMRHGMEAYVIQPSSVPVDRRMRRAKSDGIDAELLLRTLLAWLRGEPRVCSMVPIPDEADEDARRCVRERTELISERVGLTNRIGAVLATLGVSDYNPLLRSRHRRLTELRTGLGEPLPRNAQAKIERLLARLELVLAQIAELERERDAVVEAEACDKASEMIQQLTNLRGIGVQSATVLVREAFVRRFANGKALGSYAGLASSPYSSGGIDREQGIGKAGNRRVRTVMVELAWLWTRYQPGAAQVRWFRERVGSTGRRARKIMVVALARKLLIALWRFVIDGVVPEGAILKPAA

SEQ ID NO: 332512 - protein, 366 aa, unidentified
MKKISTMQAFSNEILKEQELTIGVDLGDRWSFYCVLDEAGKIILEQKVATTPEAMKQTFGKIPRSLIALETGTHSPWVSRVLTELGHEVIVAHAQKVELITKSNRKDDRHDARTLARLARIDPELLGPVRHRSAKAQIHLTVIRARAELVSARTALVNAARGLVKSFGERLPKCGTYQVDEKLAEGVSAELRDVLAPLLREVESLNERIKEYDERMEKIAKEVYPEVFLLKQVKGVGTQIALTYVLTIEDPYRFPKSREVGCFLGLRPGRRNSGESEPQKKISKEGDRYLRTMMVQGAHYILGPFGEDSDLRRWGLKLAERGGKNAKKRAVVAVARKLAVLLHRLWVSGEVYEPLRNSQKAMRAVA

SEQ ID NO: 332513 - protein, 356 aa, unidentified
MSREIKYIGMDVHQEAVVIAVLSSSGKLVMESIVETKASSILQFIHGLRGELHVTWEEGTWASWLYDLLKPQVQEVLVCDPRRNALLKEGNKSDKIDARKLADLLRTGMLRAVYHGEHGLRTLRELGRSYQTIRQDLNRVMNRIKALYRGWSIPCAGTRVYAPRYREEWLHKIEPVGVRRRAELLYQQLDGLQTLRRTLRPELLAESRKHKASKLLRQIPCIGPIRAARLLALMQTPHRFRSKRQLWTYSGLGIETRDSAQYRYVQGQLQRTKKPQQIRGLNQNHNHEMKEIFKGAATRASCGVGPLRDFYVALLAKGMKPEMARLTLARKIAAIALTLWKKEERFDAEQLKPQAA

SEQ ID NO: 332514 - protein, 415 aa, unidentified
MGLKIVYPICCGIDVHKRFVVACIASTDHQGVTSYKNHRFSTYTNGLRKLLQWLLENNCLDVCMESTGKYWIPVFNILEDSCNITLAHPKYVKAIRGKKTDKKDAKWIADLFKHDLVAGSFMPPARIRQLRDLMRYRSKLTNFTSSEKNRLQNSLTVSNIQLGSAVSDTFGKTSMNIIEKLLENPTETDFDIEPLVYGALRNKIPELKLAMDGFITPEQAGKITVIKQHYEDLQERKADLEKLILSLAEPYMEEINLLLTVPSIKNIFTAIAIISEIGVNMDVFPTAKHSCSWAGLTPTNNESAGKKKSVRISRAGVYIKPLLVQCATSVVKSEKHPEIRNRYLRIKKRRGHKRAIIAIARMLLTAIYHILKKKESYNPDLYQKADVLPVSREITVEQAILLAKSQGFRIMEKAT

SEQ ID NO: 332515 - protein, 388 aa, unidentified
MTQTPVPQPTYTAADFDRTLILALEVSEKSWVVAAQVPGLPGSKPRRTLSPTAEALLEAVETYRARAARAGRIVDRVVLVYEAGYSGFWLARWLARHAVDTFVIQPSSVPVDRRARRAKSDGIDAELLLRTLLAWLRGEPRVCSMVPIPTEVDEDARRCVRERQDLLGERVAIANGIASILATLGARGYDPMRRDRRQRLEGVRTALGDPLPPQARARIGRMLDRLELVLTQIAALERQRDAVLDEAAPGEAERMIQRLVRLRGIGVQSATLLVREAFVRPFANGKALGAYAGLSPTPYSSGGTEREQGIGRAGNARLRTVLVELAWIWQRYQPGSAIVGWFRDRLGGAARRLRKVMVVALARKLLIALWRFATQGVIPEGAALEPAA

SEQ ID NO: 332516 - protein, 350 aa, unidentified
MMEAYDGRQVVGMDLHRRRSVLVRMTEDGRKLETVRIDNSPAALRAVLARAGTNPRVVVEATYGWYWAADTLAAAGADVHLAHPLGVKAFSYRRVKNDEKDAADLADLLRLGRLPEAWIAPPQVRELRELTRYRIKLVRLRSSAKDQVHAVLAKLGIPVPCSDLFGAFGSAWLDGLQLPQPYAGKVASLRQLTGWLTSEISLLDVVIADLLGACPPYRAVRQLPGIGPVLAAVAIAEIGDISRFPAPGQLCSWAGLTPRHRESDLKVARGHITKQGSPLLRWAMTEAVQHQPAGSPPRELKDRITARRGSQARNIAKTAAARKLLTCVFYAMRDGEVRSLAAPAPALQAG

SEQ ID NO: 332517 - protein, 424 aa, unidentified
MTPHENVEPAAAEDFAAWVAIDWADKKHVWALQETGATSRQRGELEASPEAVDAWVGELLRRFPERRIAVALEQKRGALLCLLSKYAALVLYPVHPATVSRMRAALYPSNSKDDPKDADLLLDILLYHRKHLRRLDADTVETRKLQILVQDRRLLVDQGTAYSNQLRAKLKLYYPQALRWLPDLHAVVAGEFLKRWPTLPLLQKARRETIEKFFHRHNCRSEELIRMRLDEIPRAVVATTDAAIVDSSVAMVRALVDLMAVLHTHIAALDQEIAATAAVHPDLPIMASLPGAGRVMVPRLIAAVGTQRARFACADEMSSATGIAPVKQASGQNEWIHFRWACSKFARQSFHETAGHSIAQSAWAKAFYEAQIRQGKEHHAAVRALAFKWQRILFRCWQDHQPYDEQKYLAALRRRGSPYAQAAA

SEQ ID NO: 332518 - protein, 318 aa, unidentified
MMPASVFVGIDVSKRQLDVAIRPGGRCSVSNDATGIIQLLEQVKAVHPTLVVLEATGGYEIPVTGALAAAGLPVVVVNPRHVRDFAKATGTLAKTDALDAQTLAHFAEVIHPAQRPLPDEQTQALAALVARRRQLVDMLTAEKNRLRQASTQIRPSLNAHITWLEQAIQEADRDLAESIRQSLLWREKDELLRSAPGVGPVFSTTMLATVPELGTLTHKQISALVGVAPFSRDSGTLRGKRMIWGGRAQARAVLYMGTIVATRFNPVIRAFYQRLCAAGKAKKVALVACMRKLLTIVNAMLKHRRPWSHAVNTAGAGA

SEQ ID NO: 332519 - protein, 411 aa, unidentified
MQVVYQRCAAVDVGKDVIAVAVRLPGDGPDGRATIKRMFKTFYGVLAEAARWMGSLGVTHVAMEATGIYSMPVYHALIEHGDFEKVLVCNAGHVKNVPGRKTDFSDAEWLAHLLECGLLAGSFIPPAEIKAARDVVRYRAKVAQQRVSEIARLGNVLQDAQFKIDSVASSIATKSGRAMIEALVDGERRGPVLAELAKGKMRAKIADLSMALEGRFGEHHALMCRLHLDHIDHLEAMLARLDAQIEAMMAPFQCWQDLLATIPGIGRLSAAAVISEIGVTVTEFFPSDAHLASWTGLCPGNHESAGRRRSGRRRKGNEHLQSILVECAWAAVRHDGYLKSLYHRHVMKWGGYRSSTAKKKAIVVVAHAMIVIIWHVLATGKPYCELGEDYFTSRLDPERETRRLITRLPDR

SEQ ID NO: 332520 - protein, 352 aa, unidentified
MSEYIAFDSHKRYSLVEREDVATGKIVQQVRLTHAPGAVRRYLAQCAPGTAVALEATGNWYWIVEEIEQAGLQPRLVHPRKAKLMMGLINKTDKLDVHGLNRLQRNGTLPTVWIPPRPLRDLRELTRTRLVLVEQRTRLKNRLTATLAKYGVPPSEYSDAYGKSARAELEARIEPLPEQTRWVCKQLLAQIDFLVRQIRQLEQRLEDLVEVTPEMERLTTLPGIAEILAATIALEIGDIGRFPDAPHLASYAGTTPRVHASGGRVRYGRLRTDVNRYLKWAFVEAANSVAVNHRRCPERHVSQLYDRLRQRKGHHKAIGAVARHLAEAAFHVLRRQEAYRDPVLERGCTSEV

SEQ ID NO: 332521 - protein, 427 aa, unidentified
MNYKQNEKILQLTDKSLIIGVDIAKNKHVARAQDFRGVQFGKPLYFENALEGFQTFIHWMDELAIQQEKSDFIIGMEPTGHYWLPLAYWLMEKQLKVVVVNPAHVKKSKELDDNSPTKNDVKDARVISRLIQDGRYSEPHLPEGIYADLREGMNMYDQLRKDLQAVQGRVHQWIDRYFPEYTTVFTNWEGQSSLQVLKMGLFPDEISQKDEMEILSEIRKEVKRGVGLKKVRQLKEAARHSIGIQEGKTMAKLKIQTLMDQYTLLHEKINELWEMIEGLTSRIPGVQEMAAIKGVGDVTIAAFLAEVGDLHNYSHPEQIIKLAGLNLKLATSGKWQGKTVITKRGRPKLRALLFKVILPLVNHNPAFKAMHAYFTTRKENPLKKKQSLIALCCKLIRILFKVGKQQVAFSPEKMLRDIPHFRLQNAA

SEQ ID NO: 332522 - protein, 344 aa, unidentified
MDNHTQYSGFAGVDLAKKVMQIHFVTGDGEITDKQVKRAEFLDFFRNRTKCLIGMEACGASQDWARKLEAMGHEVHLMSPKAVKPFVSGQKNDYNDAIGIYKAMFNGVRRVPVKSTEIRDLQTLRRIRSQVTKDKVKEINHVRGLLAEYGIVMGKSITAFNKGISSALESLKERGDVSPLVAEELQTTAESIKTKIERQKRLDREIEQLARGCKNYENFLKTPGVGPFTAAMLCVLLCEPAIFANGRQFAAYIGLAPRSRGSGGKNFIIGIPSKFNCDRESRAVFVECAQALARYKNKSPWVDGILRRKPKKVAVIAIANKLARQVWAMANKGESFKQMTILTA

SEQ ID NO: 332523 - protein, 348 aa, unidentified
MLADQLEYVVGVDPHRDTHALAIVDVRTGGVVFEASVEASSIGYARALELARGQAPGRRSFAIEGAGSFGAGLSRFLSGEGERVLEVGRLRRERRSGGKNDALDAIRAARSVLAESRAAEPRAGGEREALRALMAAREGAVNARRAALCQLRALLITTPESLRSELRPLTRAQLLRRLGSVRPDRRRDVELRGTLRALRALARRVRQLTSEERELADEIERLARALAPQLLEQAGVGPLTAAQLVISWSHQGRIRNEAAFARLAGCAPIPASSGQTIRYRLDRGGDRRLNRALHMILVTRRRSHPATIAYIERRVQEGKSSREASRCLKRYLARNLYRLLEQGAPLAA

SEQ ID NO: 332524 - protein, 366 aa, unidentified
MKKTSTVQVFKNEIFKEQKLTIGLDLGDRWSFYCVKDEAGQVILEQKLPTTPEAMKQTFGKIPRSLIALETGTHSPWVSRLLTQLGHEVIVAHAQKVQWITKSSRKDDRHDAQTLARLARVDPELLGPVRHRSVQAQLHLTVIRARAELVSARTALVNAARGLVKSYGQRLPKCGTYQVSEKLAEGLSTELRGVLVPLFKEIESLNEHIKEYDERMENIAKEVYPQVSLLKQVKGVGTQIALTYVLTIEDPHRFPKSRQVGCFLGLRPGRRNSGESEPQKGISKEGDRYLRTMMVQGAHYILGPFGEDSDLRRWGLKLAERGGKNAKKRAVVAVARKLAVLLHRLWVGGEVYEPLRNSQKAMQEVA

SEQ ID NO: 332525 - protein, 425 aa, unidentified
MEVIHRRCSGLDVHKETVVACVRLVLDGKITREVRTFETTTSGLLLLLAWLTELGCTHVAMEATGVYWKPVWNILSDGDFELVLANAAHIKNVPGRKTDVSDAAWIADLLAHGLIRSSFVPEQAIQELRELLRTRKQLGRQQSSHIKRLQKTLESANVKLDSVITDIVGKSGRAMIQALMAGETDPGKLAALADHRIKASAQELREALRGRVTNHHRFLLHLHLQHIEFADAAIQDIDRNVTALITRMDQEVEAGQTRASFQSLILLLMTIPGIDVLSARIILSEIGRDMSRFPTAGHLLSWAGLCPRNDESAGKRRSTRLRKGDPWLKTLLVQCAWAARRKKGSYFNAQFLRLRGRRGPKKAACAVAASLLTTIYHMLKDGTQFQDLGADHFDRRSKEVRAKRLVAQLAKLGFDAKLAPLAQAA

SEQ ID NO: 332526 - protein, 347 aa, unidentified
MRFYQPHTEFYCGVDLHTRNMYCTILNRKTEVVLHQNMKANGKRFVQLIEPYRPNLVVACESTSNWYWFADLCEEVEVEFVLGHALYMKAIHGTKSKNDRIDSEKIARLIAGGLLPQAYVYPRRLRGLRDLLRRRLKLVRQRAELYTHIHAVNSQFNLAPLSRELKSQATRQAVAHRFEDAAARRSVEADLELIEHYTPLITSLERHVRRAADEVYAQERAILETIPGVGLITSLTILLEIDRIDRFPTRQKFCSYSRLVYPRGQSDGKLYGTQGRKQGNPYLKWAFTEAAVHSASHCDAIGKALSRLERKYGAGKGKSILAHKLGRAVYYMLLRKKVFDLEKFLRG

SEQ ID NO: 332527 - protein, 387 aa, unidentified
MIYCGIDIAKHKHAVSLLDEKGEQIKPVFMVENTRPGFDRLNQELGGMAGPITIGLEATGHYWLALYEELSQRGHTLIVLNPFQVAAYRRSGIRKVKNDRHDALWIADFIRIANLPATSRDIPTILQIRELSRFRFRLTEQIGDCKRKILSILDRVFPEYERLFSNVFIKSSRQVLKTAVSAQEIADYDLGELALLLHSASRGRFGDEQAERMQTAARQSVGIGFLTNAVRVEMSCLLDQIDLLEEQRDQLDQTIEPLMQQIPQHITTIPGIGPVIGAAILSEIGDIQRFDSPEKLVAYAGLDASVYQTGQFEASEAHISKRGSPYLRHALWQAANVAVQHDPDLIAFYQAKRKEGKHHNVVIGAVSRKLVARVFIVLKEQRPYVIR

SEQ ID NO: 332528 - protein, 411 aa, unidentified
MTSLYCGIDWGESRHDVAIIDQAGTAISRAKINADATGFTELLDMLAEAGDSADDPIPVALETDRGLLVAGLRATGRAVYPLNPLAASRYRARHQVSGAKADATDAVLLANILRTDAAAHRPLPADTELAQAVRVLARAQQDAVWARQKLGNQLRSLLKEFYPAALDAFAGMPNGGLARPEARTILAAASTPAKAAKLTRAKLRALLTKAGRKRGIDEEADRLHAIFRREHLRQPGVVEDAMGIGLTALLVQFDAACRTSDDLEAAARDHFERHPDAKVIGSFPGMGTLIGARVLAEIGDDRTRFADARGLKAFAGSAPVTRSSGKKTVITYRRIKNNRLAAAGSIWALASLKASPGAKHHFQTRRERGDWNRQAQRHLFNKFLGQLHHCLQTSTSYNETHAFPPPSVLAA

SEQ ID NO: 332529 - protein, 362 aa, unidentified
MIQEPKIFSYKEAFMRFYTKQHKFYCGIDLHAKTMYLCILDQESKILLHRDIKTNPDIFLKTIAPYREDIVVAVECIFTWYWLADLCSKENIPFVLGHALYMKAIHGGKAKNDKIDAYKIASLLRGGMMPMAYVYPSDMRSTRDLLRRRNHLARKRAELIAHIQNTNHQYNFDDLGRISRKCDRNKTDVANRFPDPSVQKTIELDISLIEHFDKLLNHLEHELSLIAKVHDADSYFRLRSIPGIGRVLGLSILYEIHDISRFPSVQDFVSYCRLVKCAKESAGKIMGTSGKKIGNAHLKWAFSEAAVLFLRRNPEAIKYRAKLERKHGKAKSLSILAHKLARAVYNILKKKEVFHPETFFAK

SEQ ID NO: 332530 - protein, 346 aa, unidentified
MGMDIAVLGVDLGKNVCSVVGLDASGAVVMRRKVRRETLIRLAEKLPPCVVGMEACCGAHHLGRLFAAHGHDVRLMSPEYVRPYVKAQKNDDRDAEGIAEAATRPTMRFVELKSQDQLDMQTLHRSRDRLVGERTALINQLRAILLERGMIAPQGKRKLEQFLSVLMDEQDGAGLSPRMVILVADVRAQWAELDRRIAAFDGEFVRWARENEDARRLVTIPGFGAIIASALVASVGRAEAFDRARDLSAWLGIVPQQFTTGGKPKLLGISKRGNKYLRRQLIHGARAALPYVAERDTPLGRWAKALLERAHRNVAVVALANKLARIAWAVLRRVERFVATGMPRAA

SEQ ID NO: 332531 - protein, 430 aa, unidentified
MNFYSNYISVGVDVAADFSWFCILTPDGKEFRKPFKVEHDNADSLRNAVLTIKKAEEQYSMKSRTFLESTGIYHFPLFCHLKELGFEVFVINPLITNSNKNVGIRKVKNDKYDAKRIAGLGYSPDLKVSVMPAELIMNLRCLCREYYSLVDHRSAYVNKLKAQLRIVFPGFCKVFSDVTGATSIAVMKNFSTPEDILNAQPNEVIDLIAFSSRKGLKYAKDKYEKLITAAKNALNFRYNLSTVYDVLDIHIHFVEEFDKKIDLVLAKIKAFVDKNKSESFVQQIEYLDSINGVGFLSAVTLMCEIGDFAAFSKPKQLFAYFGIDPSVSESGKFKGTENKMSKRGTRIGRRVLYAIALASVRVKRNGVAINPVLHEYYQKKKESKPKKVALGAVMHKVSNIIFAVLRDSKPYELKTPEEHRMQYLGTDKAA

SEQ ID NO: 332532 - protein, 377 aa, unidentified
MKKNIRFIGLDVHAETIAVAVAEASGEVRSLGVIPNRAEPVRRLVRKLGPAQSLRVCYEAGPCGYVLYWQLTGLGVHCDVVAPTLVPVKAGDRVKTDRRDAQKLARSYRSGDLTAVWVPDAAHEALRDLVRAREAAKKDQLRARHRLQKFLLRRGLQPPEGIKSWTLKHLNWVKTLRLEQFALDVTLLDYVTEVDRARERIERLERAIDQAIEMAPAAIRAVVDALQSLRGVARLSAATIVAEVGQLSRFPKPRQLMGYTGAVPSEHSSGGSVRRGAITKTGNAHLRRILIEAAWAYRYRPNIGSELRHRQAGASEEVKAIAWRAQHRLHHRYARLSARGKTKQHIVTAIARELAGFIWAVGVEVESKLATNSARAA

SEQ ID NO: 332533 - protein, 402 aa, unidentified
MNAIGIDVSKGKSMVAIMRPFGEIVSTPFEIKHTTSDIKSLVELINSVEGESRIVMEHTGRYYEVLAHQLSEANLFVSAINPKLIKDFDNDSLRKIKSDKADAVKIARYALDKWQNLKQYNVMDELRNQLKTMNRQFGFYMKHKTAMKNNLIGILDQTYPGVNSYFDSPARSNGSQKWVDFASTYWHVDCVRKMSQNAFIDHYQNWCKRKKYNFSKSKAEEIYGKAKELVPVLPKDDITKLIIKQAVDQLNSASETVESLRTLMNKTASKLPEYPIVMAMKGVGPSLGPQLMAEIGDVTRFTHKGAITAFAGVDPGVNESGTYEQKSVPTSKRGSSALRKTLFQVMDVLIKSKPQDDPVYQFLDKKRAQGKPYYVYMTAGANKFLRIYYGRVKEYLASLPES

SEQ ID NO: 332534 - protein, 397 aa, unidentified
MSAVVGIDVGAYKLAAAVCRSGERDAERSVLRISANRVGFDELERWLERQGPVERVVLESSGHYYWPLASHLHRRGYQVAVVNPLRAKYFAKSRLQRSKSDPADARTLAALGMSEEPRVKDPLLGAEAKEAARFWGGLVKEQGQVRQKLLRLVEIGFPELKECFEDPLCETALAVLREAPTARAAARRRVATLADTKKPGGRRRLGETKARRLHDLAKQTIAPPELDAQMGFEVGMQIQQFDLLDKQIEIAEQRVAEVLDSELARRLQTIPGVGPALAATFIAEIGDIWRFDDFDQLASYAGVHPKEQSSGNKGLKTETSWRMAKTGNSYLRAAAYKMAVVGTVHNPVIRAHYLRKRAEGKSAMNALGHCMSKALSIVWGVWRSGLDFDPTLGRPRT

SEQ ID NO: 332535 - protein, 412 aa, unidentified
MQALIERCCGLDVHQETVVACLMVGAPGVRPSKEVRTFRTVTRDLEALRDWLAAEGVTHVGMESTGVYWRPVYAVLEGHFDLIVGNARHIRNVPGRKTDVKDAEWIADLVRHGLIAKSFVPPRPLRELRDLLRYRRKLVESQTAERNRLLKLLETANIKLASVMSDVFGVSGRAMLKALIEGQASAEAMADLAKGQLRRKRADLVLALEGRMEEHHQFLLATQLRRLEAIEHDVAALDLRIVERLGPYRAPHALLMQIPGVDWVVAAVIIAEIGVDMSVFLSVYHLSAWAGVCPGNHESAGRQRSGRARKGNVHLRTILVGAAVSAGRTKGSYLRDKFHRLKARRGPLRAALAIAHKILVAAYHMLAKGVGYRELGEAYLDQIGQTRTVANLKRRIERLGYHVTLQPIAEVV

SEQ ID NO: 332536 - protein, 476 aa, unidentified
MSFEDFVETASPGDGLGGLTPKRVLSCEDCLSARRRASGVSDRGEEAVVLGVGIDWAEEFHLVALGRPGEGVIEVVRVAHHPRAVDALVDRVAALERDPAQVRVVIETRHGLLVDRLVEAGFVVIPVNPDLISRRRGPAKKKDDAEDARIACLLALDRFAELRPLIPHGPIATELRALARDDERAVRDERRLLNRLRADLLTVFPAAVTIAGKNMGAPRFLRMLQRWPTAEALSSVSRDELVAWSRAQRSGYGERFADRVFAALAAEQFRAPDHLVRAKVDTIQLAAAQLLLIGAQRRAWQRRMSDLLLGATRTHTSGDDHTQQQPPGQAFAGGEIYLSFPGLGARLAARIAGEIGDHIEQFTTPNSLQCYAGAAPVTRRSGKRALVVAHRQACNRYLADAVPKWAFASLCRSGWAMEFYQAKRDCGNSHNAALRALGNRWLEVLWHCLHKRVHYEEAVHTANRNRAMSSHPAPAA

SEQ ID NO: 332537 - protein, 352 aa, unidentified
MIVLGADTHKRSHTLAAVAAPTGELVGEQTVPVGERGFGALLQWARRLDDDRVWALEDCRHVSGSLERFLIERGERVLRIPTHLTANARKSARQRGKSDPIDALNVARVALREGLQSFPAAHLDGPELDLRLLVDHRERLVRHRVELNSTLLWHLHDLWPELQLPGGALFSKKWSTRIGRRLARAEQTMRVRIARDELRRLRELTVAINGLEREITELVTQIAPQLLAEPGFGPLTAAKLVGEIAGAQRFATAAKLARAAGVAPIPASSGNTQRHRLDQGGNRQINAALHRVIVTRARSHPQTRDYIARRRSEGKSTREAIRCLKRYLTRRVWHLLQPAGPTPNQAINTSIS

SEQ ID NO: 332538 - protein, 450 aa, unidentified
MSSEPVEVEAEEHEQIVERVASIDVAKAAGEVCTRVPHASIPGRRVTKVWSVEATTNAIVELADQFARERIERVVVESTSDYWRPFVYLLQARGLTVWLVNAHDVKQVPGRPKTDKKDAVWLAKLNERGMLRPSFVPPVEIRRLRDYTRLRTDLVRERSRHAQRLEKLLEDALIKLSSVATDIMGVSGRAMIEALIAGERDPYLLAARAKGVLRKKHDRLVEALTGRFDDHHAELARMLLDEIDGLSTKIDTLTLRIDQLIAEIPAAGAPDPDRGGHPQDAASAPLPAVERLDEITGIGPRTAQVLIAELGLDMHQFPTPGHLVSWAKLSPRTIQSGTRTRPGKTGKGNGYLKGALGEAAAAAAKTNTFLGERYRRLVKRRGKLKALVAIARSILVIAWHLLADPTARYRDLGADFYANRIDKNRRQRHLVHQLEALGYTVTLQELPMAA

SEQ ID NO: 332539 - protein, 362 aa, unidentified
MHNHRTLVGLDVHAKATIAAGLELDTGELRFRRINGPPRSAVNYLEELPGPVMATYEAGPVGYGLAREAAARRIELRVCAPGSIPRKPGERIKTDRRDAERLVRSLLAGELSFVRVPTVEEEQFRDLARCREAARADLMRARHRLSKFLLRREIEFPGPGASWGVAHWQWLRSIELADHPSRSVLNDYLAAVLALEQRRDGLDAQIEIAAPRSPWALTIANLRCLRGINTVTAYGLCCEVGAFHRFEHPATLTAYLGIVPSEHSSGEQVKRGPITKAGSPHARRLLVEAAHHYRHKPAIYKDLARRQRGQDPRACEIGWRCQQRLHRQWQRLRLERGKPGNVVVIALARELANFVWEVGQLK

SEQ ID NO: 332540 - protein, 367 aa, unidentified
MKNTIVHHEGTASLEVAVNKIKLSGSVIKIGLDVHVRLYVAVTQYDQLLPKPARRLAPSEFVPWVRQLLRAGHVVHVVYEACGFGFNLYRELKALGVHCYVIAPRKLDEDYTRVKTDPRDATTLCQRLSRYVEGNTRERAVIRVPTEAEEQARHVSRQREQLVRHRQKLEAQGRSLLVSHGLPAPAHWWKNQTWSRLSKLLPSWICLRLEVHRPALLTLEQQISALSTELEAAAPADVPTGVGKLTTVVMTREICSWERFRNRRAISSYTGLCPGEHSSGTKRIPGSVTKRGNPRLRAALVECAWRMVRFQPNYAPVKKRLSVLAKGARATGAQRKKAIVAVARHLAVDLWRVHTGRNTAAQLGLTI

SEQ ID NO: 332541 - protein, 349 aa, unidentified
MLADEVDYVVGVDTHRDQHVLAVVVAPAGAVVAQQSVAAHARGYAQALRLAETYASGGRVWAIEGAGHYGAGLARYLSSHGETVLEAGRTPRGERRLRGKDDGLDATRAARATLASDKLALPRVGQRREALRLLLLARRGAVDVRRQALVQLRSVIVTAPEQLRHELRGLPQQRLIERCSQLRRSSSRTPDELAATLVLRTLARRVQAATAEAAELEAEILAHVRALAAPLLDEPGIGPIVAAQLIVAWSHNGRVRSEAAFARLAGAAPIPASSGQTTRHRLSRGGDRQLNRALHTVILHRRLHDPATKDYIARRVAEGKTRRDAVRLLKRYLARHLYRVLQNQAPLTT

SEQ ID NO: 332542 - protein, 333 aa, unidentified
MTSKGQEKMSHQIAHASDEITIGIDISKERLDAYLHPAGIARQFPNDRKGHAQRIAWATPHQPTRLVFEATGRYHRALEMTLGKAELPAVKINPLQARRFAEATGKRVKTDPIDAAMLARFGVTMRPEVPPAKDETIDMLAELLAARRGLVKDRTAASNRGKSLTLALLKRQSEQHRKQIDSQIEAIDREWMSVLAGNQTLKARLDILLSIPGIGAATAIALLVDMPELGTMDAKQAASLAGLAPVTRQSGTWKGKSFIQGGRASIRQAIYMPALVAIRFNPPLKEKYEALRQAGKPAKVAIVAIMRRIVIIANALIRDNRHWTPDMAAVGAK

SEQ ID NO: 332543 - protein, 353 aa, unidentified
MISLGVDAHTRVHAAAALDDAGREVGRWRGPNSPDGWRDLRRWACALGDPRQWGVEGAWNYGRGLAQHLVAAGEVVYEVNPRWTAKGRRGARRPGKSDALDARAVALTVVREAAGLPRVQPDDETAVLDLLVTEREAAVAEATRLRNQVHALLQQLDPEYRTRVPNLQTQAGLAAIGGYAVPEDAATLDQERAGAIRRLAQRLRLALDQAEELADRIRERAEARFSPLTRLCGVNLLTAGALAGLLGPGRRWRTDAQLAAHAGVAPLEASSAGLTRHRLNRGGNRRLNAILYRIALTQARHSPEGRAYLDRRVAEGKTSREAFRALKRFLVRAIWRLWQECLDSQATTPAVAA

SEQ ID NO: 332544 - protein, 357 aa, unidentified
MSQEKYIGMDVHQATISVAVMDAQGKLIMECLLETKAATIVEFIRGLHGTVSLTFEEGTSAAWLHDLLKPHVSRLVVCDPRKNALLKDGNKSDRIDARKLAELLRGNQLHPVYHGEHGVRTLKELGRSYLTITQDVTRVMNRIKALYRSWAIPCAGATVYAPRHRAEWLAKITEPGVRVRAERLYQELDLLQPVRLEARRELLAESHKHSGVRLLRQIPSIGPIRSALLVALLQTPHRFRTKRQLWAYSGFAVETHDSGEYRSVRGKLQRNRERMTVRGLNDNHNRDLKNLFKSAAVSASTRPGPLRDFYVARVEKGMRPTMARLTLARKIAAISLTIWKKGARPTPLGWLCDSETV

SEQ ID NO: 332545 - protein, 363 aa, unidentified
MNATAALPVVGVDLAKSVFQLAVADGAWRVIEQQRLTRTQFERWFSNRAVGLVVMEACGSAHHWARWLNGLGIEVRLLPAAYIRAYVKRNKTDSADACALLEAARCAEIIPVRVKSIEQQALQGLHRTRSLWMGTRTSRINALRGFCREFGIVIAQGSRLGVEQIGRVLADPHAPVPTLIRGTMTLLVEEIRLLEVRIAQLERELTTLARQSPACTTLLSIPGVGLLTATAMVAATSGEVSHFRDARHFASWFGLTPKERSSGGTRHLGRISKRGDRYLRMLLTHGARSVLRAASVARHAGRTIDALRHWALAVQGRSNHNKATCALANKLARICYATLRDGEPYGTAQLQKKVTRTAFALPA

SEQ ID NO: 332546 - protein, 403 aa, unidentified
MNSVGIDISKGRSTIAVMRPFGEVVISPFEVRHTGSELSKLARQLKSLDGETRVVMEATGNYHASVAKLLHDAGLYVSVVNAKLVHDYGNNELRRVKTDRKDAVKLANYGLDRWLTLPRYIPEEDTRLLLRNCYRQYRQYSKVQTVLKNNLISLLDTVFPNANRLFSSPIRGDGSEKWVDFVAEFWHCRCVSEKSERAFTSKYLRWCRKHGYNFSEAKAHTIYAEASGHIGVMPKSETTKLLVEQAVAQLRATSTALAALKHEMQSLASMLPEYPVVMDLFGVGPTLGPQLIAEIGDVRRFYSKKALVAYAGLDAPPNDSGDVTGRHKSMSKIGASSLRRTLFLVMSVYLQTAPLDEPVYQFMDRKRAEGKPYRVYMMASANKFLRIYYATVKAYLESLEHTA

SEQ ID NO: 332547 - protein, 341 aa, unidentified
MSVFIGIDPHKALHAACAIDRTETQLAELQVRSGPRQVHQLLGWAAPFECRTWAIESAGGLGYLLAQQLVARGEHVVDVPATLSARVRLLGAGRSNKNDANDARAVAVAALRSPSLQTVRGEDHVSVLRLLAKAHLDTSRARSRSCSRLHALINELVAGGISKEIVVTQAESVLGGIEAVTAAQRQRLELAQEVLDDVRVLDVKMKRSKSRITTAVTASATTLTDLFGVGPIIAALIIGYTGDIGRFATAGHYAAYNGTAPIEFSSSGRTVHRLSRRGNRTLNHAIHMIAVTQIRNPGSEGRVYYDTKIAAGRTKREAMRSLKRHISDRVYRQLRIDARTK

SEQ ID NO: 332548 - protein, 461 aa, unidentified
MKSKKPTGKHKESVRSKVDWKALEIVHPNAAGIDVGGSEHWVAVSPERDPEPVRSFGCFTADLRAMAQWLIEKGVRSVALQSTGVYWMPVFEILEQHGLEVYLVNAQHTKNVPGRKSDVQECQWLLKLHTFGLLNNSFQPTDEIRIARALWRQRGNLVADASSAIQRMQKVLIEMNLQLSNVLSDISGVSGMNIIQAILDGERDPWELAALATPGVKATPEDIVKSLEGNWRAELLFVLRQQVELYRTYQEKIRDCDLELRRHLKSLGSKVDLEAQPLGPKPKGKKSGRNTPQFDLRTELYRITGIDWTQVNGMDVVTAQTVIAECGADLSAFPSEKQFTSWLGLVPSNEQSGGKILKRRTRQVVNRAATAFRNAASTLVRSQSYLGAQYRRLRTRLGAPKAITAMARKLACLFYRLIKHGQQYVDKGMEYYEARHRGQQIRSLMKRAQKLGFQVVVSKTA

SEQ ID NO: 332549 - protein, 337 aa, unidentified
MSKITLIGIDTAKNVFHLVGIDKRGNYSYRKKLSRQQLLPVLAGFEASEVVLEACAASHHWARQIAEAGHRVRLIAPQHVKPFRRGQKNDYRDAEAIISAALSPGMHFVGVKSVDQQAEQALHRVRSRLLSHRNAAASGLRGLLGEYGLAFSKGIKPLRAGAAEFAASDQAQALGLVGLVWDVLEELDRLQHRLDEYTRQIEQRVRNDTISQCLCNELLGVGPISASALRVKVADTRDFANGRNFAAYLGTAPGHSGTGGKVKIGKIRPSHDPYLRQLLIHGARSAVQHLGDKQDPQSRWLRGVLERRGYNIAAVAQAHKNARQAWAILAREQAPQA

SEQ ID NO: 332550 - protein, 440 aa, unidentified
MEQQVRVFVGIDWATEAHQVCAIDASGKELGNRSFAHDGEGLSSMASWLIGLADGAAETVHVGIETPHGAVVELLIERQCAVHSLNPKQMDRFRDRFTVAGAKDDRLDAKVVADALRTDVHCFRRLRLDEPLVVEIREWSRMADELGHELNRLANRMREQLRRYFPQVLDVESDVTRPWLLDLWELVPTPDAAKRARKSQVAALLKRSRIRRIDAEQVLELLRRAPLSVAAGTTEAAVAHIRQLVGRLRLAEKQHRECASKLDELAAALSDKAPAEDTEPGQKNEQHDVTILRSLPGVGRIVLGVLLAEAWWALRARDYHALRALAGAAPITRQSGKRRIVVMRQACSLRLRTAVYHWARVAAQCDPASKAAYAELRKRGHSHGRALRTIADRLLAVACAMLRGGQTYDPQRRKASARLMEPESPSADAGSGKKSVGDAR

SEQ ID NO: 332551 - protein, 347 aa, unidentified
MLHAGLDLSRRKVDVCLLSGAGEHLDQLTIPPDADSLRRLARRIDEVHDEPVCAVVESMTGARLVHDTLEREGWSVEIADAQKVKGLAPLACKTDKIDSLVLATLSQRDLVPAIWLPDPQIREERELARFRLHLVKHRSMLKHRIHSSLINFGKPCPVTDLFGVEGRKLLERLEVPEPWRGNITASVMLIDDLERQIAELNRRLRDGHADHAYVPLLLSVPGIGWVLAFTIAAEIGEIERFASPDKLTGYTGLCPRVNQSGDSDRRGPLSMHGPRYLRWALIEATMHALKHPAYAERYQRNKKRLGRQRGAKVAQIDIARRLAHAIWHMLTRNQKFAPRGATLRLPA

SEQ ID NO: 332552 - protein, 452 aa, unidentified
MEKPQEVEDEEYERVWERVAAVDVAKASGVACTRVPDEDRPGRRRTHVWTVTATVSAVTELADHLRCQGIQIVTLESTSDYWRIWWVVLEAAGLKVQLVNARAVRNVPGRAKTDKKDAVWLAKLTERGMLRPSFVPPPEIRRLRDFTRLRAELVHERTRYWARLEKLLERALIKISSVASTLDTDSTRAMIEALIAGQRNPKALAELAIGKMRPKRAQLAEALDGKFEPHHGELARIILDQIDALTARIDQLSDRVTELIDQIPAAQGVDADGTTGPGAGTGPGAPVLPAVARLDEITGCGVIAAQAVIAEIGLDMTVFGTPGRLVSWAKRCPQTRQSGKKTTSGKAGKGNPYLNGILGEVAASASRTDTFLGERYRRLARRRGKRKALAAIARSILVIIFHLLADPEARFHDLGPDFYDNRISRERKIRNHVRQLEALGLTVTLAPKEEAA

SEQ ID NO: 332553 - protein, 413 aa, unidentified
MSIDPRAAAPRVTAGVDWAKDDHAVCVAGDQGEALERFTVRHDAAGLRQLAARLLRAGVSQAGIERGDGPVVETLLEAGLTVFVIPPAQVKNLRSRYGSAGNKDDRFDACALADVVRTDARRLRPTERDSEQTTALRSTVRARRDLVGHRVAAANQLRAHLQTVFPAAAALFAGIDSEITLAFPSRFTTQEQAGWPSPLRLAAWLKSAAYSGRADPAALHARLLAAPRGKAGPHAAAHAAATLALVAVLRVLNAQIKALAVSIAAQLAARPDAAIFQSLPRSGTVRAARLLAEIGDARGRFPTRDSLTCLAGVAPSTRQSGKVKAVTFRWGADKQLRDALCDFAGDSRRASPWAADLYDKAIARGCDHPHPVRILARAWAHVIWRCWQDHAPYDPAAHNSLQTILKQRQPIAT

SEQ ID NO: 332554 - protein, 375 aa, unidentified
MNDITKFVGMDVSKEKISVGVADAGREPARYWGEIPHEVEYIRKLIKRLGKPEQLRVCYEAGPTGYELQRLLASMGVECVVVAPSLIPKQPGNRVKTDRRDALRLAELLRAGELTPVWVPGEEDEALRDLVRAREDAKEDLLRAKHRMRKFLLRHGIDNPPGVRAWSPRYRTWLKGLKFSSSALQATFDEYRLSIEEIEGRIRRLESEIHEQAEKSVHAPVIKALQTFRGIKETAAVTMVAEVGKFSRFKKASQVMGYSGTVPSEYSSGAKTHRGKITKTGNNHLRRILIECAWSYRYQAAMSEAIKKRQEGQPASVQAIAWKAQVRLCKKYRRLVSKGKSGQVAVTAVARELLGFIWAAACEVEKQMTQRENAA

SEQ ID NO: 332555 - protein, 392 aa, unidentified
MVLTVSFALLCLKNLAECANGRFSPTARSLELSPFVLEGHRAWRGAWDSSGVFLNPNSCMGLEPEPSKEGSWMMAQDDLVVAGIDIAKDKVDVCLRSPSLRRTFASTAEGRRELASWFRRQKVGKAVMEASGGYEREWANALRDGGIEVRIVDPKRVRSFAQSAGRLAKNDTIDAEMIAWFAETFDEAPGQAYDAKREELHQMVNARQALKDMQAKLTSQGEHAVPAVVQRIHARISKTIAVELVKIEAAISTSVQATPRFAELAEIIESVPGLARTTSAALIAGMPELGHANNKIVAALLGVAPYDDDSGKRRGERQIKGGRRRTRNAFYMACLGAATRHNPVLKAFYDRLVAKGKEKKVALVACMRKLINILNIMIERRQKWDPSRYAVN

SEQ ID NO: 332556 - protein, 334 aa, unidentified
MWHVGIDLHRATVVIAAVNDAGEAKDAVTIRCEETALIVETIRKLGTFRAVIEASGTYRWLYDLLRPYGTILLAHPLRLRAMIQRRSKTDKLDAQLLANLLRINQIPLAYIPPEPYQQLRDLTRSRARLARQQAVAKVELRALLARRNWQSPYRTPFGVRGLAWFRKQDFGPMDNLIRDELLSRIEHFRRQRVIFDEQLVKVAEDFPQTEALTTIYGIGSYSALMIIAELGEVERFHKAKQVGAYAGLTSRVRQSGGHCYRGSISREGSPWLRWILVPAAMKAVRKDEKLKSFSTRVRKRSSAKSARVATARKLAEICWKRLRRWHAEHATAPA

SEQ ID NO: 332557 - protein, 400 aa, unidentified
MRVVFGIDVSKASSEVAIVINSEKIHGYSMTNDAIGFSRLLEDLKTVSNPEIVFEATGVYSRRLQAFLENNDYAYTRLNPLEAKKQLDSLRVRKTDKIDAEKLAQSQFLLNRKPTDVQEDVYQELRDLSRFYQNLTEDIVRTKNRLHKALQVTFPELESLLSAPTGEQYWNLVTAFPCKEMVLELSSDKLLHVIRNSTSKRISDKRVAYLADKLTELAKQSFCAVKKTSPVIEEVRYYAQELLRLSEKRQTVLDQMVELAQPLPEYEILLSIPGIAETTATSIIGELGDIRRFQSANQINAFIGIDLRHYESGNFLAKEHITKRGNPYARKILFNCIHNIASASHTNPCHIADFYEKRKRQSQTTSTKPHTIASIHRLIRTMYYLITHNKLYDYASTQNR

SEQ ID NO: 332558 - protein, 351 aa, unidentified
MRFYKNQHKYYCGIDLHAKTMYVCILGSDGTILKHKNIACRPEPLLQLIAPYREDLAIAVECMFCWYWLADLCAREKITFVLGHALYMKAIHGGKAKNDKIDSEKIAMLLRGGMMPQAYVYPQEMRGARDLMRRRLYLVRKRGELLAHIQMTYHQYNFPAPTSELIYETNRNKLSIPFSDPAVVKMVESDLELVGHLTRSINRLVAYIESLKFEKQDVGFLLALLRSVPGIGYVLSATILYEIEDIARFPTVQDFISYCRLVKPKKTSAGKVTGGGGSKIGNHHLKWAFCEAVMLHLRDDARGKAYMDKLMKKHAKGKAMAIMAAKIARTVYFILQRRQTFNEEKFFAMAA

SEQ ID NO: 332559 - protein, 413 aa, unidentified
MRVIGLDVHRSFAQVAMLEDGVLRQCGRLDLVRDKVVTFARTLRPDDEVVLEATGNTMAIVRLLKPHVGKVIIANPLQVRVIAEAKAKTDRIDAAALARLHAAGYLPEVWQPDEATERLRNLVSRRATIVQGMTRTKNRIHAVLHANLIPPFAGKLFMAPGRKWLTEQPLAEHERAAVNRWLAELDTMEGELTAAETAIASACLGDDRVRRLMTIAGINMTVAAGVLSAIGDIARFASAEKLVSYLGLDPRVRQSGDRAAQHGRISKQGRAHARGMLVEAAWAAAVTPGPLRAFYMRVQGRKGKQVAAVATARKIAVLAWHLLTKQEDYAFARPALVAMKERQMQMKAGAKSRRGGNTPGPARNYSIKELREKERALVQQAEHAYARFVSAWSEKPKPNRERSPRDNTAVHAR

SEQ ID NO: 332560 - protein, 431 aa, unidentified
MPESTVSRQPQEPQFAAFVGIDWADQKHVWCLQAAGSTQRESGELEHKVETVEAWVAQLCQRFGERPIAIAVEQLKGALVYMLAKYECLHLFPVPSTMAASMRKALYASGAKDDPRDANLLLDFLLQHRDRLHRLAPDNEATRRVQNLVEERRKLVDEKTAQLNRLTSNLKIYFPQILDWFKDLDTELVCALLEHWPTLEELQQPSPVELRKFFHQHHCRNGELIEHRIQEIGHARPAIHDRAVIEAKRVVVKVTVQLIRSLREAIAELDGKIAEAEAAHPDFFIFASLPGAGAVMAPRLLAVFGSQRDRYGSAEEVQIYSGIAPVLERSGKMKWVHFRWACPKFVRQSFHEWAGHSMVKSAWARAYYQQRRNQGQDHHAAVRALAFKWIRILFRCWKDRVAYDEEKYLAALAKRGSPLSALLVVPTRATM

SEQ ID NO: 332561 - protein, 354 aa, unidentified
MMIIGVDYHPSWQQICWLNTTSGETEERKLEHASGEAEKFYRGLPGPARIGMESTGNCQWFVELLMTLGHEVWIGDAAKIRASEVRQQKNDRRDAALILKLLVEGRFPRIWTPSSQERDLRQLLIHRYKLVLMRVQVKNELQHLAMNQGITRRRRLWSAAGEKVLNELPLKPWASRRREDLLKLRGMLNEQIGVLDEAVKKAAEENERARLLMTQPGVGPITSMAFVLTMGDVNRFPRGKQVASYLGLIPREYSSGGHKRYGPISKQGNRFLRMLLVEAAQCVVRYDPEFRNEYLHRCHSRPKGVAKVAAARKLAVRLYWMLKTSTAYPEIVSCREQLAGAPDRPPRRIDRNLD

SEQ ID NO: 332562 - protein, 344 aa, unidentified
MEPSVTELTRIAIDTSKSVFTLHGSDERGRVVLRRNLRRSELMRFFEKLPPVEVAMEACGGSHHWGRVLTGLGHRVRLIPAQYVKPFVKRAKNDRNDAEAISEAASRPSMHTVAVKSAEAQASAMLLTVRELLVRQRTQLVNALRGHAAEFGLVAAKGDKGLAALRREIAAQADLPAAARDALELLGEEIDRIATRLAPMEKALMAQHKANETSRLLAEIPGVGPLGALNFALRVDAGQFRSGRHFAAWLGLVPKENSTGGKQRLGGISRAGDERLRQLLVLGATAVIQHTRPGRPAASAWLVELLKRKPRKLAAVALANKMARIIWAMLTSGEAYRHPTPAAP

SEQ ID NO: 332563 - protein, 390 aa, unidentified
MVAGTLNIAQRYQIAQEVPIVVSLDMHDTSTYALGVNVLTGEICIDHNILGTPETVLRAIEKLKIRDRCEILYEAGNHGFHPYRLFTKAGYLCRIIAPSSLPENRKKRVEKTDRNDCVRNLDYHLGGLMTYVTVPDVKAEAIREILRYRYSTVYKTTKQKQKIISFTKRHGLSYTLTKRNWTVTYRKWIKNIEVDVRLRCLLDIMIDELNAEEERLKRVDLNLDLEFKQDEQLSRKKRLYELLPGFGRVNSMTMVLEGGELSRFGHPKAMMKFTGLIPGKHQSSTSDPVLGITKGGNGFLRIALVSAAKIYRDPRAQYPRAAIEKYEEPLKEFLSRMQTRMFNRYRALRENKKHANKIRCAIARELCGFLWELMVKIEPMLQKEKYLKAA

SEQ ID NO: 332564 - protein, 478 aa, unidentified
MTRHNRSRGPATRTRPAPPTRPPREAAPALSVLRPHAAGIDVHSDMHMVCVPAASVPPATGDGGLPAHVRRFGANSCDLHAIAEWLKACGVTTVAMESTGVYWVPLFELLEARGFEVWLVEPGQLSRCGARPKTDALDAQWIQRLHAYGLLQPSFRPADSVLALRGYHRQRQMLVRSAAGHTLHMQKALAQMNVKLAEVVSDITGLTGQDGGDDPLAGERNPRALVALRDPKCKRDAAAIAQALEGTWRPEHLFALGQAHELYQFLHRQIAACDAAIQAELTKLPNRAGNKPFSAKPRRTGRKPNDLAFDAAGPLCRALGVDLTEVEGIDVGTALVILSEIGVDVSRFPTEKHFASWLGVCPRQHQSNGTTKKRGPRKGKNRVAIALRMAAQAVGRTQSPLGLFYRRIKSRIGGQGAVTATAHKLAVVVYRMLKFGTEYVKRSMAEYEVKLRASVERRLRAKAAKLGFELVPRSAAGP

SEQ ID NO: 332565 - protein, 362 aa, unidentified
MNYVGVDIHKKYSVLCAVDERGRKLREARVEGNAPFGFAQFFSGLGGPSKAVVEACWNWGLIHDELEELEGIEEVVLAHPYKTRLIADAQIKTDRLDAYALSTLLRGNLVARAHVPRRETRMRKNLLRQRLYWARLRTMLRNRIHALLDRQRSLELPQCSDIFGVRGLSFLRRLELPETDAALLREQLALHDLIAQQMKAQEKRIGLEFGSEAMHRQLLSVPGIGPTLAAVIACEVDSIERFSSAEKLCAYAGVVPTTHSSGGKTRHGQLLPFCNKWLRWALIEASWVAIGCSPYFGALYKQHRARGKKANSAVLIVARRMCRIIWQLLHEKRDFEKRPLRPNFNFPGCSVVRLTAATAARP

SEQ ID NO: 332566 - protein, 347 aa, unidentified
MRFYTKQHRYYCGIDLHARTMYLCVLNQQGEILLHRNMPCSPDFFLKAIAPYREDMAVAVECIFTWYWLADLCSKENIPFVLGHALYMKAIHGGKAKNDKIDAHKIAALLRGGMLPMAYVYPALMRSTRDLLRRRMHLMHKRSELLTHIQNTNSQYCLPQFGKKIAYKKNRQGVAEHFADSSVRKSIEMDLSLIDHYDKLLTEVELYITQNAKIHDVNAFNRLRSVHGIGKILALVILYEIHEIDRFPTVQDFVSYARLVKCAKESAGKRHGSSGAKIGNVHLKWAFSEASVLFLRANPAGQRYADKLTSKHGKAKALSILAHKLGRAVYYMLKRDKAFDMNKFLNS

SEQ ID NO: 332567 - protein, 365 aa, unidentified
MSNRTRIYKVNGELFKAELLKQKNKLEKKMTKTLYVGIDVAKVKVDVAITTDGKKIISSSTFNNNSEGFKKLTNLIKKYSNKTSKIHCCMESTGIYHEEIAEFLQEQNFIVSVINPYQSKAFAGSQLLRTKNDKVDAMLLASYCAISQPKETVKIPEYVKKLRRLIRFLNTQISARTKEKIRLHSIKDDDVAHVLKGTISFLSESIAQVERLIKEHIKKYPELKHKVDLLKTIPGIGDKTACEILAEIHIEDGQSINVKSQVAHAGLAPREFQSGSSIKGKPRICRTGNANLRKALYMPAMCAIQKNQLLSEFYHRLVASGKIKMVALVATMRKLLVIAIGVLRNDKPFDPNWAKIQQEKYLLCA

SEQ ID NO: 332568 - protein, 398 aa, unidentified
MTESSDYESVQVFIGVDVGKDTHHAVAINRSGKRLFDKALPNDENKLRSLISDLKQHGQILLVVDQPATIGALPVAVARSEGVLVGYLPGLAMRRIADLHAGEAKTDARDAAIIAEAARTLPHALRTLKLADEQIAELSMLCGFDDDLAAQTTQANNRIRGLLSQIHPALERVLGPRLDHPAVLDLLQRYPSPEKLASLGEKKLAAQLCKLAPRLGKRLAADIAQALAEQTVVVPGTNAAAVVQPRLALQLITLRKQRDEVALEVEQRVLAHPLYPVLTSMPGVGVRTVARLLTEVACRAFASAAHLAAYAGLAPVTRRSGSSIRGEHPSRRGNKALKRALFLSAFAALRDPISRAYYTRKMSQGKRHNQALIALARRRCDVLFAMMRDGTFYTLQAS

SEQ ID NO: 332569 - protein, 341 aa, unidentified
MSNANTYIGVDLHKKTCYVTVMNREGKIKKQTEISTDTDKVSKFFKKYHDSKVAVESTLNWIPFYENLESIGCNVVLSNPLQTKAIASARIKNDKVDSRILADLLRTDLLPTAFIQPRDIRDLKELVRQRMSFVQIRTQVKNRIHSVIFKNNLKHNFTNLYGKAGREWLNDLQLRDIYRQELDWSLAALDNLDQLIDEMSQKITDTAKNDYDCQLLMTIPGISYFTALVIKSEIGDISRFSNSKKLCAFAGLIPSTYASADKIRFGRITKRGSKWLRKALIDSITSNSRHPNRLCFIYRKLKKNKGTGKAKVATARKLCAIIFAMLTDKQPFRQFTPVKQR

SEQ ID NO: 332570 - protein, 378 aa, unidentified
MKKGTRFVGLDVHKATITVAVAEPDGAVQSLGTLPNESEAIRKLVRKLRQGGRELAVCYEAGPTGYALYWELESLKVPCVVIAPSLVPVRAGDRVKTDRRDAEKLAHLYRAGELTPVGVPTPEREALRDLVRAREAAKKDERRARNRVQKFLLRRGITKPGQSREGSEAYRKWLAGVEFEHRAQAAVRDDLLAEVDHAARRVRSLDAALDEAVAAAPKEMRSVVDALQAMRGISKLTATTIVAEVGELSRFSHPRELMGYAGIVASEASSGARTRRGGITKTGNAHLRRIIIEAAWHYRHRPKVVGAIRKRQVGIDTSSIDIAWAAQERLHRRYRQLLARGKCRQKVVTAVGRELLGFVWDLATRVERTQSRLQPKAA

SEQ ID NO: 332571 - protein, 397 aa, unidentified
MIAVGIDVSKSRSTVAVIDSNGVVLASPYTIAHTQPELHALAKYLKELKEPVTILMEYTGHYHYPVLKQLQSEGFPVCLINPYQMKKYGDTEIHKAKTDKKDALRIATYALEKSYKLVPYSSMEQKYEDLKFLSRQYEQRISFVAKLKVQLLDLIDQTMPGITKQLSLTSRNPEKCALLLFIKRFKSFDEIQRMGKTRFLSSYETMTKKTSDRYAAQKGLAIYELAKDSITTRGDDPYIWLSQTQCVDLLSAAQNAADEIILKMQNIAQTIPEYAVLRAMHGVGDRLGPIILAEIGDIRRFHSGKALNSYAGNDAPPYQSGQFESRNRHISKRGSSALRKACYEVMQALKLTKPQDDPVYLFMLKKEQEGKPYNVAKMAGVNKFLRIYYAKAMELYR

SEQ ID NO: 332572 - protein, 370 aa, unidentified
MQTVTTIGLDIAKSVFQVHGVDAQGKVIVRRQLKRRYVLAFFQKLPPCLIGIEACASSHYWSRELQALGHTVRLMPPAYVKPYVKRQKNDCADAEAICEAVTRASMRFVATKTVEQQSCLMIHRTRHLLIRQQTAVINAIRAHFAEFGIVAPVGRTGVEELLKVASDGNDKRLPDVARVCIAALGAQLQMLKARILEFDRLIMAWHRSNQVSKRLDELPGVGPALATALVGSIADPKAFRSGRDFSAWIGLVPKQHSSGGREKLGGISKQGDWIGLVPKQHSSGGREKLGGISKQGDRYLRSLFVAGALAVIRYAKKRGSKHRPWLAALLARKPTKVAAIALANKIARMAWAMMAKGERYKQPVALAAAW

SEQ ID NO: 332573 - protein, 356 aa, unidentified
MATYYIGADVHSNSIEIAIRTRKEVVKRYSIPPSIQAAAEVLSSLEGKRHMAIEEGPMAGWLYRNLRQKVDSFVVADPRRNKLISSDGDHDDKIDSAKLALLLEGGYLREVYHSDDDRRVELKHWVGLYHDRVHDAVRHMNKIRARCRMHGIKIPRKVLRQPEHRADWLGKLKQPALAKQLLMLWIGYDATAKQARMAKQHMIRLSRKYSVITLWQQLPGIGTVRAASVFAYLDTPWRFKKKNKLWKYCGVGLQRTASGTDKKGKPKPARLQMPWAANRTLKNAILGAALTAINHKHNDFKDHYERMVRNGVIPSNARHTVARKLLTVMWGIWKSSWQFDQSNGALSKSTEQCNCV

SEQ ID NO: 332574 - protein, 343 aa, unidentified
MEYYAGIDVSLKESSVCIVDAKGKVVREVKVASEPETLSRYFDDLELSVCRIGLEAGPLSQWLRAGLVASGRDVALLETRHVKAALSAMTVKTDRKDARGIAQLLRMGWYRPVHAKSMASQDTRALLVGRKLLQGKLLDVELSIRGILRGYGLKVGEVSRGRFAARIQELIAGHTTLETVIGAMLAARATLWQEFTRLHREMLKIARADKICHRLMGTPGVGALVALTYRSAVDDPTRFGKSSTVGAYFGLTPKKYQSGETDRDGGVSKVGDAMVRTALFEAAHIMLTRATRFPGLKRWALDVAKRRGMKRAKVALARKLGVVLHRMWVDATDFRWGATAMAA

SEQ ID NO: 332575 - protein, 389 aa, unidentified
MKIFVGIDIAKLNHFAAAISSDGEILLEPFKFTNDADGFQLLVSKLESFDKNSIIIGLESTAHYGDNLVRYLVAEFYQVCVLNPIKTCQIRKNNVRKTKTDKVDTFVIAKTLMMQDNLRFVSFFDLDMMDLKALGRFRQKTIKQRTRLKIQLTTYVDQVFPEIQYFFKSGLHQHAVYALLKEAPSPKEIASMHMTHLANLLKVNSHGHFTKEQAKELRVLAQKSVGANDSAISIQITQTIQQIELLDSQLEKIEAEMTDIMKFNDSVIMTIPGIGYINGGMILGEIGDIHRFSNPNKLLAFAGLDPSVYQSGNFQAKTTRMSKRGSRVLRYALVNAAWNVVRNNATFKAYYDAKRSEGRSHYNALGHCAGKLVRVIWKMLTDEVEFNLE

SEQ ID NO: 332576 - protein, 410 aa, unidentified
MNAVGIDVSKGKSTVTIRRPGDEVVMAPRDIRHTQSSISELISIIKGLDGETKVCMEHTGRYYEPVATWLSDAGIFVSAVNPILIRNFGEDSIRAPKTDKADAKKIARFTLDRWFKLRQYSRMDEIRNQLKTMNRQFGFYMDQKTAMKNNLIALLDQTFPGADKFFDSPARSDGSQKWVDFVDTYWHVDCVRKKSLEAFTEHYRAWCKRKGYNFRTSKAEEVYRIASDLIAVFPKDDNTKLLIRQAVAMLNTASVTVESLRAKMNETAAQLPEYPVVMEMDGVGPTLGPQLMAEIGDVTRFTKRGSLTAFAGVDPRANESGTYKQKSTPTTKKGSPNLRKTLFQIMDGLIKRSPVDDPVYAFMDKKRAEGKPYYVYMTAGANKFLRIYYGRVNEYLAALKADEEGQPDES

SEQ ID NO: 332577 - protein, 339 aa, unidentified
MQQVATLGIDAAKNLLQLHGVDAHGKIVLKKRLVRHKVLAFVAGLAPCLMGLAASGSAHYWARALTKLGHTVQLISPQFVKPYVKGNKNDPNDAEALCEAVSRPHMRFVPIKSVAQQDMQALHRIRERQIKARTALVHQIRGLLAEYGVVMPKGVAQVRQKLPFILEDAGNGLTMLAREWLQALAAELLALEQRIQETNTRIQRVFEHHEACQRLAQLEGVGPLTATAFVAAVGEATTCKNGREFAAWLGVVPRQHSTGGKPLLLGISKRGDRSLRKLLIHGARSVVRTAEGKQDGRSRWLQGLIVRRGKNRAGVAQANKTARVAWVLLAKGERYRPAA

SEQ ID NO: 332578 - protein, 430 aa, unidentified
MKSNTQNAKIEAITEKTLVLGIDVGSEMHYARAFDYRGIEYSKKPFKFSNTEAGFVTFKEWILDLKERHEKDKVVPGMEPTGHYWFNLGKFLQDNEMKPVLVNPHHVKKSKELDDNNPTKNDRKDPKVIAGLVREGRYMIPYLPDGVYADLRTASNIRFQLQAELTRIQNRISRWFNIYFPEYKTVYGKPDAKSGMLILKAAPLPEDILTLGIDGVNQIWRDAKLRAVGKARAKTLIEAAEHSVGSKEGAVSARMEIRMLLEDYESRNTRLQEVMVLIEELVRKIPMAEKLLEIKGVGIRTVSGFLAEVGDISRFNNPKELQKLAGLALVENSSGKHKGETTISRRGRKRLRYLLFEVTMSLVSKNQEFRELHNYYTTRRLNPLKKMQSLMAIAAKLIRVFYAMLTKGVDYDPKKMVSDIRRPAAYLQAA

SEQ ID NO: 332579 - protein, 412 aa, unidentified
MVYNLLRGRSELEGRATCAMVPAWEFSHEPEKKSSPCPLFIAFESEQHLSACDALIVEPAFISLDLAMTAPDRSSSSDSVPPTAHHVGIDVSKASLEIALIGSEEDVFASKTVSNTKDGFDEFLSWIETQADVRLEESPEQIHVCLEASGDYQRPAARFLYERGLTVSIVNPLRTSAYAESQLNRSKTDKVDARLLARFCQREEPSLWEPTPSEQKSLKEMTRGLEQLKKEHDRLKNQIRQSENPTVTGSLESVLESINEQIDRLEDQIDEHVESTDTLARNRDLLETIPGVGSTTAALVLAELGDHERFECARQAAAYAGLTPSHHESGSSVHRKPRLSKVGSSRLRRALYFPAIAALRCNAAVEALGDRLAERGKEKMVIIGAAMRKLLHICYGVLKNQSSFDPSLHPGT

SEQ ID NO: 332580 - protein, 384 aa, unidentified
MQKDNILFIGLDTHKEFTQVAYCLDHRTSEINDLGRIQSTKASFVKLARQLQSKSPHATLHFVYEAGPCGYWIYRLLTSLGHCCFLVAPSLIPKKPGERVKTDKRDAQKLARLLKNNDLDPIYVPEPEDESLRDLSRAREAAMQDLNDAKRQLKSFLLRNNIQYKGTANWSLKHLRWLTEMVLPHPCQQIVLQEMIHSISERTNRLKRLDNELTHQVKKWRYYPVVKAVQAMRGIRLLVATGVIAELGDLSRFDTPRKLMSYVGLTPSEHSSGGKRRLGAITKCGNGRVRRLLIEGAHSYRHTARISKDLEVRQEGLPKEIVDQAWKAQLRLCRRYQRLIKRGKNYNLVVTAIAREMIAFIWSISREVVLPKVDPKTRLSRVPA

SEQ ID NO: 332581 - protein, 411 aa, unidentified
MEVVHGRCAGLDIAKKDAKVCVRIAGAGRRKTVETVTTWGSTTNQVLALRDHLVAERVTCAVMEATGDYWKPFYYLLENAGFELLLVNARQVKNLPGRKTDVSDATWLAQLGAHGLVRGSFVPPEPIRQLRDLTRARTAITRERGREVQRLEKLLEDAGIKLSAVASDIMGVSGRAMLEALIAGQRDPAVLADLAKRRLRSKIPALTEALTGRFTEHHAFLARVHLDLIDRHTTAIDELTARIEVVIEPFQGFRHLICTIPGIGAINADVIVAETGADMTRFPTAGNLASWAGTCPGSNESAGRVKSTKTRPGNPYLQGALGAAAMACAQNPGTYLGARYRRIASRRGPQKANVAIQHSILTAIWHMGHTGELYNDPGADYFTRLHPDRAKNRALHQLEAMGYRVSLDRAS

SEQ ID NO: 332582 - protein, 521 aa, unidentified
MMSTTRTRKRPSTRRPEANVGKPRGVLHPRVQQVGPEHFGIVCFDPAKTRSKFFLADFYGHVLIPPTWVAHNRPELDAAIARIRQAFATHELRDGLVAIERTGRYHRLVQRAFAAAGFETRILHPFVTKQYRQPVDPGNKTDDADLRAMHRATVTGCALVEATRDEAWTTLQLLIRHRRDLVRKGAALNCQIRDHLEAALPGYAACFDKLWESRIPWHLLRHYPTAAELLAAGVTTICHSLREASIRYQQRTIQAVVDWAERAAPGDVAAGQHRRIALALFDDRQRKTQEIQALERDLAGRLARTPYVLLLSFPGINVVSAADFAGEAGPMEHYANAKAITGRSGLRPSRYQSDTVDRANGPLVRHCNRALRTAILGIADNLIHCNHHFQHLAMHWASQGKDPRDIRVRVAMRFSRIAFQMVAGRQVFRHPCIQGRHYILDKLNVFHRLHETGMEQLLRDLKAAIDQLPTREYAAEAKPLQDEWQKIRDGRRRRPQVLGDILPIVFARLGVGAVQSTESGE

SEQ ID NO: 332583 - protein, 357 aa, unidentified
MPKMPCLPVEVILGADTHRDTHAVVLVDLLGRLVAAETFPTTRAGLKALIGWACQRGSVRRAGVEGTGSFGAGLTRALRLEGIEVIEVTRAARVGGRHRGKNDTRDAEAAARSVLSGQATAEPKARDGIVESIRVLRNTRASAIKARTQAILHIKNLVVTAPDELREALDGLTNRRLVKTCARMHRSARRDSLSTTRQALRSLARRHQALDAEIAELDAILTELTRQAAPRLLNEPGIGPEIAARMLLVAGDNPSRLRNDAALAALCGASPIEASSGKIIRHRLNRGGDRQGNSALWLIANNRMIHHPPTRDYVKRRTVEGKSTKEIRRCLMRHIARGIYPLLIADLTDTQNLPALT

SEQ ID NO: 332584 - protein, 412 aa, unidentified
MDMMAAYIGLDWADERHSVHLQTADGTLEHLELEQKPAVLHDWVAQLQRRFGGGKIAVALEQRKGAVIHALLMYDCFVLYPINPKALARYREAFRTSGAKDDPLDSALLLDLVVRHRDQLRAWVPDTVESRTLQALCEQRRKLVNQRVALTNRLTSLLKQYLPQALDWVGDLASVQACDFLTQWPTLAAVHRARPTTIRQFYRAHNCRKADVIEARLAAIASARPLTTDAAVVEPLSLAVQTYATQLRVLLAAIQTFDARIADVFAQHADHDLFGSFPGAGAVCAPRLAAAFGTDRSRWDSAAELQAHSGIAPVTERSGKSRWVHHRLACPTFVKQTFHEFADQSIRFSTWARAYYDQQRARGNDHHAALRALAYKWIRILFRCWKERRPYDEDTYVDALRRRGSPLAKTFA

SEQ ID NO: 332585 - protein, 324 aa, unidentified
MNTKTKQNINVGVDTGKYQLDIYIRPLDIYFTVPNDDKGIKEAVKTIKKYKPERIVIEATGRLEMPFILACANANLPFTIANPIHVKRFAGAIGQRAKTDKLDAQLIAHYSEAIKPKLSQLKPDTMQAMSDLVTRRNQLLTMQTMEKNRLQIMPKALAMTIKPVLTLFNNQIKKIEEKIVKLIESCPEYQAKNTILQSMTGIGKIAAASIISNLPELGYINSKQASSLIGVAPMNRESGRYKGHRKIQGGRPQVRTVLYMAMMSAMQSNPVFKVTYQRLLAAGKPKKVAIIACIRKMIVILNSMLRDGVMWEAPKVNNLSLIHI

SEQ ID NO: 332586 - protein, 482 aa, unidentified
MKKKNIYLNQSQELLSLFEEAGSSGKVMCVPIDYAKKDHTVMFCNGHGDILRKPFSIKNSPEGLDYLVEQVTRSCLHRSIDLKHVFFGGEDVGSYADNFVSTLRSKGWLVAGVNAHDAKKQRTNMQASTDTLDLMGIAIMLINRRANCSRPQSGIFLNLRNLVRHRSNLIKMTTQVQNQIHTIVDRLFPGFLNEKKSGITPFTESSLYLMEGRFSAPQIRRRRREKLIEILTRHGAHEPERRAAQLQGYAQKVLMSPNEYIATLQLTLFHHVQHMKCLQDNIEQLEKETAIWLAQTQGAFLTTVRGIGIVLAAGVTSEIGDPNEQKPVNNLVSYSGIIPKVKQTGGPEGKTSTGKVAKRCNHNLKNYVAQSGMHLGLHGPTDLMADHKRRDAAGQHADFGIARRYVRMAMCLMRNWQVYIPPHLRNNRVEPEERAGYYLTTWPKLREKWNKCGALEVAFAKENPLGRWRHMVQELYEISLKL

SEQ ID NO: 332587 - protein, 349 aa, unidentified
MNRTTYAVDLAKSVMQLHWVDEATGEIGRKKLSRSRLAEYFAQLRPLCIVMEACGSAHHWARTFAAMGHEVQLLPPRQVRPFVRSNKDDAADARAIWLAARQVDIRRVPQKSVEQQAMLSLHRTRQHWVSVRTATVNALRGLLYEFGVVLRGGRRAGLKALAEQRGTIDAQLPATMRSLVDGQLRMLGQVDARIDELEREIAALQQQVPGATKLDQISGVGLLGSTALAATLGDGRAWSSGRQFSASLGLVPAHAGTGGKVRIGHLSKRGDPYLRTLLIHGARAVIEHATDKAQWLESLQARRPKNVAVVALANKMARTAWALVAHGRTYQRDWQSARPGGGAAKSAAA

SEQ ID NO: 332588 - protein, 322 aa, unidentified
METSSVIFDQVVERGCGIDIHKKTAVATIDGNGIKRTTREYGTVTSSLTELRDWLLENKITHVVMESTGVYWKPVYHVLEPSGITVWIVNARHVKNVPGQKTDKKDSVWLCKLLLAGILKPSYIPPKEQRQLRDLTRYRKKLIQDVASNKNRTIRILEDCNVKLSSVLSDTSGVTATKLIDKLCEGKQVTMQDIEAVYHKKIEATKEELWEACNGCVEKHHVYLLQTIRQNTQHLEDQISGLNQKIKELLNPYENTLELLRQIPGLSTKTVEDLVAEIGLDMSVFPTEDHLCSWVGVAPGNNESAGKKKADALRMATNMQKP

SEQ ID NO: 332589 - protein, 444 aa, unidentified
MAVRKQVFELMHPNAAGIDIGSASHFVAVPADRDDEAVREFKSFTEDLMAMADWLERCGIETIAMESTGVFWIPVFELLESRGFTVFLVNARHVKNVSGRKSDVLDCQWLQQLMSFGLLSGAFRPGEDICVLRALSRQRDMLIDCQARHVQHMQKALTQMNLQLANVITDIVGKTGQQIIRAIVAGERDPVKLAAFRDHRIHASEAEIAKSLRGTWRDEHLFALSQALRLFDTYQERIGECDERLAQALAKLARHDEVPEPNRRKGRAKNAPNFDIRTALFQACGVDLTRIDAIDVSTALKVIAEVGTDLSKFKTVKHFCSWLGLCPGTKISGGKRLSGASKRCANRLTQALKLAATGLLRSRSALGAYFRRLAGRMDKPKAIKAAAHKLARLIYTMLTKGTEYVDQGQDYYEQRYRIRVLANLSKKAASLGFQLQPVVTPEAA

SEQ ID NO: 332590 - protein, 355 aa, unidentified
MASATLTQPRPDSDFDAVIGVDTHRDFHVAVAVSPNGARLDEYRISTNPRGYQALLGWSELFGNKPVFAMEGTNSFGAGLCRELMAAGFVVVEANRPDRSTRRRLGKDDGIDAEMAARAFLAGTAMAVPKSGEDQVEMIRMLKVAKDSAIDARTKAINQMRALLVTATPALRERLNGLSRGELISTCAAFRAGALVGPLAAAKQALRTLARRVQVLDAELDELLKDLDVLTQEACPGMRQTYGIGVDGAAILLTAAGDNPERLRSEASFAALCGASPLPASSGNTRRHRLNRGGNRTTAMRLYIALQSFGCATTRPQKPTQNAVAAKVSVTRKSCAASSGSSPGRFSTYSWDEIR

SEQ ID NO: 332591 - protein, 372 aa, unidentified
MGHHTEAFVGIDTSKSCNAIAIADGGRGGEVRYLGEFSATEAAVRKLVAKLAAKYCDLMFCYEAGPTGYGLYRLLKRLGHECLVVAPSLIPKKAGDRVKTNRRDAVSLAKLLRAGELTAVWVPDERHEAMRDLSRARLAVKKDLQGKRQQISSLMLRLGRIFPGKTTWGPAHMKWLMAQKLEHREQRIAFEELLEGIRQESERVERLENAIREAVPEWSLAEVVVALQAVRGIDLIAAVGVLAEIGDLSRFQNPRELMGYLGLVPSESSTGDKVKRGGITKAGNGRARRILVEAAWSYRYPPRVSRDKQPKVEAAPRRVREIAWKAQTRLCGRFRSLERKGKRRTVIATAIARELSAFIWAINRELMAPRQA

SEQ ID NO: 332592 - protein, 431 aa, unidentified
MDQVVDRPGALDVHKEQVTACVRVPGEDGHSRRQEVREFKTTVRGLLGMADWLRAHGVTHVAMEATGVYWRPVWAVLEGEFELILCNAAHVKNVPGRKTDVKDAEWLCQLLEFGLLSPSFVPPKPVRELRELTRRRRTLVRERAQEVNRLHKALEDTGIKLDCVASDILGVSGRAMLDALLAGERDPEKLAALAKGRLKVKSPALIEAFEGCRFGAQNTLLIGGILRHIDFLDAEIAALGEAIEAHLQAERPHADRPAPFELAVQLACSLDGIQQRTAEMLIGEFGTDMSRFPTDKHFTSWAAQCPGNHQSAGKRKSGRTRKGPKWLDGALHDAAMGAIRVKDGHFARKYRRIKARSDHKKAIGAVKHAILIALYHMLKNGELYRPPTANPEAERRAQERATKRLIAQLEKLGHSVTLQTSTSTSAAVVAT

SEQ ID NO: 332593 - protein, 457 aa, unidentified
MNRKRTKSKVDRTMPMVHPNAAAIDVGATIHMAAVSADRTPEPVRSFGTFTTDLHRLVNWFKECGVETVVMESTSVYWIPIFELLDARGFTVFLVNARDAKHVPGRKTDVSDAQWLQRLHSYGLLRASFRPKGQIAELRAYVRQRERLLEYAASHIQHMQKALTEMNLQLHHVVADITGTTGLRIMRAILAGERDPKALAHLRDYRCHASAETIEKALTGSYRAEHLFALDQALALFDAYHEKVSACDVRIEAVLKELSISRSRGSGSLPSSHRRTDQTNAMAFDVRAALFALLGKDVPQISGLGPYLSLKLIAECGDDLSAWPSAKHFTSWLCLAPSNKISGGKVLSSRTRRSGSRASALLRLAAVTVGRTDTALGAFYRRLSARIGKAKAVTATARKIAVLFYNAVRHGMEYVDPGASFYETRYRKRVVENLHRRAKAFGFVLHPAEPTPSVAVS

SEQ ID NO: 332594 - protein, 372 aa, unidentified
MKKVNTVVVPQIRNFSQQKLTTEKLTIGLDLGDRSSWYCGLDAGGQVLLEQRVGTTPKAMKEVFGALPHCRIALETGMHSPWVSRLLAEFGHDVIVAHARNVRLIGESRKKDDRLDAQTLARLARIDPQLLSPVKHRSAKAQADLTVIRARAGLVRARTALVNTARGLAKSYGERLRGCNVRNMNPEKAEGLSPELQRALEPLLAASAALSEQIAESNERIEALAQVSYPQVARLKQIQGVGTLIALTFLLTLEDPHRFRKSRDVGCYLGLQPGRRNSGQSEPQMHISKEGDPYLRTLLVQGAHHILGPFGADCDLRRWGLKLAERGGKSGKKRAIVATARKLAVLLHHLWVSGEVYEPLHNRQPKAQPIAA

SEQ ID NO: 332595 - protein, 407 aa, unidentified
MSVKHVIALDVSKGKSTMTIYDGYRQCKFEGELEHTRVDFERLHDRIEAIIKLDGQAPDIVFEATGVYSKPVERFFKDYGYTYSRMNPLEANLQMAKMRRHKTDISDAHELAKTHFKLERETTYIQDDYYEQMRALTRYYDEIDGEMILLKSRMHAILQMSFPELETLLTPSSALFLNVVQLYPHPALLLAHSKTVIKNRLKANTRKNLSLDRAEKKAIELVEAAENSYPAIKPTDVRCDQIRDYATRVAELKDKKEGLVQQMVELSREKREYIILRSIPGIGDSTACRSIGEMGDIRRFKNAKQLNAYVGIDIMRYQSGNTQYRDRINKRGNKHLRKTLYFMVCAMLMAKGKPNHFVDYYYKLKTQPQRKPHKVAIIACINKFLKVTFQLLTHGILYDYEAATNYS

SEQ ID NO: 332596 - protein, 353 aa, unidentified
MNKVARKKQVREVHFDGPIWVGVDVHKSSYAVAVRDQEGQTVQFTMTADNESFVRKIASYGQPVAQVAYEAGPCGYSLYRACEAAGIRVLVAAPSRIPRPVTRGNKTDRLDCRKLADYAARDMLVSVRVPTEEEEMLRSLQRRRHGLTDRIRLTKQLIKSLLLGYHIAEPHGLGSWSKASVEALKGLARGAALRDTLDSYLRELAYLATERQTVDQAIVKATPQEVSQRMMILQSVPGVGPVLATTFACEIFRPERFADAERLSSYVGLAPVVRQSGASAASGSLVRAGKQRLRSLLVECAWIHKGRDADAELMYRRILARTGHAQKAIVAVARRLLTLLWRLCIEDRMYVAA

SEQ ID NO: 332597 - protein, 337 aa, unidentified
MEYYAGLDVSMKETHVCVVDRDGDVALETNTSTLPEAIAAALAKAPDCQRVVLETGRMAPTLYHGLAALGVPVICIESRQASLALKSLATHKTDRNDARGLAQLARTGFFKPVHVKSLPAHAVRALILARKKLVGQRVTLENQIRGLAVVFGVRLPRGLSPAFAEQVIDGSKGVAGLACAMAGLLAARNAVLEAITAIDRDMKRLARSSEACRRLMAIPGVGQLTALAFVAAIDEPERFRRSRDVGAYLGLVPRRYQSGEVDYTGSISKCGDRRVRTLLYEAANVMLTRYRGKLALKEWALEIGRRSTMRKARIALARRLAIIMHAMLRHGTEFKAA

SEQ ID NO: 332598 - protein, 383 aa, unidentified
MRLRLRKRVRRWGGCRSLQTASQCAKVVVFENHRAERTATVMKDTMIGIDLAKNFFQVHGASMTGEVKFRKKLSRAQFHRFMATQPAAVVVMEACGSAHYWARAMVALGHEAKLIAPQYVRPFVKRQKNDMADAEAIVVAAQRPEMRFVEARSQEAQARAMLFRGRERLVHQRTELVNALRSHLYEFGRTYPQGIGQIRRIAEALEDPCCDLPVLVRDECRDILGQIAEKTERIEARTKKIKALAEATGIARRLQTMPGVGPLTALAVEAFAPPMDAFRCGRDFAAWLGLVPRQHSSGGKERLGRVSKAGQADIRRLLIIGAMSRLNWMGRRSIPEGSWLAQLRARKPKMLVAIALANRMARGIWAMLTRNEDYMEPATVAPA

SEQ ID NO: 332599 - protein, 319 aa, unidentified
MAQNDLVVAGIDVAKDKVDVCVRSLSLKRTFASTAEGRRELTSWLRRHKVGKAVMEASGGYERDWAKALRAAKIEVRIVDPKRVRSFAQSAGRLAKNDTIDAEMIAWFAETFDEARGQAYDAAREQLHQMVNARQALKDMQAKLENQGEHALPATVQRIHARIIKTIAVELVKIEAAISAMVQATPRFTELAEIIESVPGIGRTTSAALIAAMPELGQANNKIVAALLGVAPYDDDSGRRRGERHIKGGRRRTRNVFYMACLGAATQHNPVLKAFYNRLVAKGKEKKVALIACMRKLISILNIMIERRQKWDANRYAVS

SEQ ID NO: 332600 - protein, 381 aa, unidentified
MVNPTTLPDRTLEQACTMVLFMALELSDKKWKLALSDGTKRRIVTIAAGDLVALGEAVAKAKARFGMHGVVPIVSCDEAGRDGFWLHRYLLHCGVANVVVDASSIEVNRRARRAKTDRIDVEQLLRLLIRYHHREKRVWSVVHVPSVEEEDARRLHRDLERLKKERTGHRNRIQALLVSQGSRLQPRHDLLERLEAARLWDGSALPPDLQAEVRREEARLRLVDEPIRALEAEQARRLEAAATPCHQQIAHLMRLRALGLTSAWVFVMEYFGWRQFHNRKEVAALAGLTPMPYASGDSARDQGMSKAGNRRIRTLMIQIAWGWLRYQPHSALSIWFNTRFALGGKRMRRLGIVALARRLLIALWRYMQSGAIPEGASLKPL

SEQ ID NO: 332601 - protein, 436 aa, unidentified
MSEKKQKDETEFAALVGIDWADQKHAWALQVSGDINVERGELDHKPEAVDDWAAELSRRFADRPIAVALEQARGPLLFMLTKYVHLVIFPVHPATIANYRRGFRPSGAKSDPTDADLLLDLLAHHREKLRRLDPDTAETRALQFLVEGRRKFVDDKTRYSNRLTAHLKMYFPQVLDWFSVVSSALVCDFLQRWPTLEKLQRARPETLRKFFLGHHIGTSELDRRLKQIRQAVPATQDEAVIRSSSTYAVALVRILREVRMAIVGYDEQIDRLARQHPDFAIMDSLPGAGAALVPRLIAAMGTQRDRYQNATELQSYSGIAPVLASSGKQHWVHWRWSCPKFLRQTFHEWATHSIRSSAWAKDYYDRQRGKGKPHHVVIRALAFKWIRILFRCWKDRKPYNDDQFRHTLARRRSFAGAVQLQWKTCAGFSKIDVITP

SEQ ID NO: 332602 - protein, 355 aa, unidentified
MKTIGVDLHKYQMTLVVLDERGVVVRQDTLPTKCRNQIREWFASYGTDCQVAVESVGFYQWFWDLVQPLVGKLVLADPAGLASKRPRKQAKTDRNDARLLAELLLKGELPAAYVPSRALRPLRELLRHRHSVGRALALQCRCLRWATLKLNLPGPRNFTSDATQKWLLSQEGKFSPAQQLIARQRLDQIIALERPVADTERLIDKAVAAEAELAERLQLLQSIPGVGPLVALTILVETGDLTRFANPDQLGAYAGRTPRVRQSADTVHHGHISKMGPPILRWVLTQAAWVAVRIDPHARRIWLRISRKAGAKRAIVAVARKILIYAWSVCRRHQPFHGPDQPVPAAAAVGWAYAI

SEQ ID NO: 332603 - protein, 432 aa, unidentified
MDQIVERPGALDVHKASVTACVRVPGHEGGRVQEVREFKTTVRGLLGLRDWLAGHGVTTVAMEATGVYWKPLFAILEDDFELLLCNAAHVKNVPGRKTDVSDSQWLCKLLECGLLKASFVPPKTVRELRELTRRRKTLVRDRQREAGRLHKTLEDTGIKLDCVATDILGVSGRAMLKALIDGTRDPAVLAELARGRLRAKLPDLREALEGRFTTQHALLVGGILRHIDFLDAEIDALGTAIEAHIDAQSKQAREAKQAGEHTGAENPFDSAVQIACSLDGIQQRTAENLIGEFGTDMSRFATDKHFVSWAAQCPGNHESAGKRRSGRSRKGPEHLNRALNDAAMGAIRVKDGHFARKYRRVKARSCHGVALGAVKHSILIALYHMLKTGELYKPPTPNPDAERRARERATKRLLAQLEGLGHTVTLQGAAAA

SEQ ID NO: 332604 - protein, 424 aa, unidentified
MNLTQNDRLRQVTSDTLIVGVDVGSQTHFCRAFDWRGFELSRRVFKFSNTGMGFLTFLRWTEELMNKTEMKKVIVGCEPTGCYWLTFQKFLQDHDIQLVTVNPFTVNRSMELDDNSPEKSDLKDPKTIALLVKDGRFSTSYLPSGVYAEIREASVCRDQIMKQHVRLSNQIQGWLQKFFPEYFECYADWDSTSGLMLLREAPLPQDILKIGAGGINQIWRDTKVRAAGIKRAQTLVEAAQNSVGLEAGEAARLEIWVLVNDYILKAEQLKRLDEYLEEKVKEVPNVEKLLAIKGVGMSTVIGFIAEVGDIGRFTDPKQIQKLAGLEIVKKSSGKKKGQPRISKRGRRKLRRTMYESAKALMLWNPAFQDVFLYYRNRTKNPLGGMQAKIAVACKAIRVFYVVLQTGCDFDEEKFRKDIIRPEAA

SEQ ID NO: 332605 - protein, 479 aa, unidentified
MEQEEAGQPPVRRLVGIDLGIASRHSVRVLEADGRAVCRSSCVPTVESLTALERAALAGAPAGTTLAVVFEPTGPAWLPIAVFFARRGHAVYRVSSAKAADLRRFLRRHAKSNGIDAETLARIPLADPGGLQPLELPGPDLAALDRRVRACARLTQAAAEHKTRIKDLVRQLMPVTPLTGDIGQADLAVLEHYGDPRALLAAGLAELTQLITAVSHHQQGHDRARQWRDAAAAAAELYQDDPAVPFAELAAEAATEIRLLRAIQAELAAHAAAREQHYLRADPDQLARSLPGFAEISAPVLIAAIGRPGRFRDGTKFKSYVGLAPKASETGETDRKGQPMSKAGPSLLRATFYRAADTARRQDPQLAKIYYTQMTERGANHLKACCVVAGHLAERAWAVLHRGTPYVICDNHGNPATPAEAKQIIAERWTVPEEIRKRRRSRKIAGKAPQPALTRPDTRGDLPRPRSSRPRAKTVNPTT

SEQ ID NO: 332606 - protein, 347 aa, unidentified
MRFYTQHHGYYCGIDLHARTMYVCIMDHDGTVLVERNIRARPGPFLELIAPYRDDLVVAVECIFTWYWLADLCHEEGIHFVLGHALYMKAIHGGKAKNDRIDAGKIAALLRGGMIPQAYVYPSAMRSTRDLLRRRLHLVRHRGRLLAHIQNTNHQCNHDDFRKKLTYKANRIGVAEQFDDPSMRKSVEVDLALIAHYDGIIRDLELFIVRMAKQHDADMFHRLRSITGVGKILALTILYEVHDIARFETVQQFASYSRLVKCSRESAGKRMGTGGAKIGNVHLKWAFSEAAVLYLRKNPEGQKYLARLTRRHGKGKALSILAHKLGRATYFVMTRSRNFDEKKFLAA

SEQ ID NO: 332607 - protein, 428 aa, unidentified
MSNQEITRREQFCQIVNEIYGSEAYLVVGIDVAKEKHYAFMGTATGHTLQRKLIFENNIEGFRRLLKVADQIKTQNGLCKVVYGLEPTGNYYKPLGRHLIRCGGNVVMVSGQAVKHNRKILDGRWDKNDTKDAANVADLVSRGKCIYYDSPLPEITELRGLLSLRRRLKKTEHSLKMRIRNTLLAQYFPELDKYYSACESESLAIIKWCLNPDKIASITFDQFFNLVTRTHRGIAQKLRLQKVYQAAIDSVGCPMGYSVEFEAELLVGRLADVRQAIRRAEDWMEDISLDIPGYNYLLTIPGFGPYVSARVLASIGDPFRFTNRKQLIKMSGYDLCANRSGKTSNKAIPVISKQGNSELRYALYQAANVAAGRTDLFRSYFTKLLRGRERERGIKTKMRVKLAAKMLVIAWTLMKNKEVFDPVYLSTN

SEQ ID NO: 332608 - protein, 314 aa, unidentified
MDKITVGIDVSKDRLDVAERPSAEVFVVERNAAGLEELVERLRSLGPHLVALEATGGFETVVAAALAAAGLPVVIVNPAQVRAFAKAIGQRAKTDPIDARVIAHFAEATQPEPRPLPDEATRLLADLVARRRQIIDMIGAERQREKRAPARLKKSIVRLVKALEKELTSVDGDIDDAVRGSPAWRETEDLLASVPGVGPTIARTRIAELPELGTLDRKQIAALAGLAPHTRQSGQWKGRSFIGGGRASVRTALFMGAMVAKKHNPVLKAFFDRLVAAGKPKMLALIAVARKLLTILNAIIRDHRPWQGTVVAAS

SEQ ID NO: 332609 - protein, 489 aa, unidentified
MKAKAVSVSRDRRGLPAVMRPALPHVVELASQTTQKRKTDTMKDYILRTHAAVEPQMTPTSQRIDQKPDLAASVAEPQLQANAQVDPKAPTSLADVSSRGSQPCALSAGPVLFIGMDVHNDSIAVSLAPSDSIEVRRYGIIGGSHDDVLKLAKKLQAAHPDRALHFCYEAGPRGYPLCRFLRAMGYSCILVAPSKIPRKPGERVKTDRRDADQLARLYRAGELSAIYVPDPHDEAVRDLIRARYQISRQQHRARQQLKMFLLRHNLRYPGKTAWSPAHLRYLARVKLPFAEQQFVFQEMLDVITEAGKRLERYEAQLPGVLAGWRWEPVVRALMSLRGVALLNAATLVAELGDLNRFPTANQLMSFLGLVPSEETTGNDRRQGGITKMGNGIARRAIIEAAWHYRLPARISPTLQVRQEGLPKTVTQAAWEAQTRLHRRFKHLTGVRHKKSQVAAAALGRELAGFVWAIARMVKPNALTDEKRTALPGA

SEQ ID NO: 332610 - protein, 416 aa, unidentified
MPEEGEPVHYYLGVDWADQTHAVWVVDERGTKITARTVPHTAEGLSEWGRELDEWRAQGIELWAAIERPEGRVVDFLLDHGVVVYPVNPKALDRARDRFRQSGAKSDPFDARVLADFLRTDHASFRALQPSSEAAQELKLLTEDCQRQIRQQTRLVNQLTATLKAYYPRGLEVAELTTALAREFLQAYPTPAAVAGLTERQWQRWARAHRLSEARTQELWAVLQRPQLPVPAHVVRAKARLLQTLLTELEPVVAAVGAYRQAVEDFFAALPAAQWIRTLPIGEHGITAPTLWARLGDAPGRWESFQHLQAHAGAVPVTVKSGKQHVVHFRFACDKMLRYVVDQVAFLSLRSSEWARAYYDQQRARGHEHREALRALGAKWLKIIFILWDRQVPYDEQYHLATMARQQLRQRSKKIA

SEQ ID NO: 332611 - protein, 347 aa, unidentified
MNQIIRIGMDTSKHFFQLHGVDAAELPVLRRKLRRKEMLGFFAKQPPTVIGMEACGASHYWARELGQLGHTVKLIALQHVKPYIKRNKNDGRDAEGLCEAMSRPTMQFVPVKTAEQQAALMLAGMRERLVAQRTQLSNALRGYAAEFGLIATKGLDKIEPLLADIAADEGLPVLARELFAMHGREYAQLQAELKAIEARLMAWHRANPDSRRLAQIPGIGPISATALVMKAPDPRAFPSGRHFAAWIGLTPKDHSTAGKTRLGKITRAGDERLRSVLVAGATAVIQQARRGRGRSSPPWLLALLARKPPKLAAVALANKNARIAWKLMTTGESYDGARMPGVSALAA

SEQ ID NO: 332612 - protein, 320 aa, unidentified
MMTQDDLVVAGIDVAKDKVDVCIRSQSLRRAFASTTEGRRELASWLRRRKVGKAVMEASGGYEREWARTLRAARIEVRIVDPKRVRSFARSAGRLAKNDTIDAQMIAWFAETFGEAPHQAYDAERERLAQIVNARQALLELQSELQNRGEHSRPDVVQRVQARLLKKIAAELATLEAAIAATVKATPQFAALAEIIESVPGLARITSAGLIAAMPELGQVSNKVAAALLGVAPYDDDSGKRRGERQIKGGRRKARNLFYMACLGAATRHNPVLKAFYRRLIAKGKEKKVALVACMRKLIVILNIMIARRQKWNPDLYAWD

SEQ ID NO: 332613 - protein, 347 aa, unidentified
MKEYSEAFIGFDTAKKKHAVAIADVGREGEIRYLGEIDSSPLTIERMIRKLAGRYEKLHFCYEAGPTGYGLYRQVRGLGHDCSVVAPSLIPKKSGERVKTNRRDAVSLARLFRAGELTSVWVPDTVHEAVRDLVRARETASQDLRRKRQQLLSFLLRHGRIFSGRQHWSRAHLRWLAQQKFDHPAQQIVFQDAVDAIDDAAARLRRLDEQVAAIVPSWSMAPVVEAYQAMRGVSFVVAVTFVAEIGDLRRFDNPRQLMAFLGLVPSERSTGERVRRAGLTLAGNKRARRVLIEGAWSYRYPARVSQTLQARLEGLPKAVFVRSLGRRKFACAPVIAGSPPPARSCPW

SEQ ID NO: 332614 - protein, 342 aa, unidentified
MKLSTISIDLAKHVFQVMGFTNTGKTLFNKRLNRQQLIEFMQMQIKCRVVMEACYSSHYWGRTFESMGHNVGLIPAQHVTPFVRGNKNDSNDTLAIFEASCRPFIRFVPIKTMAQQEALILHRLRERLLGTRIATSNQLRGVLTDFGIIFPVGHKGFNEKLIDLCSDESLSETLRWLVNDVYSEYALLNNRIKEIEKKLKSEIERHPLGKVVLSIPGIGYLNASAFIASIGNGQAFASAKDFAVWLGLAPKQFASGNKSIMTGISKRGDQYLRTLLIHGARAMINHAGKKQDALNQWVCQLRERKSFNCTAVATAHKLARIMWTLLQKNSYYTPQIAKEITQ

SEQ ID NO: 332615 - protein, 339 aa, unidentified
MHPTTIAVDLAKSVFQVSIANQADRIIDRKRLTRSQFERFIIQQPPVQFVMEACATANYWSQFAQSHGHTTKLLHPYYVKPYVRRNKTDSADADALLRANNDPHLLPVPTKKPDQQAIQGLHRIRQQLIRTRTGRINLARALLAEFGISLARGTSAIGQRLTTHAEQLPFVLHADFQDLITEIQALKQRIEQLDKSLSNIAKNDPVAQQLMSIPGIGVTTATALIAGVPDIHLFKRARQFSSWLGVTPREHSSGNKRRLGAISKQGDTYLRTLLVHGARSALQQAHRQQNKAPNELSNLQRWVLQLEMTRPKNVATVALANKMARLIWVTWTEARTYKP

SEQ ID NO: 332616 - protein, 370 aa, unidentified
MNKIITVFVGLDVHKDSIEIATADGTSGGEVRHVGRVGGDLASVDRAVRSLNQPTRSLVFVYEAGPCGYAIYRHLTSRGFTCQVVAPSMTPHRPGERIKTDRRDCIKLARLARAGELTVVHVPDAEDEAIRDLSRARGDAVRNQRDARHRLKALLLRQEIRYVGKSSWTQAHERWLATVKLPHPAQQIVFQEYLDSVRESTQRIERLTQALTDAVVHWRWQPVVTALQTLRGIAVVNAVTLVAEIGDIQRFTHPQQLMAYLGLVPGEHSSRSRRRQGAITKAGNSHARRALVEAAWQYRLPARVSPIIATRQAGVPEPIRALAWKAQLRLCARYRRLAARQMHKNKIVVALARELTGFVWAIVRETRAQE

SEQ ID NO: 332617 - protein, 343 aa, unidentified
MDPARTAARADATSSSHLQDRDMFMDAAVNSFVGIDVAKDSLDVCVLPDRRRWTTTNDRDGVGRLLEALPAAGACLVVLEATGGYQRTVVAELIAAGHQVAVVNPRQVRDFARGLGLLAKTDRLDAQAIARFGQQVQPRPAQKVPEKQDRLEQLVARRRQLIELRAAEKCRLETASTKFVIKNVRSMIEQLGKFIRQIEKELSELVDSDDRLQCRAAALQTAPGVGAVTAVTLVAELPELGRLNRQEISALVGVAPFNRDSGKFHGRRAIWGGRAAVRRVLYMATLTARRCNPVIRTFGQRLQAAGKPFKVVMVACMRKLLVILNTILKNNSTWNSNHQLNHG

SEQ ID NO: 332618 - protein, 318 aa, unidentified
MTTHACKIQSALGCDVSARTVTFFSSLTRKTITVANEASALRAALKPYAGSTDMLAVCEATGGYEDVLIKVLESLAIPTHRADAAKVKAFIRSFGTKAKTDPIDARFLAAYGLERDLDLPRWQADEPQQARMKLLVARRADLVAMRVQETNRLAAPRNKPIAREIRSHVGELNKRIAAIETEIEAIVASSRQLKARQAILRAIPGIGAVLSTMLITSMPELGQINRRKAASLAACAPHPRDSGTRNGYRTITGGRRHIRPALFTAALAAIRGNNRFADIFKNLVKAGKPKRLAINAVMRHIIVVANARLRALNDPVSN

SEQ ID NO: 332619 - protein, 460 aa, unidentified
MKKMKKSKRTKGMEEARAFEGLSKVHQNAAGVDIGATEIVACVSGGAEVQLVKAFGNYTVDLQAICEWFREHGVKTVAMESTGVYWIPLFEELERQGFECLLISSRSLRKVAGQKTDVEDAQWIQTLHSYGLLKGSFRPQGDLVGLRTMLRHRAQLVEHRAPHIQHMQKALLQMNIQLSQAVTDVMGMTGQKIIRALVSGLRDPDQLATLRDPGCKHSEEEIAKALTGTWRAEHLYVLKQSLELCDIYTEKIEACDEEIGRQYGTTRPDWGSGELPVVPNKKLHTHSKNAPKDAKEIREHLYRINGVDLSLVDGFGVSLAQTVTMEVGSNVGEKFPTEKHFCAWLGLAPKHDITGGKVLSNRTLKTKNRAGQAFRMAAQSVKKADCPFGVLYRRLRSRLGPAQATVATAHAIARVVYKMLKYKVEYDPLSVNEYQKQYEAQQVKYMKKKAAKFGYQLIPS

SEQ ID NO: 332620 - protein, 373 aa, unidentified
MPKYSTAFRMDVHLRSTTVCALDADTGEAATRRFPGNPWGEIAGWMDGFPGPSLAAYESGYPGFAPQRELAGLGVECVVAAVSKIPRSAADSASKNDRNDAARMAKAILAHDISPVWVPSPEVEGIRDLAGAYDGATARLATAKQRLLAFLAKRGFVYGGTTPAGNPRKYWTYDFLRWLDKVRPEDDGGVRTLAALRNEVEAAAEARADLLSEYRAAVDASPIAAEVASLQSIKGCAFALAAAFSAEVGDFTRFRSGRQVTAYFGLAPSQRSSGDSVRLGGISGAGNALVRKLAVEGSWCYAAARHQPKLMPRDTGVPLEIRTHGRKGSERLLRRREEMLARGMPAAKANAATAAELVRWLWALGAMCREGAE

SEQ ID NO: 332621 - protein, 331 aa, unidentified
MYDFFVGCDVSKATIDVSYRSTQIEYLGQFDNNISGFSEMVELLKTITEISSSRWFVCFENTGVYSKALLAWLYSMGIPCCEENAMKISKSKGVVRGRNDVLDSQVICKYAFEKRDSLTPTRLSKPLIVRIRKLLSRRKLLVKQKQGITVSLQDQQDYIDPDHLKIFQKQNQDLIKLYSQQIKFIEREIQVAIASDVEVKKNYDLATSVVGIGPVIGAHFIVITENFTTFLNGRNFASYSGIAPFLHGQSGTKSGKNRVSHIANKYMKALLSNAASAAKLYDPQIADYWNRMIEKGKPKGVVINNVKNKLVQRTFAVVKRRTPYVKLNTYA

SEQ ID NO: 332622 - protein, 355 aa, unidentified
MSVQNLTVGIDYHLHSLRVSVLSPEGRELGNASIENDVEKFIRYVSGFGGSVRGVAIEACEGSARFADEVIRRANWRVELCHPGYAQRMRHNPDKTDCHDAYLMADLSRVGYLPKVWLAPEDLRDLRTLVRYRASVSAQAKEQKQRIRSILRRERIKLPPGYKTLWSQKARLWLESFAELPEHTLWVFKRHLAQLKSFEEELKESEKRLTEFAERDPLITELMKQPGIGVITATILRAEIGTFTRFMTGKEFARFCGLTPKNASSGQRQADAGLVKAGNPILKTALIQVGHNLCRYHPDYRERARRMLSAGKKKGVVIAAMTNRWARRFFYLMRDFETRGSESVLTAADSSTMTH

SEQ ID NO: 332623 - protein, 358 aa, unidentified
MQIIGCDLHARQQTVAMLDTDSGELVEKTLEHDGEELREFYSGLSRPVVVGIEATGAMQWFLEWMEELGIECRVGDPAKIRAAEPRKQKNDRRDAQLLLKLLSENRFPTIWMPSTEQRDLRTLLRHRHQWVRMRARLQHTLQSMALNHGLRRGHSLWNQAGQQALRALPLAPHASERRKALMTLYPSLQESIDKLDREVSQQAQNHPAARRLMTHPGVGPITALATEVFLGDPLRFTDGKAVASYIGMIPREHSSGGRQRLGAMSKQGNTLLRYLWCEAAMHAVGRDPELKRFYRRKLVQKGLGKARVAAARKLGVRLWIMMRDEIDYQEFCRRGEAGQESGSVCAGMPGITSGPIKS

SEQ ID NO: 332624 - protein, 365 aa, unidentified
MKHVTTYVGIDAHKKDLFIAMLIGQEATPVTWTVPNEPNAVRRFVRRLERDAPGPVRACYEAGPCGYVLQRQITTPRVSCHVIAPALVPRKPGERIKTNRRDARKLAELLRANVLTEVRPPTPEEEAVRDLCRARDDAREDLQRCRHRLGKFLLRRGLHYTGRNWTRAHRQWTDSLVWTHAAERVLLEDYQLAIDHVEARLIELDRRLVEIAEAAPYREPVGWLRCFRGIDTLTAMLVLAELHDFRRFKSPRALMAYLGLVPGEDSTGEKHRRGRITRTGNALVRRLLIETAWHYQHRPSVGAALLRRRKGQPERVIAIADRAQQRLCRRFRRLAEQHKPAPKIAVAVARELAGFLWAALQAPAA

SEQ ID NO: 332625 - protein, 391 aa, unidentified
MILVGVDVAKDKHDCYIMTSEGEVLFKSFTISNSMEGFDQLYEKILSVADNLDKVKIGLEATGHYSYNILSYLLDKGLTPFVINPLHTNLYRKSLSLRKTKTDKVDSRTIASMLMSDVSLKPYSDTLYHNEELKSLTRYRFDKVQQRARLKTSISRLVTILFPELEKLVPTLHMKSVYSLLYEFPNAKAISKVHLTKLTNLLYASSKGHYGKEKAVSIREAAINSIGSYMSAKSLELKHTIKLLEELTLEIDEIEKEIKSIIDKLNSPILTIPGIGNSLCAQIIAEIGDFKNFDSPDKILAFAGMSPSTYQSGKLYSSNAKMEKRGSKYLRSAFFTAAVCVCRFEPNFALYLAKKKAEGKHQYVAISHVVKKLVRLIFHLEKTGEHYVALT

SEQ ID NO: 332626 - protein, 325 aa, unidentified
MIGIDVSKATLAVCVRLADSGIELDHEFPNTATGHHKLHAWLKKHGEQTGWACMESTGPYHLNVAQFLHQHHYRVSVVNPKRIKAYGESRLSRGKTDKADARLIAEFGEKETLPVWQPPAQERVALKDLQDRLDELEESLRQHRQRREHCQNPSVLASLEREEAFIKQEIEALKREQGHLCDKTPCLREEIELLCTIPGVGELTATRLVARIDISLFDHAASFAAFFGVTPREHSSGTSVHKKARMSKLGSKRLRTALYFPAMQATRYNAQVQALYDRLVAKGHPKKSALGAAMRKLAQQIYGVWSSRRPYDATHGLPSLESFTA

SEQ ID NO: 332627 - protein, 348 aa, unidentified
MRFYNQPHAFYCGIDLHARSMFTHVLDQQGATVFARDLPANPDAFRSAVAPYRAGLVVGVECMFAWYWLADLCEDEAIPFTLGHALYMKAIHGGKVKNDRIDAAKIAGLLRGGMFPMAYVYPRAKRATRDLLRRRCFFVNQRSQLIAHIVNTNSQYNHPPLTAKLCYAGNRTDDIAERFADPATQLSIRADLQLIDAFDEQIDDIERVVQKTAKIDDPVSLGFLRTIPGIGKILSLVMLYEIDQARRFPEVGNFLSYARLVRCEHESAGKKKGSGGKKIGNAHLKWAFSEAACLMLRALPAAKKWMQRQERKRGKKKALSVLEAKIGRTVYHLMRKQQAFDAHRFFAE

SEQ ID NO: 332628 - protein, 412 aa, unidentified
MEGETVIAGVDTHKDVHVLCLLDGLGRKIWSGSFGADPEGYDRLAEAIGDPGSCMVVGVEGTASYGAGLTRRLVELGYNVVEVLRPKRDKVRPGEGKSDPLDAERAARKAASGRGCSVPKSQDGWVEAVRQLYVARRLAVATSTSCVACAKSMLTTAPSALRERFRGRERPKDLMPLLARGRKAGDALEESVLASLRSVAAVWKEARSQVESLDERIRALLEANAPALLGVEGCGTTTAAALVVAAGDNPGRLRGEAAFSMMCGASPIPASSGKTDRHRLNRGGNRQANWALYEIAIKRMAYDERTRRYVARRTSEGKSRREAVRCLKRYIAREVYHVLMDPNPDGAAPEGPELAKMRKAMRVTQKKAAAELGLSAATLGHLERGKRRSTKLERRYYELLCELERALPQTAS

SEQ ID NO: 332629 - protein, 411 aa, unidentified
MRLFVGDDWAEDHHDVELMDAAGRVLARRRLPEGVAGMARLHELTGEHLGDDGEDAEVVIGIETDRGPWVGALVAAGYVVYGVNPLQASRYRERLGVSGAKSDRGDAHMLADMVRTDSHQLRAVAGDSADAEAVKVVARAHKTLIWERTRQVQRLRHQLREYYPAALEAFEDLDAPDTLELLGKAPDPARAARLTRAQVSAALKRARRRDIPAKATAILAALRGAQLGQPPAVTAAYAVTVRSLIALITVLNEQVKVIQEQVGAHFGRHPDAEIYLSQPGLGPVLGARVLGEFGDDPHRYASGKARKNYAATSPITRASGKKKVVAARFIRNQRLTDALMAQAMSALTASPGARALYDAERARGTEHNAALRKLANRLVGILHGCLKTRTPYDEATAWPRQEKIPQSDLAA

SEQ ID NO: 332630 - protein, 487 aa, unidentified
MHPRTTNKFLETSDVYRFSFESAGALALDNEYSGFAVLPAHYIAFAERKRARPWTSIYHCGRYDVKPLATQQFTAYVGIDWADTKHDVCLQVPGNELREFDCIRHQLADIDQWAQSLHQRFGGPIAVALELAKGPIVYALQKYDFFVLFPINPLTLAKYREAFMPSRAKDDPTDAELALDLLMRHPERFTPLRPQSVQMRTLLSLTEHRRELVGDKTRFTNRLTNTLKQYYPHALDWFEQHDTLLFCDFLTRWPTFPQVKRARRASLEAFFYAHNGRRPNVISARLGAIKAAIPLTEDMGVIAPCRLQVLVLIEQLRTTLQAIDRFDREIAQLAPRLPDYCLFQDLPGAGPHLAPRLLAAFGEDRQRYQHADELQKYAGIAPVTERSGKKSWVHWRLRCPTFLRQTFVEWAGQTINKSFWAGAYYRQQRAKGSSYQATVRSLAFKWIRILHRCWQTRTPYDESAYLNALRKRGSPLLKHLELDAQSA

SEQ ID NO: 332631 - protein, 345 aa, unidentified
MNITKYIGCDTHKKFSVFVEWKAEGQGKSTQVMHEGGQMRDYLRSLPSPAAIALEAGGNYYWMVEEIEAAGHLPFLSHPLELRRRLGRNKTNEKDGAGMARLLHSGDLPTVWIPPAKLRDQREMLRVRLYFARLRASQKNRIHGNLHQYNLQIQSAQDVFSQTGRQELSQRLPELPTHTRASMAYQLELLDALEAIIVRVEQDLEKMLEQTAEAKLLDTLPGVGLILSMTIALEIGEVSRFPSAEKLAGYAGLVPSVHGTADHIRLGGVNPECNHHLKWAFVEAANVLAMQQSRRAGQHVTRLYRRIFRKKGYQKAVVAVGRHLAEAAYWVLTKREPYTDRGYRS

SEQ ID NO: 332632 - protein, 386 aa, unidentified
MIYVGIDIAKLNHFASAVSSDGEIMLPPFKFTNDYDGFHKLQSCLDQFDKAQLIIGLESTAHYGNNLVEFLVLSNYKVCVINPIQTSTLRKNNIRKTKTDKVDTLVIAKALMMNPHRYFTKYDISLLHLKELGRFRMKLIKKRTQAKIQLTSYVDQAFPEIQYFFKGVHHKSCYALLKEAPTAGMIASMHLTHLSHLLEVASHGHFKKETAKEIRALAQKSVGINDSSVALQITQTIDLIELLDRQVTTVESDMESLVNSLDSVILTIPGIGAINGGMILGELGDISRFSNPSKVLAFAGLDPTVYQSGNFEARHTKMSKRGSRPLRFALVNAAHNVVKNNQTFKKYYDQKRSEGKLHYNALGHCAGKLVRIIYKMLTDNVAFNLK

SEQ ID NO: 332633 - protein, 350 aa, unidentified
MFYVGVDLHKTQFTICILISGKVLEEGTKFEMNKNGYQAFISLMRGLSSSDTYDDIILAIESTANSRFFRDMMTGCGFKVVVVNTLRFKVVNLSTKKTDKNDARTLAEFLSKDILPVSHLCSAESEGLRRILKSRNLMVQDMVALKNQAHAVLLAYGHITKTAQFQSKRERNKILEKLPTPIARTVGIIFETIDVVENQKKVLEGKLRTLTAKDPTVNLLMTIPGIGIVNACTIRAYIDDIDRFESYKHFSAYCGLVPWVQTSNESIYYGRITKRGPQELRTALVQCVVAMVRMEDKTSNYKMMHQYQELKNDKSSGKAIIATARKLSRIIYIMLKTNTPFDSKKLTEKN

SEQ ID NO: 332634 - protein, 366 aa, unidentified
MEVTTIGIDLAKSVFAVSGADSRGRVVIRRQLRRAQVLGFMRGLPRCVVGMEATGGAQYWARQFTTLGHEVRLMSPALVMPYRKGNKTDRNDADAILEAVSRPSMRFVMVKSVAQQDLLALHRVRAQLVKSRTALCNQLRGLLRERGVAVRMGVAALKRSLPAALADESSELSGEMRELLSEMSQWLRTLEQRIASCEARITRKFKHDERCARLAEVPGVGPLTATALVAAVGNAQRFKNGRELSAYLGLVPRQHSSGGKTVLLGITKRGDRYLRTLLIHGARSALRQCKLEGDARSRWVARISAARGPNVAAVAMANKNARILWALLSRGDRYRSSRVLTRAVLRPGSPPPVERARGAKLRVAKD

SEQ ID NO: 332635 - protein, 348 aa, unidentified
MAIAVLGIDLGKNSCSVAGLDEAGRVVLRRRLIRDGVVRLAAALPACVMAMEACCGAHHLGRVLREQGHEVRLMPPEYVQPYVKAQKNDERDAEAIAEAATRPTMRFVELKSEAQLDAQILHRARSRLVGQRTALINQLRALLLERGIVVAKGRRQLEQRLAQMLDEAAEAPTSLSPRTRLLIEDMRLEWRELDRRIAALSAEFVARAREDQAARRLATIPGFGALNATALVAAIGTGETFRRARDLAAWLGLVPRQATTGGKPRLLGITKRGNTYLRTLLIHGARAALPALSAAATPLGEWLRGLLARAHKNIVVVALAGKLARIAWAVLRSGESYAARTGLRPATA

SEQ ID NO: 332636 - protein, 343 aa, unidentified
MKKSLFIGIDFSKKTFDVCLIDGNNPNGIPDYKQFENTKEGCNQLLKWVKLWSKIPASEWLFCGEHTGLYSVLLSEFLIKKDLFVWLENPLQIKLSTGIKRDKNDKVDSREIALYALRFQDKAKESQLSDKSLKSLELLLGFRDRLIGNKHALLVSAAELRTVLNRDVTARYIYEQSQKDIERINKEIKCVEAKMKEVVDSNDAIKETYEVVSSIKGVALINTVAIIVATKNFSRFENSRQFACYAGMAPFGKQSGTSIKTGPHVSHLANKRIKTLLTQAAQCAIRHNSDLKQYYTRKVAEGKNKWIVLNNVRNKLIHCIFALVRDKQLYQEGFLQHMEKSIA

SEQ ID NO: 332637 - protein, 357 aa, unidentified
MRKYRLAVDKGKCEEGGQIFIGIDLHKIQWHITIRTEEVELFNGSIPGKWEALKKLLNRFPECQQQAVYEAGYFGFWLHDHLVDYGVDCVVTPPSLVPQEYGNYVKTDRRDSRKLAHLLAKGLLKRVWVPTVEQRYDRQVIRRRKQLIGDRVRTQNRIKAELRFYGLDLPAPTGQWSKAYFENLQRLRFGNRWMQESFNRLLEEYRFLTEQIDKQTKVLRSLSETAAYEERMKILRSTPGIGLVSAMEYLLELQDVERFRRGNQLPAYVGLTPSQYSSGEKLRMGRITAIGKNDLRGTLVEVAWRLIAKDPAMREKYECIKARAGSKRAIIAIARITLLRTRRMLLDRQPYVIGLAA

SEQ ID NO: 332638 - protein, 347 aa, unidentified
MNFYTQQHKHYCGIDLHARAMYVCILDQHGTKLVHKNLPTTPEAFLRVIAPYRDDLVVAVECIFTWYWLADLCAKEGIAFVLGHALYMKAIHGGKAKNDKIDAHKIAVLLRGGMLPRAYVYPVEMRATRDLLRRRCHLVRKRAELLAHIHNTNSQYNLPEIGKKLAYKANREGVEEHFPDPSVRKTIEVDVSLIDHYDQLLGEVELYITRTAKAHDVQTFARLQSVPGIGQILALVLLYEIQDIARFPRVQDFVSYCRLVKCAKESNGKRLGTSGKKIGNVHLRWAFAEAAVLFLRHNQPGKAYFTKLEHKHGKAKALTVLAHKLARAVYYMLAREQAFDLRRFVSA

SEQ ID NO: 332639 - protein, 414 aa, unidentified
MTKSYPTPEAAILVAVDIAKDHNEVLIELRHNHRRRFRVANRLEEYERLVAYLRQFDTPALVGFEATGNYHRPLAYFLHARGFELRLIPTMALARTREAMHNSWDKNDPKDAQVILHMLKTGLSQTWHDPLVSGTNDAQELSKTHHQVTLARTRVWHRLRNHYFPLYFPEIEHFIRSDHSDWLIQLLLRFPTPGSITSLATEDFAAQAWSLVGRKVHKAALLAEIYAAAQHSIALPVPPDGAAVAMLRLVLEEYLMLGRMRESIAQQAEIILASNADRRRLMTVPGVGPLTALTILAEAGDLRRFAHYRQFLKFCGMSLSTQQSGRFRGISRLSKYGNARLRTAFWMAAKTAVRMRENSLRRKFDRYVRANPLDADLRRKGYSAVAAKLARIVYGLIKNGTDYRPFFEEAIPGG

SEQ ID NO: 332640 - protein, 416 aa, unidentified
MTVPVSPVVERHLAVDLHKHYLVIGGVNARQEVVLSPRRITLDEWLTWAKTNLKSSDVLVVEATTNTWWFYDQTYQSVGQVLVADPRKIAWIAQTKVKTDAHDVMKLARLSAAGLIPLVWVPPLAVRELRALLAHRRRLVRTQTVLKNRLHSLLHRLQIAPPEGDPFCAKHRAWWANLSVSPTERLHVKHDLATLDQVVEQLGEIDDELRRLSCAEPWSDVAPYLLHLPGVGLIVAMTVLAAIGDITRFPTSKKLVGYSGLAAGVHDSGQTHRTGHITKEGRKELRYGLVEAAWHAVETNDFWKAEFARLCRRMERNKAIVAIARQLLVAIWHVLTEHATDRHADPDMVAFKLMTWSWKLTNEQRGGLTTRQFVRYQLLRLGLGHDLTHVIRGGGKYLIAPPDEVLKLKPDLQRVA

SEQ ID NO: 332641 - protein, 391 aa, unidentified
MIYAGIDVAKDKHDCFITNSVGEVLFKSFTIPNNREGFETLFQKIQSVSDDLTKVKVGLEATGHYSYNLLGYLIDKGLPTYVINPLHTNLYRKSLSLRKTKTDKVDAHTIASMIMSDVNLKSYSDTSYHNEELKSLTRYRFDKVKARAKLKSSVSRLVCILFPELEKLVPTLHMVSVYSLLSEFPSAHAIASAHLTRLTNLLSESSRGRYGKDTAICFRDAARSSIGSHIPAKSLELKHTIRLILELTSEIDEIEAEIKTIMDKINSPILTIPGISYKMGAMIIAEIGDFSRFDSPDKILAYAGMSPSIYQSGQLDNCYAHMEKRGSRYLRYALYNATKYVCHWDESFGTYLAKKRAEGKHYNVALSHATKKLVRTIYAMEKSGQAYTNAA

SEQ ID NO: 332642 - protein, 441 aa, unidentified
MFLEHGWSNNDQVVTKRQSDGGNPMTVTYKYTVALDLGKKQHVASIFDTESSEQQQSVKVPVNQAGFSRLERLLQTYSPDSSAFLVGCESTGHVGETLLRRLQADGYTVVRMNPAQVVQFRRGLGRRAKTDKLDAEAMALQLSVTDFVPEQLASETARTLQRMTRLRLDFVEEQGRWVNRVRALVNQIYPEIEALLGDITTSTALAVLTSYPSRLSLAGAPLSELTKIVEKASRKNKGSVYARSLQKAAKQSVGLDDPWLTTELELVLRQLLTVRDNVKSLEREIAMLTEQLLQELSEDLGVEEPLTLDSFPIGTHLSIGTLLAEIGSVERFPTIKHLLSYFGWCPNTKESGSSKSPNPKMSHQGNRFVRRILWMLSVAAVRWVPEYVDYYQRRLDAGKNKMKTIVAVGRKLLSAIFAILRDGQPYDPDRYLQQQMKASNT

SEQ ID NO: 332643 - protein, 475 aa, unidentified
MPRIVNGNVYSGCEAFGPAGLEYEISVISSKTCLAARSDPLTWEARWSQPVSVCDALPINQRTRLFHTHGGVAMGNEIKRFIGLDIHKEYFVAMGVNALREVVLGPQKVSVYQLEVWADKHLSLEDAVVLEMSTNTYLFYDILQPLVGSVTVVHPPAVGLVTNVPVKTDKKAALALAQLHAAGLLTGIWIPPHEIRDLRALVAQREKMVRLSTIAKNRLHALVQRKHLILPEKPFGAEQRAWWEALPLSAIELLRVRSDLDTLTFARQQLEQIEDYLKRESAQDERIPLLIQLPGVAWLTAITILASIGEISRFENAKKLVGYAGLGSRVHDSGKTHTNGRITKTGRRDLRRAMVNAANHAVEYHPHWKKEFARLEAHLGRSKAIVAIARKLLIAVWHVLTTGQADRFAQPEDVGRSLIAHAYKVGVRNLPQTQSAPAFVREQLDRLSIGQELKTVPWGSEHRNLPPSKLLLEKE

SEQ ID NO: 332644 - protein, 390 aa, unidentified
MARGAGLVTIAVDPHKRLNAVEVIDAGSVVLARQEFVHSTAGFAELMGVARRWRCRQWAVEGATGVGKNLAQRLVARGEVVFDVPSKKSSLVRAFSATSGRKSDEIDAHAVALAALNSPDLERVDLDDHTTALRLLASRRKELVGLRTQAVNRVHRELQILVPGGAKRGLSAARAKTVLATVRPRDEVGKLRKSLVADQIADLVAIDKRLADINRQIKAAVKAAPTTLPELRGVGPVITAIVLGEVRDVARFVDEDHFASYNGTAPTTWGSAGEATPCVNRGGDRTLNHAIHMAAVTQLRYPGPGQDYYQRKRAAGKKPKAALRCLKRRISDAIYRQLLTDAQASQRGPGGHSGATTKISASDPAPTVGSSIKPQPGPRSHVTPVAAKTS

SEQ ID NO: 332645 - protein, 416 aa, unidentified
MFAVGVDVANGRSMVAVLDGMRNMVAKPFEVVHTAQGFAALVEKLRQLDGEVRIVMEHTGRYYESFAMSMHRAGFFVSAVNPLLIKNYQGSINVRKVKTDKADAQKIAQFALDKWTILPHYTPMDTIRYNLKTLHRQFQLASKTKTALSNNLIALLEQSYPGANRYFDSPVRADGSQKWVDFVDTFWHVDCVASSSENAFVERYRKWCKRHGYVFSEQKAIQLHADARQKIPLVPKSDTCKLLVREAVSQLNAVSRTVETYRAEMDRLASQLPEYETVMGMTGVGKSMGPQLMAEIGDLRCFAHQKSLVGFAGTDPIKEESGDKVSQSKPSSKRGSPYLRKTLFVIMTILLQLQPQEDPVYQFLDKKRSEGKPYYVYMTAGGTKFLRVYYGKVRDCLKAKGLWEVPASASQEVNPG

SEQ ID NO: 332646 - protein, 343 aa, unidentified
MERVYYVGLDIHKKTISYCIKLQDGKIVRHGEIAAERKALHQWTSELPGPWKGAMEATMFTGWVYDFLKPHALELKVAHPEMLKAITAAKKKNDRADSEKIADLLRVNLLPECHMASEEIRELRRVLRYRNMIVHTAVKMKNKISGLLMEVGATYSKKKLHGKKYFNELLERVEDVPPSVNDLLCLSRSGLEMFQGVQKKLLDTLRENDLIRERVDRLMTIPGIGEVTALTWALEIGNASRFSSTRQAVSYCGLCSAQKESGGKEQRGPISKKRNKHLQTVLIEAAKLAPRWSEQLAEVHAKELTRGNRNRATLAVARRLVAYMMAVEKRKTAFEPVTTAIAA

SEQ ID NO: 332647 - protein, 398 aa, unidentified
MSRIWVGTDCGKTHHHCLVLDSEGEVLLSRRVANDEPELLQVIADVLGLAGGTAVTWALDMTGGEPNLLIALLAAHGQERVYIPGIAVNRATDGYRGAGKTDARDARVIADQARMRRDLLPVRLDDEAVVELRLLTDYRADLVAERTRATNRLRSLLNSMFPALERALDLGNTGPLRLLTGYQTPAAIRRAGARRLATWLRNRKVYSPDALAAKAVEAAGRQHTAVAGEKAIAKMVHTLAEEVMALNEKITETDELIEGRFREHELAEVISSMPGIGPTLGAEFLAAVGGSLDAFPTADRLAAFAGVAPAPRDSGKVSGNLHRPQRYHRRMQRVFYTSALVSIRCDPNSRAFYDRKRAEGKRHVQAVLALARRRVNVLWALIRDGRCYQVTPPVTTAA

SEQ ID NO: 332648 - protein, 341 aa, unidentified
MTEYIGLDVSMKETAVSIRREGERIWRGKCASDPNIIAELVRKRAPAAKRVVFETGPLSVWFYHALRAEGLPAICIDARHAKAALDMAANKTDANDADGLARLAEAGFFREVRVKGFDSMLTRTLVAARTRLVRITVELSNQIRGIMKTFGLVVPAGKGTTFEKNVRSLLIDQNELAPIVLPMLEAWRSIRIRAAELGRQLVAGARQSQACRILMSIPGIGAITATSFVTAVEDPNNFKKSRSVAAWIGLTTRRYQSGEVDFDGHISRRGDRHLRGLLYEAAAVILTRSSIDSSLRTWGLKLRERIGFKRAAVAVARKLAVIMHSMLKTGEFFDRNAGATA

SEQ ID NO: 332649 - protein, 360 aa, unidentified
MEKHIVVGVDIAKAVFEVAVSKEPGRVADKRRLSRGAFLAFLAQIPRGTVVMEACGSAHYWGRKIRELGHEVVLLPPHRVRPYVTRNKTDRMDAKGILEAYRNADIHPVPVKSVSQQVLVCLHRFRSGWISSRTAQVNTLRGLLRELGFVIPEGIEKVLPQVRVIIEDADSGIPEGLRAVLATACDEIQALGESIRMTELQLEAVAEQTPLVERLQSIPGIGLMTSTALVAFIGDVERFPSGRHFASYLGLTPREYSSGLKRRLGRISKRGDSYIRMLLIHGARSVLCHAKKAKEHDRLRTWALASSGGSSTTRLPSHSPTSSPVSPGPSGSAGATSSHAPTPLREPEPRKALPTPELHE

SEQ ID NO: 332650 - protein, 355 aa, unidentified
MFHVGLDIHTKHIAICALDERGQVVHRSQVRTIQDLVRVLTGLPDRCEVCYEASCGYGHFHDLLRPLATRVLVAHPGQLRLIFRSKHKNDRNDAERLAKLLYLGEAPAVHVPSLEVRTWRELINCRSQVIAKRTRAKNTVRALLRSAGVTPPKSPGLWSKKGLAWLRQLELPTASQQLRRDLLLEEIEGLIRPVRRVEQQLNRQAGQTGAVARLRSIPGVGIRTAEAMAAFIDDPQRFGDAKAVGCYFGLVPCQDQSGDKNRLGHITREGAPVVRQLVAEAAWQAQRRSPTVRAYFERVQRDDPQRKKIALVATAHYLVRVMWAMLKRGTDWQEGPALATASGAAAGGDPAPEVD

SEQ ID NO: 332651 - protein, 316 aa, unidentified
MNEMNAEQFVGIDVSKATLDGAVEPQGQVWQVAYDAKGIDQLVLQLQEIGPTLIVIEATGGLETQIASALAGKELPVAVVNPRQVRDFAKASGRLAKTDRVDAGVLAAFARAIRPQARPLKDADTRALDDLVDRRRQLIGIRVQEVLRLKGATTKPLQTSLKKHIAWLDKQIDQNDRDLTRRLRESDAWRAKDDLLKSIPGVGSVTIVTLLAKCPELGTLNRREIAALVGVAPMANDSGQYRGKRFIWGGRSEVRAVLYMATISAIRCNAVIRAFAERLKNAGKPPKVVIVACMRKLLTIMNAMLKNNTPWQSQNT

SEQ ID NO: 332652 - protein, 389 aa, unidentified
MFKSNIIQTKDLSHSLFLGADIHKNNHTFVALNNLEQKVGQYSTTDEERDLRNLRCWVEELKTKFKGEIILGLEDSNGNGKLISKFLSEYDYQLYNINPCLTAQRRKRTIHQDKSDEEDALLVAKTLISEIDNLSQIKITRETETASQLKGMVDDYDSLVKNQTQIKNQLHKVLYQEYGAEYQRLFKDPFSKKALKYWLNQNERAYKSLDPDSGLAVAPPQLENIRKLRIRQKVKYLIFIQEQLKGLTGIIKKLFSLLPYQNLLTLPGCGILLGSRVVSEIKDISRFENSSKLARYAGISPQENSSGQSKKHKRSRFGNRQLNKAFYRISLSQIGGHKNAKAASYYQRKIKEGKNKKRALKSLVRRNVNIVFAMMRDKSEYDINYKRKS

SEQ ID NO: 332653 - protein, 370 aa, unidentified
MRYVGIDYHKRYSVLCATDERGQELKRRRISGNSATGFAQFFSELGEESKVVMEACWNWGWLYDLLAKIEGIDEVVLAHPYKTRLIAEAQIKTDRLDAQMLAKLLRGDLIAQSHAPSAATRARKHLLRQRLFWVRLRTMLRNRMHAILDRQHGLERPQLKNFFSRRGQTWLEEVQLPCAEDQPLLKQDLEVAELLEGKIKQLDRSIGQSQSEEEKLLESIPGIGPLFSSVIATEIDGVGRFNSATKLAAYAGVVPTTHASGGRVFNGRLLWQCNKWLRWALIEASWSAIQFSGYFGSIYRCARARGKNKNIAITMVAHRMIKIIWLLLTEKRPYTETLPDRSEDQVTVGSAPQGAQPRVVMLSMEDPGPN

SEQ ID NO: 332654 - protein, 305 aa, unidentified
MHQHKAIGIDLAKRVFQVCIVDTRNQKVHVNKALKRREVLDFLRQQPPCRVFMEACGGSHYWARQIKALGHAVGLISPQFVTPFRKGHKTDANDALAIVEAGLRPDMRFVPTKAIEQQDIQSLQRIRDRCIKQRTRLSRQMHGLLQEYGIICGRRQKSLTQAVWRAVEDAENELTMLMRQLLTEQMEELEQLNNRLLNLDQQVEQVSRAFAPCRQLMAIEGIGMVSATQLYSALGDGRAFQNGRQASAYIGLTPKQYSSGGARPRCEALGALGNYPLNARLYEGGTPPFVSWAINKMPEVGGYVI

SEQ ID NO: 332655 - protein, 404 aa, unidentified
MNQNTCITIDVSQGKSHIQGFFGPNKPLGKSKTMRHTKQGYQQIISLIEIIQSKTNEVPLVIFEYTGIYHKSLEKFLISHKINYHIVAPLRAAKSRNSEIRAQKTDVRDCLSLSKLFYSNNLGEFYYENKTYSKLRKLSHFYDTNMKHLVKIKVNFRETLAVVYPNYKQLFDNPYSIDSFVFLSNFPHPTILLNLSKEKVIETLCEEWDHLKPWSLNKINEIYSFVNNIVSGCDEDDPEVYMILEYLKQIEYYVRQNKTIIVEMIKLAKTTSLYILVRSLPGIKDILTVKFIAELGDISRFKNYKAIVAYAGTDPMIRQSGDKDGLHLKISKKGNSRLRKVLYLMVNSMIKTNRLNNAIKVKYQKRTQHLNPLKPKVASIACANQIVRIIFYMHKTGSIYNYPG

SEQ ID NO: 332656 - protein, 341 aa, unidentified
MLTVSLDVHAGASQMAVVDATGEVIREQRIATTPEALARAVDAVPGPKRVVFEQGPMARLIRDALTGRCEEIICADPAHNALIARAEDASDERDARRLATLAQVKSVRAVYVPGEPYRSLRALQVYGHQVERAMTAVKNRITALLRSQGVRYRGRQPYGERGRTALRRELTSPAIRWQLDSLYRRLESLAAEKKRCRREVSKISRGLPVLRRLRQIPGVGPVTALVLVAWIADPHRFRSPSALSSYAGLGIGQGSTNWKPVGRARASKRGNRELKRILFLAARAAGRSQSALGRRHRARLDAGWDISKVRRDIARTILKTAVSMWRNQTDYDEGRITVPCA

SEQ ID NO: 332657 - protein, 330 aa, unidentified
MNAVGIDVSKGKSMMMALQPMNQVVLKPREYPHTEVGLEQMAYDILRLGEDTRVIMEATGRYHEPVVAVLHEHGIRVTVMNPLFIKQSGGGSIRKVKTDKADARKIAKYGLDNWTDLREYTPMEAIREQLKLVSRQYDLYMKNVVALQNNLISLTDKVFPGVNEMFSSPDRADGSQKWVDFIMTFWHCECIALISEAAFTERYRKWCKRKGYHFSGSKAADLYIDSIGHITTLPKNSNTKLIITTAARELTSAKAALAVLRAEMDRLARQLPEYETVRAMYGVGERTAPQLMAEIGDVRRFPRRSSIVSFAGVDPAVDESGKHISKNLYS

SEQ ID NO: 332658 - protein, 322 aa, unidentified
MNNQSRSIPGPRREIGVDVSKDTLDVFDGSSHWQASNDKTGIRRLIARIRKLGPIARCRITCESTGRYGHLLVATALEAGLSVSIANPRAVRDFARCHGRLAKTDRIDAETIAAFASAINPAVLGGDWNHRRHFVDLFSRMRSLVTLAASQKASLHQTSDRRILAEIRSTISMLERKVAAYERELDEMVRSDTELRSRMEKMTAIKGVGKRTGLALLATMPELGSINRQEAAALAGLAPMNRDSGRMRGTRHIQAGRAPARTALYLAAVVASRFHPTLKTFYQRLREAGKTARQAFCAVARKLLIQINTSLKPTLQSVPASI

SEQ ID NO: 332659 - protein, 339 aa, unidentified
MTTFVALDVSLEKTAICIMTAGGTIAAEVIALSDPDAIAAELGRQEAVGADTLVGLEAGPLSEWIARGLADLGAPVVLMETRHVRAALSSMVVKTDRNDARGMAQLLRMGWFRPVHLKSMDAREQRALLSARETLARRLMDVENSVRGLLRGFGLKLGAVSRGRWAERVRDVVGGNAALAAIFEPLVAARAALLEQLGRLHARLLAVVRQDPACRLLMSAPGVGAVVALTFRAAVDDPSRFGSSRAVGPCFGLTPRRYQSGETDRSLGISKAGDPSVRRALFNAAHVIMHQVRRGFALKSWAAALAARAGLRRAKVALARRLGVILHRMWADGTEFRFA

SEQ ID NO: 332660 - protein, 397 aa, unidentified
MDVAVLGVDLAKNVFQLHGVSRSGKVVLRRRLSRERLLEHIAQLPPCLIGIEACAGAFYWQRQFAQHGHTVKIISPQYVKPFTCRSQKNDPTDAEAICTAVQQPRTRFVPPKSIEQQDVQTLHRARQRLVNHRTALVSQMRGILLDRGIVFAVGITRARTMIPRILHDSESALTSIARETIAELWDLFQDLDDRIARFDDEIDRVFRGSESCQRIAKIKGVGPKTATAIVAAIGNGSEFKNGRHLAAWLGLVPRQHSSGDRRLMLGITKRGDKHLRTLLVHGARAVVRTAPNKHDPISRFANALRARRGFNRATIAVANKNARIIWAVLHSGEAYRSAGDPTPCSCKQSVMAQQVRPARAEPDYYSGLRGRPSVEAHARGFPIRARDVRRRRIDVSN

SEQ ID NO: 332661 - protein, 343 aa, unidentified
MSIATIGIDIGKSKFHVCGLDERGHVTLRKMFSRTALIRFLANTPPARVATEACAGAHFIGRKAESFGHEARLLPAQYVKAYVKSQKNDYADAEAIAEAATRPTMRSVPVKPADRQALQLLHRQRSGWIAERTALANRIRAMLLEFGITIPKNLSQLRKQLPLVIEDAENELPDRLRQLLVELWEDMIRLDERLTSLNAELDIYARTDPQTKLLLSIPGVGPIVATALISGIGNAGAFRKGRDLAAWLGLVPRQYSTGGKTRLLGIGKRGNRHLRMLLIHGARAVLRVISNRQEDDGLRRWVERVTARKHPNVVAVALANKIARVVHAVLRHQVPFEARLISS

SEQ ID NO: 332662 - protein, 384 aa, unidentified
MSVNHTEASTAVRFDLAAIFVSLELSRSKWLLTSISPGAGEKMSKFTVEGGDVAALLARFGELQRKARERTGQSYPIISIQEAGLDGFWIHRILEREGIETYVVDPASIATSRRRRRAKTDKIDGEALVRALLAYKRGEPRVCAMVRVPTPEEEDRRRLTRERKALMIEKTRHVNRIKGLLYSQGVSGYEPMKKDRRTRLDALVTGDGRALPPAMKAQLNRELGRLETLIDQIKEVEHARDATLAAETVSSVPGMLLALKGIGPEFAAVLWSEGLSRQFDNRRQVAAYAGLAPTPWQSGQIDREQGVSKSGNARLRTTLIQVAWLWLRHQPDSALSGWFKARVLQNGGRQKKTAVVALARKLLVALWKYVNAGVVIEGAVLTAA

SEQ ID NO: 332663 - protein, 348 aa, unidentified
MVVGVDTHKAFHVAAVIDSVGGLLGSTTVPATAAGYAQLVAWARSFGRLERAGVEGTGSYGAGLARHIAERGIAVIEVNRPDKSTRRRRGKTDAIDAESATRAVLSGYAHGTAKSADGPVEMLRMFKLAKDSAMKSRTQAINQLRAVLVNTEPSLRESLSGLGTTRLVQRCARLLPGDGGDALAASKYTLRLLARRIQNLTAEIEDLQREIHRVVTAHRPQLLEGYGLGPDTAATLLITAGDNPDRLRSEASFASLCGVCPVEASSGNTSRRRLSRGGDRRANAAIYRIALSRLRWDQRTQSYLQRRIAEGKTKREALRCLKRYIARELYPLLLGQPNTGPERLPEAA

SEQ ID NO: 332664 - protein, 350 aa, unidentified
MLIIGADYHPGFQQIAYVDTESGELQERRLQHREEAEKFYRDLAAQEMKVRVGMEASGQARWFERLLGELQFELWIGDAAEIRTRRVRKQKTDRQDAQLILKLMLKDDFPRIWVPSWENRDLRQLLWHRHRIVQMRTRVMNQLQAVALNEGVRRKKALWRPAGRIQLESLGLAPWASRRRHDLLELLDRLNPSIAQLTKAVEQEAEKCSEAQRLMTHPGVGPLTALAFVLVIGTAERFRCGKQIASYLGLVPSEDSSGDRRRLGHIWKQGNSLLRFLLVEAAQVTVRSNQEWRSKFFHLAMRRGRKIAKVAMARRLAIRLYWMWRKGWNYEQLTQFGSHAGQPGNPHGVQ

SEQ ID NO: 332665 - protein, 361 aa, unidentified
MSTIAEDDVRVVAGVDTHKEFHVVVVLDELGRKLDMATFAATPCGYRELTGWVTDFGEVLAIGVEGTGSWGAGLCRHLRERGLNVIEVNQPDRHKRRRKGKSDRLDAEVAARAVLAGDATALPKSGDGPVEALRQIRVARAGAMKARTAAANQLHSVCDTAPDQIRSQLRGLSTRRKIAIASRYRPGDPLTPSGAAKRALVTIARRWAALDAEIAELDRAIKTILDAIAAPLLARHGVGYETAGALLCTAGDNPDRLATEASFASLCGTAPVPISTGNSNRRRLNRAGDRRGNSALWTIVMARLRSGHAPTVEYLQRRVAEGHSKRDAIRCLKRFVAREVYGDIQAITAAQTTKSPLEIAA

SEQ ID NO: 332666 - protein, 348 aa, unidentified
MVHFVGLDVSVKETSVCVVDDAGKVILEQRVPTEPADIIALLSSLGATFGRIGIEAGPLSQWLVNALTAADLPVICVETRHMKALLTAQQINKTDRNDARGIAQMMRVGLFKPVHVKTLVAQEQRMLLTSRKLLQRKLLDLESDLRGTLRNFGLKVGVVSGGRYEARVRELVEGFPRLAAIAEPLLNVRRVMRQQLAVLHKMLLDTVRGDPVCRRLMTAPGVGAVVALTYRATVDQPRRFVHSRAVGAHVGLTPKRYQSGETDYDGRVSKCGDALLRTMLYEAAHSLLIQSRKWSWLKAWGMRVAQRRGIRRAIVAVARRLAVVLHRMWVDGSEFRWKKDSAAVPTVA

SEQ ID NO: 332667 - protein, 349 aa, unidentified
MSQNLNSAVAVIGIDIGKNSFHVVGLDNRGAIVLRQRWSRGQIEARLANLPPCLIGMEACVGAHHLSRKLQALGHDARLMPAKYVRPYSKGQKNDFRDAEAIAEAVQRPTMKHVATKTVEQLDLQALHRVRERLVSQRTGIINQIRAFLLERGVAVRQGLRFLRAELPRILATPPDVLSPRIVRVISDLAEDWRWLDDRIDQLSSEIAVLARQDAGCERLMSVPGIGPIISSAMVAAIGTGDAFSKGRDFAAWLGLVPKQMSTGDRTILGKISKRGNRYLRVLFVQAAWVVLIKPMSWDRHGLKHWIEAAKKRLHRNVLAIALANKLARIAWGVLAGGRTFEASKLQIA

SEQ ID NO: 332668 - protein, 369 aa, unidentified
MLESDQLQPRELPIVTTSTRIKCHLYIRLHDLPTIAQEELFTVDAILERCAGLDVHQDNIVACFLSGPLDQRPSKEIESFGTTTKELLRLQDWLQDRECTHVAMESTGVYWKPVWNILENTCELTLANPTRIKNVPGKKTDYSDAEWIARLHRSGLIEKSFVPNEEIRDLRDLTRYRRKLLQNVTQEKNRVHKILQDANLKLTTYMSDVFGVSGRALLESIVNGEVLDAEQVRDMVKSTLKRKVPELIEALNGRLRLHHRKMIRRHLEHIAFLEREIQELEAEIEQLLAPYQREKELLETIPGIKQDAAASILAELGPDMSHFPSDAHLASWAGVCPANHESNGKKNEKRTNVEIKDLNPCSVNVAGQP

SEQ ID NO: 332669 - protein, 339 aa, unidentified
MSKQTNAIAISTIGVDTGKNTLHLVGLDRQGMIVLREKLARSRIGTRLANVPSCLIGIEAGMATHYVARELLALGHDVRQVPPAYAKPFRQGHKSDFRDAYAIAEAVQRPSTRCVPVKTDDQLDLQALHRVRSRLVGQRTAVINQIRSFLLERGIAVRQGLRFLRQRLPEILAKRVDVLSPRMIRIVEDLSGDWRRLDERIEHVTEEIEVLAHESESCRQLMTVPGIGPLIASAMVAAIANGAAFAKGRDFAAWLGLVPKQMSTGDRTILGRISKRGNRYLRTLFMQGARVILLRPASWAKHSFGPWLMAGVKRLHHNVLAAALANKLVPGIIGQRNVL

SEQ ID NO: 332670 - protein, 373 aa, unidentified
MSNCTRYLGLDVHAESISAAIAEGRGKVRSLGKFPNRPEPMRKLIEKLGGPQGLKVCYEAGPTGYALYWQLTKLGVDCEVIAPSLIPKKAGDKVKTDRRDAEKLAQSYQAGDLTPVWVPTPEHEALRDLVRQRGAAKADESRAKHRLVKHLLRRGLRSPDESRAWTHPWWQWVQALKFDHEAQQVAFADCIAEVLHMGQRLDRLDKAIDRLVLSAPPHMRAVIEALQALRGVAKLTAVTIVTEVGTFKRFRRPTEMMGYTGFVPSEYSSGARESKGRCTRAGNAHLRHVLGEAAWHSRHRPWLNLRMKKLLPSLPAGVAEIAWKAQERLHRKFTRMTYCRKPAGKVAAAVAREMVGFVWAIGTLVESQQPAKK

SEQ ID NO: 332671 - protein, 424 aa, unidentified
MEEIPQPIGKAEAEPEFAAFIAIDWADQKHYWSLQVVGQKGLQRGTLDNTPEAVEAWIAELRMRLGERPLAMALEQRRGALVVMLSKYAHVHLYPVHPTTLAKFREAWYPSRSKSDPSDADLLLEILTTHRSRLRRLDPDTVEIRLLQNLVENRRKLVDERTALSNRLTDLLKLYFPQILGWFFDVTSVVVGDLLEQWPSLQDLQQAKPAKLEKFLRDHHCSDMEERLLQIRQALPATHDRALLDSAPYQVAAWVRQMAVLRDSIRQLEKRIAELAAQQQDWRIFQSLPGAGAALAPRLMVALGTQRDRYSSASELQCFCGIAPVKEASGKTQWVHFRWAAPKFLRQSFHEWAACSIAQCEWAHAYYDQQKARGKTHHVAVRALAFKWMRILHRCWRDRQPYREEIYLASLSKRGSALALAQHG

SEQ ID NO: 332672 - protein, 375 aa, unidentified
MRFYTCEHSFYCGIDLHARTMHLCILDHAGQVVFDDNLPTNPRAFLEAITPYRQGIIVGAECMFSWYWLADLCHQQNIDFVLGHALYMRLIHGGKGKNDRIDAGKIARLLRTGGFPLAYAYPKGMRETRDLLRRRSYLVRQRGSLLTHIQIVNSQYNLLPIGKELRYEGKRTGIAERFPEGAVRKNIAVDLHLIRQLDALIDDLEEELVRTVQVEDRVTFELLRSIPGVGPILGLTLLYELHDWRRFATVGQFLSYARLVRCVHESAGKKLGTGNSKIGNAHLRWAFAEAACQMLRVSERARRWKERYQQGHGKGKGVSVLAARLGRAVYHMLRKGEEFDEARFWNENQRDAEPRSRPASKHDKAKRVRRKVKCA

SEQ ID NO: 332673 - protein, 348 aa, unidentified
MRNIASVGIDLAKSVFQLHGVDERGRAVLRKTLKRSEVTSFFARLAPCLIGMEACGSAHFWARKLSELGHTVKLMAPQFVKPYVKSNKNDARDAEAICEAVSRPNMRFVPIKNIEQQALLAVHRVRQGFVSARTAQSNQIRGLLSEFGIVMPKGITSLERRMPEILADVENGLPGTSRELFARLYAHFKELSRQVGELEQQIKAWHRESTASRRLEAIPGIGPLSASALVASIGDARAFKSGRQLAAWLGLVPRQNSTGGKERLLGISKRGDTYLRTLLIHGARSVLLRLKRNSDQAEGWAARLVGRRNANIAAVALANKNARIIWALLAHGREYQRGYVASPLRVAV

SEQ ID NO: 332674 - protein, 413 aa, unidentified
MSNSNVVPTPPEPASLRYVVGIDIGSQTCAMCCLTPEKRQVFKPSTFANTREGFDWLFEKLASLKSDPSSILVGLEATSRYGENLSQALLKAGYRLCLLHPAQVHAFAQQRGLRAKTDQLDAGTIARVLLSGEARFGYLPDEHTGTYRELLRLQQQLSEDVVRYKNELHALLVVLFPEFVQVFADPTRPTALAVLKRYPSAQAVVDAGVEQLSHLLHELAPHHYGRPTAQALFALAQTSIASGVAVMARSKSMSIVCDQLEHTLINLAQLEQEIDQLLTNDPQAKRLLAVAEFGPLTVAVLRAELGDVQRFAHMDQVVAYVGLDIQVKQSGKWKGQSKLSKRGSGRVRRLLYLAALRSLHEKHSPFKDYYQRLVDRGLKKGTALVAVMRKMIIVGVHLLKTQDLYDANKVGIQ

SEQ ID NO: 332675 - protein, 306 aa, unidentified
MHLTANISVPQKNFIAIDLHSDNAVICVRRNALNKAGELVGKNIWCGRVSIRDGLDSFVKALLPYCQDFDHVAVVESTYNRYCLADVFEERGWLLRIADPSTVSQANLKSSDDRTDAQYLAERLRVGSLKHYLPLSYSSRALWDLCRYRMAMVQDCASLKIKLINLYRNQLSKNLLVADLLDRCRNHMQSNYRFDPDILEEFKDPNIRLRVAFEVSRIAMLEEMIEECNAEIQKQCKDQELVKLCKTIPDCGPVLSAVICTEIGTMQRFKSAGDFVTYCRLCSTSKLSNGKSKGLGNAKNGNAYLS

SEQ ID NO: 332676 - protein, 338 aa, unidentified
MSIVFVGIDLAKNVFAVHGVNEAGKPALVKPSVARGKLLELVASLAPCTIGLEACSGAHHWARQFTAHGHTVRLMAPKFVAPYRLSGKQGKNDAADAAAICEAVQRPNMRFVPIKNLAQQGQLGIHRVRQGFIEQRTATINRIRGLLAEFGMVLPLKASTVRREAARCLEDLPGWANTAVGDLLSELHHLDERIGQYDKHIAQMAREDSRAQQLMRFKGIGETTASAMLAMIGNGHEFKCGRQFAAWLGLAPSQYSSGGKARLGRITKAGDPYMRSLLVLGARAVLNKAKDQTDSLSRWALALAERRGYWRAIVAIAAKNARMCWAMLARGERFAMPA

SEQ ID NO: 332677 - protein, 346 aa, unidentified
MKILALDLGKYKSVACVYETASLRHRFTTIVSTPQALHDLLVVEEPERVVIEICPLAGWVSDLVETLGIALEVASTTHDAWRWKNVKRKNDRQDGLKLAQLSALGQLTLVHMPAPRVRQWRALINYRQRLVSRRTRIRNHIRALLLGQAVVIGRGAGAWTRAGIAQLKALARPLAEVAPEELWRGELELELAALEALTEPLREVEQKLNELSAANKGVQLLRTIPGVGPRGAEAMVAVLDEVQRFKRGKEVGAYLGLVPKQIQSGESNRLGRITHQGNRLLRSLLIEISWSGLRYNSWMRAVYERVRRGSQARKKIAIVAVARRLLIRCWAMLRDGTRWHPALSSS

SEQ ID NO: 332678 - protein, 430 aa, unidentified
MKSNTQNAKIEAITEKTLVLGIDVGSETHYARAFDYRGVEYSKKPFKFSNTEAGFVTFKEWILDLKERHEKDKVVPGMEPTGHYWFNLGKFLHDNEMKPVLVNPHHVKKSKELDDNNPTKNDRKDPKVIAGLVREGRYMIPYLPDGVYADLRTASNIRFQLQAELTRIQNRISRWFNIYFPEYKTVYGKPDAKSGILILKTAPLPEDILTLGIDGVNQIWRDAKLRAVGKARAKTLIEAAGHSVGSKEGAVSARMEIRMLLEDYESRNIRLQEVMGLIEGLVNQIPMAEKLLEIKGVGIKTVSGFLAEVGDIRRFNDPKELQKLAGLALVENSSGKHKGKTTISRRGRKRLRYLLFEVAMSLVAKNPEFRELHNYYTTRRLNPLKKMQSLMAIAAKLLRVFYAILTKGVGYDPKKMVNDIRRPAAYAQAA

SEQ ID NO: 332679 - protein, 426 aa, unidentified
MLNSQINKIQAITSDTLIVGVDIAKNIQWAQFINFRGIKVSKHICFENNYSGFNSIMEKIEEIKSKNNFLSVIVGMEPTGHYWKTFVTFLHNNGIKVVQVNPYHTKKAKELDDNSQTKSDKKDVLVIVKLIKDGRYSAIYFPEGEYADLRNLSNTRLEVSRLLNICKNRIHACVDEYFPEFETVFKSFIKGKVALHILKRIPFPTDILGLALEDIISVIREAAKKSVGKKKAEELIRAAKVSTGVKVGLEGARIRLNNLLEEYELYHNQLEKIEKEMAQELEKTGYKDILTSIPGIGIISAASFIGEIGDPKRFSNPQQIIRLAGYNLVEDSSGKHKSKTMISKRGRKILRTILYKISLIVVCKNQEIKLLYKYLITRKENPLKKKQALIVISGKMVKIMYSLIKKEEVYDKEKVLGIYRKQQIVA

SEQ ID NO: 332680 - protein, 399 aa, unidentified
MSLDLRFAEPTAIRTQFGAIFISLELSRSTWLITSLTPGGGEKMSKHCVAAGDVAGLLARFAALNGKALARTGKRYPLIVIQEAGLDGFWIHRVLESEGIESHVVDAASIATSRRRRRPKTDKIDGEALLRALLAYKRGEPRVCAMVHAPSPEEEDQRRLSRERKTLVAERIQHVNRIKGLLFSQGVAGYQPLRRDRRRRLDALSTGDGRALPPHLKRQISRELDRLELLIEQIKTVEAERDALLARATDEDQTAAAQARTNAMRPPEKLMALRGIGADFAAVLWSEGLYRTFSNRRQVAAYAGLAPTPWRSGSIAHEQGVSESGNPRLRTMMIQLAWLWPRHQPQSALARWFREHNARKGGRERKAAIVALARKLLVALWKYVSAGVVIEGAVLKGAA

SEQ ID NO: 332681 - protein, 423 aa, unidentified
MKYALVRVLPEVPPGGVCAGIDWASADHAVCVAVLAGRVRDRFTAVHDRAGIAGLIARLRGSGAAEVAIERGDGVLADALLAAGLTVVVIGSRQVKNLRSRYGSSGAKDDRFDAFVLADTLRTDRARLRPLIPDSPATLALRAAVRARRDLVAHRVSACNQLRAHLAVAFPGATGLFSELDSPLSLAFLAAFPGQQAAARLDEQALAAWLATVPRRGNTAPAGVLAARLAAAPRGAAGADAAQAAVTAQLAAATAGLAGRVRALEAEIAAQLAAHPDQHIFTSLPRAGTLRAARLLAETGDCRARYPDPWSLAGLAGVAPVTRRSGTYISHEFRWNVNRQLRDAICDFADGSRHASPWAATVYAAARDRGKDHPHAVRITARAWVLIIWRCWQDGTSYDPAKHRALQDVLTRQAAAGTPQPHR

SEQ ID NO: 332682 - protein, 423 aa, unidentified
MSNQIVELAAFVGLDWADQSHVVTLQEAGSDRRERSTLDQTPEALQTWTQQLRARFGGRPVAIAVEQVRGALIYALMHVDFLHIYPVNPQTLAKMRQAFYPSGAKDDPKDADLLLEVLMTHRQHLRVWVPDDVLTRSIQLLTEGRRHLVDERTALTNQLTAALKTYFPQALAWLGDLHTARACAFLHRWPSLQDLKRATPSSIRKFYRRYGYRGQDKLDQLLANIKQAQPLTQDGAVLLAATMMVQALVAQIPSLTESIERYDQQIASLFAQHDDSTLFGSFPGAGPVLSPRLLAAFGSDRNRFEFAAEMQQLSGIAPVTEKSGKSCWIHWRLACSKFLRQTFHEFAARSILESDWARAYYDLQRHRGKSHHAALRALAFKWIRIIFRCWKTRTPYDETIYCKSLQLRGSSLAAALTTKQVLT

SEQ ID NO: 332683 - protein, 411 aa, unidentified
MVKENFIYVGIDLHKETHTAVMIDCYNQKLGEITFPNRPADFPKLVTKVKKCNTDAKEVVYGLENAYGYGRPLAVWLIDKGYFVKDVNTAISHRQAKHRGAMYRKSDSDDAEAIALATLNMLDKLPDACPNDAYWSLGQLVHRRDNIMKQRTRLVNQLHEQLCIAYPSYKSFFNDISRPTALYFWEHYPSRKYLRGKSVEDLRKELVPVSHNRCSTKNCEKILDAAASDKVKNNAYQDARDMVTLSIVSDLQHYDSQLAEVDKMLEQMYKMLGCTLTTIPGVNVITAVKILAEIGDIKRFSNANKLAQFAGIAPLHLSSSGKGKDVATKQGNRRLQATIYFLAIQMVQVSSKGTPRNPVVRAYYEKRKAEGKTSQQALICISRRLISVIYGMLKNGTEYRMPVVESAGENR

SEQ ID NO: 332684 - protein, 327 aa, unidentified
MSQITGKKNVEFIGIDVAKQKLDICFSDNKKMSCQNDDTGFNLLIKALPHPDDCIVVLEPTGGYEKKAIERLQKFHYKVILANALKVRRYAQAMGYLAKNDPIDSYVIKSFGEDLYPKGKLVLLLDKTDEFRRLEQWLNRSRQLVKLITIEKQRLEKTSDKVIEKSIQRIIICLEKELKKVEQKVQESSDKCQLSEQAQKYKEVKGIGPVCSNALVTYLPELGQYDHKKIAALVGVAPYCNESGKFKGKSSVKGGRETLRSLLYMGTLSAIKHNAVIKTFYDRLIQKGKHHNVAMIACIRKLLCILNAMAKNNTQWQEDYAITKSLK

SEQ ID NO: 332685 - protein, 314 aa, unidentified
MNKCHLNTELSSLEGTRSEFNWSKASIKLGIDVHQDFYVVVKQEEGSNPKPAQRFRKEAFVHWAAKLKRQGGEIHAVYEACGFGFGLQRQLSALGIQCHVVCPQKLDERNKRVKTDGLDAKALCLKLDRFVLGNREALALVRVPSEEEEQLRAIHRKREQLVKARKVLEAQGRSLMVNHGIEPVQQWWKRRAFAQLSVPEWMKELLSQSQPILLLLEEKIRALTAQLQGAAEPKQPRGFGGLTSVVIDREVGNWYRFSNRRRVSSYTGLCPGEYSSGNTRVQSCVTKHGNPRLRAALVEAAWRLVRFQPDYRAV

SEQ ID NO: 332686 - protein, 345 aa, unidentified
MESIGLDVHRHYTVYARVDETGRVLARDKVAHEALPTIIRQAHAPCRATLEATGNWGYIADLLQPVVEELVLAHPLQVRAIAAAKVKTDKIDATILAQLLRGDLIPRAYLAPPEVRELRDLLRLRASLVRLRTAVKNKVHAILAKRGLRVPVTDLFGRAGRRWLAEQVLSPVHQSAIQSYLAVIEPLDAEIDRVSREIDRQAEERQETPWLTSIPGVGRYTALFLLSEIGDIRRFPDGDHLAAYAGLVPIVRASGGRARLGPITKQGSPWLRWLLVETVHRAVRRPGCLKERYERLLRRKGTAVATVAVARFLATCVYALLSEGRPFAERPSGSRRDMVERGRQL

SEQ ID NO: 332687 - protein, 357 aa, unidentified
MPSSNVKYIGLDVHKEAITVAVRNGAGKLAMESILETKASTLLDFLHGLRGELHITLEEGTWAAWLYDVLQPHVQEIVVCNPRRNALLKEGSKDDRVDARKLSELLRAGLLRAVYHGENGLRTLRELARSYQVVSKDLKRVMNRLKALYRSWGIPCTGTQVYGRRHRQQWLQKINQAGVRRRAELFYQQLDGLQVLRLTVRGELLAESRKHQAVKVLRQIPFIGPLRAAQLVALVQTPHRFRSKRQLWTYSGLAVETHDSAQYRYVDGQLQRSKKPQQVRGLNQNHNHTMKEIFKSAALSASRRAGPFQNFYEGLLAKGMKPELARVTLARKIAAITLALWKRGGRFDAGYVKSQAA

SEQ ID NO: 332688 - protein, 419 aa, unidentified
MRIIKTKNHKIVNGETLLVAVDLAKNKHMGYYRCPDGNDIKPFEFSNNREGYQKFYDCIGQAKAVYHLEQVVVGFESTGVYGEPLIHFLNNKGIRLVQVNPLHTKRMKELEGNSPGKTDRKDPKVIADIMELGHFLTVVIPEGVSAELRRLTQARERSVERRTAFYNQLQDLVFIVFPEFLEVMKDIKTRSAQYLLRHYPTPQAMLQCGVDELSSVLRRVSCGKLGRQRAEALYKVAGRSVGIKEGQRSILLEIEEILLEIEGCECFIAKLEREMRRLLEQIPYSRSILSVKGIKAVTAAGLIGEVGDFRKFRTVSELLKLAGLDLFEISSGNYKGNRHITKRGRSLLRKLLFFASLNMIRKGGVMREPYQRYIGRGMPTQKALVAISRKLLRILFALVRDHREYVVNYSERENFKLAA

SEQ ID NO: 332689 - protein, 412 aa, unidentified
MQVIIERCAGLDVHQETVVACVLIGVPGERPVKPVQTFRTMTRDLEALCGWLQGLGVTHVGMESTGVYWRPVYAVLEGHFDLIVGNARHIRNVPGRKTDVKDAEWIADLVRHGLIAKSFVPPAPQRELRELLRYRRKLVESQAAERNRLLKLLETANIKLASVASDVFGVSGRAMLKALIEGSASAEEMADLAKGQLRRKRADLALALEGRREEHHRFLLATQRRRLEAAEQDIAALDGRIEVKLVPYCVQHALLMQIPGVDWVVAAVLIAEIGVDMSVFLSAYHLAAWAGVCPGNHESAGKQKSGRARKGNLHLRTMLVGAAISAARTKGSYLKDKFHRLKAGRGAMRAALAIAHKILVAAYHMLAKGLPYRELGEAYLDQISQTRTVANLKRRIECLGYNVTLQPTADAA

SEQ ID NO: 332690 - protein, 411 aa, unidentified
MDVVNARCAGLDVHKATVVAGVRVPGPPPGARRGETTTFAPTTRGRRDLTNWLRTQGVTVVAMESTGVYWRPVYEALEGLVQLVVVNARHVQMVPGRKTDVKDCEWLAQLLECGLLRGSFVPPRAVRDLRDLTRLRKALIRERGHHVNRIAKTLELAHLKLSCVVTDLMGKTGRAILQALSAGVDDPERLAACAQGLLRKKQAALREALGGRLTPHYAFLLQQHLSLIDSLDAHIATLDTRIEAAMAPLAEAAALVQTMPGVAARAAQAILAETGVDMDLFPTPAHFASWARLCPGNHESAGKRQSTTTGKGATWLRATLQETAWAAVRSKKSYYRALYHRLKGRRGAKKAIVAVQHAMIVALWHMLKHGVTHQDLGADYFERRNIARIRRHHVRRLEQLGYDVTLRGKAA

SEQ ID NO: 332691 - protein, 357 aa, unidentified
MVEGSWVGLDVHARKVVAGVLDSVSGELATLRVPVAREETVAWLRTLRGPVRVAYEAGPTGYGLARACAAAGIACTVAAPSKIARPSGDRVKTDRRDAERLARLLRLGELTAVRVPEPHEEDARDLVRAREDVRGDLMRARHRLSKLLLRHGVVYDAAAWTLAHDAWLRRQRFASRPLALAFDECYGAVLQAKTRRDALDAAIAELAVEPPFAAIVGRLCCLRGVSTLTAFGLTVELGDWTRFRPQSLGPFLGLTPSEDSSGERRRLGGITKTGNTHARRLLVEAAWHQRRPLRASATLERRRQGQPAAARARADDSARRLHARWQALESRGKKRTIVAVAVARELAAHCWALATME

SEQ ID NO: 332692 - protein, 425 aa, unidentified
MPYRIAGIDVHKKMLAVVVADVEVDGDFYFERQKVGTTPADLRGLADWLVEHEVEEVVMESTAQYWRPVWEALEQHWRPRRRARDGAPRLAGTLHLAQAQSNRGPGGRKRDFPDAERLVKRLVAQELTLSFVPDAEQRLWRTVMRRKYQITRNRVQLHNRLEALLEEAHIKVSSVVSDLLGTSARRMLQALADGATDPAALAALAAPRLRATPEQLCDAFQVCPTLHPVYRRLLKLTLEELRVIEDHLGQLDQQMADLLAAHHDAVQRLAEVPGLGVDSAQQIIAEVGATAATFPSPKHLASWMGACPGNEESAGVNYSHRCPKGNRQMRRVLNQAANAAVKAKGTIFNVVYRRLVPRLGHAQAIGAITHRLCRLIWKMLHQRIRYEERGPAVSTEAKKVRARKMIRELRSLGYRVELATHGATA

SEQ ID NO: 332693 - protein, 335 aa, unidentified
MEHVAIDLGGRESQVCVRGSDGRVVDETRIPTRSLVQWLNDRAPSKVVMETCAESFEIADHAIARGHDVRIVPSTLVKSLGVGARRTKNDRRDAQVLSEASCRIELPSVHIPSPTARKRKVLCTTRDALIASRTQLVNCVRGWLRQSAQSLSKGYPVTFPRRVREKIAAVPACIERLLASIETLSAQISAADKELEQEVDGDSLCKRLMTVPGVGTITALRFAATIDRVDRFEDAHSLQSYLGLVPGEHSSGEKTRRLGITKAGATATRVVLIQAAWSVRRYRKDHPMARWAAEIEKRRGKHVAAVALARKLAGILYAIWRDGTTYNPFRGARAA

SEQ ID NO: 332694 - protein, 315 aa, unidentified
MDQHTPTFAGIDVSKATLDAYLHPEGSHRQFKNHKTGWRALRGWLNAAHPDGVVYEATGTYHKGIERYLGRHGFPIARLDPRRARKFAQALGISAKTDPIDACGLAQFGAFLKPPTLSLPEPALEQLKELVAARRGLMQQRTRIINKSKTASVPLLKRQLRLSKQQIARQIVQIDTACHEIVNSEPTLAQRLIILKSIPAIGDVTAMTLLAEMPELGELNDKQAASLLGGAPLARDSGAWQGKRFIRGGRATVRRAVYMAALSAMRFNADMKRKYDALVTEEKPPKLALTAIMRKLIILANALIRDNRQWSEVRP

SEQ ID NO: 332695 - protein, 365 aa, unidentified
MKKVSRGAGRMEKPQITIGLDLGDRFSHYCMLNEDGDAIESGRMQSTEEALRRHFEGEPTMRFALECGTHSPWISRLLEQLGHQVIVANTRKIRAITGSESKNDKNDAEKLARFAFCDPRLLSPIRHRSPERQQDLNLIQARSTLVRARTMIVNALRGLVKSAGGRLPACSPQGFEARAAAAIPPSLATAAQPLLHQIAALNTSIQQMDRGIEQLGNRYPEIPILRTAPGIGPLIAAAYVLTLDRPDAIQHSRQAGAFLGLRPRQSQSGDSDPQHRISKTGNVYLRSLLVQAAHYVLGRFGPDSELRRWGLKLAASGGQRGKKRAIVAVARKLAVILHRMWQTGNPWQAFLQSANNAAGKDLCMA

SEQ ID NO: 332696 - protein, 383 aa, unidentified
MTSSPISTRPDLPICVGIDVAKDRIEVAFGGANQTTAWANNHPGHNALLKHMEPLSIDLVVMEATGGLEAALACSLKAEGYAVAVVNPRQARDFARSMGQLAKTDHIDALVLAQLAHVLAQRSDRHKFVKPALSEERQHLAALVVRRRQLVGMLVAERNRLGQAPTQTKKSVSRIIKALTQELNRVEGDMQDHIAEHHAALAALLDSAKGVGPTTISTLIAEVPELGKLNRHEIGKLIGVAPLNRDSGKMRGKRTIFGGRGRVRAALYMATLVATRYNPVIKAFYARLLSVGKPKKLALTACMHKLLIILNAMVKANKPWDPTLHSIWVWIFLATKDRRQINVWGHDGLGEGASRVVCNRLRSDYVPPQETPSYGSIHKRDVF

SEQ ID NO: 332697 - protein, 334 aa, unidentified
MRNLYTFYVGVDVAKSFYVVAILSIEGNEEKLRSFRVEANPRAFEKRLISIIGSCKRTDLLIIMESTGPYHVGLAEYLSRQGYKVVVANPFAVKRFIEANMSKAKTDKIDAEFLAKFGMHVSDHRLYELRSEEEKKVERYIKLIEDLKEKLVSLESQREAARIILGKEDEDILGSYDRIIKELKKEIEAKERELKEYLKRSFAREYRLLLSIPGIREKAIGVILGVMRGFRGFKSVKEVVSYAGICPRVVESGSSVRQRGRMNRRGNRLVRRVFFMCALSAVRANRYCRELYERLLSRGKSKKAALVAVAAKLLRQAFGVLKSGRPFNAELATP

SEQ ID NO: 332698 - protein, 354 aa, unidentified
MHYANRVDFTGQPIYIGMDVHKKSWTVSIFMEHLEHKTFTQPPEVETLVSYLHRHFPGAHCTAVYEAGFCGFWIHDQLQAHGIACRVANPADIPTRDKERRRKGDRSDSRKLARGLRSGEIEGIYVPARAAVEDRSLIRTRQAMVRKQTRCKNQIKSLLHFYGIPVPEDSRSWSRNFIRSLEALRLERPSGTLALNAHLEELLQLRQIVAQLNRDVLALSRTDEYRARVELLRSVPGISTLSAMVFLTELGDLSRFASLDKLCGYVGLTPDTHASGEKAGMGDITRRCNPALRSLLIECSWTAVRKDPALALAYHGFCKRTRKTKAIVKIARKLLNRIRFVLNNRCRYVSSLAA

SEQ ID NO: 332699 - protein, 410 aa, unidentified
MEVLYSHCAGLDVHKDSVVACVRHMAEGKVTAPVKTFKTTTAELMLLSNWLSAEGVTHIVMEATGIYCKPVWHILSDGEFHLILANAAHVKNVPGRKTDVNDATWLADLMAHGLIRASFVPDEPTQQMRDLLRTRKQMVRERSSHVQRIQKTLEDANIKLDSVVTDILGLSGRRIIEALIAGQTMPQALATLAHRRIHASTDELEAALRGRLTKHHRFLLKLHLDQIDAFDAAIAAIDQEVNVNVEPFRGAIELLSSIPGIGNLAATVIVSEIGIDMSRFPADGHLISWAGLCPRNDESAGKRRSTKMKKGAPWLKTTLVQCAWAASRTKGSYLQAQYHRLRSRRGSKKAICAVAASMLTAAYHMLKNRTFYEDLGADHFDRREKGRQILRLVNRLQSLGYAVQITPRAA

SEQ ID NO: 332700 - protein, 372 aa, unidentified
MKSIAFVGLDVHKKTIAVAVASNATPRNGAEYRGEILNEPGAVRKLCNRLKREADELHFCYEAGPCGYELYRQLLTLGHACDVVAPSLIPVRTGDRVKTDRRDAVLLARLHRAGELTSVWVPDSAHEAMRDLVRARNTAKQSLTRARQHLKSFLLRHGRSRADTGGWTLTYRRWLADQKFDHPAQQIVFQDYIDAVSNAEVRVKRFDDQIATFVPDWSLAPVVAALQAMRGIGFLCAVTLASEIGDFTRFTNPRQLMAYLGLVPSESSSGSRTRRAGITKAGNSRARRILVEGAWTYRMNSRIGRHKVKLLDTLPKTVCDIAWKAQIRLCAKYRKLLARGTNTKIVNVAIAREMIGFAWAIACHMQAQPASA

SEQ ID NO: 332701 - protein, 346 aa, unidentified
MSYSTTVGVDLAKNVIQISVVSPRGKELLNRSFTRRKFAEFLGKQKPSLVAFESCASAHYWARAAKRHGHEARIIPAKSVAPFRQGHKTDSNDALAVAEAARRPNIKDAPMKTAEQQGLQAIQRSRELLIGECTALSNHLRGILLEFGVAIPQGFASLLKALPEILEDGENELPHLYRPTLHRMHQRLLELRQDIESMTREVDGLVKQHPVCKRLTAIEGIGPIGALSLYAVMGSGKAFTRSREFSAYLGLTPRQYSSGGKTNIVGISKKVGNRRLRSILIQGARAYVYRMKEPRSLKDRWLKDLIERAGPNRAAVALANKNVRTAWAMVTQGTDYQRRLQLEMAA

SEQ ID NO: 332702 - protein, 348 aa, unidentified
MSIVEVTRPIVGGVDTHLDVHVAAAVDPVGGVLGVGSFPTTPAGYHELSSWLSSFGPVERVGVEGTGSYGAGLARHLSASGIVVVEVDRPNRQARRRNGKSDELDAIEAARAALSGRASGAAKSATGNVEALRMLLVAKRSARSIRIKTIGQLRHLVITAPDDLRDRLGGLTTKALIRQAAALRPRPGSDPIGAHAIKTAIVTLARRVQAINTEIAALDAHIDTLVRATAPALLEVYGVGSDTAAIFLTAAGDNPGRIRSEAAWAKICGVAPVPAGSGKTNSRHRLNQGGNRQANHALWRVVLTRLGQGEPRTVAYMQRRLAEGRTKPEIIRALKRYVAREIFQHIPT

SEQ ID NO: 332703 - protein, 398 aa, unidentified
MTESSDYESVQVFIGVDVGKDTHHAVAINRSGKRLFDKALPNDENKLRSLISDLKQHGQILLVVDQPATIGALPVAVARSEGVLVGYLPGLAMRRIADLHAGEAKTDARDAAIIAEAARTLPHALRTLKLADEQIAGLSMLCGFDDDLAAQTTQASNRIRGLLTQIHPALERVLGPRLDHPAVLDLLQRYPSPEKLASLGEKKLAARLCKLAPRLGKRLAADIAQALAEQTVVVPGTNAAAVVLPRLALQLITLRKQRDEVALAVEQRVLAHPLYPVLTSMPGVGVRTAARLLTEVACRAFASVAHLAAYAGLAPVTRRSGSSIRGEHPSRRGNKALKRALFLSAFAALRDPLSRAYYTRKMSQGKRHNQALIALARRRCDVLFAMMRDGTFYTPQAS

SEQ ID NO: 332704 - protein, 354 aa, unidentified
MPKTSKPSIAVIGIDIGKNSFHVVGLDKRGAIALRQKWSRGQVETRFANMPPCLIGMEACCGAHHLSRKLKALGHDARLMPAKYVRPYSRGQKNDFRDAEAIAEAVQRPTMKFVATKTTEQLDLQALHRVRERLVSQRTGVINQIRAFLLERGIAVRQGFRFLRIALPDVLAAPSDVLSPRMVHLIEDLAIDWRRLDERVDAVTAEIEALALQDAGCERLMSVPGIGPIISSATVAAIGTGDVFSKGRDFGAWLGLVPKQISTGDRTILGKISKRGNRYLRVLFVQAAWVVLIKPKSWERYGLGPWIETARKRLHHNVLAIALANKLARIAWAVLAKGRGYESRRIDDAVAQPA

SEQ ID NO: 332705 - protein, 393 aa, unidentified
MFYIGIDIAKHNHEASIIDSDGSLLCESISFSNSQKGCEKLIALLERFSVDPDNCIVGMEATGHYWLSIYSYLFELGFDLKVINPIQSDAFRKIYIRQTKNDSKDSFVIAQIMRFGQFSSSSLSDENIMALRQLSRYRFCLVDDCSDLKRKVICLLDQVFPEYSSLFSDIFGVTSKELLLKYPTPEDMLSVSATKLSNFISKCSRGRYGRSKAEEIQSAAKSSFGIKFASNAFSFQIKQMIEQIKFIENHLKELEKEITELLVQTNQVITTIPGIGNVLGGVIIGEIGDISRFESAPKLVAYAGLDVRVSQSGQFTGTQMKISKRGSSYLRRAIWMAATVAAFSDPVLSEYYQSLRARGKHHLTAIGAVSRKLCNIIFAVLRDDKPYEPMPKR

SEQ ID NO: 332706 - protein, 327 aa, unidentified
MASYLGIDVSKDQLDAVLLREDGQRESGRFDNTRKGFNQLRHFLKKRGKGIVHVGLEATGHYGDEVALFLHEAGYLVSVINPAQIKSYADSQLRRTKTDASDAAVIADFCRTQQPTPWQPPAPEVRELQALMRHRGALLQMRQQENNRLASGQHSATVRHSIQEHVAFITQQLDDLDRRIRQHLDQYPDLRRQRDLLTSIPGIGDVTAAQLLAELPSWAASASPRQIAAYAGLAPRQHISGSSVRRPSRLSKRGSTRLRRALYMPAISAKRYLPALHAFAQRLLDAGKPTMAVIAAVMRKLLLLAHAILKSGRPFDPNYALHFTPTT

SEQ ID NO: 332707 - protein, 386 aa, unidentified
MQKLNDLSRSLAVLEPDVTLIAVIEMSLSSWLVAGIVPGVERQPLKKLAVDESALLKLLHRWREEAEKAGRRINRIVVAFEAGRDGFWLARWLKACGIEAYVIHASSIAVSREHRRAKTDRLDTELLKRAVLGWLRGERDHCKMVAIPTIKDEDAKRPNRERDSLVGERSRIVNRMKAALVRLGIRGFNPKLKRAAERLDGLRTPEGEPIPPNTMAELRRDMERRRLVNNQIQQIEEARLERLEQTPSDGPHAMVRLLARVIGVGIETADMLVHEVLTRNMRDRRAVARYGGLTGSPDESGRRRREKGLARSGNARVRRGMIQLAWRFLLHQKNSALAQWYRARTENARGTRKPMIVALARKLLIALWRLVRQGVVPDGVVLRLAQ

SEQ ID NO: 332708 - protein, 319 aa, unidentified
MKTLSHPSIIGIDVSRDWLDIHCLPDGQSLRLPNTAEGHQQLIALAQERGALVGFEATGGQEWPLWTALEEAGVAARQLPPAQVKAFAASCGTRAKTDRIDAALIARFMAFRPEAGRRLPDGKVRLLRMLVVKRRQLVEMRKRLIVQMKAWDKQGAGAMLADMNAELHDLLTVQIARLELQIEQVIAESEVLARRAALLRSIPGIGPVASAALLAEMPELGQISATQAAALAGLAPFAHDSGALRGRRAISGGRQQLRHVLFQAALVASCHNPTLKRFAERLRQAGKPHKVVITAVARKLLSIANAICKSQQMWRPQAT

SEQ ID NO: 332709 - protein, 370 aa, unidentified
MKPSTTFVGLDVHKSTISVAVADEGRGGEVRNHGVIENRADLLIRLAERLSRRGQHLHFCYEAGPCGYGLHRLLSGLGHDCTVVAPSLIPKKPGERVKTNRRDAMMLARLHRAGELTAVWVPDAAHEAMRDLVRARATAARCLTKARQHLTGFLLRHGKIYTGPRAWTVAYRRWLTTVRFAHPAQQIVLQDHVHAVADAETRIAKLVAQIEQVLEQWSMAPVVAAIQAMRGVAFINAVTIVAEIGDFVRFTNPRQLMAYVGLVPSEHSSGDSVRRGGITKAGNSQARRALIEGAWTYRMQARVSRKLHDRIESLPKGIRDTAWKAQVRLCARYRRLVAAGKKTVVVTTAIAREMIGFIWAIACQVEPQSA

SEQ ID NO: 332710 - protein, 362 aa, unidentified
MKEYIGVDLGKRKAVVVKKDRQGKTTSKVTVPVTQAALESYFSKQDRRSQVVVEATGNWMYLYESIEQYTPDVVLAHPLKTRAIAEARIKTDTIDATTLAELLRLDGIPKAYIPPREVRDIRELLRYRASLVSIRVGIKNKIHAVLTKNGIDCTFSDILGKSSRQWLKSLAVRACYRLEIDGYLRIAEALAISIGEITKTIKAEVAENPQAQLLMGIPGISYYSALLILSEIGEVDRFPDAKRLCSYAGLVPSIYSSGSKSYSGRITKQGSRWLRWILVEISIHAANGDSNFQKVYRRVSRRRGRSTAKVAVARKILTVIYAMLKRSESFKRHRPRQRLMAVPGRKKVTDVSGHPPGVMVPA

SEQ ID NO: 332711 - protein, 412 aa, unidentified
MKRIYQRCCGIDVHKATLTACVRVHGAGRKLSQEIRSFGTTGDELLSLHDWLMTHRVSHVAMEATGVYWKPVFYVLEQGFTLLLVNPADVQRMPGRKTDVSDAAWLAQLLENGLLRPSFIPPRAIRELRDLVRYRSELKHDHTRVANRLHKVLQDADLKLSSVMSDILGVSGRQILRQLAAGHSDPAALAELARGSLRAKRPALRQALTGRFSEHHAFLIGQALTELDNLEESMSALAARVEQHLVPFAQQIEQLTTIPGIKRVAAAVILSEIGTDMSCFPDTAHLASWAGMAPGNHESAGKRRRAKARHGNRWLRTILVECGHAARRTRDTALAAIYRRMIIRAGRKHAAFVTGRHILNIAYHLLTQHDTYRELGPSYFEQRRAEQLKRRCLDQLRNLGFQATLAPLPTAA

SEQ ID NO: 332712 - protein, 368 aa, unidentified
MGRKSSKLFVGMDVHKESIDITLAEEGGEVRHYGGIGGEQSALLRTVRKLESLGKSLVFVYEAGPCGFWIYRLLQERGHPCWVVAPSNTPRRVRDRIKTDRRDSLKLAGLARAGELTPIYVPDAADEAMRDLVRAREDAVTTQRQARHRLAALLLRNDIRYGGKTAWTEAHRRWIARLHLPGAAQRIAFEEYVLTVDEATASVQRLTRSLEQELGHWRWQPVVHALQACRGIQLIHAVRIVAEVGDLSRFTHPRQLMAYLGLIPSEDSSGERRRQGPITKAGNRSARRALVEAAWAYRHHAAVSPLIVRRQTGLAKPVLDIAWKAQLRLCARFHRLSARGINRNKIVVAVARELAGFVWAIGQRVKLN

SEQ ID NO: 332713 - protein, 353 aa, unidentified
MKHAELKEESNEYWVGLDVSKQTFDAAIAGPQQRFPSTPLRALPWKAFPRTREGVAAFLIWLDERVPRRKARVVMEATGKYSIELTAWLLAKRPTLRPAIENPRSTKSFIDSLNQRNKTDGLDARGLAFYGVERRPAPYEPLSKERQELRELSRYRDALVTQCTALKNRSREKSSSKIVVRMQKRQLRQLKDDIAEILLEMKCVVNDDQSFKRDFDLLTSIDGVGPITALTILAEIGDLRRFGRARQLTAYAGVSPRVVQSGTSVRGKTRMCKRGNKRVRQALYLSAMATLNTKKPNTLSAMHHRLCNDGKQGKEALGAVMRKQLTVMRAILISEIPYDPTFKGRGKLNRKTA

SEQ ID NO: 332714 - protein, 400 aa, unidentified
MLSIGIDVSKGKSTVCGMKPGGEIVYTPFEVQHTREGMSELVSLLRSSGEEVRAVLESTGSYHCPVVTALLENGIFVSVVNSLRMKRFCSQSIRKVKTDRIDAMQIALYGLAYWQELQPARLPEDTYRELQLLARQYYQMTSILIKAKVDFNAICDQVLPGMQELMSDHAGRHKLSDFVLRYRHTTHILEMGETRFRKDYCKWAEKKGYRNCERMAALIFATAQNGIPVLPNAPSTQIVITEAIRVLHTVEASRDAILTQMQALAKTLPEYSLVREMPCIGDTLAPRLIAEIGDVRRFHSKRALIAYAGIDAPPYQSGKFCANNRHISKRGNRYLRKTGYEVMQSYVMHKPANDPIFTFIEKKRGEGKSGKLAMVAGLNKFLRVYYGKVTELYRSLPAIE

SEQ ID NO: 332715 - protein, 362 aa, unidentified
MGSLHRSRRDWKPAAASAFRPRMSLVLQSLLPFPDSCQGMSPYQQGRGTKMTEYCYGGIDVSKDRLDVMVLPERKSFSVDNNAAGYSELVKRLRGLSIAAIGIEPSGGYERAVIRALLAADLSVRRINPNKLRQFGRARGVLAKNDRLDARLIAEYVAIMPTRVVQRDSATEQLAEVVTMRRQLCDEHVAVENQTAQLEDAMLRRLNKRRLARLAADILLLDRRMAQIVVSNANLTRRYELLTSMQGVGPTLAFTLVALLPELGQMSRKQIAALVGLAPYDFDSGRLKGHRCIYGGRLPVRNVLYMAALSACRYNPALKVFHHRLAATNKKPKVIIVAIMRKMITTLNAMLRDNVVWQPKSA

SEQ ID NO: 332716 - protein, 317 aa, unidentified
MSIFLHVGVDVAKDAVVVACAEEHFPVHSVSNRRAPLLAWLKSLPVGSRIGLESTGDYHELLADLAQTHGHCVFLLNPLETRHYAKAMGNRAKTDRVDAALIARLIAQEHTHLRAYTPPTANQRKLDRLIRRRATIVRLKGTLKLTMRNLGGFAAELKAVMSKLEALMAKIDGAMAAIAACSPQHQAAQHRVETIVGVGPLVGIALTNTLERVSFRNADAFVAFTGFDPRANDSGHKVGRRRLSKRGPAELRRLLYNAAMSAIKTKAWKPIYEHYRTQGWSTTATLVIIARKIARAAWSIHHYHSTFNPERITKCLT

SEQ ID NO: 332717 - protein, 365 aa, unidentified
MPWAPGCSLGRAGGRVGYGGGGGRVSLVMGMDQHRGQISTEWIDTITGEIARARVTPADRAGVRKFLARFEGSDLEVALEATTGWRFLVEELQRVGAEAHLAEPAETSGLKGRKNRAKTDWADARHLRELLLIGRLPESWIAPAHLLDLRARVRCRHTLVHQRTEWQQRMQAVLYHHGCLHTRGLLTLANRERITGLKLPAAASEQLAIALQMIDAIDLQLGPFDLSLRQYARNQTGCRTLIKELYGVGELTSVTILAELGDTRRFQNSRDAVRYSGLDITVHQSDARRTPGHLSRQGPPALRWALYEAAQAARRPSSPDRDYYLQTAERIGSNRACIAVARKLLKRSYHLLRELGDQSMEPVTV

SEQ ID NO: 332718 - protein, 390 aa, unidentified
MPVVATELEVPVAAVRTDLGAIFVSLELSRSTWLITSLSPDGREKMSKHSVSAGDIEGLIKRFSELRQKARVRTGWSFSVVTIQEAGLDGFWIHRLLEREGIESWVVDPASVLTSRRRRRAKTDRIDGETLVRTLLAYKRGEPRVCAMLKVPTPDDEDRRRICRERKVLTAERISHVNRIKGLLFAQGIRDYEPQRRDRRTRLDELRTGDGRCLPAHLKAQISRELDRLEIVLTQVKAIDAERDALLAQGNEDQPPRPASLLAQLKGIGPEFATVLSSEGLFRTFNNRRQVAAYAGLAPTPWQSGSIDHEQGISKAGNPRLRTTMIQLAWLWLQHQPGSALSIWFRERVERNGGRGKKTTIVAMARKLLVALWKYAVHGVLIEGAAAKAA

SEQ ID NO: 332719 - protein, 362 aa, unidentified
MAVTRMTDQQHAVDTTLVTGGVDTHKDTHTAAALDHLGRCLGTRTFPATTAGYTALLAWLGGFGVVTGVGVEGTGSYGAGLARHLAAEDVTVVEVNQPDRHTRRRAGKTDAQDAINAARAVLSGQAGTTPKAGTGPAAAISALRTALNGAVKSRTAALNQLDALIVTAPAALRETLTPLTGTTLITTCARLRPGTDLTDPRTAVKTALRRLARRIQHLTDEITDTKTELATLTRQALPATTALFGVGPDTAAQLLTTAGDNPDRITTEARFAHLCGAAPIHASSGRTTRHRLNRGGDRHANAALYRIAIVRMRHCPSTRAYVERRTTEGLPKRHIIRCLKRYIAREIHQALIADLATLTHTP

SEQ ID NO: 332720 - protein, 355 aa, unidentified
MTHAQMISARITVGVDLGDRYSSFCLVDRDGAVVDDGRLRTTPVALRQYFAERPPMLIVIEVGTHSPWVSRLLEECGHEVIVANARKVRLIYRSDNKTDQVDAESLARLGRLDPKLLAPICHRGAEAQADLATIRSRDCLVRARTRLINHVRGAVKAAGGRLPASSAPAFPHRVIDHIPAELCATLKPLVGMIDTLSREIRGADRRIEQLAQERYPETTRLRQVAGVGPITSLCFVLTLEDPTRFPNSRSVGAYLGLCPRRRDSGANSPQLRITKSGDSMLRCLLVNSAHYILGPFGPDCDLRTQGLKLAERGGRNAKKRAVIAVARRLACMLHSMWLNGTEYEPHRLENRKTAA

SEQ ID NO: 332721 - protein, 425 aa, unidentified
MNFTQNAKINQVTDKTLVIGMDIAKRTHYACMVDERGMILKKSFPVHQTNQGFEYFYECILSAKKQFGKTDVIIGIEPTGHYWLNLAYFLDDRGISLVVCNPMHVKKSKELDDNLQTKNDAKDALVIARLVKDGRYSYPRILRKTEAELRVGSTLKGNLTEELNTIKNKMIRWTDRYFPEFQEVFPAFGKMALAVLECTPFPNEIANQEPSELLATYRSVEGMKSPQLPKTKKLIENARTSIGVTEGQQMARIEIATLVQRYRQLEKELESLQEQLTEFIQETAEYEYLQTVPGLGDATIIDLLSEIGSFAHYNHPRQLLKLAGLTLRENSSGQHKGQKRISKRGRSQLRALLFRVMMPMVRHNKAFKQLHEYYTTRQVNPLRKKQSIVVLCGKLLKVLHAICTKHMAFDAEQMMKEIPTLNRAA

SEQ ID NO: 332722 - protein, 424 aa, unidentified
MTLHENAVPLEAEDFAAWVAIDWADQKHVWALQETGSPRRQQGELKASPEAVDAWVSELLLRIPGRRIAVALEQKRGALLCLLSKYEALVLYPVHPATVSRMRAALYPSNSKDDPKDADLLLDILLHHRKRLRRLDADTVETRKLQILVEDRRQLVDQGTAYSNQLRAKLKLYYPQALRWLPDLHAVVAGEFLKRWPTLPLLQKSRRETIEKFFHQHNCRSEELIQKRLEEIPQAVVATTDAAIVDSSVAMVRALVDLLAVLHTHIAALDREIAATAAVHPELPILASLPGAGPVMVPRLIAALGTQRERFACASELSAATGIAPVKQASGQSEWIHFRWACPKFWRQSFHEWAGHSLAKSTWAQAFYQEQIRKGKGHHAAVRALAFKWQRILFRCWQDRRPYDEQKYLAALRQKGSPYAQAAA

SEQ ID NO: 332723 - protein, 360 aa, unidentified
MSTIADDDARVIAGVDTHKEFHVVVVLDELARKLDTASFPTTGRGYRDLTGWLTSFGEVLAVGVEGTASWGAGLCRHLRARGLNVIEVNQPDRHRRRRRGKSDRIDAEMAARAVLAGDATALPKAGDGPVEAVRQLRLARSGAMKARTAAANQLHSVCDTAPDELRAQLRGLTTRRKMRLAARLRPGDPLTPTGGAKRALVAIARRWLALDAEITELDHAIKHVLDAIAAPLLARHGVGYETAGALLCAAGDNPERLRTEASFAALCGTAPVPVSTGNSHRRRLNRAGDRRANSALWTIVMVRLRSRHAPTIAYLERRIAEGHSKRDAIRCLKRFAARELYNDIQAITRTNSRPALEIAA

SEQ ID NO: 332724 - protein, 489 aa, unidentified
MSRASQQQQGKKDATLNAKALKRKARGSHRPQGEGHQRRSQLRITNRDAAGIDIGSQVHYVAVPEERAERAVRSFGAYTAQLDEIAHWLKECAVKTVAMESTGIYWIPLYQKLEEAGFEVLLVDARQAKHVPGRKSDVQDCQWLQQLHTYGLLRAAFRPEDWVCRLRTLQRHRKSLVEYAAMWVQHMQKALNEMNLHLHHVLSDISGCSGLAILDAILAGERDPRKLASLADYRVKKSQAQIEAALTGDYRPELLFVLNQSLQDYRQIQQQIAQCDLSIEKQLAQMADCTNPSQDSGPRQQGPESAGGKRGKIKPKDGLEVSLAGHLKRILGIDLTTIPGLNVLAILTLISEIGTNMSKWRNEKAFVSWLGLSPNNKISGQRLLSSRTRKVVNRAATTLRLAAMVLGHTNTPLGSFYRRKRAQLGAPKAITATARKLGCLIYRLIKNGEGYQEPDLHVYELKYKDQILNSLRKRANSFGFDLVEVPKAA

SEQ ID NO: 332725 - protein, 415 aa, unidentified
MSEEENARTLRRYVALDIHKYYCVVAGVNREGQVILPPVRVEHADLEEWLKKKLQFNDQVVIESTTNAWHVHDLLEPLVERVVVANPIKVMQIATARVKTDIRDTLILARLLAANLVPDVWLPSLHVRQMRQLLSQRRQLVETHTQILNRMHSVSHRHHLKHERGKRFNEKTIGWQTDKSLSGMEQFQLRLEMENKVYIEKQIERISDEVRKRCHQKPWAESMPYLMQLPGFGVITAMTVLAAIGDIQRFETPKHLGSYSGLTPGLEQSGTKNRGKGITKEGRRELHWALVEAAQMAVKSDPLLKMKFQALQKRMHRNQAIARHLLELVWYVLTRRQPYRHFSQERIAYKYLTWAWRMDEVARDGLTRQQFARYYLMRLGIGHDLTRIALDPKHPRKLASEAEVLALRPELQKIE

SEQ ID NO: 332726 - protein, 427 aa, unidentified
MDVVYPRCGGLDLHKAKIVACVLVPGVAGRPAKEIRTFGTMTADLLELADWLRAADCTHVAMESTAVYWKPVYNLLEEEFTLLLANARHLKAVPGRKTDVRDCEWIATLLRHGLLQPSFVPPRPQREVRELTRYRTALVEERSAEVNRLQKTLEGANIKLAAVASNVVGVSARQMLEGLVAGETDPVVLADLAQGRLREKLPQLQRALSGSVGPHQQFLVAQQLAHLDFLEATIEHVSEEITARLRAVEPPTTAEAPGASTAPDDALARLQTLPGVGQRTAEVLVAEIGLDMRRFRTARHLASWAGLCPGNHESAGKRRSGRTRKGSRWLRSALVQAAHAAARKKETYFAAQYRRLAQRRGSKRAAVAVAHSLLGCVYALLRDGTTYRELGADYFVQRDPAAYARRLVRGLEQLGHKVTLEPADPAA

SEQ ID NO: 332727 - protein, 338 aa, unidentified
MKLYAGIDLHANNSVVVMIDAADRVSYQKRLRNELGEILSAFAPYQEALQGIVVESTYNWYWLVDGLMAAGYRVHLANITAIEQYKGLKHTDDQSDARWLAHLLRLGILPEGYIYPKEERAVRDLLRKRSQLVRQRTTNLLSIQNLLTRNTGLTFSGHRIKQLTVGEVEQWLPQAELALAVKSNLAVLQCLEEQIERIEAVVLAQLKLREGFQPLLTVSGIGQILGMTIMLETGEISRFATVGDFASYCRCVGSQQLSNGKRKGQGNVKNGNKYLAWAFVEAAHFATRYNAQIKRFYQRKQAKTNGIVAIKAVAHKLARACYYILRDQVPFEVTKAFA

SEQ ID NO: 332728 - protein, 343 aa, unidentified
MQTVTTIGLDIAKSVFQVHGIDAEGKVVIRRQLKRRYVLAFFQKLAPCLVGIEACASSHHWSRELRALGHKVRLMPPAYVRPYVKRQKNDAADAEAICEAVTRANMRFVETKTPEQQSCLMLHRTRHLFIRQQTAVINAIRAHLAEFGIVAPVGRNGVEELLGVVADASDKRLPEIARACLAALGAQLRMLKAQILEFDRMINAWHRSNETSKRLDEIPGVGPALATALVASVADPRAFRSGRDFSAWIGLVPKQHSSGGKDKLGGISKQGDRYLRSLFTAGALAVIRYAKIHGAKHRPWLTALLARRPTKVAAVALANKIARMAWAMMARGERYKEPVALAA

SEQ ID NO: 332729 - protein, 341 aa, unidentified
MKPEMSVLGIDIAKRLFHAIGMDERGTIVFRKRWSRHDLIPFIAKLPPVLIGMEACGGAHYWARRFREYGHEVKLMAPQFVKPYVKSNKNDSRDAEAIAEAVTRPTMRFVPIKDVAQQDIQALHRVRERLMGERTALVNEVHGLLHAYGIVIPKGVAKCRQAVVSKLESAKDKLSALSQEMFWKVVEEFAALEKQLAYYQEKLEALATTHPECQRLMTIPGIGPLTATALVAAVSDASAFKNGRQCAAWLGLVPRQHSTGGKERLLGISKRGDSYLRKLLVHGARATIRWVGRKTDRRSQWMRQLIERRGKNRTAVAVANKNARIVWALLTSHQAYDLAKG

SEQ ID NO: 332730 - protein, 442 aa, unidentified
MAMRKREDSSEVFPNAAGIDIGGSSHWVAVPKGAAEEPVREFGTMTDDLHEMADWLLACGVDTVALESTGVFWIPVYEVLEQRGLTVWLVDARQMKYVPGRKSDVMDCQWLQKLMSLGLLRAAWRPGDEVCVVRAVARQREVLLTEQAGWVQRMQKALVQMNLQLTEVLTDVMGVTGQAIVRAIVAGERNPKVLASHRHGRVRASAAEIERALTGNWRDEHVFVLGQALAMFDSLGERILECDAKIEALLKPLGVHEVELSGPGKRGGKNTPHFDARTALARWAGVDLTRINGLSITTVMTILSEIGPDLSRFANVKHFCSWLGLCPGTKISGGKVLSARTRRSTNRVRQALKLAAMSLSRNDSALGAFYRRLCARMDKPRANTAVAHKLARMVYFMLTRGEAFVDEGQQCYEEQQRQRNIAALRRRASALGFEITPAGQVA

SEQ ID NO: 332731 - protein, 366 aa, unidentified
MKKTITVAKNRNEIFKQPQLTIGVDLGDRISHYCILDATGNVILEQGVPTTPKGIQQVFSKISRCRIALETGTHSPWVSRLLTQLGHDAIVAHARNVQLITESSRKDDRLDARTLARLARIDPELLGPVRHRSAKAQIHLTVIRARATLVSARTALVNAARGLTKSYGERLPKCGTEQMNREIAKGLSPELRDVLEPLLGEIESLKERIAEYDRRIEQIAKEVYPEVALLKQVKGVGTLIALTYVLTLDDPHRFRRSRDAGCFLGLRPGRRNSGMSEPQMHISKEGDAYLRTLMVQGAHYILGPFGQDSDLRRWGLKLAERGGKNAKKRAVVAVARKLAVLLHKLWVSGEVYEPLRNNHQVVSAVA

SEQ ID NO: 332732 - protein, 347 aa, unidentified
MVHAGLDLSRRKVDVCLIGGDGEVLGEFACPCDHDGLRQLVERVGLGLRVRAVIESMSGARFVHDSLEQLGWEVLIADAQKVKGLAPLTCKTDRIDAGVLAVLSHRDLVPAIWLPDPRVRGERELARFRMHLVKHRSMLKNRIHSALINWGKPCPVSDLFGVAGRRLLDELEIPQPWRGSIDASLLLIDDLDAQIAKAAAELKASGVDHPYVPLLMSAPGIGWVLGFTIAAEIGQIERFASAQKLVGYTGLCPRVYQSGAKDRRGQLTKAGPKYLRWAMLEATMHALRHRAYHDRYQHTKKRLGRQRGAKVAQIDIARRLTGAIWHMLTRNQPFNPAAGGAAFRLAA

SEQ ID NO: 332733 - protein, 393 aa, unidentified
MVVSVGIDVSKNKHDCFIVSSEGEVLADVFTIPNNMDGFYALLEKIRACTTPQDKIKAGLEATGHYSYNILGFLLDNGLATYVLNPLRTNLYRKSLSLRKTKTDRVDARTIAAMLLSDAGLKPYTNTAYHNEELKSLTRYRFDKVRERAKLKSSISRLVCILFPELEKLMSSLHLATVYALLEEFPGAKQIAKAHLTRLKTLLENSSKGRCGRDMAVTIRSAAQNSVGSCMPAKSLELQHTIRLIRELDAEIAEIEAEIETMMDKIQSPITTIPGMGFRMAAMILAEIGDFSRFESPDKLLAYAGMSPSTYQSGQLKNCYPHMEKRGSRYLRYALYNATKYVCHWDPTFAAYLAKKRDEGKHYNVALSHATKKLVRLLFALERSRQPYCSLAA

SEQ ID NO: 332734 - protein, 407 aa, unidentified
MIFVGDDWSEVHHDIELQDDAGERLARVRLPEGVAGIAAFHELVAGHALSPGEVVVGIETDRGLWVQALVAAGYQVYAINPFAASRYRERRSPSGAKSDPGDAAMLASIVRTDRRHHRLVAGDSALAEGIKVLARAQQNLIWSRQREARRLRALLREFYPAAITAFEDLTSSDALAVLAIAPSPPAAARLTTKRTAAAMRAGGRQRNAQVKAAETLTVLHTDELHAPAEFVDASAAVVRALIGVLTAMSDQLESLDAALADHFEQHPDAEILRSLPGLGVFLVARVLAEFGDDPTRYADARARRNYAGTSPITRASGTRHTVLARIARNRRLAAACHWWAFNALHTSPGARAFYDDRRARGQNHNQATRALANRLVGILHGCLHHRQPYAEQRAWPTPNPRPQGVAA

SEQ ID NO: 332735 - protein, 405 aa, unidentified
MAVMIGIDPHKASHTAAAIDKTEKVLGELTVRSGASQVERLVGWASQFEERTWAVEGAGGLGYLLAQQLVAAGEHVVDVQPKLAARVRLLSNAATNKNDPNDARSVAIVALRSPSPVAVHAEDHTAVMKVWSKRHRDLASHRTRLACRLHAVLCELVPGGYSGEIYASRAARLLDELEPQGAVATARHELAVELLADLRRIDEQKRETKKRIAQAVAASKTTVTEIFGVGPIVAATVIGNVGDVARIASSDRFAAYNGTAPIEVSCGPRRIYRLSRRGNRRLDHAIHLAAVTQIRNRRSEGRAYYDRKIAEGKTGKEAIRALERRISDAIYRQLHIDAQRSREATVMGPGGQAGNDSVASVTGSHPESRLFGEATPEPGTTHRTAAIVVRPKRSGTPSRRVKRAS

SEQ ID NO: 332736 - protein, 351 aa, unidentified
MIIIGCDFHTRFQQIGMLDPTTGEIVGRRLEHESGEAERFYASLPTSARVGVEATIRAQWFEKVLARYGHELWIGDAAAIAAARVRKQKTDSRDALHILDLLLTDRFPRIWVPSPTERDLRQLLRHRHKLVRYRTSVMNQLHGLAISQGLCRKRKLWSRMGRQELEALALDPWACRRRQELLQLLDQLNPWIADLDQAVEKEAERRPEAIQLMKQPGVGPVTALAFVLTIGPVNRFRRSKQVVSYLGLNPTEESSGGKQRLGSISKQGNSMMRYLLVQAAQTASQSDPELRRDYQRLKFRRGHSAVAKVALARKLAVRLYWKLREAAQPVPPARMQGSPSNPMVEETPSIS

SEQ ID NO: 332737 - protein, 446 aa, unidentified
MSERTIACEAPGIRMTFDSVAVRATKGKIMKPFNEITHYAGFDWARDHHDVVIVDRQGQIVADLRLQHTLEGWQQFRDQVKPYPALAVAIETNQGAAVDQLLQMDGTVYPVNPISAKSYRERKAPSGNKTDHLDAWSLAEALRLDGQHWKALQPLDSLTQQIQLLCRDEIALIEQRTALVNQLQQALCEYYPAALQAFDDWTQAYCWDFILQFPTPEKLAAAGRRRWEKFLHTQKLWRPQTAPPRLEIFQNAGKFCGSAPVISAKSLLAVSLARLLKALQLQLDQYRQQIQALFQKHPDHDLFGSLPGAAQTLGPRLLGEVGGPPQRFEDTQTLQCIAGTAPVSFQSGQIHRVRVRYQCNKILRHTVHLWAQCCLRVSPWAEVYYRQKRAEGKPRLRPALSGAAPVENPLEDAPNPPAVRRRSARPPSKAAWFLGLGAHKTRSQSR

SEQ ID NO: 332738 - protein, 369 aa, unidentified
MTDLTLFIGLDVHKKTISVALVDAAASATVRFYGTIVNTPDALLGLSKKLSKDGQALHFCYEAGPCGYGVQRQLTRLGHRCDVVAPALIPRKVGDKVKTDRRDAMMLAQTLRAGQLTAVWVPDEAHEAMRDLVRLRAQAMRDLRKTRQQLLSFLLRHGLVSPYGHWTKMHRRWLGELVFAHPAQHLAHEEMLQRIERAEALCDRLKGAILDLVPQWSLAPVVQAIQALRGVSLIVASVIVAEVGCFTRFDNPRQLMAYLGLNPSEHSSGSTIRRGAITKTGNALARTCLVEAAWTYRFPARVTQIIRDRLAGLPEPIRNVAWKAQVRLSARYRKLVAAGKPTPKVVVAIARELVGFIWAIARMVEPKFA

SEQ ID NO: 332739 - protein, 354 aa, unidentified
MKNYTVGCDAHKRYSQFSVLDWKACIQERRRVEHTSGAIKKYLSKFPDGTPVAVECVSNWYWIVDEIEEAGCRPMLTNAGKAKLMMGNVNKTDKLDADGLALLLHNGTLPTVWIPGGELRDLRELPRTRMALTKQRTAIKNRIHATLAKYSIRVDSSSDIFVGKGLAALGKELVHLPEETRSCVEQELELLDQLRDHIQYLEKRIRKRIRQTKNMQLLKSLPGVGDILAILIASEFGSVDRFPNAEHFASYAGTTPKVKSSGGKTYYGHLRKESNQYLKWAFIEAGNAIVSSCNRPGWRNKHVVRLYERIRQRKGHGIAVGAVARHLAEASYWMLRKGETYHEPAHRKTLPKPG

SEQ ID NO: 332740 - protein, 315 aa, unidentified
MIQTSITTAGIDTSKAKLDIAVHGRTERWQVANALPGWRALAANLVKAGITRVGIEATGGYERGVVEHLRSAGFAVLLLQPLQVKAFGQVHLRRAKNDALDAVLIAACAAALDPPEVAPDPRLTELADYLTFLEQIEEDIRRFKTRLEHIDEPALRRIVNSDIARLKARKSTQIRDIAKRLRAYDDLAKRLKLVLSIPGIGERTALAIVIRMPELGRVSREEAAALAGLAPFDSDSGQHRGQRKIAGGRSRLRRSLFAAALPAAFRWNRALMALYARLMARGKVHNAALIACARKLLIYANTVVQRGTPWIEKEA

SEQ ID NO: 332741 - protein, 435 aa, unidentified
MEEVTDEPLYRDRVCGIDIGKAGMVATIRVPSDKDPARRMAGTRSFGTTKREVLALADWLRCWQVPAVVMEATSDYWKGPFYRLEAEGFECVLADARQVKNLPGRPKRDPADSRWLAACFERGAVRSCFVATPEFRIIRLHTRYRRDLAEERAREKNRAEKLLESAAIKLSSVVTGLHGVTGRDIMDHMTAGVRDPKAPAQLARARARRKIAQLEQALEGAEFFTAAHAALLAAMPARIDRVDQEITQLSGVIETLLAPYEEQLRQAEPMPGWGRRAAQDAIAGTGAGMTRFPTGAHLVSWGSRAPLDHQSGARNGRARAKKGNRYLAGVPGETAASAGRTQTREGARYRRLARRRGKLKAQVALGNTQLKVYHKLLSSPGTRYQDLGPDYHERQRDTRRQIARHAGKLGALGFEVTLARTPEPGPDRPGQTQAA

SEQ ID NO: 332742 - protein, 340 aa, unidentified
METPRHIGIDLHRNQFTCCVRLENGRNYLTEWKLEDLPRFVKKLRPADEIAVEVTGNTRLFHDAVAPHVSRVVAVDPNQFKVISHSVKKTDPNDARNLALYLEKDLLPEVRMKDKTQAQLASLTQTRDTMVKLRTALKNKINNILSAHGINLEKEALSSEKKLQEVLTMKFDPMVKLELEVIVEEIRSLNQRIAKLEKAIADEGSKLEGHKNLTSIKGIGPLSGSILLSVIGDINDFADEGKLAAYFGIVPRISNSNETEHAGRITKRGSKLGRTALVQCALIAQRYSPYLKRYYEQVKARRGTGKAIIALARKLLGIIYRTLKNKWVFADFPNFVLAEA

SEQ ID NO: 332743 - protein, 346 aa, unidentified
MEHIIRIGMDTSKHIFQLHGVDADEQPVLRKRLRRKEMVLFFAKLLPTVIGMEACGAAHYWARVLRGLGHEVKLMAPQHVKPYIKRNKNDGRDAEGMCEAMSRPTMQFVPAKTEEQQAALMLAGVRQQLIARRTQLSNAIRGYAAEFGLTTAKGLDKIEPLLARIAQDNRVPELARELFAFQGTDYARLQIELKAIEARLMAWHRANACSKRLAQIPGVGPIGATALVMKTPDPRAFPSGRQFAAWLGLTPKDHSTGGKTRLGKITRAGDEVLRSLLVAGATAVIQQVRKGRGRPSPWLLDLLKRKPPKLAAVALANKIARIAWKLMATGESYDSARMTGPSVSAA

SEQ ID NO: 332744 - protein, 379 aa, unidentified
MFCGIDVSKNKSQVCILRDDNTILREFQVEHTKQGFEELEKNLVSDATIAMETTGNYSKAIYDYFKARYNVVYVDNGQMHMFAKLHFSHMKNDKIDARLIAKYLSFGLKKVNPIKEEGLKDLGRLYEKTCYQMTKYKHMFKNQINIIFPELETHFHLTKAKALTTLLLQYPTPQSIAKLSDEELENALTANFKKLGHLRNKEKFITELKEIARNSIGIKDYPTECFVQTIKILKFYEQTMEDIKAKIKVAVMSCPYSRLLNEFGYDDASLVSIVGEVGDIRRFPNHKKFVAYCGLNVSEKQSGKSQSKNCYITKRGNKLLRHTFYMMVLPHLRYKKEGHHAQFFNRLKESGKHPKQCMVACARKLAVKTYYDMMKCHEK

SEQ ID NO: 332745 - protein, 419 aa, unidentified
MSKSNIARQIMQVQPGSLHAGVDLALEKNVVIVINEKGQRLDHFSFAQEREGYDYFLRRLEELRQKHQAPGVVVAMEPSNYFWKLLAKELEQKQIAYRLVNAYTVKKHREGNQLDQSKDDRRDAAQIAELSRSGYYTKTCLQKGAYEELRQYAILHDQLIPAITREKNVIWGLVGQVFPELSQVFKNPARETSFALLGSCASATDIRLLSLEDFIATVRTAYSGKKLCVSKLRLVYRLAATSIGVSEGLHAIQLAIQVHLAELQTLQQQLNRVISAMSACLALMPESPFLLSMKSLNTVSAALFLAEVGDPYRYHSSAQWVKLAGIQPAPNFSGKKQRSKTPMSHHGRSRLRSMLYFTCLRLVHQDDHFAQLYAHLQRRPNNPLTKMQALGVLMNKLLHILWALIHNQTFYNPSFNQSI

SEQ ID NO: 332746 - protein, 346 aa, unidentified
MMIIGCDFHPSWQQVSWLETETGDCGERKLVHANGEAKVFYQQLAAPVLIGMEATGNSQWFVELVEDLGQEIWIGDAAQIRASYMRRQKTDKRDAAHILKLVVEGRFPRLWTPDREQRDLRQLVLHRHKLVEIRSRVKNELQHLSLNQGVQKKRTLWSQAGQKGLRELPLKPWAACRREDLLGLLAMLNQQIGRLDAAVQHAADENSQAKLLMTQPGVGPNTALAYVLTIGDVTRFARGKQVASYLGLIPREESSGGRQKLGAISKQGNRLLRSLLVEAAQIAVRFDPGYRKQYRHRCHQKPKAVAKVAAARKLAVRLYWMLRSQTAYPEIVRIESSPRVPLVGAS

SEQ ID NO: 332747 - protein, 344 aa, unidentified
MSEVITIGLDIAKHVFHVHGADERGRAMFSKRISRGKLLDFFAAQPSCTVALEACGGAHHWARQLTQLGHEVRLIPPAYVKPFVKRQKNDAIDAEAICEAAQRPSMRFVAVKSEEQQAAGLLFRTRDLLVRQRTQLINAIRGHLTEYGWIAPKGPSHVAMLADLIEEEEMVNSLPGAARAMFRLMLDLLTGLRSKIADLDKEIARRAREDEVSRRLMTVPGIGPISATAIAALAPPVETFARGRDFAAWLGLTPLQRSTGGKQKLGATSKMGERTLRRLLIIGSSAVVQQASKRGAPKGSWLEQMLARKPRMLVTVALANKMARIVWALLIKQENYRAPVAAKA

SEQ ID NO: 332748 - protein, 427 aa, unidentified
MNGTNDSRVERFRQFRKRIRGSDTDLIVGIDIAKSKHHAFFGTANGRTVLKGLIVENSASGFEHLVTMVKFYMDRDGFKEVVFGVEPTSVYHKPLAEFLIEHGYLVVYATNEAIKKNRSLLDGRWDKNDTKDCANVADLIAQGKCHYYDFPDHGLRDIRSLLLFRKRLKKQLHSCRVRIRNNLVAQYFPEMDRLWNQAEAENLAIVRWCLSPQRINDLTFEDFYQMVTTHNRGLRQHRRLQKIWEMAPYSIGCRASTASQFEAKLLVDGVDYLKDQIAQVESTIFTMCRSYEQYEDLLTIPGFGPYVSAVVLAAIGDPHRFDNASQVIKMAGFDLNAHRSGNKSDTAVPVISKKGKADLRYALYQAALIASSLTAHFRGYYHRLLEGRQKEKGIRTKMRVKLATKLLVIAWTLMKKKEPFNPAYVKI

SEQ ID NO: 332749 - protein, 367 aa, unidentified
MNDTKYIGLDVHQATISAAVRDATGELVMEAILETKAETILQFFRGLRGSLQVIFEEGTWSAWLHDLLQPHVARVVVSDPRKNALLKDGNKNDRIDARKLSELLYLNKFNPVYHGEHGLRTLKELARSYLTITKDITRVMARIKAIYRSWGIPCAGQQVYAPGHRREWVAKLSEAGVRARAEFYYQQFDGLAPLRQQARRELLSESRKHAAVKLLRQIPSIGPIRAALLVALLQTPNRFRTKRQLWAYVGLALRTYTSGEYRFEHGQLKRSKKVLAIRGLNRNHNHDLKNIFKGAAIWAAGNTGPFQNFYEACLARGLKPHLARLTLARKIAAITLLVWKSMPTPRLCRLPSGNSGWEGLGLRPESA

SEQ ID NO: 332750 - protein, 325 aa, unidentified
MQSVTNYTGVDISKSFFDVAIEQQGKYVFHKLDNDEKGFEALAVLLPAGSQVIMEASGPYYLRLASYLYANGILVSVVNPLVIRRFCQMRMSRAKTDKKDAMMIAEYGKTEKPGVWEPPQQHVVSLQQMEALLLGFNKERTALSNQLESFTSSGMLEKELKKLITKELKHKEGLIEELTLAMQQLAMQHYNEMMTNLESIPGLGKKTAMMLIVISGGFRRFDDYKKLSSYIGLCPRIIESGTSVKGKARICKMGMSRIRAMLYVCSWSAKRCNKACKALYDRLIAKGKAKRLALIAVANKLLKQAFAIAKQQNKYNENYSNIICF

SEQ ID NO: 332751 - protein, 476 aa, unidentified
MPLLGRRHTIQMKKKPQNHKNKRTKIKLDSGLPMINPDAAGIDIGHREHWCAVPVERSAKPVQRFGTFTEDLEKLADWLKECGIKTVAMESTGVYWIPAFQILERRGFEVRLVNARQVKNVSGRKTDVLDCQWLQRLHSYGLLNASFRPADEMCVLRSYLRYRDELVCARSVQCQHMQKALQQMNVQLHQVLSDITGLSGLRIIEAILAGERDAEKLANLADRRVHASKATIQRALKGDYRSEHMFLLKVAFELHGTYEKKIHECDEQVIAEMAKLPARVDPKQKPLAPRKPGRAPIRDMVAGKDLREELYRWTGVDLTAIEGIGVLSAQVILSEIGTDMSRWRTEKHFTSWLGLCPDNRISGGKILSSHTRHVINPVADVLRIAATTLERNKSALGAFYRRMKGRLGPASAITATAHKLARLIYRLLKHGDAYVRQGIEVYEQKYRERLIHNLKKTAASFGFQLTETKELAQGVS

SEQ ID NO: 332752 - protein, 388 aa, unidentified
MWRRLLPRPMVRDGSLRDAPCIKKRSSGGRIDCSITEGSPVAPRVLKPVGEQGAPSVGPFIPNGRMGRMSSPYQQGREKDQMFVGIDVSKDRLDVHVRPGDQTFAVERDHAGIERLVAQLRDLMPQLVVLEATGGFETVVAAALGAAGLPLAVVNPRQIRAFAKACGRLAKTDALDAAVIAHFAEAVHPEPRGIPDEAARALSELVTRRGQIITMMVAERNRRRQLTQARLTKTVDRVLATLQEQLSAVESAIDETIRGTPAWREKEELLTSAPAIGPKIARTLIADLPELGALTRRKISALVGIAPFNHDSGKRKGLRAIAGGRARVRTALYMAVLVTIRRNLPLAATYHRLRAAGKPAKVAIVATMRKLLVVLNAMMRDGNAWHAA

SEQ ID NO: 332753 - protein, 348 aa, unidentified
MKELMAGIDLHSNNIMVGIVDREGKRLAHQKLPCELKRIGEFLAPFKDRLEKLAVESTYNWYWLVDGLQAQGYPVVLANPARITQYSGLKHADDKSDAFFLAELLRLGILPTGYIYDAERRPVRDLLRRRMSLVQQRTALMLSFKSLFTRTTGEPMSLSRLKAMAAKEAQQLYEHPANQLIAGLQIQHIEQLEASIGRLEKAVLRVARELPCYPKLKTLPGVGIILGLTITMEIGDIKRFAGPGQFASYCRTVAAKCTSNGKLKGENNRKCGNKYLAWAFVEAANFAKRYDESCRKWYERKAARTSNVIATKALACKLAKAAWYLAAEETDYEPGRVFGPPAGAIMKQ

SEQ ID NO: 332754 - protein, 343 aa, unidentified
MQATTTIGLDIAKSVFQVHGIDAAGNVILRRQLKRRYVLMFFQKLQPCLVGIEACASSHYWSRELAALGHTVRLMPAAYVKPYVKRHKNDAADAEAICEAVTRANMRFVATKTTEQQSCLMLHRTRHLLIRQQTAVINAIRAHLAEFGIVAPVGRKGVEQLLAVVGNSNDKRLPDVARACVAALGAQLRMLKAQILEFDRLIIAWHRSNEASRRLDDIPGVGPALATALVASVADPKAFRSGRNFSAWIGLVPKQHSSGGREKLGNISKQGDRYLRSLFMTGALAVIRYAKIHGTKHRPWLAALLARRPTKVAAIALANKIARMAWAMMARGERYKEPIVLAA

SEQ ID NO: 332755 - protein, 458 aa, unidentified
MERHTPPVRRRPRPALTRRFPDAAGIDCGAAAHVVAVPPDRDPESVRTFPTFTADLHRLADWLLACRVTHVAMESTGVYWIPLFEILEARGLQVLLVNARHVRHVPGRKSDVADCEWLRDLHLHGLLRGSFRPAAAIVALRTYVRHRATLIELAATQIQRMQKALVQMNLQLPLVVSDIAGTTGLRIIRAIVAGERNPTVLAQHRDYRCQATEAEIVAALTGQYQPALVFTLQQHLALFDHCQLQLAACDTALEGVLTALAATAPAPTTALPPPRGRVTPRDNDPRFDVRTPLYALTRTDLSQIDGIGPANALRLVAELGTDMTRWPTAQHFTAWLALAPHNKISGGRLLSSRTPRSANRAAAIFRLAAVNLGRTQTALGAFYRRLAYRLGKPKAVTATARKLALLVYRTLKDGLVYADPGADAYDRAHRAAVVRRLRQRAGTLGFQLVNATTGEILE

SEQ ID NO: 332756 - protein, 409 aa, unidentified
MTTDIDLSASPVAGVDTHTDTHTVAAVTPTGRHLATETFPTTRPGYTHLAEFLSKHGVGAVGVEGTNSFGAGLTRHLIDRGYTVVEVLRPARSIRRRDGKSDPVDALAAARQVLTGEGLSTPKDSTGPVESLRALQITRKQLVSTTAKLITTMKSLLVTAPDDIRTRYATMTNHALVNALVYCRPSSDVTDPRNGVLTSLKILATTYRALRVQCDELETRIAALVSVINPHVSNIVGCGALVSADLLISIGDNPERIHSEAALAHLCGVAPLPASSGRTNRHRLNRGGDRRANSALYRIAMVRMKCDQRTREYVARRTEEGLSKREIIRCLKRAIVREIYRVICTRRSTSQPRDLRRDELKELRIAKHLTQVVVAKHLGCAPARISDIETGKRPLTELASAYEKFLKSS

SEQ ID NO: 332757 - protein, 299 aa, unidentified
MLDIFDDAVGKAERIANTPQAITEQVAGWRCGNVFVVFEATGVYDRELAEVLRQAGIRFARINPARARDFARADGRLAKTDAIDAHMLAVFARKMMPAAEPAPEPARTTLASLAKRRDQLVQIRAQEKNRRSEASDRTMIEGIQRLLDFLNEEIKAIEASIKSLIKAEPDISEQARLMRSAPGIGPVACMQLLAKMPELGRIGSKQVTALAGLAPFNVDSGSYRGKRAIGGGRKRVRDALYMAALNAVRRDRTMKAFYQKLRTVGKPAKLALIAVARKLLTTLNAMLRDRKTYALPQPS

SEQ ID NO: 332758 - protein, 340 aa, unidentified
MSEITTIGLDLAKHVFQVHGINAQGTTVLRKRLRRGQVLAFFSCIPRCVVGLEACATAHYWARELRALGHEVRLMPAQYVKAYIKRNKHDAADAEAICEAVQRPTMRFVPVKTAEQQATALLHRGREQLVRQRTMLVNALRAHLAEFGMVAAQGLRNVSQLIAVVRDDGDTRVPDVARQVLQVLANQIEQIEAAIAALEKQLMAWHKTNAVSQRLASIPGIGPIIATAIATTVADPGVFRSGREFAAWLGLVPRQNSTGGKTRLGGITKRGNRYLRRLLINGASANLLRSKATKADPWVIGIRRRRPPLVVAVALANKTARIAWAVMLRQREYQPRAVAA

SEQ ID NO: 332759 - protein, 344 aa, unidentified
MFYVGIDVSKCTLDICLLRDGVRGKVKTRKFKNDGDAAAGVVSWLDKQHCPPEDTHVIMEATGVYHELTYGLHHAGVRVSLANPHRSREFAHGMGILTKNDRVDAYMLACYGALKAPDAWIPPPEAVRLLRALLRRRDTLVADRGRERNRLEKCRHGFTEGAEAVRASVEAMLRHLDAEIRRLDGQIMAHVQGCPSLKNDLALLTSIKSVGVQTGLHMLVILRSHQFSRPGQAAAFLGVVPVEKTSGTSVRGRARMSKIGPPEIRAVLYMAAMCGSRFNPAMKRIFENLLLQGKARMCAIGALMRRLVHWCWGVLHSQRPFDPEYQRSWHEIRDAEARLCTEGA

SEQ ID NO: 332760 - protein, 409 aa, unidentified
MVVHSAPVTPRTVAVAIDVGKDEFALSVTDAARNVLMKPRLGCPMTAPSVRLVIAQVQSLLPAGASVKVGIEAAGHYHRPLLSPRVWPAGWELLALNPGHVAEQRRVLGKRTIKTDAGDLEAMTEMLLAGRGLPVGETVGVLSELTAWSAHRTSRVLTRTATKNQLLGQLDRTFPGLTLALRDVLGTKVGRLVVAEFPDPVRLAALGSSRLIRFGAARGLQIRKPMADRLTRAAKDALPMPDAAIARAVLAADLALLHDLDSQIGAATSELARLVPLTPFRTLTSVSGWGAVRVGNYAGALGDPSRFSNAKQVYRSAGLNPIQYESAGRRRDSGISREGSVELRRALIDLGLGLWLTDPAAKQYASALRARGKKGGVIACAMAHRANRIAFALVRDQAEYIPAKWIREV

SEQ ID NO: 332761 - protein, 404 aa, unidentified
MYNAVGIDVSKGKSTIAVLQPGGTVIRKPFDVSHTSQRLIELARYLGSLEGSTKIVMECTGRYHEPMLKALYEAGLFVSVVNPHLIKNFGNNSLRRVKSDPADARRIARYTLDNWAELRQYSGMDNTRTQLKTLNSQFSFFMKQKVAAKANLIALLDNTYPGVNKLFDSPPREDGSEKWVDYAYSFWHVDCVRKIGLKTFTERYKAFCKKHHYIFQQDKPEKLFNASKELVAVFPKEKTYKLLIQQSIQQLNLASGHVERLRQEMNALASTLPEYNTVMGIYGVGKTYGPQLIAEIGDVSRFTHREALTAFAGVDPGVDESGQHKSKSNRASKVGSARLRKTLFQIMTTLLQNAPEDDPVYRFLDKKRAQGKPYYVYMTAGANKFLRIYYGKVKECLRNLEQAE

SEQ ID NO: 332762 - protein, 345 aa, unidentified
MTEAYDGRQVVGMDLHRRRSVLVRMTEDGRKLETVRIENSPAALRAVIARAGNNPRVVVEATYGWYWAVDVLEAAGAEVHLAHPLGVKAFSYRRVKNDERDCADLADLLRLGRLPEAWIAPEPVRALREITRFRHKLAGQRTSCKDQVHAVLAKAGIPVTRSDIFGRGGGIWLDGLPLPQPYAGKIASLRALIAVLDGEIARLEEQAPAMLAGDRGYAAIRQLPGIGPVLGAVIAAEIGDITRFRNPGQLASWAGLTPRHYESDTRVIRGRVSKQGSRMLRWALVEAIQRQPAGTKPRQVKDAIIARRGPGARGIAKTAAARVMLTQVFYGMRDGYIRRAASQAA

SEQ ID NO: 332763 - protein, 350 aa, unidentified
MDKELYIGVDVSKQTLDLANYDGESIDWKNAHIKVSNNNAGFKKIGSWVAKVSKGVDIVLFCMEYTGLYTQNFRLWLEEKHYIYRMVEPRKMHRFEPDLDDGLRSLDRIKTDELDSFRIAIYCEQNHRKILRNPSKLPPPVYFKLKRLLAERKQTVKQSVLYKQQLHDICAYDTDLSVERKNGQLKTLNDALKGIDNEIDMYIKEDADISKNFSLLTSIPGIGRVVALETIVLTENFMAIDNPRKYACYIGVAPFKKESGTSVRKGSSVSKKGFKQAKADLSIACLVCMQHIPNIRDYWERKRKEKCSGIVFNAIKFKMILRMFAVIKRGTPYVETDNYRNGKNKQPGVN

SEQ ID NO: 332764 - protein, 342 aa, unidentified
MLYVGIDVAKNKHDVTALNVPGKTVLKPLTFSNNKAGFELLDLSLRQLNQDCLIALEDTGHYAFNLLNFLHEQGYKVYTYTPLLIKEFAKSLSLRKTKTDKKDAHGIALKLLSDPNREQFQHDNRQVELKILARHIHRLKKKQSDWKVQYTRCLDIIFPELDKIVGKHSEYTYQLLTCYPNPQKRLEAGFDKLIEIKRLTASKIQDILSVAPRSIGTTSPAREFEIIEIIKHYKRLIDKAETCVNDLMAEFNSVITTVTGIGGRLGAVILAEIRNIHAFDNPAQLQAFAGLDSSIYQSGQIDLAGRMIKRGSPHLRWALIQAAKACARFSPAFKAYLKTKLE

SEQ ID NO: 332765 - protein, 369 aa, unidentified
MTDSMATIVPVAALDVHAASIRLAAVHRDELLDERTLAFDHELVARQLRKLGVGRVCYEAGPTGFGLARHLQAAGFHCDVIAPGLVPWRSSDRVKTDKRDARKLALLYQGGMLQPIFVPSASQEAVRDLIRAREDARMDRMRARHRIGKFVLRHDRRMPSKGWTLTRRQWLGQQAFEHAAQQAAFDDYLLACDLVDRRIETMERHIDEWAMHDDFRELVGALRCFRGIDTLTAVGMVAEIGDFTRFKTAPAFMAYLGLVPSESSSGDQRRQGAITKTGNTHARRLMIEAAHNQRRRPARSGAITRRQVGQPAEVVARAQHAQLRLHKRWNRMASRGKHSNKIATSVARELAGFVWATATHQPLRATDTD

SEQ ID NO: 332766 - protein, 343 aa, unidentified
MQAITTIGLDIAKSVFQVHGVDAGGRLVVRRQLKRRHVLSFFQKVPPCLVGIEACASSHHWSRELQALGHTVRLMPPAYVKPYVKRHKNDATDAEAICEAVTRANMRFVATKTPEQQSCLMLHRTRHLFIRQQTAVINSIRAHLAEFGIVAPVGRQGVEQLLGIVADAHDKRLPEIARACVAALGAQLRMLKAQILQFDRMIIAWHRSSEASKRLDEIPGVGPALATALTASVADPKAFRSGRDFSAWIGLVPKQNSSGGKDRLGSISKQGDRYLRSLFTAGALAVIRYAKIHGTKHRPWLAALLARRPTKVAAIALANKLARMAWAMMAKGERYKQPAALAA

SEQ ID NO: 332767 - protein, 422 aa, unidentified
MHKERRWFVGIDWGSQEHVVSLCDDVGKRIGQRKFAHGGTGLTDMIAWLLKESGGKPGEIHVAIETPHGPIVEVLLERSCNVYSINPKQLDRFRDRFTVAGAKDDSRDADVLADSLRTDMRAFRKLSSVDPTIVELREWSRIDEELKAEHVRLTNRLKHQLWRYYPQIYELANDVGAGWFLDLLEALPTPEKAAKTREKTVARILKQHRIRRFDAAHVLGELRKPALTVAPGTIEAATAGIRILIARLRLINSQLVDAEQQLDRLCKKIVGPVAGEEGENTPGQKNEPRDAAILDSTPGIGRTVLASLLTEASDALQRRDYHALRALCGTAPVTKRSGKSCLVSRRRACNRRLRNAVHYWAHNAVQHDATSRAKYEALRAKGHGHARALRSVADRLLNVVCAMLRNGTSFDSSLASKKQAGA

SEQ ID NO: 332768 - protein, 416 aa, unidentified
MNAVGIDVSSRKSTVAVLRPLGEVVCLPFDVTHDIAVLASLAEKLKAIDGETRVVMEHTGRYYEAVAKALHEAGFFVCAVNPLLIKEYGANSLRRVKTDKADAIKIARYALDNWADLRDFTPMDAIRYDLKTLNRQFQLASKQRTASANNLIALLEQSFPGIRKCFDSPVRSDGTQKWVDFAHSFWHVDCVRKQPFAAFCERYRKWCKRHAYLFKLSNAEEVYALAKRAVVLTPKSKVVKVLVQEAANQLSSISRSVEVYRAEMDWLAAMLPEYPVVMAMYGVGKSYGPQLMAEIGDVRRFERKQALVAFAGIDPMPNQSGDKNVRSNKSSKRGSPYLRKTLFNVIRTYLQCAPQDEPVFQFLNRKRAEGKPFYVYMLAAANKFLRRYYAKLRDYFASLDTLQPVAPIPTILKAAL

SEQ ID NO: 332769 - protein, 315 aa, unidentified
MEHAAKEASFVGIDVSKDRLDIHVRPSGRAFAVARDGTGLDQLVDDLRHLAPALIVLEATGGFELTVAAALAGAALPLAVVNPRQVRDFARATGRLAKTDALDAQVIALFAERIRPEPRPIASADRQILAELIARRRQVVEMIGMETNRLHQARNPRVQRMLRATLKTLKAQLAELDRDIDDTIKRSPAWRAADDLLTSVPGVGDVTSHTLIADLPELGQLDRRRIAALVGVAPINRDSGQMRGRRTIAGGRIDVRNVLFMATLTATRWNPVISRHYQALVDRGRPKKVALVACMRRLLGILNAIIRTKTSWQCA

SEQ ID NO: 332770 - protein, 496 aa, unidentified
MNNKVNKVINKKNHQKNLLENLPPALYNNAMWSTSGRELTVFYPKRISLKSVPPEVNRSKNVNRVPSFKDLYKATSERTRPQNLNLKEVEAMFYIGIDWADDHHDVYIVDEQGTKVDSFSIKHDSEGMCFLRDKIRELSSLKEQVLISIETPKNLLVDFLLDEGYTVYAINPMSVARYRERYRTSGARDDSFDAMIIANIIRTDRDQHRAIMPNSVLARELKILTQDEQRLIRLKTKLLNQIQSCLKDYFPTALDLFCKLDQGVTLDFLLKYPRAQKISINELKKFLKKCGYPGVDEKAKEIFEKLSAPQIFVEEFTVRAKSRMLITLVSHLKTLLPQLDEYQKEIDRLFEQHPDCKVFQSLPGAGEKNAPRLLAQIGDNRERYTDRKNLQCDAGTAPVTDKSGKTEFVRMRFACRKVFRNVVYQFSFSTLTQSAWARKFYDCQRAKGNTNTKALRSLGNKWLKIIFHMWKDGVAYDENRHLADIMRHQLNAPSVA

SEQ ID NO: 332771 - protein, 387 aa, unidentified
MARKRTLSTLDTSIAYEAVGLDLAKEDTAIAAFGPDHEGPYLIDRMPYDKLYELLADMAPTLVAMEPCSGAHQIAEQIQELGHEVMMISGRHVQAWVKDHCNGQKTDLNDAFAILNLAYDRWLTPIRGKTREECRLLALQASYRQLKGQRTKTMVHVKATLHAWGFPIRAGSFNQKVLHELIDTNREAFGDEVVETLHLMINRVRDLDHDIATVLKLLTEATKRDPRASLLRSIPGFGILTMSRWCAVIGDIARFDSPKQTMAFIGLVPNNRITGHHTETSSGREARGQGKMSKRGDKMLRSLCILGAGALCLMVRNDRLPDCPFVASIKERLASPRPWFKVLVYVAAKLVRIATALLKYGETFSFEKAGISKAVLKQWELEQAKAA

SEQ ID NO: 332772 - protein, 343 aa, unidentified
MQTVTTIGLDIAKSVFQIHGIDAAGNVIVRRKLKRRYVLPFFQKLPPCLVGIEACASSHHWSRELQSFGHAVRLMPPAYVKPYIKRQKNDAADAEAICEAVTRPNMRFVATKTREQQSCLMLHRTRHLFIRQQTSVINAIRAHLAEFGIVAPVGRNGVEQLLDVVADVSDKRLPEISRACLLALGAQLRALKAQILNFDRQIIASHRSNEASKRLDEIPGVGPALATALVASVADPKAFRSGRDFSAWVGLVPKQHSSGGKDKLGSISKQGDRYLRSLFTAGALSVIRYAKFHGTKHRPWLTALLARRPTKVAAIALANKMARMAWAMMVRGDRYKEPVALAA

SEQ ID NO: 332773 - protein, 430 aa, unidentified
MQEKQTDVTKELNYAAFIGLDWSDKKHDVYLHVCATGEEESKVIASTPEALDEWILQLRERFESRPVAICLEQARGVLVYMLMAHDFITLYPINPAMSAKYRQAFTPSHAKDDPTDARIMMELLLHHRDRLSAWKPDNVQTRMLARLCEERRAAVNLRTKLVQKLNAKLKMYYPQALTLVGENLSSTLACDFLQKWPSLAEVKKAKPAKVRAFYYGHNCRSESLIQERIKLATTAKAATTDEAILIPLVASVKMLARLIRDLDPAIKDFDEQIKVLFAQHPDAAIFGNLPGAGDALAPRLLVSFGSDRDRYSSAAEVQQFSGIAPVTERSGQRQWVHRRWQCSKFTLQSFHEFAQHSMGWSAWAKAYYQFYKSKGKKHNTIVRSLAFKWIRILFACWKEHRPYDEAKYLETLQRRGSPLCQHLGRSALVA

SEQ ID NO: 332774 - protein, 359 aa, unidentified
MEQPTNQTNSVVGGVDTHKDLHIAAVVDEQDHVLGTHCFPATRLGYRQMLQWMQSFGVLRRVGVESTGTYGAGLLRHLQAAGAEVLEVTTPDKHDRRRRGKDDDLDAQNAAHAAFARRRVVTPKTRDGMIESLRVLKACRKTAVAARKIALQVIQSNIVCAPEELRDVLRNLTRMQLVRTLAAWRPDLSDYRNVTSAYRIALKSLGRRYLELHDEIADLDAMIAAIVEELAPSLVARNSIGRESAAQLLLTAGDNVDRIRSESSFAALCGVSPVPASSGKVIRHRLNRGGDRAANSALHVIAIGRLRTDPKTKAYIAKKIAEGHSKLEALRCLKRYIAREVYALVRERNREIAQTRIVT

SEQ ID NO: 332775 - protein, 361 aa, unidentified
MAQAKTWAAFDVHVSGVVAATLDRDSGELRVQRLPGRSDEVAAFAAGLAGPVRATYEAGPTGFVLARKLEAVGVDCLVCAPGLIPRGASDRVKTDRRDAERLVRLLAAGELHRVTVPSVEAEALRDLVRAREDLRGDLMRARHRLAKLLLRHEVRFEGPQANWTQAHLGWLAGVTLAQPASQRALEDYRGAVAALMIRREQLEAEIARALPASPWAQTARRLMCLRGIDTLTAAGLCAEIGDFHRFEHPAQVMSYLGVVPSEHSSGERRRRGPITKSGSQHARRLLVEAAWHYRRAPRVAGSLARRQRDGEPEILALSWKAQRRLHHVWNRMEQRHKRRTIIAVAAARELAGFCWAVATAD

SEQ ID NO: 332776 - protein, 410 aa, unidentified
MDVIIDRVCGLDVHRDTIKACVRVPGPGRERQQTIATFGTTTADLLALRDWLEQWQVTHVAMESTGEYWKPAYWVLEDQFQTLLVNAAHIKNVPGRKTDAKDGSWIAQLLECGLLQGSFVPPREIREIRDLTRYRKTLVGQRTEEVLRLHGVLQRAGIKLSSVASNILGVSGRAMIEAMIQGGKDPQALAELARGALRGKIPLLKKALEGRFTAHHGLMVSHMLGHIDYLEETIAALSRELEERLEPFEESIKLLKTIPGVQDRIAQMMVGETGVDMSRFPSAAHLCSWAGVCPGNHRSAGKRKPENTRKGGRWLKPALLEAVWAAVRENDSYLSAQYHRLVPHKGKKKAAIAVTHSMLEAAYYILRDRVPYQDLGPDFFLRRNKEAIQRRCLRQLQQLGLEVEVKPKAA

SEQ ID NO: 332777 - protein, 408 aa, unidentified
MNPLYVGIDVSSKSNVVYFMLPDGSKHCNFSVANSHTGSSQLVKRILSAMTSCSLDTVLIGLEATSVYGDNLVYFLREDAALARFNSKIHVLNPKQVSKFKEAYNDLPKNDLIDSFVIADCLRFGRINKEVYMGDYRYKALQNLTRARFFAVQNLVKEKQRFMNVLFKKYSTMTQEKVFSDAFSTTALAVYDEFESAEALANMDLHELTDFIIEKGKNRFPDPDAVAKAIQKAARSSYRLPKTMNDSVNQVLSISITSIKALEAQIKEFDKAIATQMELLPNVLISIPGIGPVFSAGIMAEIGDINRFHNQAQLAKYAGLAWKQHQSGDFEAQTTRLINSGNRFLKYYLCEAAFSLVRCDKEYSDFYHLKYKEVNRYQHKRALALTARKFVRLVFRLLKDNRLYTSAE

SEQ ID NO: 332778 - protein, 351 aa, unidentified
MKKTTIATIPSTTIGLDLSDRTFQFCELNAAGEIVDEGQLWLNRATVLGYLSTKSPGARVALETGGHSTWVREVIEQVGHEAVVANARELEAVTGRSHRSDHHDARQLARLARVDTALLNPVELRRTVEQADLFVIRARAALVEARTMLINFARGITKTMGHRLPSSTSHCFAERVRAAVPEALHPALLPLLTVLKQMEAQIEDYDDKIEKLAVEQYPETRWLQQVPGVGTLTSLTFVLTLGQPERFAHSRDVGAFLGLVPQRRQSGGQDPHLPISKCGDRYLRRLLVQCAHVLMNRYGPDCSLRQWALQHAQNSRTMKKRTVVAVARKLAVLLHRLWRRQEAFQPFPKVA

SEQ ID NO: 332779 - protein, 354 aa, unidentified
MMVIGVDPHKQTHTAVAVDELGRKQAQQTVQARRDGHQALIGWARAAAPQQRCWAVEDVRHVAGNLIRDLLAAGERVVFVPPRLMAGARRGGRERGKSDPIDALAIARAAQREGDDLPAGQLDEVTRPVRQLADYRDVLVKDRTAMISRLRWQLHDLDPALAPAQGTLNRAVTRRRLAAALAALPASTGQQIALSLLARITSLSQEITALEHQLAALVTPLAPALLAIPGVSVLTAARLLGETGDIRRFRTSAAFARHNGTAPIPVSSGTPAAEGPHRLNRAGNRQLNAALHRVSLTQARCHPPAQAYLNHRTTTRRETPKATRRAHKRHLSDTIYHAMTTDARHRDTTQPPTT

SEQ ID NO: 332780 - protein, 345 aa, unidentified
MQQSSKTIGVDLAKNVFLAAEADVHFHITGTRRLSRNQFHQYVIRQPATHIIMETCGTAHYWARVCQGLGHTVTLLPAQHVKPYVPRNKTDRNDAIALIEASRNPRIRPVPIKTEYQQAIQSLHRLREQWKLTRQSRINTLRGIMREFGISIPLGPKAAIKIAGSSLEHIPTIIQSAIRDVLQEIHLLDQRMSDVEAQLKRIAKQDEVVQGFMQISGIGLLTATAMRAAIQSPTQFKNGRQLSAWLGITPREYSSGEKRYLGRISKRGDSYLRTLLIHGARSVMARIKTLQRQQQPLNAIQQWAAKLEQRVGMNKATVALANKLARILWATWMHQRTFDGNYVAH

SEQ ID NO: 332781 - protein, 348 aa, unidentified
MNFYKKLHQYYCGIDLHARKMYVCIIDQQGNVKLHENIKTEPGSFLTLIAPFGDDIVVGVECVFCWYWLSDLCNHHQIPFVLGHALYMKAIHGGKTKNDKVDSFKLASLLRGGNFPVAYAYPAAEMRATRDLLRRRMYISRRCNELVAHIQNTNTQYNLPAFKKKLSRKYNHQGVAERFEDPAVQKSVETDLAMIEALNQILAKLEWHIEKTARQHDYHTLFLLRSVPGIGKILALVILYEIHDINRFPSVQDFSSYARLIRPTKESDGKWAGHANGKIGNHHLKWAIKEASILMLRDSEPAKKYVSRLERKYNKGKALGIFAHKLGRAIYFMLKNKEAFDMKRFFAE

SEQ ID NO: 332782 - protein, 396 aa, unidentified
MDRAWAGVDIGKQHHHAVVVDDQGTRVLSRRVANDQVALVELIGQVTELAGAVTWAVDLHSSEAALLVALLLAHDQTVVYVPGVMVNRAASAYRGAGKTDAKDAYVIAEQARMRRDLQVLGADDELIVELRLLVARRQDLRADRTRAVNRLHDRLVAVCPALERVLDLGNRGALVLLTGFQTPAALRAQGVAGLEAWLGSHKVRGAGKLAAAAVDAANAQTIRLPGEQVAACLIADLAEGVLALDEQIKQVDELIEGRFHRHPAAEVILSLPGMGVLLGAEFLAVTAGNMAAFGTPDRLASLAGVAPVPRDSGRVVGNLHRPQRYHRGLQRVFYTSALISIRCCPESRAFYDRKRAEGKRHTQAVLALARRRVNVLWALLRDQRCYQQTPPEPKAA

SEQ ID NO: 332783 - protein, 360 aa, unidentified
MNKIKPLDFTGDTIFCGLDVHKLSWRVNIRDKDIELKDFTQPPDAAILHKHLSKNYPGAHYKVGYEAGFCGFGIQRELAALGIECLVLNAADIPKGDKDRKQKNDKRDARSISQHLSNNRDVKTLYIPSTQWEHARSLVRNRQQQITDSTRCKCRIWQFLYFSSLSIPDKVETGQYWSGKFITKLQQMDCNNSAELKAALDIKLQDYLHKRKLLLESTRAIRKMYRQSSFWPLMSLILTIPGIGEINAAIILFELQDIFRFKTFDNLCSYVGLIPDTDDSGDTRRNKGLTHRRNNFLREAIIESSWVLVKKDPAMLMKYKDYCKRMHKNKAIIKIARHLMARINYVLRKQTPYVSGLVAG

SEQ ID NO: 332784 - protein, 340 aa, unidentified
MKQPRYYIGLDVHKERTTCVVRDRIGNILIECETATLYQEIFPKLQPYLTQGIIGLEASTSYYTLYQQFLHHGYTIKVANTIQLRQLIAKNDKLDARRLAEMLRLGTFPSSYIPDEKIQRMRSLIQTRHSFMEEKVRCNNRIQAFLDRNGVLMPSHRAFSKKWRYALMQYMGSGRVSTELRYAYDHFVFLEKKMEQLDQEIQGYARTHWTKEYELLQSITGIGPVLACYAIAHILPIKRFDSAKKLRRYAGVVPTCKESGNKKSPGHIPKTSSRRLLRWALIQAANTAGKTNTSLGRYYRKKKKQKKNNGIAKVAVASSLIDIMYKVLTTKQPYTPKTMC

SEQ ID NO: 332785 - protein, 345 aa, unidentified
MNKLSVVGLDLAKNVFQVHGINTDGEVVVRKQLRRSEMRKYFARLEPCLIGMEACGGAHFWSRELTRLGHSVRMMAPAFVKPYLKSNKNDRNDAEAICEAVQRPSMRFVQPKMPEQQAVLHLHHGRQLLVRQRVALSNHMRGVLSEYGIVVPQGVKVLSRHLPEILEDAENALPILARHLLAELKAEHDQLLERVDRFEKQLKAWHASSVVSQRLASIPGIGVLTATALAATVGEGQDFKNGRQLAAYLGLVPRQASSGGKDRLLGISKRGDGYLRGLLIHGARAVIHHIRRRLRAGRPGGNPWVEQLLQRCHVNEAAVALANKMARTAWVLLARNETYCPAHPA

SEQ ID NO: 332786 - protein, 407 aa, unidentified
MEVLYPRCAGLDVHAKSVTACARVASGADVTYQQVTVPTTTQGLLELAEWLTTHACTHVAMEATGVYWKPVWHVLEDQFTLVLANAMHIRNVPGRKSDTNDATWIADLLAHGLIRGSFVPPAPIQELRDLTRTRKQLVAEIARHTLRIQKTLEDANLKLTHVVSDILGASGRAILKALIAGETDPARLADLTTARHNASRAQLIAALHGRVTPHHRFLIELHLTQIEALDAAVHKLEGHLGDALEPFRAAATRLTTMPGLSDTAARVLIAEIGVDMTRFPSPGHLVSWAGLCTRLDESAGKRHSTRIRHATPWLKTTLIQAAWAATRKKGSYLQAQFLRVKTRRGPKKAIVAVAASMLTAAYFIIRDGVEYHDLGGRYFVERDKTQLTKRLLRRLHELGVEVEIKAA

SEQ ID NO: 332787 - protein, 349 aa, unidentified
MAMTIVEAAPGITGGVDTHLDTHVAAALDPLGRLVGTESFDADAAGYKELFAWLESFGEVTKIGIEGTSSYGTGLVRFLRRKGVEIVEVNRQNRQSRRNQGKSDPLDAIEAARAAISGRASGSAKSKDGPVEAIRVLVIAKRSARQARVKAITQMRHLGFTAPEQLHCRLKGLTVIAMVAECAGMRPGRSGDPVTAATKASLSSLAHRVQSLDVELAGLDEKIESLLVAAVPELLARFGVGPDTAAALLVAAGDNPERLHSEAAWAHLCGVSPIPADSGKSAGHLRHHQGGDRQANSALWRIVMVRIAHDPETTAYFERRVKEGRTKRDVIRILKRYVAREVYRYLPRG

SEQ ID NO: 332788 - protein, 460 aa, unidentified
MSKLDQPKAQLAEARPFASMTRLNPNAAGVDIGAREILVCVPGEANTQLVRSFGVYTPDLQTIAAWLKEHHIETVAMESTGVYWIPLFETLEAAGFRCHLISARSLRRIPGRKSDVLDCQWIQTLHSYGLLESSFRPEADLVALRTLLRHRAQLLEHRAPHILHMQKALLQMNIRLPQAVSDVTGETGLRILRAIVAGERDPHKLAALRDYRCKKDEAEIAQALTGTWREEHLFVLKQSLEMYDFYTRQIEACDAEIERAYGQVRSHDDGSDDDDLPPLPDHKRKSHSKNAPRRQGDIRKHLKRICGVDVAAIHGLGVSLAQQAVMETGTDMSKFPTEKHFCSWLGLAPKREISGGKVLRSATLKTRNRAGQTFRKAAASVMRSDCVFGVFYRRMKARLGPAQAAVATAHFIARVYYRMLKYKVEYQPANVEAYRQKYRQQQVKSLQRKAARLGFQLTPA

SEQ ID NO: 332789 - protein, 332 aa, unidentified
MQKDFYIGVDISKKTIDVAIYKKEKASKASVCEKFSNSPDGFKEMKRWLRKCGVSLTNALFCMEATGHYTYDLCLFLEQQEGSYSVQSPLHLKRSFGLTHGKNDKVDAYRIASYAYLHREDIKLSKLATNSIRKLKALMAERKSLVVEIARCKAQLKEVGSHSSSPGTIKRTKELLEFLETQVQDIEKDMAQTIDSDAELKNNYQLLLTISGIGIVNAVNTIVATHNFKMFDNARQYASYIGVAPFEHTSGTSVRGKTHVEPGAKMLKADLTGAVRTCINHDKEIQKYYERKIAEGKSYGVVANAIKFKLLLRMFAVIKRGTPFVKKADHLI

SEQ ID NO: 332790 - protein, 367 aa, unidentified
MRKVDTNFAKGKSIYVGIDVHKKDWTVHIMCEGEVLYHGTISPDAERLVQLIKRYKAKSVHTVYEAGFSGYWLHDALEAAGFDSMVTPPSLVPRMGGRVKTDRRDSKKLATLLMNGFLRRLHILTPEERAHRQLVRTRNQIERNRKRTQAQIKSMLIFYGVRSPKGIRERWSTAYLQWVEHLQWDYPELKASMETLVKLYYYLDEQLKELTKKIMDLAETEKYRERVGLLIKIPGIGIYTAMSLLVELQDVERFRKSEHIASYLGLTPSQRSSGERIRMGGITHCGNPHLRTRFIESSWTLIRYDKNMRSTYERLKHQTGSGTKAIVGVARRLSTRVRRVLLDKSPYTLYDGGRESISKGSRRFIIK

SEQ ID NO: 332791 - protein, 351 aa, unidentified
MTNGITTMLTIGIDLGDLRSEVCMLGNDGEVKRRFSVATTREGLEKKLGSLVRARVVIEVGTHSPWVSRWLEAKGHEVVVANARAVRSIAESDRKTDRNDAEQLARLGRVDPKLLHPIRHRGEAVQRHRMLLAVRDHLVRTRSSFVVQARGLAKALGERLPKCKAETFAKKMQREVGTDVFPAMDVIVAIVEQLDAQIAALDAQLEELAGSAYPETELLRQITGVGLITALAFVLTLEDPRRFAHSRVVGAFLGLTVRKRQSGTRDPALRITKAGDEFLRRLLLQCAHYILSRGPDCDLRRFGERIMARHGRSKAAVAVARKLAVRLHHLWVNGEVYQPLYDAERKALAAT

SEQ ID NO: 332792 - protein, 349 aa, unidentified
MRRPKDKLIAGLDLHSNNVMIGVMNQEGKRVAHRKVECNLRHVTEFLAPFKTQMQSMAVESTFNWYWLVDGLRTEGYPIDLANPAKIEQYSGLKHVDDKDDAFHLADLQRLNILPKAHVYDPQLRPVRDLLRRRMSLVHQRTALLLSFKSLHARTTGQPLDLSDAKKMEPQRAPKLYEHPANQLIAQVQAEHIGALKKSIERLEKAVHACAREIPFYDRLLSLPGVGRILGMTITMEVGDIKRFKSDGNFASYCRMVDANRMSNGKCKADNNSKCGNKYLSWAFIEAANFARRYDANCRRWYDRKAAKTSKVIATKALGCKLAKAAWFVMAQQCTYDEKRIFPELANKR

SEQ ID NO: 332793 - protein, 318 aa, unidentified
MTHSIGIDVGKEELVACIRDTDGKSAMPAPFPNTSIGLKKLVVHFEDNNIGTDDPILLESTGPYHWQAARTLADRGYFVKVANPLHTKQIARLSIRKRKTDNVDASHLAFLASQQYGYRFIETEEMARKKALVRHFWKLRMTATNLMIHERYLKEYRHISRASISALLVKRCEKLKREIVAEWSAGNDVKYLDSIPGITPFLAATILAELMPLERFERIDQIIAFAGLDPSVKQTGGKRGSHGPISKRGSPTLREALFLAAFGSFSKGPMRGIYKRYKDRGLHHNAILCVLARKILRIAVALLKKRRVFDPARLLTGT

SEQ ID NO: 332794 - protein, 414 aa, unidentified
MEVVYERCCGLDVHKQSVVACLIVPGPTGAPRKQVRTFGTMTADLLELSDWLTSASVTRVAMESTGVYWKPIWNLLEGSFELVLANARHIKAVPGRKTDVRDCEWIADLLRHGLLNGSFVPDRDQRELRELTRYRTSLVRERTAEANRLQKTLEGANIKLASVATDILGVSGRAMLAALTDGTSDAAAMAELAKGRLRAKIPQLEQALAGRFGPHQRFMVAQQLAHLDFLDAAIARVSTEVAERVREDEPAIAHLDTIPGVGRYVAEALVAEIGTDMTRFPSANHLASWAGMCPGNNESAGKRRSGKTRKGSPWLRSLLVQAAHAAARKRNTYLSALYRRLAARRGKSRAAVAVGHAILVIAYHLLERGTDYQDLGPRYFEERDRDAEQHRLVRRLEALGNTVSLKPKDQDPAA

SEQ ID NO: 332795 - protein, 383 aa, unidentified
MTEATVSSKVTLHCALELSKSSWLLAIQFPDRPQPSLYRIKGGDAEGLMSQLLIARDRCAKASGKVCSITLCYEVGYDAFWLARFLMARGIECLVVDPASLQVNRRARRAKTDRIDVGMLLRALISWCRGERHVWSVVRIPSVDEEDVRRSHRERGRLIHERTSHINRIKGLLFAQGIRGLNIKARYNKLKLNELVTGDGRALPPRLLNEIAREIMRLALVQDQISAIDRERDEAPTPCKATEKKRIQLAHLKGIGPAISAVMSREVYYRQFNNRRQVASFLGLATSPYDSGDMERSQGISRTGRGQVRAIMIQAAWLWTKHQPKSTLTRWFLERTQGQSGRIKRIMIVAVARKLAIALWRYVEHGLVPQGAILELPTPKSAR

SEQ ID NO: 332796 - protein, 343 aa, unidentified
MEHIGIDVHKVESQICILTESGEIVERRIRTERERFAAVLGGRAPAKIVIEASTESEWVSRCLEKLGHEVVVADPNFAAMYATRSRKVKTDRRDARALAEACRLGAYRPAHRTSDRQRHVRAQLSVRDALVQTRTRYISLVGALLRREGFRIASGAAEGFAKRVEKLALPGPLKSEIAPLLAVLLSVNQQLAWVDGRLEHLAQSEETVARLCTAPSVGPVTAAAFASTIDDVNRFRNGHQVMAYLGLTPSEMSSGEKQEKGHIAKAGNVRMRRLLVQVAVSILRLRSLRTEALRTWANSIAVRRGKKIAKVALARRMAGVLYAMMRDGTCYVAAQPREVKQAA

SEQ ID NO: 332797 - protein, 402 aa, unidentified
MQVYSKYVGMDVHKETIAVSVAEPLGGEVRYLGEIHNTPEAVAKLVRQLRKGDAKLSCCYEAGPCGYGLHRQLLEMGVANQVVAPSLIPKKPGDRVKTDRRDSLTLARLLRAGELTAVWVPDMPQEALRDLTRAREDLKHLECQAKQRLQAFLLRHGKRYGGETKWTQMHYHWLETVKFDQPLQQIVFQEYVDTTQSLTKRVAALDKQIEGAGSASGFGPVIEGLMALRGIARLTATTIMAEIGDLHRFTTAPQLMGYLGLVPSEHSSGPHQCRGGITKTGNGHVRRVLVEAAWTYRHPARKTTYLQSRAKHTTETVQEIAWKAQVRLCGRYRLLEGKGKLKVKVCTAIARELAGFIWAVGQAFPEPEVNASGQGRGRSVSAAERATVGEPSALLCRRPAME

SEQ ID NO: 332798 - protein, 338 aa, unidentified
MQFKRVAVDTSKSVFTIHAVDNDEHPVVRRDLSRSQFQTFFSKLPPTVVVLEATGGSHHWGRLLSSMGHEVKLIPPQYVKPFVKRSKNDRNDAEAISEAASRPNMRFVPLKSAEMQADGIELNSRQILVEQRTALVNSLRGHAAEFGVVAAKGLHRVEKLLEVIEASLDVPPTAKTALAQLGKQIAYLDSQLEEIDRRLVTQQKSHPVAQLLSAVPGIGAISSLTLALQVDPKQFKSGRHFSAWLGLTPKQHSSGGKHRLGGISRAGHERIRQLLVVGAMAVVRHAVNGSKAATSWLLSLLERRPRKLAAVALANKMARIAWAMMMSGEEYRHPARTA

SEQ ID NO: 332799 - protein, 335 aa, unidentified
MQIYGIDFAKEKFDVSFLAPTLKNVSNKPAHKVVRNNESGITKFIKTLPADAVLVAEHTGVYGDRLLKHCTESHINIAYVGGYVIHTYKSAPDRAKTDMLDCAVLREFGERFTDKLIYKTFPKEELYELKQLARHRTMLVEDRKRYVTADKGEDCRPCRSMQVKESMERIMKILTEEIARTEKQMLDIIRAHEELSRNYDIITSVKGVGLITAVELIVKTENFTTIKTASQYAAYAGTAPYEKSSGKMNKGAHVSKIGNRRSKTLLYICAESARMHNKEIKLYYERRTIIDKKPHFYVLNAIVNKLLKIIFSLVTKGQMFDSDFIRKDPRVIKDN

SEQ ID NO: 332800 - protein, 343 aa, unidentified
MLHVGVDLHKRRAQMAVVDDVGTVLSNRSVVCERESVRGFFSHLKEPAQVVVEATSNWYWFCDLLEEMEIPVLLAHPLKTKAIAAARIKTDKLDAATLAHLLRADLVPRAHLSSHQARLDRELLRHRTVLVRLRTGVKNRIHALLAKENLVYPKGGVFMKHGRQWLASLALQPVQRAIVDRMLTLVQVLEMLIEQVSKEIRVRAEDDRAARLLCSIPGVSYYTALLIAAEIDGVNRFPDARHLCSYAGLVPSVRASGEHSRLGHITKQGSPWLRWILVEICQKAAGRPDFLGAHYRRVARRKGNGAAKVATARKMLKAIYHMLRQGINFGVVSQSMTAKGASS

SEQ ID NO: 332801 - protein, 417 aa, unidentified
MRTLRGSSLEWTSRTEEVPLRELVAVPVDVGKSSAMVMACDFTGRVLLPAVEFALTREGVARMLARVQAAVPAGAQLVRVGVEAAGHYHLPMIAAGVWPEGWQVVELNPAHVSAQRRVNGQRGVKTDRVDLVAIADLLLAGRGSPVVACGEPLIELAAWVAHRRRRGEVRTATKNQLLTQLDRAFPGLCLALADVLGTKVGRLVAAHFADPARLARLGPDRFREFAARRGVRVNRRVAARLVEAARTALPTGQAVIARQILQADLALLGDLEAQIATAEERIAALLPATGYHVLTTTPGWGVTRAADYAAALGPHARWGTPAGVYRAAGLTPAVYASAGRRRDGAISREGSVYLRRALIGLGMGLWQKDPAARAYAQALRERGKPGGIIACALAHRACKIAFAMVRDQAPYDPARWS

SEQ ID NO: 332802 - protein, 387 aa, unidentified
MNRSNHRVVGLDVHPDSFAGAILEGSDPWQARVKSTSTRVALRLLEKWALRHTRESDCLVLESSANAFAVAERLGRLKRKVLILDSHRAGKVGQSYCATDRVDAIKIARIYLSALSPIVWQPDQKTRERREVFSAYQAVVKEGTRLKQQIKSMLNEHCVRLEKGFRLSHPTAIERLLQRRKWTEAQKMLLEQLHAGLVGARSRRQQLRRYMAREILAEKELLRLTRLCGINLITLYGLIAAIGDINRFANSRKLVAYLGLNPSVCQSGEWEGATALKRHGRGAIRALLIQSAKKLLQVNNPLQKWGLAIALRRGRNKAAVAVARKLCVAVWHVMQGHVIGAIERLDTLHTKLHKLATDLGVPAIKALGYETKEAFVQKKLYLLQSYP

SEQ ID NO: 332803 - protein, 314 aa, unidentified
MKSQEIKYVVIDCGKKTLEVIRIGDNSLHQRQQFSTTEIGISKLINWLNPNDVVGLEAGSQSFRIAKSTLNKGIQVIVLNPGDLATIYQSLKKTDKEDSLKIARLIQRFPIEELPVVPIPNDEEEDNRRLCTEQENWTRQLTQSKNRLHSLFTQAGLTHITKKHLRTKANREISVASLPSRYQKEAERILKVLDLVEQNLKLIEEEIKEALKRNKAYAQTIMSMPGVGMTTSLAIMSYMGNCKRFSSAKQAAYYVGLVPRVDISGDSAYYGRIVNRGCHSIRRVIVQAAWSLVRCQYGGKIKEFYQRLYPKKGD

SEQ ID NO: 332804 - protein, 495 aa, unidentified
MDSINRTSIGIDVSDRTAWVCVMTRSGVVDEFKIVLDEDSIRTRVPFVARESGVVVFETGPRSAWLKRVFEKLEMRVVVADARKLPTISGSPTKTDRNDARHLARLGLADELLDGPSAERLLVDTYVRSPVHQRIYAELTLRDLLVRRRGDYIRFVRSTVKGTGVTLKGSSPTFHEQRHEVGKELREVLDPAFDVIEATNGAIARMDARLEVLAQSDPLAARLDAIPGVGPITALAFVVVIGDPKRFSNVRNVGAYLGLVVKRNQSGQMDPSLGISKCGNGFTRRLLVQCATHILGPHGRDCALRRWGLRFIAEKGDRAKKKARVAVARKLAVQMLSVWKREVAWVPFPEPPTSPVDVPSATDGGADCASPLDATELALREIAAAPTAPIQPCAHSLGVRTDESADSRRNVDPSGSRARAPKPARTQTPASADGERGCPQPGARVAPAPGPATSPPGSATPARPPAHMDAPRKKTRAESSVTGVGPQPPPARHAP

SEQ ID NO: 332805 - protein, 315 aa, unidentified
MNYAGIDVSHKELVIVVSVQGKTHKAKTFENTASGHKAIIQLLSKLKGDSRVCIEATGVYHFDLAVALSRAEGIEVMVVNPKASHNFAKVLMKRSKTDAVDAELLATYCERMPFEAWQRPADENIALRAIARRIAALTKLKTQTKNQLHALKATEETPVLVIEYTEELIEVVDKQIQVHRDSARKLIQQHDELAEAFALITGIKGIAMASAVQLLGELMILPKDMNAKQWVAYAGLDPRQFESGSSVTKKPRISKAGNKFVRRALYMPALVATCHEPHIKGYYTHMIQDNGLKEDTGCMRGNAQTFTRHPWHAKS

SEQ ID NO: 332806 - protein, 459 aa, unidentified
MPRRKNTHKGKASRHLLERVQHPDAAGIDIGAEELVAAVPHERDEEPVRTFSTFTGELHALRDWLLACGIKTVALESTGNYWIATYSILEEAGIEVFLVNARHVKAVPGKKTDVCDAQWLQQLHAAGLLAKSFRPAKEIVPLRYLLRHRSHLIESAGRELQLMQKVCNEMNLHLHHVLSDLDGVSAQRILGAILQGERDPEKLASLCDRRVRAPRARVIASLEGDYREEYLFVLGQCQQRWEQTQATITALDEKLAGLLAAFEAPCQGTAPTAPWQQRRLHKNSPNLPIYDEAWRFYGVDLSSVAGVSAATLAVCMTELGTGAQIKAAFHSNQAFCSWLALCPDNRISGGKVLKAKTRQVKSRVAGALRLAAQALSHSKSALGEYCRRMKGRLGKAEGITATAHKLARILYAMITTRRPYDEKVAFAITPAKLQRRLNHLHAQAAKFGFQLVPQPQPLT

SEQ ID NO: 332807 - protein, 344 aa, unidentified
MSEVIIIGLDIAKHVFHAHGADERGQAIFSKRISRGKLLDFFAAQPSCTVALEACGGAHHWARQLTRLGHEVRLIPPAYVKPFVKRQKNDAIDAEAICEAAQRPSMRFVAVKSEQQQAAGLVFRTRDLLVRQRTQLINAIRGHLAEYGWVAPKGPSHVAMLADLIEEEAMASSLPKATHAMFRLMLDLLAGLNGKIADLDKEIARRAREDEVSRRLMTVPGIGPIFATAIAALAPPAETFAKGRDFAAWLGLTPLQRSTGGKQKLGATFKMGERTLRRLLIIGSSAVVQQASKRGAPRGSWLEQMLARKPRMLVTVALANKMARIVWALLVKQENYRAPVAAKA

SEQ ID NO: 332808 - protein, 429 aa, unidentified
MKTNSKCQTKTERAGKARKARGPVQRDAKEVMAELVAKLSQKLEPRAAKAEQVGGPAESVPGPNRERLTVGVDLGDKRSNFCILGLDGEKLTEGELQTTQEGFAEFFQSMAGARVVMEVGTHSAWARDVVASCGHEVLVANPRQMEGPKKRKRKNDRIDAHKLARVGRLDPQSLFPIHHRSVEVRQDLMAVRARDAVVAVRKDLINAARGLVKSVGGRLPKCSSPSFPHKAEEALPEAVREVLLPLVQMVERLSSCIKVYDETIEKLGSEKYPHTKLLRQVKGVGPITALAYVLTLENPERFAKSRDVGAYLGLVPKQEDSGDRQPQLRITKMGDMMVRRLLVGSAHSILGRFGPDTDLRRYGLRLSERGGKNAKKRAVVAVARKLAVLLHCLWVSGEVYEPLHHTLPEGTAVEATHRAPAESTQEKAA

SEQ ID NO: 332809 - protein, 344 aa, unidentified
MTLLSVGIDVSKETLHVAYGSTPEEMTFLGAFANKSDSFQTLAEAVESKAQQLGCDQILLVMEPTGGYEQRLACFAHQRGWLVSLPNPHQVRQWAEGQGIRAKTDRQDGLLLGQYGLQGPVLLWQPLAEHVALLSDLLDRRQDLEHMRQQERNRAEALQGQGRYYGVAKSSIENTLARLETSLQEIEQAITEHVKQHPDLTQQRKLLRQVPGVGEKNVLPLLVLCARWSSLTHGQGTAKGLTSYAGLDPQPYDSGRTVHKRARISRKGNPTLRHLLFMGALGGIRSPNSALRHFYNRLLAAGKPKMVALVAASRKILLWAWAVFRNQSPFDPQRAQARQITYSI

SEQ ID NO: 332810 - protein, 356 aa, unidentified
MQAKIKALVDDYDRFIGIDHHKRTSYLTVKDREGNTLKRGNIPTSKNALSLFLDDGENENGSASIAVFEAGRCYRPMYRWLSEMVETVVLAHPGGLKIVSDTVYKDDKLDSEKLADLLMLGMVPEAHVASDEAWDRRRVIRHRVLMVQMQTKVKNRIHSTIDLYPDAKPTRPEVSDIFGKLGMHWLQRLELPLQERRRLDELLDILDFFKKKVSASDALVRNIVRQDKRCQLLKTIPGIGDFFAALIAAEVDDINRFPSSKHFVSSIGLVPGRDDSGDRERPGRMHKKGNSYLRWAVVEAAIPATRSNLALKNHYDRILARKGRKAGPNIAKVAVARKLAEIIYRILKDERPYEHR

SEQ ID NO: 332811 - protein, 316 aa, unidentified
MASFLGIDVSSLSLDAAVRPQGIKMHLSNDPTGFEALLESLRKLSIKRVLLEATGGYERDVMRFLQDAGYKVIRVNPRRARSFADSLGIKAKTDAIDAEVLAHYAEVIPDQPSLRISPERALLRELLQQRDRLVQQRDDDLRRLKQVQSTAVANYLNANLKHFKAQIKLVEREIEQQTAMLNDERVTQLIKVKGIGMVTAGKLVALLPELGRVESREIASLVGVAPFNHDSGKFMGKRSISGGRFAVRRSLYMACLVAMRYNPALKARYQSLRERGKLPKVAIVACMRTFIVRLNAMLRTGTSWLDLVLPQPESTT

SEQ ID NO: 332812 - protein, 357 aa, unidentified
MSKSIRNLLTVTRVGLDLAKRVFQVHAVDAKGEIVVARKLTRSQLIPFFAALPPCVVAMEACASAHHWGRALIELGHEVRLIPPAHVKPYVRRNKNDPVDAAAICEAVGRPGQRFVPVRSIDNQAELMRHRARELLAGQRTAALNALRGHLAEIGLIAPQGAHHAYGLKRMAADGFNENGEIVVPDCVRGALRSLVGQIDALDEAIGAIDRELAASVKADETAKRLMTIPGVGPVTASAIMATIQDASAFASGREFAAFLGLTPRQNSTGGKTRLGRITKMGDRYLRKLLVVGACATLRHRKGHNDAMRLWASGMLERKTVKYKFKLTAVALANKVARIVFALMTRGGQYDDRPVAA

SEQ ID NO: 332813 - protein, 339 aa, unidentified
MHIKTIGLDLAKSVFQAHGIDEAGDAVLVKKLHRKQMIPFFSKLPPCLIGVEACATAHHWARTLSAMGHDVRIMPPSYVKGYVKRGKSDAIDAEAICESVGRPTMRFVPMKTVEQQSILMAHRTRALIVRQRTMAANALRAHLAEFGLVANPGIANLVKVADKAFADATLPPYAHRALEILIRRMAELTDEICALDQELKAWHASNEASRRLAAIPGIGVITATAIAATVTDPDQFSSGRQFAAWLGLTPKQHSTGGKTRLGGISKQGDRYLRRLLVVGATAVMRHAKRNPTPMTDWVNNLLEKKPFRLVSVALANKLARIAWAVLTRGETYRPFGLAA

SEQ ID NO: 332814 - protein, 348 aa, unidentified
MDHIIRIGMDTSKHVFQLHGVNAAEEPVLRRKLRRNDMVVFFERLAPTIIAIEAAGASHHWARLLRSFGHEVKLIAPQLVKPYVKRGKNDAADAEALCEAMSRPTMRFVPVKTAERQAALMLLGLRDRLVRNRTQLANAIRGYAAEFGLAAAKGIAHLAPLLARIQSDESLPGLARELFAAHAQEYAQLQAQIDEVEEKLMAWHKTNPGSRRLAQIPGIGPIGAAMLIMKTPAPEMFRSGRQFAAWIGLTPKDHSTAGKVRLGVITRAGDEGLRSALVVGATAVIRHLRNGKGRSMLSAWVEQLLKRKPPKLAAVALANKLARIAWKLMVTGETYTAKPRPIASAGIA

SEQ ID NO: 332815 - protein, 347 aa, unidentified
MRKIAYLSMDVHARNCVLGDMDGNGKFRGNRSFTTCEINIIKALKAIKAKKKYLVMEAGPMSNWAAQVANDHTTKVFICDPRENALIYKSSHKHDKVDTKKLCRLLRLNEFKEVYRPENDQRALFKAAVQHYQDFRDQLKALKQKTKAMYRQWGIINVFTDSVYSVSGRDKFLQQVKHRPIYLQLKRLYTLLDATAAMKQEAEKSMASLGRNYPEIKEFKKMPGMGIIGPHTFDAYIQTPHRFAKRNRLWKYCRLAVTDRTSDGKPLGFKRLDKSGVSELKAVSYRAFLSAMKGDNEVRRFYLNSLQRTHDRKHARLNTQRKILSVMLSIWKKGEAYRAELFLDPSI

SEQ ID NO: 332816 - protein, 384 aa, unidentified
MPMRQVCGLDVHKDSVFVCILNENGIVFQEKYGVLTTELEQMLEVMMQHDVTEVCMESTSVYWMPIWRVLENYIPKLMLVNPYFIKQLPGKKSDVKDAEWIATCLLKDLIKGSYVPEDRIQQLRQYDRRIFDLNKEITYKLTKLDMALQRCNIRISNYVATTDGKSYQDVVRLISEGKTSPEELAKVIHGRTVNKHGRETIVGALTGVISETDMDIIRQLREEILLDQKHKDECQSKMDELCQKWFPTQLKNLQTIPGVKTRSATAIIAELGTDMSSFEDAAHLVSWCGLKPRNEESAGKIKSRSITHGNKYLRKTLIECSWASSKTQGCFYNKFSYIQTVVRRKNKMKVQVAIARKMLSAIWFILHDNVAYRDYTPDIASADE

SEQ ID NO: 332817 - protein, 388 aa, unidentified
MQTVADRPEAPTAIRTDLGAIFVSLELSRSTWLITSLSPGGGEKMSKQVVRGGDVAELLERFARLREKARARTGKVFPFVVIQEAGLDGFWIDRALQNEGIESHVVDPASIATSRRRRRAKTDGIDGEALVRALLAYKRGEPRVCAMVKAPTPEEEDRRRLCRERKVLIGERVQHVNRVKGLLFSQGISGYEPLRRDRRERLDTLQTGDGRLLPDHLKAQVCRELDRLELLLEQIKAVEAERDVLLAAQQVAAPAPAAMLLDIKGIGPEFAAILWSEGLFRHFDNRRQVASYAGLAPTPWQSGSVDREQGVSKAGNPRLRTTLIQLAWLWLRHQPQSALALWFEERVRRNGGRLKKTTIVALARKLLVALWKYVTAGVVIEGAVMKRT

SEQ ID NO: 332818 - protein, 355 aa, unidentified
MIDQQPEKEVFAGVDTHTDTHHAAVVDPLGRPVADREFPATTQGYRALLMWLIMFGHVQAVGVECTGSYGAGLTTVLSAADLVVVEVNVPDRGTRHARGKSDPIDAYAAARAAASGRATAIPKSHTGTVEALRQLRVARASAIKARTQAINQLIGLRVTAPEPLRASLTGLTRTTLVNCCLRLRPGANLTCPTDAARYALRQLALRIRMLTEEIDEVTERLAMLTTSAGPELVALFGVGTETAGQLLVTAGDNPERLRTEAAFAALCGAAPVPASSGRTDRHQLSRGGDRQANRALHMIAVVRMRYCPRTRAYVARRTQQGLTKKDIIRCLKRFIAREVYRALTRTHASGTTSTT

SEQ ID NO: 332819 - protein, 354 aa, unidentified
MNAKKLTIGIDLGDRKHSACVLSAGGEILAEEVITNTRECLTIFAQRYRGATIILETGTHSPWVSRLFEALGHTVHVANARKVRAIATSLTKSDEEDARMLARLGRADPQLLSPIKHRSEAAQRGLLRLKVREALVRSRVNQMNSVRFLLKSLGLPVTSGSKAMTFTRRLRPLLDAATAHLVEPLLTMIDALNAKIKDLDTELEVVATERYPMTQRLRQVPGVGPLTALGFVLTIEDPGRFPHTRDVGAYLGLVPRRDQSGNTDKQLPITKAGNVQLRCLLVNCAHYILGPFGPPCHLRAAGERIAARGGKSAKKRAVIAVARKLAVTLLALWKTGADYHALPPALSLPNGAAA

SEQ ID NO: 332820 - protein, 370 aa, unidentified
MSEGTTRYLGLDVHKATITVAVAEESGPPTVYGTIANEAAAVRKLVRQLGREVRLVAAYEAGPTGYALHRELARLGVECTVAAPSLIPIRPGDRRIKTDSRDALGLARLLRNGDLTPVWVPDPEHEALRDLVRARYDAKDDLRRARHRLSKFLLRQGICSPPGIKAWSARYYAWLNQLSFDQPASQVVLDDYRVVEQTAHERVRRLELALRRCAEKSPQLPLIAALQVLRGIAFLSAVTIAAEVGDFRRFASAPGFMCFTGLVTSEHSSGSSRHQGGITRTGNRYLRHVMVQGAHNARYVPNLRGAVQQRLDGLPPDLVELALRAQQRLHSRYRHLDQRIGRPKAVTAVARELAGFVWAVGRRMSEAPAA

SEQ ID NO: 332821 - protein, 341 aa, unidentified
MAKNVYFVGLDIACDDFVASIYQSPKQSIITKEGIKNTFDGFNMFIAWLKEHGLSKTNSIICMEATGVYNEAIAHYLVSQGFRVSVEPPLKVKRAFDPVGHKTDPVDSRQIAEYAYRYSDELRFWKPRDEIMEKTKHLLTAREQFTKQSTAIKNAMKAYEKHIVQVSLIVKAHRQTLREIRKHITEIDKELDRIIGQNPSISKMNNQLKSIPGFGLLLSTSLITLTGAFSDISHHKTLAAFLGICPYQHQSGKSIYRQPHMRSFGPAYPRKLLTLAARSVATHNDLFKKYYTRKLAEGKDKKLVLNNISNKLIKLACALIRNNSRYTATYRSVNPMFLDIS

SEQ ID NO: 332822 - protein, 456 aa, unidentified
MGHARARKIPARLVEDEEYQLRYERVAGIDIAKAKADVCTRLPPQREGGRRASRLEEVPASAKAILALAARLAADGVELVMMESTSDYWRIWYYLLEAAGLNVQLVNPAHARQLAGRPKTDRLDAQWIARLAEMGLLRPSFVPPPEIRALRDLTRTRLQLVRDRTREWQRLEKLLEGALIKLSSVVHSLAGTKTARDILEAIAGGERDPRALAALAAAHVKGGRAAVEEALDGMMPGDHHLVLIRIHLDHATFLDRSIAAVEDEISAALDAIEGAWGISADGVPSPDPGPDPAALTAAGRLAEIPGVSPKLAMSIIAETGLDMTRFPTAGHLASWAGLAPVARQSGPRSRKPGKGQGDAYLKGYCTQAANGAARTDTFLGERLRRLSRRLGGNRAKCAVARSILVIIWHLLADPAARFTDLGPDWHEHKTDRDRKIRAHLRQLQALGLDITINPAA

SEQ ID NO: 332823 - protein, 334 aa, unidentified
MNQIQLVGMDVSAKLLVAWVDPQPGAIERLEVPNTPEGHRRLCRRLTRQGRQARVVMEATGLYGLDVALALHRQPGIEVMVVNPRAVRDFARACLRRSKTDALDAQILVDFARRMPFQAWQPPTRQRLELRAVARRIAALTELRTQEKNRLHAVSSSRHLGTIVRQDLERSIRHLDRSLERLQKQAQQLVTTDSQLQLAWTCLTSLKGVAAKSAIQILGELCVLPHDMTARQWVAHAGLDPRHIESGSSVHKPARISRVGNRYLRAALYMPALTATRFEPHVRAFHDQLLARGKKPLQVIVAIMRKLLHSFHAMLSDGTCFKGVKFRRLEPATP

SEQ ID NO: 332824 - protein, 439 aa, unidentified
MRDGNDGEIEFAAYIGIDWADQKHACALQSSTGSGVVQGELIHKPEAVEAWAADLYRQFGGRPIAIALEQSRGSLLFMLLKYEHLVLFPVHPSTLVNYRKGFRPSGAKNDPSDATLLVDLLVRHRERLRRLHPDSEQTRTLQFLVEGRRKFVHEKVRYSNRLTAYLKMYFPQVLDWFFAVDSAIVGDFLLRWPTLEKLQKARPDTLRAFFRQHNSCKSDSIERRVQEIRDAVPATHDTAVIRSCCKAALSFARMLREVRAAIRSYDQDLEKLTREHPDFALIDSLPGVGPVLAPRLIAALGTQRDRYQSASELQCYSGIAPVLASSGKQYWVHWRWACPKFLRQTFQEWAVHSLASCAWAKDYYEQQRAKGKPANTVVRALAYKWIRILFRCWKDRTPYCESTYLQGLERCQPLARKGVLVKTRWKTSAGFRKIDAATS

SEQ ID NO: 332825 - protein, 346 aa, unidentified
MQELKVIGLDLAKNMFQIHGNDDRGRKLRGAKLKRGDVLPYFANLPPVLVGMEACGGAHDWARRITALGHRVKLMAPQHVKPYVQGNKTDARDAAAIAEAAAREAVPAVAVRSVESQQMQALHRVRELFMRQRIADANQIRGLLAEFGEAIPLGFKRLREAVGQWRERTGPELAQLKELIEITMDALRQTEERISKIEARIKLLHRDNPASQHLESIPGVGVLTATAVVAAFGRCEHFENSRKFASCLGITPREHSSGGNQVLLGISKRGNKYVRKLLIHGARAVLKARTNKAAHANDWEIKLVRRRGHNIAAVALASKNARRIWAMLRTGEVFRADYAQANSACA

SEQ ID NO: 332826 - protein, 348 aa, unidentified
MYHVGVDLHKETSWFYIIDSNGKKVDSKNILNKPEILRKYFGQIPKPFVLAVEATYNWYYFVDLAQEYAKEVFLANSYELKAFAKRHKKTDKIDARLIANILQKGFLPVVAIADQHTRQVRELLRYRIRLVIDRSRNISRLKALLDKLGINSNGDFTTYKRLKTIIMGELPSIYIQLVKNYIEIITELTQKLKPIEKDITTVSCNNHHMVNLMSVPGIGDFSAALIKSEIIDISRFVSFNRLCAYAGLSPRVSASANKIHHGPLNKNRRKNLQWILLENVYHFIKAIPEKQEKYEILKQRKGHNTAKVAMAREMLKIIYHVLKEQRPFYFSNKKYQIQSVAAPALSGV

SEQ ID NO: 332827 - protein, 404 aa, unidentified
MISVGIDVSKEKSTVCILKPYGEIVRSPYEITHTESQIAELVSTIKCLDDEVRVVMEATGNYHLPVLSFLKEHGIFVAVINPLIMKKYASIILRKGKTDKLDSIKIANYGLDNWFYLINHESSEEIYVQLRLLGRQYGHYIKLRIESKLSLTTMLDYTMPGIKTMLKSRSDKPEKDKLNDFIEEYWHYDNITKKSENQFISNYKNWAKKKGYQQSEAKAIKIYDLAQQGIPTLSSNAPSTKMLVLEAVRVLREIDKTLALILSQMQELAKSLKEYTVVREMAGVGDIIAPRLMAEIGDIRRFHSGKALIAYAGIDAPPYQSGQFTGTRRRISKRGSATLRKTGFEIMKCLKSNKPESDTVYLFVLKKEAEGKASKVAKIAGLNKFLRIYYVRVKKYISNRQFNK

SEQ ID NO: 332828 - protein, 403 aa, unidentified
MNAVGIDVSKGKSTVAIIRPFGEIVASPFEVAHTDSELSKLAKMLESLTGETKIVMESTGSYHLPIAYALHDVGLYVSVVNAQLTHNYDNNSIRKSSNDSIDSLKIANYTLTNWLKLSKYIPPEDIRHMLKTYSRQYNKYGKIKIMLKNNLISLLDQTFPGVNELFTSPPRKSDGHEKWFDFAAYFWHCECVCSLSPKVFAERYRKWCKREGYNFNQDKADDIYVSACGHFSVMPKNDVTKLLITQAISQITAVSETTAMIAAEMKRLASLLPEYNIVMDFRGVGEILGPQLIAEIGDVYRYPKKSSLVRFAGLEPVENKSGKFQGKETISKQGSPHLRKALFQVMDGILKHQPADDPVFRFLDRKRAEGKHYYSYMNAGSAKFLRIYYARVKAFLDNYYDNA

SEQ ID NO: 332829 - protein, 365 aa, unidentified
MTTIAQPGVERSVLGGVDTHKEVHVAAVIDDLGRVLATAEFPATRNGYRRLLAWLKNFGELVAVGVEGCGSWGAGLARYLAARGARVVEVNRPNRQHRRRRGKSDTVDAEAAARAVLAGEASVTPKTGTGPVEALRQLRVARAGAMKARTAAANQLHSLIDTAPDRVRAQLRDLTFKNKIAVASAWRPTVTVTPEGASRYALASVARRWRALALEIAELDRRIKTILDDVAAPLIAVHGVGYDTAGQLLVTAGDNPERLRHERSYAALCGSSPVQVSSGKTDRHRLNRGGDRHANSALWRIVIVRMTSHQPTKDYIARRTAQGRTKQEIIRCLKRYIARELFPHINNVITPADHRPAPTDQRIAA

SEQ ID NO: 332830 - protein, 329 aa, unidentified
MYYVGIDISKRFIDVCLLVDGIKGKRKTKVLPNDPNSAQALAQWLILQKCDPSQAHIIMEATGVYHEHLADGLHQSDILVSVINPHRVREFAKGMGILTKTDKVDAYVLACYGCLKQPENWLPPSQEIRKLKALLQHRDSLLNDKQRIENRLSTLKSTTAPEEILTSLESIEQNLKDELARIERLIAEHIDKHPRLKNDLKLLKSIDGVGEQIGWNMLAIIRGNNFRSAEQVAAYLGVIPVERRSGTSVCGRARLSKIGPPGIRAKLYMGAIAAISWNSHVRALYERLRLKGKAKMVAIGAAMRKLVHLCYGVLHTQQPYDKNHGVVAG

SEQ ID NO: 332831 - protein, 340 aa, unidentified
MEITTIGIDLAKDVFELHGVDGKGRVVLQRRLTRKRLIECLAKLPACLVGIEACGSAHHWAREITKLGHEVRLMSPQFIRPYVKGNKNDANDAAAICEAVGRPSMRFVPVKNQHQQDIAALHRVRSQLVKNRTALANQIRGLLGEYGITVVQGIDHLRRALPVILGDEANGLSGMFRETLAEMAERLQWLEERCRRYERRIELVFRQDERARRLGQIEGVGPLIATALVAAVGNAREFRSGRELAAWLGLVPRQYSSGGRNVLLGISKRGDRYLRALMIHGARSALRVAARKRDPRSIWISRIKLRRGPNVAAVALANRNARVIWALLIRGEDYRMQAVA

SEQ ID NO: 332832 - protein, 438 aa, unidentified
MNKLISKKTVIESSQYVKRNNMEQKFGSYLYCLMKYCVESPIVSIDVSNGNSHYMCFIKNNKRFGKVKKIDHDIEGFKRLLEDIQKLEAETNEKVCAVFEATGVYTKPLERFLSKNSIKTYIINPLESARKRKEEIHNKKTDKLDPISISKVYYDKKEMMELKKKDETYNWLRKKNRLYEDQLNHLRKYKVTFQNQLSICFPGYLDLFKDGYSDIPMTILKKYPHPDLLKNKKAETVARYLEKNTCHTHKVSLEYALKIIEFAKKTYPGCEKDDVEVEIFKILLDKVIETQRECEKTLNEMITVASTLEEYRYISSIDGIGPNLAARIIAEIGDIEEFKSREALVAYAGLDPHIYQSGDQDGKHLKISKKGNKYLRCLLFLAVGCSIRGAKDNPVNRFYQKKKQQSNPLNSKAAKTACTAKLLKIIYGICKNKTTYER

SEQ ID NO: 332833 - protein, 340 aa, unidentified
MEKRFIGIDLHRNRFTCCIRLENERTYLTEWELEDLGKFVKKLRASDEIAVEITGNTRLFFDAVAPHVARVVVVNTNQFKVIRQSVKKTDPHDARALALYLSKDMLPEVRMKDKEHGQLASLTQTRDTLVKLRTALKNKINNILSARGLNLAKEALSSEKKLNEVLELPFDEIVRIELRVIVEQIRSLNKSIAELEKTIGEEGSKLEGHKGLSSIKGIGKITGAILLSVIGDVNDFADEGHLASYFGIVPRVSNSNETEHSGRIHKRGTKLGRTALVQSALIAANYSPYLKRFYEQVKARRGAGKAIIALARKFLGIIYRTLKNKWVFEDFPNFVLAEAS

SEQ ID NO: 332834 - protein, 383 aa, unidentified
MKKTQETLPLKDTIKAAILYIAFELSSSKWKLAFSDGSKVRYKTITAGNLAQLQVEIDLAKRKFKMDEDVKVVSCYEAGRDGFWIHHYLEGQGIENLVVDSASLEVNRRKRRAKTDRIDVAKLLRMLLRYWGGEKKVWSVVRVPSEEDEDARHLHRSLEGLKKERTMHRNRIKGLLIQQGIKVSNPSQKKFLDVLEKLRTWNGQAVPPGLKSQVFREYERLQVVEDQIKALEKEKTERLKNPDTDSLEKVAKLALLYGIGSVSSWTFVMEFFGWRQFQNRKQVGALAGLTPTPYDSGKSLREQGISKAGNQRIRALAVEIAWAWLRFQPQSKLSQWYMKRYANGGKRMRRIGIVAVARRLLIDLWRYLEYDKVPEGARLKSLV

SEQ ID NO: 332835 - protein, 319 aa, unidentified
MRLNAGVDVSKQHLDVSLDAEARRIANDANGWDELTAMLKAADVDLVVVEATGGYERGLVCAMQGAGLSVARVNPRQARDFAKSMGVLAKTDQVDARCLRDFADVLARHKDRQKYITPILESARQELADLMTRRRQLVDMRVAESNRLEHAGKPAARSIASVIKLLDKQLSAIDAQIGEHMDTHFRSQRELLDSVKGVGPVTILTLTAALPELGKLGRRQIAKLVGVAPLADDSGSRQGKRRIWGGRGNVRAVVYMAALVAMRHNPVIGAFYTRLVATGKPKKVAIVACMRKLLTILNAMLRDQAMWNAARHLEVPVAA

SEQ ID NO: 332836 - protein, 344 aa, unidentified
MKVSTIGLDLAKSVFQVHGIDDAGQIVLRRQLRRSEMLTFFGRLPRCLLGMEACASAHYWARQLSALGHEVRLLPASHVKAYVKRGKKNDATDAAAICEAVTRPHMQAVPIKTEEQQAVLMLHRSRDLLIGQRTMLSNALRAHLAEFGIVAALGNAGIKALAAIVRGDVHEPLPQLARKALGLLVAQIADIEAKVRMLDAEILAWHKADAISQRLASIPGIGPITASAMAATVGGDVSRFASGRQLAAWLGLVPRQNSSGGKDRLGAITKTGDRYIRRLLVVGATAMISQARRKKNVVSAWLIKLLEAKPARLVSVALANKMARIAWAVLARGTVYQTPAPVMA

SEQ ID NO: 332837 - protein, 405 aa, unidentified
MLCVVLANARTHNHHRLLELQAVGHRAKARRRGVMVWTAPYGIECARMRLLQSQTREPSVNQIIRIGMDTSKHIFQLHGVDSAERPVLRRKLRRSEVLAFFAKLPPTVIGMEACGAAHYWARELRKLGHEVKLMAPQHVKAYVKRNKNDGRDAEGLCEAMSRPTMQFVPVKTEEQQAALMLAGVRQQLIARRTQLSNAIRGYAAEFGLTTAKGLDKIEPLLTRIALDETVPALARELLAIHGQDYARLQIELKAIEVKLMAWHRANACSRRLAQIPGVGPIGATALVMKTPDPRAFRSGRHFAAWLGLTPKDHSTAGKTRLGKITRAGDEMLRSLLVAGATAVIQQVRRGRGRPSAWLLALLKRKPPKLAAVALANKVARIAWKLMTTGESYDGARMPGAQAFAA

SEQ ID NO: 332838 - protein, 485 aa, unidentified
MQRNQQSTAAKATKATPSPTRRGWHQMNRKQRRELARRMQAEDLSLEVVHPDAAGIDIGSEAHYVAVPPARDSQPVRRFGCTTAELKEMAAWLKQCGMRTIAMQSTGVYWIPVYDVLEEAGLEVYLVNARETKNLPGKKTDVQESQWLMKLHTYGLLRNSFRPPHEIRMLRNYWRQRNDLVQSAGRHIQRMQKVLTQMNVQLANVISDLSGATGQAIVKAILAGERNPRALAALRDVRIQASEEQIARSLEGNWQEDLLFVLQQEQDGYEFCQKQMAQCDVRLEQYLKQRPDRSAGAHLPEETRKRRRRRKKGNAPQFGLREELFRMTGVDLTRIDGIDVMTAATVISEAGWDMSQWKTEHHFVSWLRLCPDNKISGGKVIGKGHLPTHNRLTVAFKMAASTLLKSKTYLGAQFRRLRTSLGAPVAIKAMAAKLARLVYRMLRYGMQFADQGAWLYEQKHRQRQISSLKRKAADLGFQLVQAPAA

SEQ ID NO: 332839 - protein, 356 aa, unidentified
MSSIVSEEYDFVIGVDTHAATHTFAVVAGSTGAVLDHAVFPTSPAGLKRAKGWLVRRCGDARTLIVIEGTGSFGAIVTERLMAAGRTVVEAARMPAGDRRGKGKSDEFDAARIARAVLGLAITDLRIPRTLTGNRSRVAMRVLVVAREEMTGERTRAVNALTALVRTIDLGVDARTSLSAAQITAIAGWRTRVEDTNARICRQEAVRLAQRIRTLDGEITSNRATVTKLIAQDTPQLLELTGVGAIVAASVLVAWSHPGRVRSEAALASLAGTCPIPASSGNTVRHRLNRGGDRRLNRALTTIVIVRMRTDPATRAYVARRRAEGRTTKEIMRSVKRYVTRQLFRTLAAAHPIPVT

SEQ ID NO: 332840 - protein, 369 aa, unidentified
MDSMTHEAPGRHITVGVDTHRDVHVAVALDGLGARLGELHLPTTPAGYADLERWAAGLGPVDAFGIEGTGSYGAGLARFLGDGGHRVVEVNRPDRATRHRLGKSDPIDAEMAARSVLSGVATGTPKAADGTTEMIRMLKIARDSAVKARTQSINQIRALLVTAPAELRESVRGLSTRRLLDRCAAFRPGVLDSPAAAAKHTLRSLARRNLALAAEADELEAGIRRLVSGSAPGLLAAFGVGPDSAATFMITAGDNPGRVHSEAAFASLCGSSPVPASSGRTKRHRLNRGGDRQANAALHRVVVVRLRWHGPTQEYMARRTAEGRTTAEVMRCLKRYVAREVFGLLPRGASAPVAPARARAPRSTGSAAG

SEQ ID NO: 332841 - protein, 349 aa, unidentified
MLVKYSLGIDISSETFDSNLSVIDSEQNVKVIASHKFANNQNGFAQCHTWITKNWKQKDIRLVITMEATGVYYENCALFLFRKGYPVAVVLPNKAKKYMQSTGLKSKNDKIDAKGLARMGAEQSLRSWEPMTAFFYQLRELTRQHQSLQEHRTVLLNQIHANENGMFLNTMVMKQLKSLVGVIDKQIEATEVAIEKHIASNSEVADKVKKITKIKGIGTLTVATLIAESNGFALFTTASQLVSYAGYDVIENQSGTHTGKTRISKKGNSRIRRALHMPALGVVRWEQTPFLNLYQRTLEKHNLKMKSYVAVQKKLLVVVYALWKKNEEYDNNYLIKKCMTPQEQMKKAA

SEQ ID NO: 332842 - protein, 341 aa, unidentified
MTIGIDLGDIWSHYCTLNEDGEVVDRGRFRTNPSGVDKRFRDPGPARVAMEAGTHSIWVSEQIRELGHEVIVANVRELRAISHSDRKSDKVDAEKIARYARLDPDILRPIAHRTVAQQETLTLIRARDVLVRLRTGAVNSVRGLAKPCGYRLPASSTLTFAKRCLAVLPPGLAQALGPLLHQIADMTVKIKQYDRDIQKLTETAYPETQALIKVYGVGHLTALTFVLTLGNKQRFQRSRDVGCYLGLRPRRSQSGDRDPQLGITKAGNVYLRSLLVECANHVLGPHGRDSTLRQWGLHLASRGGKQSRNRAIVAVARKLAVLLHRIWVTQEPYVPFYAVAA

SEQ ID NO: 332843 - protein, 344 aa, unidentified
MGEVITIGLDIAKSVFQVHGVDGAGAVVIRKRVSRAKVLTFFADLPPCVIGIEACPSAHHWGRELEALGHTVRLMPPSYVKAYLKRSKNDANDAEAICEAVTRPSMRFVALKTKAQQAALMLHRTRQMLVRQRTMLSNAMRGHLAELGIVSAKGRNGTSELLRIIADGADSRVPPVARGILEVLARQYSAIGAELGSIQKGILAWHRSCEASRRLEEIPGIGPIVATALVAEIGDWKAFGSGRDLAAWIGLVPKQHTTGGKDRLGGITKQGNRYLRWLLVTGAMAVIRYAQKHGTRKQPWLGRLMERRPTKVAAVALANKIARVAWAIMVHGDRYKEPELPVAA

SEQ ID NO: 332844 - protein, 343 aa, unidentified
MQAITTIGLDIAKSVFQVHCVDAEGNVVLRRQLKRRYVLAFFQKLPSCLVGIEACASSHHWSRELQALGHTVRLMPPAYVKPYVKRQKNDAADAEAICEAVTRPNMRFVPTKTPEQQSCLSLHRTRHLFIRQQTAIINSIRAHLAEFGIVAPVGRRGVEQLLKVVVDVNDTRLPEIARACVAALGTQLLALKAQILAFDQRIMAWHRSNDTSKRLDAIPGVGPALATALVASVGDPKAFRSGRDFSAWIGLVPKQNSSGGKGKLGNISKQGDRYLRSLFTAGALAVIRYAKLHGTEHRPWLTALLARRPTKVAAIALANKIARMAWAIMTKGERYKEPVALAA

SEQ ID NO: 332845 - protein, 344 aa, unidentified
MELFTLGIDLGKTTFHLVGMDQRGEVVLRKRFSRAQLLQFTANLKVKLIGMEACGGSHFLGRALREQGHDVRLIPAQYVKPYVKTNKSDYIDAEAIAEAVGRPTMRFVPVKSDEQLDLQSLHRVRERWVMRRTAVVNQIRGLLLERGTTLRKGRRYLDEALPAILAGGSSKLSGAVLVLLAELRQELEQLAEKIDRADKSIEKVARENEACRRLVAMPGVGPVTATAIIAAIGNDAAFHKERDFAAWLGVVPEEHSTGGKQTLWKIPQRGNRYLRRLFVQGARAVMQHRTKQSSGLSAWLAQLTARTHQNVAIVALANKLARMAWTVLAKSEAYRPPLLAGNTI

SEQ ID NO: 332846 - protein, 339 aa, unidentified
MQVTPIGLDLAKNVFQVHGIDDHGEVAFNRALRRSQVLAFFGRLEPCLVGIEACGTSHHWARELIKLGHNVKLIPPAYVKPYVKRGKSDAVDAAAICEAVTRPTMRFVEVKTPEQQAILSVHRTRDLIVRQRTQTINMLRAQLAEFGIILPQGVYHALQFAKVCVNGEPLNLPADAEEVVFDLCDQLLFLHAKILRHSRHMTQIAKREKRVALLRTIPGVGPITASAIVATVGSGKQFNNGREFAAWLGLTPLNRSSGGKERLGHISKMGDQYIRRLLVLGMTSRIRSIRLQPEKFDPWFADILSRKPSRVAAVAMANKTARMIWAVLTCNEPYKVRTV

SEQ ID NO: 332847 - protein, 445 aa, unidentified
MSEPDNIPREPFAVFCGLDVGKSEHHACALDVAGRRVHDKALPNDEPALRGVFTALAEHGRVLVVVDQPASIGALAVAVARAMGVEVADLPGLAMRRIADLHPGQGKTDARDAHIIADAARTMPHTLRRVGSDDETLAELTVLAGYDDDLAGQSTRLTNRLRDALLHVHPALERLLGPRLDRGGVLDLLIAAPTPQALAALGGDGIAEVMAPRSPRLARTLPAQILLALTAQAVVVPGTAAFARVIAGVASQLRDVRLERADLATTLEERLEAHPLGEVLTSMPGLGVRTATKILTIVGDGSAFPTAGHLAAYAGLAPVTRRSGTSIKGETRSQRGNHALKSALFLSAFASLADSVSRAYYDRKRAAGKRHNAALICLARRRTDVLFAMLRTKTNYRDPNKGPTTDTESLRPSLPERLDKPIETPPTEWLDAWFRARDWRSSRWR

SEQ ID NO: 332848 - protein, 349 aa, unidentified
MLYIGLDVHQKKTKVAILDNVTGEFQKPYDVRTSDLPDHMEEMPGRKRIAMETSTVSQFVARRMRSSGLDVMMVDAAQCHLLLGGLSRSKTDKLDATGLCVLLSKGMLETVEVWLPDDAIQELRELTRLRRGLMKNSVSMQNRIRKLLSRQGMSCPYDDLQGQSASKWLDEAIERLSPIMALTLSTMREGLADLTAQIDTLTEAIQSQTEDHEPTRLLQTIPGVGPLLAAIIAAEIGDIARFESACKLRGYTGLVPRVDQSGETRRTGPLVKHANRFLRWALIQTAQNFAHNTQTRDLRMIRNYGRKVYTYGPNPAKVHLARRIVNVIFAMLRDGTEFDARLLARAEAA

SEQ ID NO: 332849 - protein, 405 aa, unidentified
MLKFLIKRAFNLNILYKLANNFNLRPMRRVCGLDVHKDSVFMCILSENGEKVQEKYGVLTKELDTLRDVLVANNVGEVAMESTSIYWMPIWRVLESDFDLKLVNPYFIKQLPGKKSDVKDAEWIATCLQKELIKGSFVPDAAIQRLRQYNRRIFDLNKDISYKLTKLDMALQRCNIRISNYVSRTDSKSYKKVVDKLAGGITDPQELEKCIHGRTVNRFGKDVITASLTGVINETDIDIMSQLKSEIDLAERHKSECLMKMREICMENYPQQLENIKSMPGVKEQSATAIIAEIGVDMKMFLTAAAIVSWCGLRPRNEESAGKIKSRKIVHGNKYLRRTLIECAWAASKTQGCFYNKFSYTQVSIRKKNVLKVRVAVARKMLVTIWNILSKGEAYREILDCTLPQ

SEQ ID NO: 332850 - protein, 358 aa, unidentified
MKIIGCDFHPSFQQIAMLDKETGELVERRLLHSEEARAFYEGLKEPVLVGIEASGNTHWFESLLTRCQHELWIGDAAEIARQYGRKQKHDRQAAALILKLMMENRFPRIWVPTVAERDLRQLLMHRQHLVRTRARVKNQLQHIALNQGWQKKHKLWSETGLKLLRSLKLDPWTQQRRDTLLEMLEELDEKIRPLDQAVEKEAKAREAVQRLMTHPGVGPVIALATVLTMGDVRRFPNSRSWVSYLGLNPSEESSGQRRRLGAISKQGNPFLRYLLVEGAISAARGDKSLARMYARLKAKKHHGVAKVAVARKLAVRLYWMARTQKSYPEVVRTQGSLKQAMAEVRAEVVNRPPASHQS

SEQ ID NO: 332851 - protein, 382 aa, unidentified
MQASTVDTPTAGHSGTIFVSIELSQKTWLVTLHSPDRDRISRHKLEGGNHAGLLGLLENIRARAALKLGAAPKVVSCYEAGYDGFWLHRLLTAAGITSFVFDPASIAVDQRARRAKTDRIDGELLLRTLMAHLRGEPRVVRIVRIPSVEQEDARRASRERDQLVKEQTAHTNRIKALLRLLGMAVGNPRRGDWLGWLEQQRDRQQHPMPPHLLAEVKREHARLMLVREQLAALEAVQAAQAPAVPAPMAERRDALRRLKALGPAFTATLVNELFYKDFCNRREVASYCGLTPSPWRSGGIDREQGISKSGNRRARHKAIELAWLWLRHQPDSALSCWFRARTASAGKRAKRIAIVALARKLIVALWRYLTTGLVPEQATMKA

SEQ ID NO: 332852 - protein, 349 aa, unidentified
MGEVSTIGVDIAKSVFQVHGVDADGTVVIRRRVGRAKILEFFSKLRPCLVGMEACATAHHWARELKKFGHDARLMPPTYVKAYLKRGKNDAADAAAICEAVTRPSMRFVPIKSVEQQSTLMLHRTRDLLIRQRTQLINALRAHLAELGLVAAKGREGLCQLVTVVTECGDERLPSNARFACQAIVGQLHAVQTQISGLDKRITQTHRANPDSKRLDAIPGFGVILSTAVVATMTDPKAFKTGREFAAWIGLVPRQNSTGGKDRLGSISKQGDRYLRRLLVVGAISIVRTARMWPDKYPWLIELLGRRPAKVVAVALANKMARVAWAVLAKGETYRAPTRLSNAAITVAA

SEQ ID NO: 332853 - protein, 315 aa, unidentified
MVEQVVVGIDVSKAKLDVALLPGGEQFTVSNDRHGIGELVRGLSPLAPSRVVLEATGKLEQLAVSELAAAGLPVVVINPAQVRHYAKARGKWAKTDPIDARLIAEFARDLEPELRPLPDAETQALAALCQRRNQLLEMEQMEKSRLQRAPGANQKSIKAMLRFVRRQVEQVEKQIEHSIRHSPLWQAKRELLESMPAIGKVNSSTLLARLPELGQFTRQKICALVGVAPYNDDSGQWHGRRHIAGGRGGVRQVLYMATLSAVRCNPSLRDYYQRLLGRGVEPKAALIAVLRKMLTILNAMVRDNTPWRPPCPIPA

SEQ ID NO: 332854 - protein, 427 aa, unidentified
MSYRIAGIDVHKKMLAVVVSDVEVHGEYRFERRQFNSSPDHLQLMAGWLIEQEVKEVVMESTAQYWKPVWAALERYWKPICKKRQSNEPASGTLHLAQAQSNRGRRGRKKDFPDAERLVKRLVANELILSFVPDAEQRLWRTVTRRRYQLTRNHVRLQNQLESLLEECHLKLSSLVSDLLGVSARRMLKALADGETDPAALAALADQRLRATPAQLVDALGACTELNPVYRQLLKLALEELRLIEQQIAQLDQEMATLLTHHQDAVQRLAEVPGLGVDSAHQIIAEVGATAATFPSAKNLVSWVGACPGDEESAGISRSHHSPKGNRNMRRLLNQCANAAVKLKGGIFQLLYRRLLPRLGHNQAIGAVAHKLCRLIWMILHQGIRYEERGPAVAQRSRRVRTARMIRILRKQGYQVQLQTAQPSFPM

SEQ ID NO: 332855 - protein, 343 aa, unidentified
MDHFAGLDVSVKETSVCTVDETGRIVREVKVASEPEALLEVLRNPTWHFKRIGLEAGPLSQWLYSALAEAGLPVICVETRHMRAVLKAQINKTDRNDARGIAQMMRVGLYRPVHVKTLRSQKLRMLLTHRKLLQSKAIALENDLRSTLRNFGLKVGMVGAVKFEGRIKELVENLPDLAVLVEPLLVVRRVLHEQIVILHRRLLTIVRDDDVCRRLMTVPGVGPVVALTYRATVDVPARFKNSKAVGASFGLTPSRHQSGESDRPGGISRCGDEMMRVMLYEAAQVMLTRTSKWSWLKAWAMKIARHRGRKKAIVALARRLAVIMHRLWVDGTEFRWTREVVAA

SEQ ID NO: 332856 - protein, 395 aa, unidentified
MDEAKRKAWAGVDAGKGFHWAVVLDAEGEVLLSRRVENDEADLSALVEEALGFGLELTWAIDQPGGAVALFLALLWERGQRVLYVPGIAVDRARDGYRGESKTDARDATLIAEQARMRRDLSTLAPGDELLAELGLLVARRRDLVADRTRTIARLRDALLALFPGLERALDLGARGPLLLVERYQTPSAVRRAGRKRDGAYLEKRGVRGAAKLAEEAVAAAKGQSASLPAEGVAAGIVARLAREALALKERIVEVDRELERRFLAHPLAEILLSLPGMGTLLGAELLVAVGDPRDAFADAGRLAAYAGLVPAARDSGKRTGNNRRTRGGNKMLKRVFYQSAFASLRSPASRAFYDRKRAEGKRHTQALIALARRRVDVLWAMIRDEERFRAPLTA

SEQ ID NO: 332857 - protein, 341 aa, unidentified
MSLFVGLDVSQRLTHLCVVDADGKRVWRGKCATDPMILAETIRVQAGANARVGVETGPLTPWLVHALRAAGVDMICIEARHAHAVMAAAQVNKNDQHDAHALAQLVRTGWYRAVHVKSYAAHQLRATLGARAQLVRMVTRVSNHIRGVMKIFGLVVIGVRGTAFAARIDELVADRAEVQSIVGPMLETWRYLRSQVAVFDRQLLAVAKSRPECRLLMSIPGIGYVSALAFIGAIDEPGRFARSRAVGAHLGLVPKQHQSGDVDRLGEISKCGDAYVRTVLVEAANSLLIRSRKPSPLRDWGLALERRSGPKKARTALARKLAVLMHSVWRSGTPYLAAAAV

SEQ ID NO: 332858 - protein, 402 aa, unidentified
MTYDYVIGMDVGKYFHHACVLDIDGTQVLSKRINQNEQSLRALFSAFSAYDHKVLVVVDQPNNIGRLTVAVAQDIGIDVRYLPGLAMRQLSRIHAGNAKTDIRDAYIIAHAAKNLPESLRSVDRVEEAFLQLKVLNGIDEDLARSYTRLINQIRSALVGCYPQFEQALRGQIIHRKWVLHLLARYGGPTKIKRLGKAKAAAFARRYKARNPEPVLDAIFAAISEQTVTIAGAHYAEMGVAMSAKDALLKLEHRQQIEKEVIELINDIPHTQFLLSMPGIGPKTAAQILMTAGDMSDFPSAGHLASYAGLSPRTNQSGTSIMSNSLNRAGNKKLKNALWQSSSASIRFHERSRQFYERKRREGKRHNAAVVALARRRLNVLYAMMRNHEHYHDPAPSQEDLAA

SEQ ID NO: 332859 - protein, 478 aa, unidentified
MELILGIDLACRAAHQASLARPDGTFVWTGRKFFTRPDELEELWKKIGLGEQDTLRVVMEPTRNAWAPVASWFRHRGARISMVPTTQSADLRAYYSKHTKNDQLDSKLLARLPLLHPEGLREHTGDGPADPLRRVVKIRSSIVKRRTAIYQRLDAQIELLGPGWYDALGSDYGKAALAVLARYADPHSLIRLGHARLTRFLIRHSRGGWREHHATMLLTAAQESLQLWGSGATARIDFAELATDIAVEAEQAQMLTEQIDDLDERCANLYTEADPTGVIASAPGVGPVTSAVIAGRIGDPHRFHSLAAIRAYSGLVPKLSQSGQAHHQHGLTKAGDPLLREALFIAADQARKTDPQLAAKFKRLMIAERHHDSAICHIATILLTRIATCWRTGEHYVLRDTDGRPITPEEGRRIVRAHHTVDKKIRINAACKRYSQRQKGRTDREQQESPSAPVHRPVTPSIKPANATRRPRKPLDSP

SEQ ID NO: 332860 - protein, 355 aa, unidentified
MLYLGIDQHARQITISLRDETGDVLQTRQVSTKPEMINTFFQKLTRERLQDGDEFVAIVEVCGFNDWLIRMLYDYRCHKVILIQPYEKKQRKTDRRDAAALSELLWVNRDRLMQGKPVRGLRQVDITGTVEQESRRLTTLRKDVGRARTRLINKVRHILRRHNLQWDMPTKTFPTKPAIAWLKKLVLPEIDRLEMNHLLADLALIQQRKQELEQVIAERCGNSEDAVILSSLPGAGAYTAIALACRVGRVERFRSGNSLANYWGLTPGCSNSGERKQRLGSITKAGSPMARWLLAQVTRNALRKDARLREWFKRIKRRRGANIARVAVMRKLATIIWHMLIKRKTYAACRAQAVT

SEQ ID NO: 332861 - protein, 396 aa, unidentified
MPQMWAGVDIGKEHHHCVVIDRDGERLLSRRVLNDETALLELIQDVLALDEDVLWAVDLNHGGAALLIGLLISHDQPLVYLTGLAVHRASGTYRGEGKTDAKDAFVIADQARMRKDLGLLRPGDEIAVDVRTLTTRRTDVVADRTRQINRLRAQLLEICPALERSLELANKGPAVLLTGYQTPAAIRRAGAKRIETWLRNRKVYGAAALAKAVVEAAEAQHTALPGEKLAATMVVRLAKGVIALDQEIAELDALIEARFREHPHAEVILSLPGMGKLLGAEFLAATGGDMDAFGSADRLAGYAGLAPAPRDSGRVSGNLRRPRRFHRGLLRAFYLSSLSSLKSCPASKAFYQRKRAEGKGHKQALLALSRRRVNVLWAMIRDGACYQAVPPVTAAA

SEQ ID NO: 332862 - protein, 318 aa, unidentified
MNTKMNQSINVGVDTGKFQLDIYIRPLDIYFTVTNDEKGIKEAVNTIKKYKPERIVIEATGRLEMPFIIACAKANLPFVIANPVYIKRFAGAIGQRAKTDKLDAQLIAHYGEAIKPKLSTLKPDIMQSMSDLVARRNQLLVMQTMEKNRMQILPQHLAMTIKPVLTVFKNQIQKIENKIVALIESCPDYQAKNIILQSMKGIGKIASASIISNLPELGYISSKQASALVGVAPMNRESGRYKGHRKIQGGRHQVRTVLYMAMMSAIQSNPVFKETYQRLVAAGKPKKVAIIACIRKMVVILNSMLRDGVMWEAPKAIN

SEQ ID NO: 332863 - protein, 358 aa, unidentified
MVDKVTEAAVVGGVDTHKDLHVAAVVDQNNKVLGTQYFSTTRQGYRQMLAWMTSFGTLKRIGVECTGTYGSGLLRYFQNAGLEVLEVTAPDRMERRKRGKSDTIDAECAAHAAFSGIRTVTPKTRDGMIESLRVLKTCRKTAISARRVALQIIHSNIISAPDELREQLRNMTRMQLIRTLGSWRPDASEYRNVTNVYRISLKSLARRYLELHDEIADLDVMIAAIVDELAPELIKRNAIGYESASQLLITAGDNPQRLRSESGFAALCGVSPVPVSSGKTNRYRLNRGGDRAANSALHIIAIGRLRTDAKTKEYVARRVAEGHTKMEAIRCLKRYISREVYTLLRNQNRRLNSIPITA

SEQ ID NO: 332864 - protein, 350 aa, unidentified
MEIYTIGIDLGKTVFHMVGLNVRGEAVVRKKFSRTQLLRFTAKLRVELIGMEACGGAHSLGRALREQGHEVRLIPAQYVKPYVKTNKSDYIDAEAIAEAVGRPTMRFVPIKTDDQLDLQSLHRVRERWVMRRTAVINQIRGLLFERGITLRKGRCHLETALPDILEDADSKLSSAVRLLLVQLKMELTQLAMRLEEADALIQKTAQESEVCRRLDAIPGIGPVTATALLAAIGNGGAFRKGREFAAWVGLVPREHSTGGKQKLLGISKRGNGYLRRLFVQGARAVLQFREKQSPGLRAWLAQLTSRTHYNVAGVALANKLARIAWAVLAKGEVYRPPLLVSSASADLACR

SEQ ID NO: 332865 - protein, 342 aa, unidentified
MKIIGCDFHPSFQQIAMVDTETGERTESKLTPEEAKQFYSRLQGTVVVGVEASGNMLWFERLLAGLGHRLRLGDATQIQAREVRKQKTDRRAADLILQLMLEERFPEIWVPSLAERDGRQLLIHRHKLVAMRRQVKNQLQHLAMNQGLQLKYRLWTQAGRKRLEELPLEGWTARRRADGLRWLDQLDNDVAELDAAVAKHAQQNAVVQLLQTHPGVGPITSLALVLTLGKIERFPGSRQVVSYLGLNPSEHSSGMRRRTGAISKQGNPMLRSLLVEAGQSASRWDKELKRAYQRLKQKKHSAVAKVMVARKLAVRLYWMWRTQQPYTATRTQGSPSHVVAGR

SEQ ID NO: 332866 - protein, 400 aa, unidentified
MLYIGIDIGKRNHEATILDKSGKELCESIKFSNSNEGVEKLLSKINNPKNVTFGLEATGHYWLPLYCSLVSKNLNVLVLNPIQSDSLRNMYIRKTKTDKKDSFIIADILRIGRFPASGLADEGIVKLQTLSRLRFEFIDQVSSLKNRLLAVLDRIFPEYESIFSDVFIKSSKELLKNTPTPEEILEFDISELTEVLKTASKGRFGIPKAKELMDKASNSFGITIALDAFTLELKLLLAQIEFIEEQIRQIDSNIKELMKNIKTFITTIPGIGDVLGASILAEIGDISRFSSPKKLVAYAGLDSSTYASGQFVGTRTKISKRGSPYLRRALWAAAVTTRRFNPVLADFYQRKISQGKHPQSATGACARKLTHLIYYILKERKPFDPNYEWSNNPKIYVDSL

SEQ ID NO: 332867 - protein, 391 aa, unidentified
MPEDTPRPAQAAIRTDLGAIFVSLELSRRAWLITSLSPGGGEKMSKHSVPASDVSGLLRRFAELRRKAAARTGWDFPIIVIQEAGLDGFWIHRVLQSEGIESHVVDAASILTSRRRRRAKTDRIDGETLVRTLMAFKRGEPRVCSMARAPTPQEEDRRRVCRERRTLVGERVTHVNRIKGLLFAQGVFGYEPLRKGRRERLEDLRTGDGQPLPMHLKAQIMRELDRLEVLLGQLKTVEAERDALLKPETDKATSPAAMLTRLKGIGPETAAVLWSEGLFRQFDNRRQVAAYAGLAPTPWQSGSIDHEQGVSKAGNPRLRTTMVELAWLWLQNQPTSALSLWFHERVRRLGGRMRKTTIVALARKLLIALWRYTTAGVVIEGAVMKAAPATI

SEQ ID NO: 332868 - protein, 466 aa, unidentified
MRRNQRRSPGKPRRSPTVLDRINRNVAGIDCGSAEHFVAVPPDRDPTPVQSFTTFTTDLLRLADWLTACGVTSVAMEATGVYWIPIYEILDTQGFEVLLVNARHLKNVPGRKSDVSDCEWIRELHSVGLLRGSFRPTDAIVALRAYLRHRQTIIESAGTYIQRMQKALVQMNLQLPLVVSDITGVTGLRILRDIVAGHRDPQALAEHRDHRCRASKADIVAALTGHYRPEHLFGLQQNLELFDACQAQLTACDRAIDTQVQRLTAQVATPARPLPPPRVTKKPRENEPRFEIRTPLHQLTGGVDLTQIDGIAPYTALKLVSEIGTDMSRWATDKHFTSWLTLAPRNKISGGRLLSSRTQPSANRAAAILRMAAMSLGRTQTALGAFYRRLSARIGKPQALTATARKLAILVYRALKGELQYQDPGAHAYHVQQRSRVLRRLHQRAATLGFELVNRETGEIVQAAVS

SEQ ID NO: 332869 - protein, 411 aa, unidentified
MNPVVGLDVAKGESQVQAFLDKKKPYKRSFKVAHTIEGLESLHQYLREIENVTGIRPPVVLESTGHYHTPVVQYFEERGYLLIIVNPLISYRAKSSSLRKVKTDLIDARHLCELYYKEDLEPYKKRGIQLLNLRNLSRQHANITGIYVQTKLQFQAVLDQVFPEYRGVFGDLYSVVSLLTLLEFPTSEDISAVEEETVANRINELCPSRSRKWANTQAEKLMAASARNPFQRTLYQSHILSLEMYIKMLLEYQKHLSKFEEEINALAKEIEEYKIIQSIPGIGEKIATTIISEIGEIDRFNHPKKLVAFAGIDPSIFESGKFKGSVNRITKRGSGRLRHALYMAVRCAIRDCRKKKTTDEIIPRNKRLREFYDKKREEGKPFKVAVIACANKLLQWIYALLQNNSTFQDLT

SEQ ID NO: 332870 - protein, 375 aa, unidentified
MRNKVRFLGLDVHAETIAVAVAEPEGEVRSLGTIPNRAESIRKLIRKLGPADQLRACYEAGPTGYVLYWQLSELGVDCAVIAPTLAPVKAGDRVKTDRRDAERLARSHRAGDLTAVWVPDAASEALRDLVRAREAAKQDQLRARHRLGKFLLRQGQRPVTGVKAWTTAYMTWVRQLRFTQSAQDAARLDYLHEVEHMVERIKRLEESIREAVQQAPPQIQAVVQGLQALRGIALISAVTIASEVGAVSRFQNARQLMSYSGMVPSENSSGKRTQRGGITKSGNAHLRRILGEAAWSYRRRPAVGVALRKRQEAVPEEIRQIAWKAQVRLSKRYARLAAAGKDQRKIVTAVGRELLGFVWAIGVWVEASVAQAKAA

SEQ ID NO: 332871 - protein, 338 aa, unidentified
MKITTVGLDLAKSVFTVHGVDEHGNTTLRKTVRRAKLLELFAQLPACVVGMEACAGAQHWARALRQLGHDPRIMAAEFVEPYRRGGKNDANDAAAICEAASRPKMRFVSIKSVEQQAVLAVHRLRQGLVEERTALANRLRGLLTEYGVVVGVGLDRLRRALPEILEDGANGVPGIAREVFADAEQLLRELDTRIAAYDRRIAALARTSPPVQRLMKIEGVGPVTATAIVATVGTAAVFNNGRQFAAWLGLTPRQHSTGGTQRLGAMTKHGDVYLRTLLIHGARAVLRMTAHRSDAKSRWAESLRRRRPDNVAAVALAAKHARIIWALLARAQEYQPAA

SEQ ID NO: 332872 - protein, 343 aa, unidentified
MKLSRVGVDLAKNVYQLHGVDRHGKAVWKRRLRRGQWLQALLDKAEPGCEIGMEACTGAHHWARELQSRGYTVRLIAPQFVKPYVKSNKNDANDAEAICEAMSRPNMRFVTVKSVAQQDIQATHRVRTELKEQRTAKANQIRGLVAEYGLVAPQTLLALRSTIPCWLEDADNGVTDYFRSLLHGLWGDLVALDDRMAELDKQIKTLADSNEVTQRLQQLRGVGPLVATALIATVGTGEQYCKGKQMAAALGLTPRQCSSGDKQRLLGISKRGDVYLRTMLIHGARAVVSQAKHRDDRLSRWVTSIAKRSHPNVAAVALANKTARMAWAMLRNHSNYDPDFATS

SEQ ID NO: 332873 - protein, 348 aa, unidentified
MVADELDYVIGVDTHLDEHVLAIIAARSGAVVAQHSIQASAPGYAAALRFAADEANSARVWAIEGTGSYGAGLARFLAGRGETVLEISRTPRAERHLRGKDDSLDATRTARAALASETLALPRSGERREALRLLLVARRSAVDVRREALTQLRAVIVTAPELLRRELCRLPKGKLLDRCSRFRRSSSSADELATRLVLRSLARRIEAATLEAAELERELLGHLRALAPALLDEPGVGPIVAAQLIVAWSHPGRVRSEAAFARLAGVAPLPASSGKTTRHRLSRGGDRQLNRALHTVVLHRRQYDPATKDYIARRIAEGKSRRDATRLLKRYLARHLYRLLQNQEPLLA

SEQ ID NO: 332874 - protein, 355 aa, unidentified
MKYYTSTTEFNCGIDLHARQMYVCVMDRQGKKLVHTNVKENDFAFFLKLVQPYKHSLTVCCECMFGWYWLADACLEAGLSFVLAHALYVRAIHGGKNKNDRIDSEKLTHLLRSNLIPPAYVYPATLRPVRALLRQRVCYVWRRSELLARIYSHQLAYNRIPVRQSRRDRDPWKERLLAQEDHPLRRFALQNDWAMIVQYDTQISLLDLELVRVTKAIVGRDYALLQSVPGIGQSLGLTILYEIGSIDRFPTVKDFLSYCRLVKGTVASAGKIKGLRGAKLGNPYLRWAFGEAAVIAKRDHALIGPLAQRLEAQMNGNKFKANTVLAIKLARAVYFMLKNKTVFDPERLVAVLAKN

SEQ ID NO: 332875 - protein, 385 aa, unidentified
MVYIGIDIAKFKHFASVVSSDGEVIIKPFPFENSRQGFMKLIEEIENFQDCLIGLESTGHYAENLIYFLYQRGYQIGVINPIQTDALRDSNIRKTKTDKIDTKLIVQCLMLKKYSLVNSQDINIIKLRRLSRFRLETIQQQTRIKTQLTACLDIVFPELSSFFKGNLHLKVSYALLEKYSSAKAIAHCRIDGLTNLLYDNSRGHYNQDKALQLKELAKQSIGLDNPAIELQIQCLIKQLRLYQKQIKDIDLAIMTLMELLNSPILTIPGVGYILGAMIISEICDIKRFSNPSKLLAFAGLDPVVKQSGDFQASSMKISKRGSTYLRYAIYRVAFLIIYNNETFHNYYISKRAQGKTHRVALGHICNKLVRVIFKILTDETPFNLS

SEQ ID NO: 332876 - protein, 418 aa, unidentified
MYSLEVPGQVVAGIDTHSLTHHVAVLATTGARLGDRQFPATPAGHGAIAAFIASFGTVIRIGIEGTGSYGAALSRSLRGEGLTVAEVIRPKRIQRRRGKSDPIDAYAAAEQVLANHDLPTPKDGDGVVEQIRVLLSVRHSAVKARANTMRQIKSLLVTAPDTVRSRWRSATDQHLISGLASTRPDDAIMSVTAATGSALRILARRYQHLTEEITLTDTDLETLVKIANPELVATFGIGTTTAAQLLVTAGDNPGRLRSEAAFAALCGVAPIPASSGKTNRHRLNRGGDREANCALHTIALVRMSHDQRTRAYVDRRTTEGKTGRDILRCLKRAIAREVWHLLTHPKPVPDITDLRPLRVSKAITLDTAAHHFGYWPTTMSRLERGQLRDDDLAHAYRDWLTQQPDSTPTKRMLTLNSR

SEQ ID NO: 332877 - protein, 347 aa, unidentified
MEHYAGTDVSLDSASVCVVDAQGKILKEAKVACEPEALIAWFTAHGTPMARIGLEAGPLSQWLFAEMKAAGLPVELLETRHVRAAFKAMPVKTDRKDARGIAQLMRLGWFRPVHCKSLPAQEVRALLTTRKLLQAKRHDVEMSLRGMLRGFGLKVGPTTPKTFAGRVRDLVAHHDTLQTIADALLNARAVLDQEFKAIEKRLYRLARANEPTRRLMTTPGVGAIVALTFASAIDDPARFRSSRMVGAHFGLTPRKHQSGETDVTGRISRIGDHGVRVALYEAANVILTRAVKGSDLKSWAQGVARRAGMKKAKVALARKLAVVLHRMLADGRSFIARKAVPSAAVAA

SEQ ID NO: 332878 - protein, 343 aa, unidentified
MHFIGVDLHKKVISVCVLVRVGDQRRILDRQNLRCDRPEQIRQYFARFAPFRVVVEATSSYEWFVQLVEPLADRVVLAHPKKLRIIAESTKKTDRLDAQVLAEFLSLDMIPSAHRPSPRLREHRALVRQRQYIQRRITSLKNRLRHLLSNYNADVPNLFTGEGQLYLDDLKFSASDRFVVEQLRESWRFFSGQLQAMDKQLRQFAKSAPVAECEARQVLKTMPCVGPVTVDVVLAELGDVRRFRSQKQVSAYAGLAPGIRQSAGRGKQLGITKEGSGLLRWALIETAWRLVGKTRRWGLVYEKLKRRAGPKKAIVAVARRVLSVMFALLRSGRRYSLASEAQA

SEQ ID NO: 332879 - protein, 359 aa, unidentified
MTDAIRWVGLDVHAAQTTVAVIDKASGELSRARLRGSPSAVLDLLAGLEGRVVAVYEAGPTGMTLARQARARGIEMKVCAPGLIPRRPTDRVKTDRRDAEILARQLAAGGLSFVRVPSEQEEALRDLVRAREDVRQDLSRARHRLSKFLLRRDLRFAGSNWTQKHLHWIGQLRFAEVSSQLTCAEYVQAVRTLMHRRDTLERALEQILPDAPFAQTALRLRCFRGIDTLTAIGLCAEVGDFRRFDKPTKLGAYVGIVPAEYTTDSKRRLGSITKAGSSHARRLLVEAAWHYRRPPRVGEKLERRHRGIDPAVIEIAWRCQRRLYERHTALAARRKPAGVTNIAVARELACFLWEAATLD

SEQ ID NO: 332880 - protein, 411 aa, unidentified
MQVIYQRCCGLDVHKRIIIACVLEWVGSGWEKEIRQFGTMTSDLLALSDWLVHEGCTHVAMESTGVYWKPVYNILEGQFELLVVNAQHLKAVPGRKTDVRDAEWIAELLAHGLLRGGFVPPASVRELRELTRYRTSLVRDRARTINRLQKVLEAANIKLANVVSDIDGVSARLMLEALVAGERDAQQLAGLAKGRLKDKRAQLVEALSGRLQPHQSFLIAEELAQIDYLDGAIERLNHQVEERLRPFEQEIGWLDTIPGVNRRTAEVLWAETGGDMSRFPSARHLASWAGMCPGNNESAGKRRSGRTRKGSPWLRHCLVEAAHGAAHTKNKYLSSQYHRIGAQRGRKKAQVAVGHSILVIAYHLLTRKQPYSDLGANYFDERDRQAVTKRCVNRLQKLGFKVSLEKLPAAA

SEQ ID NO: 332881 - protein, 451 aa, unidentified
MSKSTKKQVKKKRIAVFPILHPNAAGIDVSDKEMMVCVPGDRCDEPIQVFGTFTDDLHAIARHLKSCRIDTVAMESTGVYWVPLFLVLQDYGFDVYLVNAKHVKNVTGRKDDEEDAAWIQRLHSCGLLNRSFQLDNDTRRLRSLVRHRKNLIRSQSSHVNRLQKTMELMNIKLHTVISDILGKSGMSILDAIINKGERDARILSQLADPRIKADRETIVKSLEADWREEHLFELKQYYELYHIYQQKIKELEAEIERVLLDITVNDTIGQTDMKDMARKTRKLKKNEYSFDVSFYLQQITGVNPMEIFGVGDTTALEIYSEVGGDMSRFPSSKHFCAWLGLSPNTKISGGKIISSKVMKKKHNAGQAFRMAASTVWRSNNELGNFYRRIKSRGGSAVATVATARKIATIYYMMMVKKQSFNPQALNEYQQCYKEKKIRRLENQLAKLRAAS

SEQ ID NO: 332882 - protein, 338 aa, unidentified
MQTYAAIDLHSNNGVLTIIDETDRVLKQRRIPNKLEEFIKELEPFRATLQGVAVESTFNWYWLVDGLQAKKLPVTLVNTAAIQQYEGLKRSDDDYDAWWLAHMMRLGILPKGYIYPPEQRAVRDLLRKRLTLVQQRTSNILSVQNLEARNRGTKISANEVKHLTGACVAERYENEDLALAMTTTLAVIETLTRQTNVLEKAVLKKARLRSEWEMLLTVWGIGKILGLTIMYEAGDMGRFASPGDFASYSRCVDAKRFSNGKKKGDNNAKNGNKYLAWAFVEAAHFAVRFYPEAKRFYDRKAARTNTIVAIKALAHKLARATFHVLRDQQPFDPKKVFV

SEQ ID NO: 332883 - protein, 455 aa, unidentified
MPRSRRRPTRAATPPVVHPHAAGIDVGATDLYVCVPVERDPRPIRRFGTFTADLLALAAWLGEVGVTTVAMESTGVYWIPLFQILETRGFEVCLVNARHVKNVPGRKTDVQDCQWLQYLHSVGLLRGSFRPPDAVCAVRTVLRHRERLVQLAAVHTQHMQKALTQMNLQLHHVLSDLTGVTGLAILDAILAGERDPAVLAQHRDPRLKASRETLAKALVGDYRPEHLFTLRQAVESFRHYQRLVAECDRQVQALLEGFPARVDPAAAPLPREPRPHRRRSAAGLELRTELYRILGVDLTRVEGFATIPLALFAELGPTLTAFPSSKHFASWLGLCPDNRISGGKVLAVHTRHVKHRVAQALRTAAQSLHRSQSALGAYFRRMRAKLGAPKAITATAHKLARILYHLLTTRQPYEETHVAAAEERYHRRTEARLRAHARALGYQLVPAVPSAGGVS

SEQ ID NO: 332884 - protein, 356 aa, unidentified
MSHDVKYIGMDVHKEAIVIAVLNESGKQVIESVIETKASSILQFLHGLRGELHVTWEEGTWAAWLYDLLQPQVQHMVVCNPRRNALLKEGSKSDKVDARKLADLLRTGMLRPVYHGENGLRTLRELGRSYQTISKDLTRVMNRLKALYRGWGIACAGTQVYAARSREEWLSKLPQAGVRRRAELLYQQLDGLQALRREVRPEFLAESRKHKAAKLLRQIPCIGPIRAARLIALMQTPHRFRSKRQLWTYSGLGIETHDSAQYRFVRGQLQLSKKPQQLRGLNRNHNHEMKEIFKSAATRASCGRGPFYDFYAALLAKGMKPEMARLTLARKIAAITLTLWKREERFDAEQLKTQAA

SEQ ID NO: 332885 - protein, 343 aa, unidentified
MEHYVGLDVSLKQTSICVVNQAGSVVREGVVDSEPEAIAAFVRSKAPGAVRVGLETGPTATWLWSELKQLGLPVICIDARHARAVLKMQINKSDRNDAAGIARIMQTGWFKEVRVKGLDSHSVRALLASRALLVKIKRDLENQIRGLLKNVGLVIGRAKFNVFAVRAEELIEDRPELIAVVGPLLKARQAIEQQTDDLDRKVLKLARHDAQVRRFMTVPGIGPITALCFKATIDDPTRFKRSRSVGAYVGLTTRRHASGEIDWTGRISKCGDAMLRSYLFEAAGVLLTRVPKWSALKAWGMRLAKRNGLRKATVAVARKLAVILHRMWIDRTEFNWSKKEVAA

SEQ ID NO: 332886 - protein, 351 aa, unidentified
MVVLGVDAHKRTHTVVAVDQLGRKLGERTTGTTSQDHLGLLRWAEKFGQQRLWAVEDCRHLSRRLERDLLGAGERIVRVPTKLMAHARDAARSYGKSDPIDALAVARAALREPQLPAAQLEGPARQVRLLVDHRDNLVAERTRAINRLRWHLHELDPSWQPPARTLWRPKHLQAIGDRLAGVDGTVARLARGLVERCRQLSIEIAAIDKELEVLVGPLAPALLELCGCATITAAKIVGETADVRRFRSRHAYARHNGTAPLPVWSGNRVRHRLSRAGNRQLNAAIHRVAITQAHYHRDARAFLERRRAAGDTKAESLRALKRRRSDVIYRALLLDAELNPAPPTVLDAPLT

SEQ ID NO: 332887 - protein, 343 aa, unidentified
MQTVTTIGLDIAKSVFQVHGVDAAGQVVVRRQLKRRYVLAFFEKLPPCLIGIEACASSHHWSRELRALGHKVRLMPPAYVRPYVKRQKNDAADAEAICEAVTRANMRFVETKTPEQQSCLMLHRTRHLFIRQQTAVINAIRAHLAEFGIVAPVGRNGVEELLGVVADASDKRLPEIARACLAALGAQLRMLKAQILEFDRMINAWHRSNETSKRLDEIPGVGPALATALVASVADPRAFRSGRDFSAWIGLVPKQHSSGGKDKLGGISKQGDRYLRSLFTAGALAVIRYAKIHGAKHRPWLTALLARRPTKVAAVALANKIARMAWAMMARGERYKEPVALAA

SEQ ID NO: 332888 - protein, 348 aa, unidentified
MDHIGIDVHKRESQIYLLAEDGEIIERRIRTEGERFAAVLGDRPRARMLIEASTDSEWVARCLEALGHEVIVADPNFAPMYATRSRKVKTDRRDARALAEACLLGAYRPAHRLSDPQRHVRARLGVRDALVHTRTRYISVIRALLRQHGYRVPSGSAGSVIDRVRRLPLPGRLLSVVAPLLAVMGPLNQQLAYSDATIEHLAVQDPRVPRLRSVPSIGPVTAAAFLAAIDDVGRFPHAHQLEAYLGLVPREYSSGETQRRGPITKAGHSRPRWLLIQAALSILRRRPPAAEALWTWALRIAARRGKHVAVVALARRLAGILYALLRDGTVYAPRHPAALPGPVAALHA

SEQ ID NO: 332889 - protein, 345 aa, unidentified
MNELYEGQQFVGMDLHRRRSVLVRMTETGEHLETVRIVNTRDRLAEVMTRAGESPEVVLEATYGWYWAVDALAELGASVHLAHPLGVKAFSYRRVKNDQRDAADLADLLRMGRLPHAWIAPPETRELRELVRHRAKLVAMRSRCKAEVHAVLAKGGVWVPMTDLFGVEGNMLLDTVTMPAPYLARIASLRRFVEAFDAEIDLFTGLAQRRLTHDAGYTAIQQIPGIGPVLAAVFVAEIGDVHRFDGPAKLTCWAGLTPRHHESDTTVHRGHITKQGSRLVRWAAIESVKILPETSHIGAIREQVAHRRGNRNIGAVAAARRQLELVFYGLRDHHIRALHRSPRAA

SEQ ID NO: 332890 - protein, 345 aa, unidentified
MSQSNQYVGLDVSLKETSICVIDDADKIVWRGRADSMPEAITSAVKQHAPHAVRIGLESGQLSSWLFHELRQAGLPVICIDARHAKAALSLKVNKTDANDAFGLAQIMRVGWYREVTVKGLDCQAVRALLVARAQIVSQITTLKNCVRGILKTFDRVLPKGLRSRFAERVRAAIDGHPVLGAIIEPTLRVLEAMRVQLRVYDRAVIYRARSDDTARQLMSTPGVGTVVALAYITGVEDPARFKRSSSVAAYFGMTPRRYQSGEVDHAGRISKCGDGMVRGLLFEAAKVLLSRSARPSALKTWGEALGKRIGAKKATMAVARKLAVILHGMWTTGTTFKWNAEAAA

SEQ ID NO: 332891 - protein, 312 aa, unidentified
MIEHCYGGIDVSKDRLDVMVLPQGKSFTVGNDKAGWSALIERLAGLRLAAVGLEPSGGYERGVIRALLAAGLSVRRINPNRLRQFARARGALAKNDRLDARLIAEYVAIMPTRVVHRDAAAERIAEVVTMRRQLCDEQVAVENQAAHLEDALLRRLAKRRLVRLKADLLLLDKRLAEMVAAEPDLACRYERLTSMPGVGPVLAFSLIAWLPELGHMSRKQIAALVGLAPYDHDSGKLKGSRSIYGGRRPVRNVLYMAALSAGRYNPALKAFRDRLAAAGKKPKVIIVAVMRKMITTLNAMLRDGAPWQPQST

SEQ ID NO: 332892 - protein, 443 aa, unidentified
MQQPREVDVDESQQVVERVAAIDVAKATGMVCTRVPHSTIAGRRVTKVWEVSTTAKALSELADHLLGQGIERTILESTSDYWRPFYYILEAAGLEVWLVNAKQAKNVPGRPKTDKIDAVWLAKLAERSMVSASFVPAEPMRRVRDLARARFDLVEDRSRVKQRVEKLLEDALVKISSVLTDIHGVSGRAMIEALIAGERDPKALAGLAKGRARSRLGALAEAADGRFSDHHARLARMLLDQIDDLGARIETVTGLLDDAIAAAAPAPVVDTATGEVIVLSYPSAIERITALPGGGADSARAVIGEIGLDMGVFGTAGRLCSWAKVSPRTVQSGRRTGKARTGKGNPYLKAALGQMAMGAAKTDTFLGERYRRLAKRMPKAKALAAIERSILVVIFHLLADPTATFNDLGSDYYAKRLDTTRRTRNLVGQLEALGHRVTLAPAA

SEQ ID NO: 332893 - protein, 341 aa, unidentified
MSICVGLDVSLRSVAMCVLDAKGAIIEEVSLPCEVEAITDHIREAGYAVERIGFEAGTMSQMLFHGLTAEGFEVVCMESRQVAAALSAMRNKTDKADARGIAQVLRAGWYTPVHMKARESHDIRALLSARKALLSKCIDLENEIRGLFKAFGIRLPSHLSRLRFDEKVRPIIVADEALAFAMLPMLEARGVLYDAFRAMEKRVYAVSHKDPVCALLMTAPGVGPVTALAFKAAIDDPARFTSSRLVGSHFGLTPRRFQSGEMDNPGRISRAGDRGVRATLYTAANSLLLRSTRPSALKTWGLRLARTKGRRRALVAVARKLAVILHRMWVTNTPFLSEGAA

SEQ ID NO: 332894 - protein, 336 aa, unidentified
MMSVCILDQSGEVLVHRTMQTDPDTFLKAIAPYRQGVVVAVECLCTWYWLADLCADAGLPFVRGHALSMQAIHGGKAKNDPSDSHKIAALLRGGMRPQAYVYPAKMRATRDVLRRRMPLAHKRAALLAHVQNTHSQSNLPAMGKKIAYKANREGVAERCADAAVQKRIAVDLALITSDDALRRDVELPIVQTAKHHDAHTRYLLHTVPGIGTMLRLVLLYAIPDVTRVPRVQEFVSSCRLVQCARESAGTRYGTSGATLGHAHRKWAFAEAAVLFLRDHPAAQKYLARVEKKHDKGKVLTILAQTLARAVSDRLKRHGAFNTEKCFQRYTIREGSG

SEQ ID NO: 332895 - protein, 386 aa, unidentified
MPDVSSTAPAQVRLWVALDVHKHSIVAATLPPTGGAPEVQRIESSERAIRRLIDRLGGPSGLAVAYEAGPCGYDLFRLFGRLGVACDVIAPSLVPVRAGDRVKTDRRDAKKLVRLYRAGELSFVAAPTPEQEGLRDLVRCFDDLRCARTAARHRVAKQLLRHGRIFREGKKSWTKQHVAWVRRQRLEQPNAQRALEHMLAHLNGLDAQLGALEHELAALATSDPWRDPVAWLCRFRGIGLRTALGLLAEIGDFRRFGSARELMSFLGLTVSEYSSGDRQHRGHLTKTGNRHARRLLIEAAWHYQHPPRRPLRTGALAEPVPSAVDARAWQAQIPPAPPLPAPHRAPQALDRRGRRRRPRTRRLHLGRHDPPARPHRPPAHRHRLKP

SEQ ID NO: 332896 - protein, 344 aa, unidentified
MSKVTIGLDIAKSVFHLVFMNQSGRVLRKKKLRRHQMLSYFSQLEPCIVVMEACGSCHYWCRELTKAGHEVKAIAPQYVVAYRKGNKHDYNDAEAIAEASQREGMRFVPFKSQEQQDVQLMHRIRERMIAQQTALSNQIRGLLSEYGIVYARGVATLVKELPLTLEEADNGLSMLARRQFQGLLNDLRELREHIKEMDKELKAFSQSQPVCERLMSMTGIGPLIATALYAGIGQGQAFNSGRHLAAWLGVVPKQHTTGDNPRLLGISKRGNTYLRTQIINGARAALRHIGDKTDKVSEWCRACLARMSFNKACVALANKMVRMAWAMLHYQQDYQPGLINKVAA

SEQ ID NO: 332897 - protein, 377 aa, unidentified
MKKNITAKKKPRREEKTRKQTIQLCGRITIGMDLGDKTSRYCVLDEGGEVVAEGSTATTKNGMLRAFAPVKRCRIALEVGTHSPWVSRLLTKLGHEVIVANARQVKLISASSRKDDRLDARMLARLARADPKLLAPVRHRSEEAQADMNLIRAREALVEGRTRLVNSARGLAKTAGERLPACDPDQLRAERMTELPPGLQEVLKPLFEMVEALTGKIKECDRKLEQIAREKYPESKLLQQVNGVGTLIALTFVLTVEDKTRFAKSRDVGCYLGLRPKRSESGQRQPELRITKEGDRYLRKLLVQGAHCVLSQRGPDTDLKRWGLQLSGRGGKNARKRAIVAVARKLAVLLHHLWVTGEVYEPLRNATGTQHLKQAAA

SEQ ID NO: 332898 - protein, 343 aa, unidentified
MTTVGIDLAKNVFQIHGVDVQGETVLKKQLSRAKMLTFFVNLPSCLIGMEACGGAHYWARKLQDFGHEVKLRAPQFVKPYVKTNKNDAADAEAICEAVTRPNRRFVPVKTEEQQSILSVHRARERFVKARTAQANAIRGLLSEFGIVIAQGIKQIAVRLPEILEDASHSLPDTFRQLLQRLGEHLKELDRQVMELEQEIQHWHRGNADSRRLSKIPGIGPLTASARVASVGDASHFANGRQLAAWLGLVPRQHSSGGKSTLRGISKRGDKYLRTLLIHGARAVVRYAKEKTERTGNWLNDLLSRRNINVTVVALANKNARIVWALLAHDREFEPNYGRPEPSN

SEQ ID NO: 332899 - protein, 351 aa, unidentified
MSHTKRTVVGGVDTHSATHHAAIVDEQGRLLGDAEFPATPNGYAQLLSWMQALGRLDRVGVEGTGAYGAGLARHLHERGVVVLEVPRPDRRLRRQGGKSDPIDAEAAARAALAGDTAGTPKLATGPIEAIRMLRVARVGALKAKTAATNTLMAMLVTAPEPLRSQLRGLTRIKLVAACTRLRPDLAQLADPMHAAKAALRSIAARAHSLELEARALKRQLDELTTAAAPATSAVFGLGPDTVAALLVAVGDNPDRLRSEAAFAHLCGVAPIPASSGKTHRHRLHRGGDRSGNRALHIAVVVRLRYHPRARAYAARRTTEGLSMPEIIRCQKRYLAREVFTTLRADYTKITT

SEQ ID NO: 332900 - protein, 364 aa, unidentified
MKIVGCDLHARQQSIAMVDTETGELTEKRLMHEGNAVRDFYTSLEGPVVVGIEATGAMQWFLELLEELGIECRVGHPAKIRAAETRKQKHDRRDAEVILDLLVMKDRFPDIWMPSTEQRDLRTLLRDRHQWVKMRARLQHTLQAIALNHALREGRALWTAAGRRALQDLALPPYTHQRRDELLALYTQLEKRIQQLDKQVESEAQQRPGARRLLTHPGVGPVTALATEVFLGDPTRFATANQVVSYIGMIPCEHSSGKKQRLGKLTKEGNALLRYLWIEATLHAVIQDAELKRFYRRKLIQKGMGKARVAAARKLGIRLWIMLRDEIDYEEFCRRGKLRQKGEAHAGMTDYNSGPARAVTGSTE

SEQ ID NO: 332901 - protein, 317 aa, unidentified
MHSETCWVGVDVSKSTLDVYVSSPEHAFSLANDPDGIRRLIETLHPAQPRLIVLEATGGLERALVAELMVAPLPVAVVNPRQVRRFAQALGYLAKTDRLDARVLARFAQAVEPTPRALPEADALALTDLLARRRQLVEMLTMEKNRLQAARNATVRQDIKAHIEWLQQRLKSTERGLHEAVEASPAWQAKAELLGEVTGLGDVTILTLIACLPELGQLNRKQIAALVGVAPLNRDSGTRHGRRCVWGGRAPVRHVLYMATLSAVRYNPVLKAFYTRLRDAGKVAKVALVACMRKLLTIVNAMLRDQAHWDPAHGKTA

SEQ ID NO: 332902 - protein, 362 aa, unidentified
MPRARRRAPVVASVFHKPEQLLGALEPEFARPGRRTDNVSTRSTKTSRRSFIGIDVSKQFLEVAVHKNEYHFRCPNDPKKFPTLIAELIALRPARIVLEATGGLERPLLHALRRAGLPVVLINPRQVRDFAKALGLLAKTDRLDARVLAHFAAAIQPPLRPIKTAEDTELDALMGRRNQVSDMLAAEKNRRGSAATEAARADIDAHIEWLEQRLKALDKQLKDQLKRSVAWQQKDKILQSVKGIGFVTSVSLLADCPELGQLNRHQIAKLAGVAPLNRDSGKQRGTRHIFAGRAPVRAKLYMATLTAIRCNPVIKAFYQQLIARNKLKKVAIVACMRKLLTIINVMVRDNKVWTVKAQPVSA

SEQ ID NO: 332903 - protein, 376 aa, unidentified
MKNTTTYGGVDAHKKDLFIAMLIGTEQTPVTWQLQNEPNAVRRLVRKLERDAPGPVRVCYEAGPCGYALQRQVTTARVHCQVIAPSLIPRKPGERIKTNRRDARKLAELFRAGLLTEVRPPTPEDEAVRDLCRARDDAREDLQRSRHRLGKLLLRRGLHYSGGRNWTQGHRRWIASLEWTQPAERVVVDDYLLAIDHLEARLIELDARLVEIAATEPYRERVGWLRCFRGIDTLSAILMLAELHDFQRFPSAPALMAYVGLVPGEDSTGEKHRRGRITRTGNALVRRLLVETAWHYQHRPSIGVALTRRRKGQPGRVIAIADKAQQRLCRRFRRLMEQHKPAPKVAVAIARELAGFVWAALQPAPVPTSTRVERSQ

SEQ ID NO: 332904 - protein, 370 aa, unidentified
MSQSSTLFVGMDVHKETIAVAYVAQEPGAEVTYFGTIGTRQCDIDTLIRKMQSKAQHLIFIYEAGPCGYWLYRYLQKKGYDCWVVAPSLIPKKAGERVKTDRRDAVQLARLARSGDLTLVYVPKVDDEAIRDLTRAREDVISDLKDAKFRLKAFLLRQDIRYAGRANWGPAHLRWLAEVVCPTPAQQIVFQEYVRTVTEHTERLGRLDQELREQVKTWRLHPVVDALQALRGVQFTVAITMVAEIGDLTRFEHPSELMKFLGLVPSEYSSGQRRQQGGITKTGNTHARRVLVEGAWAYRYPAKVSRQLQLRLEHQPQMIQDISWKAQVRLCKRYQRLVAKGKHANVVTVAIARELVGFVWAIAKKVPITL

SEQ ID NO: 332905 - protein, 386 aa, unidentified
MQKLNDLSRSLAVLEPDVTLIAVIEMSLSSWLVAGIVPGVERQPLKKLAVDESALLKLLHRWREEAEKAGRRIKRIVVAFEAGRDGFWLARWLKACGIEAYVIHASSVAVSREHRRAKTDRLDTELLKRAVLGWLRGERDHCKMVAIPTIKDEDAKRPNRERDSLVGERSRIVNRMKAALVRLGIRGFNPKLKRAAERLDGLRTPEGEPIPPNTMAELRRDMERRRLVNNQIRQIEEARLERLEQTPSDGPHAMVRLLARVIGVGIETADMLVHEVLTRNMRDRRAVARYGGLTGSPDESGRRRREKGLARSGNARVRRGMIQLAWRFLLHQKNSALAQWYRARTENARGTRKPMIVALARKLLIALWRLVRQGVVPDGVVLRLAQ

SEQ ID NO: 332906 - protein, 485 aa, unidentified
MKAQRAKAYRRSHRHQSGPIRPAASMPVVNPHAAGIDLGATEHWVCVPEDAVPEGQANVRAFGAFSADLDQLVEWLRACGIKTAAMEATGVYWVALVQKLEQAGIEVVLANARHLKHVPGRKSDVKDCQWIQQLHSYGLLNGSFRPTQDICALRSLLRHRQNLIESCGREVQHMQKALQQMNVHLHHAVSDLVGATGLRILDAILGGERDPQQLVQLRDEQLCTKTTREELEKALAGDWREEHLFVLRQALATYRHLLNQVLECDAQIEQALVQVIIPQPAPLESPIPPNPKAKDGAPAQTKKKRFHRLKTGTSLKRDLTPELKRVCGVDLTQVIGLNVLSVLIIISEIGLDMSRWRSAKAFCAWLGLCPGNKISGGKVLDSRTAHVINRAAILLRTLAPRIGKTDTWLGIFHRRMRARLGPAGANTATARKLACLIYHLLKYKEDYIEVDHLVFLEKIRKQRVVRLRKQAQELGMQLTELQQAA

SEQ ID NO: 332907 - protein, 372 aa, unidentified
MGHHTEAYVGIDTSKSCNAIAIADGGRGGEVRYLGELPATEATIRKLVAKLAAKYRDLTFCYEAGPTGYGLYRLLKSLGHECLVVAPSLVPKKAGDRVKTNRRDAVSLAKLLRAGELTAVWVPDERHEAMRDLSRARQAVKKDLQGKRQQISSLMLRLGRIYPGKTTWGPAHMKWLMAQKLEHREQRIAFEELLEGVRQESERVERLENAIREAVPEWSLAEVVAALQAVRGIDLIAAVGVLAEIGDLSRFQNPRELMGYLGLVPSENSTGDKVKRGGITKAGNGRARRILVESAWSYRYPPRVSRDKQPKVEAAPRHVREIAWKAQTRLCGRFRSLERKGKRRTVIATAIARELSAFIWAINRELMAHRQA

SEQ ID NO: 332908 - protein, 427 aa, unidentified
MGNDNATKYREFCQFRRQIRGSSEYLIVGIDVAKSPHHAFFGTARGQSLLRKLLFENSRAGFEKLMERVDQLKVGQGLGKVVFALEPTGNYHKPLSRWLQDQGQLLVLVSNHAISENRQTLDGRWDKNDTKDSANIADLVSQGKCLFFEEPGEDLVELRSLLSLRKRLKKQSHSLRMQIRNGLVAKHFPELDRCWGNCMTENLAIVRWCLDPRMIASLSFDAFVRQVTTKDRGLRQVKRLRTIHELAATSIGLPVDAAAVHEAKTLVERFNDLCERIEQTESKIEVVCRRFKAYRRLRSIPGFGPYVSSQVLARIGDPNRFAGRRQVIRLAGFDLNAKRSGKRSLSAVPVISKRGNSDLRYALYQAATIASYHHAAFRALFTRYQEGRQKERGIKTKMRVKLAAKMLVIAWTLMRADTDFDPNKLGV

SEQ ID NO: 332909 - protein, 367 aa, unidentified
MTSLTHRGYIHLGMDVSRDSIAVAILGPDTDLPVIEKISSDPEAVRRLIKRVGRPSGIWACYEAGPTGYELYRLLNSMKVRCDVVAPSLVPKGRGDRVKTDKRDARKLAGLHRAGQLTAVAVPSPVQEAVRDLCRTRGQMVGDLTRARNRLTHFLLRHGLVYRDGTKWTRRHEAWLAAQHFDDAALALTYRHYRATLALRDKSLEDVEADLRGYFTTEPFADAVVRLGGYRGMTHMGGLCIGAEVFDWRRFPRARSFMAFTGLTCWEDSTGLSQHRGSITRAGNSKIRAQLVESAWAYQFQPAIGETLRQRLAMVSPATSARSWSAQTRLCRRFHALAQRKNVKSVVAAAIARELAGFLWAEMTAAD

SEQ ID NO: 332910 - protein, 344 aa, unidentified
MHITSIGIDLGKNTFHLVALGERNKVLVRKKFSRAQLLVYCANLPSALIGLEACAGAHFMGTRLREQGHEVRLIPAQFVKPYRKSNKNDFLDAEAIAEAVTKQNMRFVQIKTEEQLDVQAMHRVRDRLVQRRTALINEIRGFLLERGITFAADPIHLRKNLPGVIEDAEQKISPRLRWLLDRLWQEWKQTESDIKAITNEIERISKENALCRRLQQIPGFGPLVSTATVAAIGNGAAFRRGRDFAAWVGVVPRQYSTGGKQKLFGISKRGNVYLRRMLIHGARAVLFRIKYDTGGFGQWVQRLAQRAPRNKVVVAIANKLARIAWAVLSSGKDYQHQPLQMTAA

SEQ ID NO: 332911 - protein, 349 aa, unidentified
MESVSISKQYYCGIDLHADVMYACVMTKSGKVVFHHEMPTDFKCLLKHLKPYLSSIAVCAESTFNWYWLADGCAKHNIPFFLGHALYMKLIHGGKTKNDRIDAKVMADLLRTGFFPPAYPYPERMRATRDLLRRRAHLTQLHSETLRHIKTLLYQQGYTDLPAVHNYNAQKIRETFSVYKLPDDAAFSLQTDFSMIEHLDTQIGKLEWQIEKTAREHDHHALALLRTMKGLGLIISLTLLYEIHTIKRFKSAQCFSSYARVVRVERSSHGKKLASKNNKIGNPYLRNAFGLLAISAQRFYPAIKVYTQKLVKKYGNAKAYTLLAHKFAVAVYYMLKNKTAFDVKRFVAA

SEQ ID NO: 332912 - protein, 414 aa, unidentified
MEKQWNIVCGADIHKKFLIATILSRDGTKATRRFGMTLDDLLTFKNWVIENGCEQVAVESTGTYWVPIHTVLEGSVGLIVANAYKIKYTPGNKNDLDDADWIAELCLNGMIEPSRIFPKADRDLRRLTRIREGYVNDMTREKNRVHHALESCGIKLSSVLSDIFGKSGRYVLNGLLEGRTIDDILKGIKLKRIKKKADEIKEAIKGSLDLTQIFLIRGSLEQMEAIQKRIDELGVEIKARSAHRNADLKIAMSIPGVGFTSASTLLAEIGDITDFKKPEQLAAWAGLVPSVYQSADKLLTGSITKHGSRHIRRILVQVAHVIARGRNSKLKRFFLRIKSKKGSNVAVVALARKVLCILHHLLMNREMYHEGGINKKIKIDIEKASSSTEIDLEEMIKYIVKAGYEVRKGPSGGG

SEQ ID NO: 332913 - protein, 388 aa, unidentified
MIYVGIDIAKLNHFASAISSDGEVLIQPFKFTNDGDGFQLLVSHFDSFEKASLIIGLESTAHYGNNLVKYLVASGYQVCVINPIQTASLRKTNIRKTKTDKVDTFLIAKHLMMQTSYRFVSLKDLDMMDLKDFGRFHQKAIKQRTTLKIQLTSYVDQTFPELQYFFKSGLHQKTVYALLKEAPNAQAVASMHMTHLSHLLEATSHGRFKKDTARELRVLAQKSVGSPDKAISIQITQTIERIELLDSQLEKVEAEMHEIMDFHDSVIMTIPGIGYINGGIILGEIGDIHRFSSPTKLLAYAGLDPVVYQSGNFNASRTRMSKRGSRTLRFALVNAAHNVVKNNATFKAYYDAKKAEGRTHYNALGHCAGKLVRVIYKMLTDNVEFNLD

SEQ ID NO: 332914 - protein, 375 aa, unidentified
MGDYSEAFVGLDTSKLTNAVAIADAGRGGEVRFLGEIENTPSATAKLVRKLSTKYKRLTFCYEAGPTGYGLHRQIKDLGFECVVVAPSLIPKRPGDKVKTNRRDALSLAKLLRADELTAVWVPDGRHEAMRDLTRARETAMLDLRTKRQHVSAFLLRLGRPYPESRKTWTKAHMSWIASQTLEHPQQRLVLEEMMLAIRQAQERLQRLEQAIAAAVGEWSLAPVVTALMAMRGMDLISAATLLAEIGDLSRFQTPHELMAYLGLVPSEQSTGEDVRRGPITKAGNRRARRMLVECSWSYQHPPRVGQAKQPKVDAAPPAVREIAWKAQCRLYRRYRALIRNGKLKTVAIVAIARELAGFIWAVARAVTPARAAVA

SEQ ID NO: 332915 - protein, 349 aa, unidentified
MKDIKTLGIDLAKTIFQLHGIDKKGKCVLKRRVTRGKLLNVISQLPPCLIGMEACGSAHYWAREFQALGHQVKLMAPQFVKPYVKSNKNDRNDAEGICEAVSRPNMRFVPIKTREQQDMLLVHRARELAVKHRTALSNQIRGLLAEYGITMPKGYIGKYMATILSDAFEQLTESACVIFNSLYEQYRQLDEQVESYDKMIQQQATKDKRCQALLDIEGVGPVIATVMVATIGDGHDFKKGREVSAWLGIVPKQHSSGNKERLGGISKRGDSYIRKTLIQGAKAVVYRCDQKTDRRSLWLKDKKDRCGLNKAAVALANKNVRIIWAMLSTGECYRKPTQNNVMKAAPVAA

SEQ ID NO: 332916 - protein, 356 aa, unidentified
MNAGKLNRIKYFVGIDLSKLTFNYCIRYDGTNVTNGKSANNPESIVEFLDSLHQITGFNFRIAVFGMEVTGIYGNILINALMARKAKFVVAPAIRIKNSLGIIRGKNDNLDAARIARYLIKNLSELELWTPRRKLIDQLASLSSLRERMVKIKKIVKTPIDEDQGFVSPAIAQSNIEFCEPLVFQINTLVDQTDDKIKQLWTNDERCKRLMEIMLSVTGIGPVTAIQILIHTNEFKSIKDARSFASYCGVAPFEHQSGTSVKKKSRVSPFANRRIKSLLHNGVRACIAYDHEIKAYYQRKVLEDKKNKMSVMNAIKFKLICRIFACVKTDRLYNRAMLVNNTEAETSMTSIDKSHH

SEQ ID NO: 332917 - protein, 340 aa, unidentified
MKLYTAFDLHANNSYAAIIDQEGHKVAGKKLINDPQVVLEFLKPHQKDIMGIVVESTFNWYWLVDNLMDCGYKVHLANTTAIQKYNGLKHSGDKEDAFWLAELLRLNILPEGHIYPKEERPIRDLLRKRSHLVRLRTSLILSLQNIVDRNCGKRIKVKDIKKRKEDLVAPFFEGNDDLSLTGKISKEAIDFFTAKILTVENFVEDKLELKKPYQYLLSIPGIGKILGLTIMLETGPVERFEKVGNYVSYCRKVSTRWTSNDKTKGKGNKKNGNKYLAWAFSEAAEFSRRYDEKAKAFYNRKMQKTNFMVAHNALAHKLARAAYHIMKDQVPFMPDKLFSS

SEQ ID NO: 332918 - protein, 370 aa, unidentified
MGEPTTLFVGLDVHKDSMAVAHASADPASDVVYVGQVGTREADLDKLLRRLHSHASRLVVAYEAGPCGYGLYRTLTRKGISCLVVAPSLIPKKPGKRVKSDRRDAVQLARLLRSGDLTSVYVPTVEDEAVRDLSRAREAAIGVLKDAKLRLKSFLLRHGLNYSGRAIWNEAHLRYLAKVVCPTPAQQIVFQESLRAVGEQTDRVRRLEDELSEIAATWRLRPVVDAFQAMRGVQSHTAVTVAAELGDLTRFDTPRQLAAFIGLIPSEYSSGESRRLGPITKAGNGHARRALVEAAWAYRYPAKVSAHLQQRLQRCPMPIQNIAWKAQVRLCKRYRRLVARGKNPNVVVTAIAREILAFLWAIAREVPIGG

SEQ ID NO: 332919 - protein, 341 aa, unidentified
MQITTIGLDIAKNVFQVHGIDGDEKAVVRKQLRRNQVLQFFDELPPCLVGLEACATSHYWARELARLGHEVRLMPAKDVKAYIKRNKNDAADAEAICEAVRRPTMRFVQIKSADQQAQLMQHRARDLLMQQRTQLINAMRSHLAELGIIAPQGREGVKELLAIIAHDDNRHLPVDARASLVVLAAQLQALQTMIGAIEKRIVKQHRASKESKRIQTVPGIGEIGASAIAATVTNPRIFRSGRDFAAWIGLVPRQMSTGGKPKLGPISKQGDRYLRRLLVVGAISVLRQAKLHPGKFPWVTQMLARRPFKVVAVALANKMARTAWALMMSGKTCRAARYAAA

SEQ ID NO: 332920 - protein, 315 aa, unidentified
MAEETKEVFVGIDVSKEQLDVAVGEDGAFWSISNDGDGLQKLVERLKAQSPTLVVVESTGGLETPAVAEMAAAGLSIAIVNPGRVREFAKSVGLLAKTDKLDARLLARFAAAVKPPASRLPSEEEQYLTGLVRRRRQLIDMRTAEKNRLGTTRLAFRERIDNHIAWLNEEVEAINEEIDDFIQQSPLWAKKEAILQSTPGVGPVTARTLLAELPELGQIDRKKIAALVGVAPMNRDSGPRRGKRRIRGGRASMRSVLYMAALSATRFNPTICAFYHRLLDNGKEKKVALTACMRKLLVMQNAMLRDLEPWHPNPL

SEQ ID NO: 332921 - protein, 303 aa, unidentified
MDDTIRFVGLDVHKRRTVVAIADSGRDGEVRQYGAVETERSAIAKLAGKLARGGKTLRFCYEAGPCGYSMHRWLTGLGHECEVVAPSLIPRRPGERVRTDRRDAVKLARLHRAGELTAVWVPDPAHEAMRDVVRARAVAVSAVRRARQQLSGFLLRHDRIYSRKAWTGAHRRWLAELKFEHAAQRVVLEDYIDAVGAAERRRDGLTEQIREQLPRWSLAPIVEAVQALRGVAAIAAIIIVAELGDPRRFDNPRQLMAYLGLVPSEASSGEKVYRGGITKAGNRSARRALVEAAWTYPITGLPD

SEQ ID NO: 332922 - protein, 351 aa, unidentified
MIIIGVDYHPSSQQIAFMDQETGECGERELNHSDGEAERFYRELKERGVGVRVGMEATGHARWFERLLAELGFELWIGDPAEIKTKRVRKQKTDREDARLMLKLLLENRFPRIWVPSPENRDLRQLLWHRHRLVQMRTRIMNQLQAVAMNEGYRWKKKLFGQQGRALLEKLSLAPWASRRRQELLELLDQLNPKIAELTAAVEREANKRPEVVRLMTHPGVGPITGVAYVLVIGTPDRFSCGKKIGSYTGLIPCEDSSAGRQRLGHISKQGNTLLRFLLVEAAQAAARCDADWRRRYMHLMMRREKGIAKVAMARKLAVRLYWMWRNNWQYSQLVEFGSNAGKLGIVHGMK

SEQ ID NO: 332923 - protein, 335 aa, unidentified
MQNVALIGIDLGKHSFHIHCQDKSGNALLRKKFTCTKLMQFLATCPSSVVVMEACAGTHFMARRISDIGHEAKLISPQFVRPFVKSNKNDFIDAEAICEAASRPSMRFVQPGTETQQAMRALHRVRESLIRDNKVKTTNQIHGFLLEFGISLPTGDAAIKRLSLVLAEHEVPEYLSRLLMKLYANYLYLIEQITELESELNQSIKADATAQRIMTIPGVGPMTASLLSSQLGDGKQFSCSRDFAASTGLVPRQYSTGGKSTLLGISKRENKNLRRLLVQCARSFMMRLEHQQGRLAEWVRKQLDNKHSNIVACALANKLARIAWAITALQKEYQA

SEQ ID NO: 332924 - protein, 357 aa, unidentified
MKYIGCDFHPSFQQIAMLDVETGELVERRLLHTEEARVFYEGMQEPVLVGIEASGNTHWFESLLARYRHQLWIGDAAAIARQNGRKQKHDRRAAELILKLMVENRFPQIWVPTVAERDLRQLLIHRQHLVRMRARIKNQLQHIALNQGWQKKHKLWSEAGLALLRSLPLEPWTQQRRDTLLAMLQELEEKIQPLDQAVEKEAWACEAARRLDTHPGVGPVIALATVLTMGDVRRFADSRSWVSYLGLNPSEASSGQRRRLGGISKEGNPFLRYLLVEGAVSATRRDKDLARMYARLKAKKHHGVAKVAVARKLAVRLYWMARTQKSYPEVVRTQGSQSHPVAERRAVQLNRPPASHQ

SEQ ID NO: 332925 - protein, 430 aa, unidentified
MTLREPTPADAVLVAIDVSKQRNDVLIEVPGQSRRRRLVVVNTRTEHDRFVDILQGLGRPVIAGFEATGNYHRPLAFRLLEAGITLRLVSSVALARTREALHNGWDKNDPKDAQVILHMLKIGATQTYLDPIRAGINDIQELSKTHEIVSKAKTELWHRLLTHYLPLYFPEVARFAGNSRSDWFLAFLEQFPTHGSITAQSKDAFIEAAWATVGRKVSKARLLGDIYETAQASIGLPVAIDSPATAMFRMVIAEGRNLIRQRDAIEKHAHAALGENADYQRLRQIPGIGPIHAMTILAEAGDLRRFRHHRQFLKFCGLDLATHQSGQFRGLTKLSKFGNARLRRAFWMAAQVAIRQRDNSFRAKFERYIAKDRANADLRRKALTAVTAKMARTAHAVIKSGTDYRPFIEGPMPSGRTSIRMGREGASATL

SEQ ID NO: 332926 - protein, 457 aa, unidentified
MGRQGKRTKGIEEEHPFTGMSQVNLNAAGVDIGAVEIVTCIAGENSTQIVKAFGNYTVDLQNIGKWLHEHNVRTIAMESTGVYWIPLFEELERQGFECLLISSRSLRRVPGRKSDITDAQWIQTLHSYGLLESSFRPQAEWVALRTLLRHRGQLLEHRAPHIQHMQKALLQMNVQLSQALSDVTGETGLVIIRAIVLGERQPEKLAALRDRNCKKSAEEIGKALTGTWREEHLFIIKQSLELYDFYTKQVEICDAEIDRMYAMTRLDWEEGELKLLPQKKRNSHSKNAPQGQAEIRKHLKRISGVDLSMVDGFGVSLAQTVIMEVGTNMNKFPSEKHFCSWLGLAPKHEISGAKVLKNKTMKTKNRAGQAFRMAAQSVKRADCVFGSLYRRLKSRLDKAQATVATAHAIARVVYRMLKYQVEYETINVEEYEQKYKDAQIKYMKKKAAKFGFQLVPA

SEQ ID NO: 332927 - protein, 400 aa, unidentified
MKSVLSVDVAKGKSMIMLSTEYGEVLIEPKEIKHNFRDFNELKDKIESFNLEDLTIFMESTGIYHLPVERYFKENNFSTLVINSLTTKNNYDTLRKTKTDTKDCMRLAKLFFVNEVEYHDLSKKDLYANLKAMTRQYFYLTQLNVSCKNRYKRLINICFPEFEEIFKGSRIYEETALNFIKTFPHAYIVKEKRIDALYNNLYKTNSRHDYYYKRLANKIKDIAVNSYPGVDKDHSDVKNLSDMAAILQENIKTINELKEKMIKTAKESPYFDIINSFYGIGEVLTTELLGELGDITRFDNHRQLIAFCGLDPTIIQSGKSINVHGTISKRGNKYARWILFNISQIVVKLGHQCPGHPVYDYYLTKKAEGKHYYENLTACSTKILRMLYTMCKNNTTFKIN

SEQ ID NO: 332928 - protein, 322 aa, unidentified
MKNLSFLGVDVAKDTLVIFDGQKVYEFQNERGLKKFKRKFFKKKEDRKKRVVIYEPTGPYSAFLEEFCATNMIKVVSLNPRKVPRLREVLGHRAKTDNLDAKLLYEYHKIVSEEEIKEIEYNENLEKLALLLSEYQLYQNIENKLSNFLEYLDRVPVDSKESKKHIQKNLEETRQRLQKIKKEMEELVNKDDDINKGVKEIEKVKGIGKMIATYCYIFFRKRRIRNRREVVALAGLDPEVKESGKRKLVTRISKKGDNRLRSLLFMGALSAIRCKEGGLKEYYESLIKRGKPKKVAIIACARKLLIFAFYNYKKWQMEAQSA

SEQ ID NO: 332929 - protein, 430 aa, unidentified
MGRLKIVFPVCCGMDVHRDFVIACIASTNSQGVTEYQSKRFSTYTGDLRKLAAWLKENHCSDVCMESTGKYWFPVHNILEKDFHVVVSHPKFVKAIKGKKTDKKDAMWIADLFKHDLVRGSFIPPEDIRQLRDLCRYYQKLVWNTTGEKNRAQNCLTVSNFKLDDVFSNVFGKSASAIISQLLEHPGEAFDVAPFLDKRCKASPQEVQEAIDGVFSPWQAEKLKVIRKHISNLDDLRDTLQKLIFKLAEPYSRQIELLLTVPGISDPMTAIRVIAEIGADMRQFESSKHLCSWAGLTPQNNESANKKKTTRIGKAGQYLKPLLIQCAIAASNPRSKLYPEILAKYQILKKRRGVKKARVAIARRLLTAIFHILLNDTPYQPADSSAKDSAPEQRIISLSQAIALLTRKGYVISEVADISDLPLVESAPSS

SEQ ID NO: 332930 - protein, 345 aa, unidentified
MPIVGGLDIHRKQLTFDYLDTESGEVKRGQIAPADRAHLRAWLVRFAGRNDVAFALEGCTGWRYVSEELAGAGVAAHVAEPADTAFARGRKRHAKTDKTDSRHLRELLAEGRLPECWIPPSRILECRALLETYHDLRAEHTAWVQRIHAVFFHQGAPALGEAALRTDDDLKALRAAAACRLSPAGQLQVDTALGMLAALEARLDVLRHRLLDAARGLTGARVLAERLYGVGPVTALAMTCWLGGAGRFSSSRKAVRFAGLDITVWSSDRKGPPGRLSRQGPEVLRWAVYEAGKTHARASAPDHRYYAAVKDRQGGKRAALSEARKILRQACHILAELGDDALTAA

SEQ ID NO: 332931 - protein, 456 aa, unidentified
MKKHSKTEPAVNPCLKSGSAKKAKTANAMEPSEVVAELVRKLSQKVHAEEAAAAGSLLQKVAEPAGGVGVGKTAGSRQGRQPLGMNLDRLTIGLDLGDRMSNYCMVATDGEVLLEGKVKTEREAMRKLFEALSGSRVVVEVGTHSAWVEEVLKEIGHEVVVANARKMEGNKKKRKKNDKEDARMLARKGRADPESLYPIEQRGGETRQGLTLVRLRGAVVEVRTKLINALRGTVKSYGERLGKCSSESFAERAAEEMPEQLQELTEPVVELLGMLNETIAKYDAGVEKLAEEKYGVETGRMRQIGGVGALTSLVYVLTIGDPARFRKSREVGPYLGVVPRQEESGESAPQLRITKAGDEDLRCLLVGSAHYILGPFGKDSDLRRYGLALSERGGKNGKKRAVVAVARRLAVLLHRLWVSGEKYEPLRNARLKEEGEKIAAEKESRKEGVAAGEQAA

SEQ ID NO: 332932 - protein, 373 aa, unidentified
MVVPTATPRRHRLCQNEVVADLRQWRPPVEQISRIGMDTSKHFFQLHGVNAAEKVVLRKKLRRKEMVAFFKALAPTVIGIEACGAAHYLARLLGSFGHEVKLIAPQLVKPYVKRGKNDGADAEALCEAMSRPSMRFVPVKTAEQQAALMMVGLRDRLIRNCTQLSNAIRGYAAEFGFSAAKGKAHLVPLLERIQADESVPVLARELFTAQAEENARLQAQIDAVDAKLLAWHKADESSRRLVKIPGVGPIGAVLLMLKTPAPELFRSGRQFAAWIGLTPKDHSTAGKVRLGGITRAGDEALRSVLVVGATSVIQHVRRGGRGSPWIVNLLKRKPPKLAAVALANKMARVAWKLMVTGERYAAKSVPAALANAT

SEQ ID NO: 332933 - protein, 334 aa, unidentified
MSGYERVIGIDVSSEKLDISDSMGKLPAVVDNKVDAIKGKLLKKLTAPEKTLVVCESSGGWEGLLVDLLHEAKVNVAVVNPRQTHHYARAHGYLEKSDRIDAKVIRLFGEHVKVHLTKPLSEQEKQFQALSRRRVQVLTMINQEENRKLLCRDKTSRGLIDASLEMLKNQLKTIDAQLKKFVDQLSKDTPKVKIIASVPGIGPVTTATLCCELPELGMISRRQIAKLVGVAPLVKQSGNSEGKRKARGGRATVRRPLYMATLAATIKNPVIRAFYLKLIQKGKPHQVAMIACMRKLLLMIHDMVRNEQMWDPLKKANDQAVSSLATGTTCSAGH

SEQ ID NO: 332934 - protein, 408 aa, unidentified
MNAVGIDVSKGKSMVAALRPMGEVALLPQEFLHTEVGLEQMAYAIIALGEDTRVVMEATGRYHEPVAAALHEYGIYVSVLNPLFIKQSGGGSIRKVKTDKADAMKIAKYGLDNWVDLREYTPMDTVRQQLKLCSRQYNLYMKTVVSLQNNLISLTDKTFPGVNELFSSPERADGHQKWVDFVMTFWHCDCICRVSEKAFTERYQKWCKRKGYHFSTEKALDLYAGSCGHFTTLPKNDNIKLLITTAAQQLLAGKMTLAALRAEMTRLAMQLPEYDTVRAMYGVGQTTAAQLMAEIGDVRRFPRRSSIVGFAGVDPGVDDSGKHIAKSVPTTKRGSPHLRKTLYQIVCTYLRKAPADEPVYQFLDKKRAEGKPYFVYMTAAQNKFLRIYYARVKECLEAFDAQQSISQG

SEQ ID NO: 332935 - protein, 417 aa, unidentified
MTDGKNASPCRYVALDIHKHYSVIAAVNRDGQIVLEPVRMEHEDLEAQLNQKLLPSDQVVIESTTNAWHIYDLLEPLAAKVLVANPIRVKQIACAKVKTDIRDTLILARLLAANLVPTVWVPPVEVRDLRYLLSQRRRLVGMHTQTVNRMGSVAHRHHLNHPKGKRYIEKNTEWQQDDELSDSEKFQLELDMATGEHLDGQAKKIAEKIARMSQEEPWAANMMYLMQLPGFGVITGMTVLSAIGDIARFESSGKLSSYSGLTAGVEQSGTKNRGKGITKEGRKELRWAMVEVAQRAVKSDPYWKSRFQALERRMHRNQAIVAIAHQMLELVWHVLTHKQAYRHFSEERIAYKYLTWGWQLDEEARDGLTRQQFARYYLMRLGIGHDLKRIALNPKYPRKLASEAEVLALKPELNQTR

SEQ ID NO: 332936 - protein, 352 aa, unidentified
MEKHSKVTRQATPVETIGIDLGDKISRYAIVDEVGNLMEEGKFRNQPESIRKHFGQGMHARVALEVGSQSAWIARELKQLGHEVIVANARQVKWITASDQKNDRVDALKLARLARVDTKLLAPVEHRSEQQQAELDVIRARDAVVRARALLVNAARGMAKGIGHRMPKAITSTFGVRTLQVLPAQLRPALEGLLQQIDQLSAAIQGYDEAIAQLIERHPEVKRLKTIRGVGPLTAMTFVLTVGSAERFAHSRDVASYLGLRPKQKQSGTCDPQLGIAKSGNKYLRKLLVQCAHHVLGRFGIDSSLRRWGLVKSEGSKNAKKRAIVAVARKLAVLLHRLWVTGETYKPFPQMG

SEQ ID NO: 332937 - protein, 346 aa, unidentified
MTLYIGVDFHPHQQTVASCDTRDGEIRFLTFKHSDKSMIRSFYGGLGEAAVIGVEATGGLDWFEEMIFENGHKLMVGNPHEIRRRAMSRHKSDRRDAETILDLLMHREFPEVWRRNQESRIALEMLRFRQNLVKQRTSVANQLQALARKRGLPRFGTRTKKGRTLFLAADLSESDSYLRESLYRLFDDLSDQIERVDGRLQGIASEIEEAKRLMTHSGVGFRTALAVTATLGDVSRFNNIRQVSAFVGLDPLNKSTGETKRIGRISKRGSRVCRFLLGQAAARSSDPRLRASYKRISSRRTTAVAKVAAARRLLVNCYIMLRDGIDYAEFTRRGEVGLHENTPASK

SEQ ID NO: 332938 - protein, 324 aa, unidentified
MIDGVLGIDVSKNTLDASMSSCNKVRARSFANSPDGWRHLLDWLITQRVRRVHACLESTGRYSLGIAGALNEAGHVVSIVNPAQIRDFARTKLGRNKTDGVDASHIREYCELFKPQPWAPPSEAHRRLGELQTIRAGIIAGLTEWKNRKNSCMIDAVAQSLADVTISHFTSQLSAVDEAITQTIDHDSVLRRKRDLLLSISGVGETLAGVVLAELPGPDVLHSSAEVVAYVGLNPRQHQSGTSIDRMTRISKIGNAVLRAALYMPAMSAMRYNPAIVALVARLKSRGRLKPKQIVVAAMRKLLVLCFGVLKTGKPFDPAIAMGR

SEQ ID NO: 332939 - protein, 402 aa, unidentified
MTYDYVIGMDVGKYFHHACVLDIDGTQVLSKRINQNEKSLRALFSAFSAHDHKVLVVVDQPNNIGRLTVAVAQELGIDVRYLPGLAMRQLSRIHAGNAKTDIRDAYIIAHAAKNLPESLRSVDRVEEAFLQLKVLNGIDEDLARSYTRLINQIRSALVGCYPQFEQALRGQIIHRKWVLHLLARYGGPTKIKRLGKAKATAFARRYKARNPEPVLDAIFAAISEQTVAIAGAHYAEMGVAMSAKDALLKLEHRQQIEQEVIELINDIPHTQILLSMPGIGPKTAAQILMTAGDMTDFPTAGHLASYAGLSPRTNQSGTSIMSNSLNRAGNKKLKNALWQSSFASIRFHERSRQFYERKRREGKRHNAAVVALARRRLNVLYAMMRNHKHYHDPAPSQEDLAA

SEQ ID NO: 332940 - protein, 428 aa, unidentified
MNIEETIRRQQFCQIKDEIRGSDHYLIVGIDVAKDKHHAFMGSATGKSLLRKLVFENNLEGFRMLLERSDAVKTQNALSKVVFGMEPTGNYHKPLGAYLIRCGHHVVLVTGKAVKNNRELLDGRWDKNDDKDAANVADLVSRAKCLYYDYPSSSINDLRQLLSLRRRLKKEEHSLRMRIRNNLLAQYFPELDRFYSACESESLAIVRWCLDPGRIAGMELDEFFTMVTTTRRGIAQKLRLQKIHRLSVQSIGCPMGPAAELEAQLLVEKLKEVRRQLKEISDLMQDFCMQFAEYSFVLTIPGFGPYISARVLASISNPWRFDNSSQVLKMAGYDLGANRSGKRSDDAVPVISKRGNSELRYALYQAAHVASTRNRDFIRYFTRILRGRERERGIKTKMKVKLAAKMLKIAWTLMKKQEVFDPHHLIIE

SEQ ID NO: 332941 - protein, 381 aa, unidentified
MFAETTHTDQYTVSQPHLYMAFELSQSKWMLGFTIGFGQRPRLRTIAARDLAALRDEIHLARERFGLGEEVPVISCYEAGRDGFWLHRYLLSLGVTNLIVDSASIEVNRRAKQAKTDKLDLGKLLTMLMRYQAGEKKVWHVVHVPSPEVEDHRHLHRELADLKAQRTQHTNRIKGYLSNQGVCLEVRDDFPELVEHQRLWNGEPLPPGLQARLLCEYERFQLVQQQVKALEVERRETIRHSTQPEMEQVRQLLHLRGIGINAAWLYVMEFFCWRAFRNRREVGALAGLTPMPHQSGEEDHELGISKVGNRHIRAMAIEIAWGWLRYQPNSELSRWYQRRFGKGSKRLHKIGIVALARKLLIAIWRYLEFGTLPTGAVLKST

SEQ ID NO: 332942 - protein, 452 aa, unidentified
MMEQDMSTSKPRAARGGRSKLEVMHPDAAGIDVGGSMHCVAVPNHAADETVRQFGCYTVELNALADWLAQCGVKIVAMESTGVYWIPLYELLERRGFEVMLVDARHVKGVHGRKSDVLDCQWLQQLLSYGLLRAAFRPHDQFCALRELNRIRSRTLRDQGRSVQHMQKAMTLMNIQLGQAISDVAGVTGQKIVRAIVAGERDPQELAAYRDRRIKASEEEIAASLEGTWRAEHLFALKQALATFDFCAGQLQDCEGEIEQVMQQLHKYSGEPTKGKRRGRAKNAPKFDVREHLFKMCGVDVTRVDGIDVSTALSIISETGTDLSRFASDKHFASWLCLCPGTRISGGKVLGSGTRHSVNRATQAFKQAAAALRTSQSALGAYFRRLCARMDKAKAVTAAAHKLARLFYALLTKGQEYVDQGQLYYEERYRQRVIYNLQRKASKLGMSLVPSA

SEQ ID NO: 332943 - protein, 331 aa, unidentified
MKIRETVGIDISKLTFDVRIHSNQTFKVFENSIKGFKMMTCWVYKNSSFLKDEIMFIFEHTGLYSHNLSVFLTEQNIGYALVPGLEIKRSLGISRGKDDKIDATKIALYGYRLRDEIVPYDLPSQDIMTLKSLLSLRDRLVKQRAGYKTSLKEQKRVLLKKDNKILFEIQQKMIQSFSKQIKKIEKEMQNIVENNGQLNHLYDLITSIKGVGPQTALFLITYTNAFTKFKNARKFASFCGIAPFPNTSGTSIRGRTRVSHLANKKIKSLLDLCAKSAIQSNPEMKCYYHKRVEQGKNKMSTINIIRNKILSRVFAVVKRQTPYVDTMKFAA

SEQ ID NO: 332944 - protein, 356 aa, unidentified
MKVLRQCCGIDVSMDALDVVLMTLQEDFELKIVSSGQFANTKKDIKKLMNWVKRHQLNDLPLQVVMEATGVYHEQLAYALYDNGFELAVVLPNKVANYGRSTDVRRIDDKISARHIAEFGLLKKIDNWTKPDASLLKLKGLSREREQLLNERTRAKNQQHAKEHMAEVDKFTLKRAKQHIKFLDKLIDQVETQMKDIVDQTPWLKKKINYICSLKGVGFITATIVIAETNGFNLIRNSRQLVCYAGYDINNKQSGTSVNTKARISHKGNKHIRKALYFPALTAVQHDEPLSNFYNRLFDRQKIKMKSYVAVQRKLLILIYTLWKKEERYNPEYCKDKFLLEQPQEAALTELDQVRS

SEQ ID NO: 332945 - protein, 325 aa, unidentified
MMKLVYPICCGVDVHKNIFVATIVSTDNVGIATYQQKSFSTINYDIKNFHNWLIVNKCYHVCMESTGKYWIPIFNYLETDIDVCLTHPKYVKAIKGKKTDKKDSKWIADLYKFDLVKNSFIPPKDIRELREISRYRYKLVCMKSSEKNIRVKPYWHLVELIASMPGMTEISATLTLAEIGIDMSVFEDAKHLTSWAGLAPTNNESAGKKKSVRIGKAGQYIKPLLVQCALAAVKSKKEPYFAIKYQHLRKRRGHKKAAIAIARMMLVCIYHMISEEKPFNPTDYTDLMDPHHHVHKVALNEANVFAYLQQQGYDISLIDKICNDN

SEQ ID NO: 332946 - protein, 339 aa, unidentified
MSKPNQPAQATVFCGIDVSAATLNVVVQQEDHRFEERVFDNSASGHKALIAWLHKRKAMARVSLEATGIYSLDLALALDSAEGIEVAVLNPKIIHRFAQTLRRSKTDSADAQALAEYSRRMPFTPWCAPSVNGLQLRTISRHVQGLVVEHTRQNNRLHAAEKSVATPRCVVNDLRRSMASLQRRIVRLRREARELVRGNETIQKRFELLIRIPGIAEISALQLLGELSPLSPDMSVRQWVAHSGLDPSHHVSGTSVNKPSRMSRAGNRHLRRALYMPALAAVRCDPHLQAFYEVLLSRHKAKLQAIIAVARKLLHAIYGIFRSQTHYDGSKLFPHLEVA

SEQ ID NO: 332947 - protein, 400 aa, unidentified
MDETQRFRWFLGIDVSKETFDGCCITMKGERLFSLSTSMNRKGFQELIKQLSGPSVSQESTLVGMESTACYHVNLYSFLISLGYTVIVMNPLLISNFVKLQLRKTKTDKKDATVIAQFLLLNRDSLSQTILSSDISDLRDLSRQRESLVDQMSSTKSEIKRLLTMTFPELEHISGLFSKSMLRLLCHYPSAASIKQAKRSKIAKILIPGSYGKQTDVSVDRILKAAKVSVGTSSATKEIIIRQKASLLIQWEQHLQELTDILIELCGGKIQREKEILTSMKGIGEKSAVNFLIEIGGDMKQFESHKKVIAMAGLDPALYQSGKIDRKGKISKRGNRHLRRVIWIMTTKVIQFNERFKQYYLKRIKDGLPYKMAVLATAHKLIRVMFAMLKNKTLFDPRMN

SEQ ID NO: 332948 - protein, 322 aa, unidentified
MNKYKETFGVDISKDVFDVHGSNKGHDQYKNDETGFKKFLKELPKCSLVVMEATGYYHYRLAQFLYKNEVIVSVVNPLSVKRFIQMKLAKVKTDKSDAKAICEYAQVNEVPICNALTDIQSECLQLFRLLDIYLKQRTATKNKIHGEAVLGIPSKFVYRSLIRNKKLLNKEVAAIESKILSLVKEDQQEQLTLLMSIPGIGQKTALFLIVVTDGFNKFKNAAQLCSYVGITPTIRESGSSVRGRARISKVGNRKLRNLLFLCSFNACKHNKPCKEVYERIVNRGKSKKLALIAVANKLLKQSFAIVKSGRPYDETYVSTLPR

SEQ ID NO: 332949 - protein, 375 aa, unidentified
MKNKTGTVSDNKQVQARVRSQSKARVKLGLDMHYRQVTVAMQEEDGAIKALGKMSHDGFSNWVEQKLQAGFELYSCYEAGASGYWLHRDLEGLGVKNLVVAPKAMGQDRRQKTDRRDSAELVDALDRYLRGNGKALNPVAIPSVEVEEKRALIRYHRQIMADRNRCEARGKGLLCAQGIEVRGKWWQSQSWQELKTHPRLKSWMQAQLEGWRKKRLALETEQQSLRRQIEALAPALLPKGVGAYSAVALEYELKGLARFQRARALSSYTGLCPGIHSSDGRGREGSINRCGNAAVRWNLVEMVWRLLKWQPQYEPVRQLARGLLKSKRARKRLAVKAARQLAIDLWRLHTGRATAQELGFIMQPTTQKPTSRTQY

SEQ ID NO: 332950 - protein, 344 aa, unidentified
MTKISTIGLDLAKNVFQVHGVDASGAVVLGRQLRRAAVEKFFAQLPPCLVGMEACGSAHQWARVISRYGHEVRLMPPAYVKPYVKRNKNDGRDAEAICEAVSRPTMRFVPVKSVEQQATLAVHGTRALLVRQRTMIANALRAALSELGIVAAQGYEGLGELMARLQEASDEIPETMRGALLLLAQHWQALDTDERALERQIAKAARCDGEARRLMEVPGVGPIIASTVLAKVPDAKVFRSGRDFAAWIGLTGRDHGTGGKHRPGRISKQGDRVLRALLISGASAHLRQQKRRGISDPWLRELLARRPYKVAMVAFAAKTARIIWAMLVKGEHYRDRATAPAAAC

SEQ ID NO: 332951 - protein, 309 aa, unidentified
MKEQLVYCGVDIAKSYLEAVIGKEKRRLANDAMGHQEFIKWIKQIEGQAQVICEPSGGYERRFIQALVGAEIKVSLVPANRVRAFARAAGILAKTDTIDARVLCAFGEAMQPPMVTTSKLEQEQLRELESQRRHLSRLLVMEQNRGARLADCSVRVLNRSLIKQIQKQIEKIDLLIKEHIEESQELSSKAAKLTAISGVGPRTAALLLAQMPELGQLNRREVAALVGVAPFNRDSGKLRGKRTIFGGRRCVRHGLYMAALVAARHNPTLRAFYRRLRAAGKPAKLALTATMRKLLIVPNSALKPNPIYA

SEQ ID NO: 332952 - protein, 344 aa, unidentified
MITIGIDPHKSSHTAVAVDAAGHQLAQRRFVVNAGTVRQLMRWCETWPERRFAVEGARGLGRSLAQQLAAAGEKVVDVPSTLSARARLLATGGDRKTDAADALHVAQVALFRQDLRTVEPEDQSTILRLLTERHDDLVNERTRIINRLHAVLRDLLPGGAPTRLSAEKAAALMKGIRPATATDSCRRDLARDLLADLRRVDRQVRNNEAQMRDALAAARPALTALPGLGTVIAAKLLGHVGDVARFPTEHHFASYTGTAPLDASSGKNTRHRLNTGGNRALNSVLHMVAVCQIRDGGRGQEYYLRKIAEGKTPAEARRALKRRLSNVVYRTLKRDRRKALPTAA

SEQ ID NO: 332953 - protein, 410 aa, unidentified
METIVERPAALDVHKAQVTACVRVPAAAGGREQHVAEFATTVRGLLGLRDWLAAHRVEQVTMEATGVFWKPVWAILEDDFPLLLVNARHVKQVPGRKTDVSDAAWLCQLAEAGLLRASFVPPKPIRALRNLTRYRKTQIQERAREANRLHKALEDTGIKLDCVATDILGVSGRAMLAALIEGTTDPELLADLARGRLRAKLPALKEALEGRFDRVHGLWIGAILAHVDFLDEQIDQLSDAIEEQIAPFAPAVELLCSIPGVQRRAAEVIIAEIGADMTVFPSPGHLASWAGQCPGNDQSAGRRRSGKTRNGSKWLDWTLEEVALAAVRSKDAYLAAQYNRLRPRRGHKKALGAVKHTILRTCWHMLTTGELYNDLGGDYFQRRDPERTTKRLIKQLEALGHHVTLEAAAA

SEQ ID NO: 332954 - protein, 449 aa, unidentified
MRKPQVIEDQQHERVFERVAAVDVAKASGMVCTRTPNPSRPGARHSTVWQVPAAMNAVLALADRLVADGIEMVTLESTADYWRIWYYVLESAGLAVQLVTASQARNLPGRPKTDRLDAMWLARLTEMGMLRPSFVPPAPVRVLRDYARARTHLVQDRTRCWQRLEKLLEGALIKVSAVASKLTTVSAQDMIKAMIGGQRDPHILAGLARGRMKAKHDALVEALTGMFDDHHGELAQMLLDQIAFCDTRIAALATRIEQHLAQVRAAWGVDADGSTGPSAGTGTDAAVLPAAQRLAEIPGVSAELARSIIAETGLDMSRFPTAAHLVSWAGLCPSARQSGPRNRTGKKGQGDGYLRGYLGQAATGAAGTATFLGERHQRIARRRGRAKAQVAIGRSILVIIWHLLASPGTRFADLGPDYYASRTDKDKKIRNHIRQLQALGLTVTIAPAA

SEQ ID NO: 332955 - protein, 405 aa, unidentified
MEVLYQRCAGLDVHKKTVVAAVRLVEGNKVVTEVRTFATTTVGLLALSDWLAETGCTHVAMEATGVYWKPVWHVLSDGEIELVLANAAHVKNVPGRKTDVSDAAWLAELLAHGLIRASFVPDGQTQELRALLRTRKQLVRERSRHVQRIHKTLEDANIKLDAELSDVLGKSGRAMLDAMVAGETDPVRLAALAHPNVKCPQAKLREALRGRVTSHHRFLLQLHLGQIDRLDAAIATIDREVEANLVPFRTAVELVSTIPGVSTLSAEVIVSEIGLDMSRFPTAGHLLSWAGLCPRNDQSAGKRRSSRLRKGAQWLKTTLVQCDKKGSYLQAQFLRLRSRRGPQKAVCAVAASILTAAYHMLKDGTLYSDLGADHFNRRSKTTQAQRFVNRLKHLGYAVELKPLAA

SEQ ID NO: 332956 - protein, 342 aa, unidentified
MEVSTIGLDIAKSVFQVHGVDESGATVIRRQVRRRHLLGFFEKQAPCLVGMEACATSHYWARQIAALGHEVRLMPPHYVKPYVKRNKNDMADAEAICEAVTRPTMRFVAPKSEEQQSVLVLHRSRELLVKQRTMLANAIRAHMAEFGIVAPRGIPRVKELLAVIAEPDDERLPPGARTCLEGLARQFGSLHVEIRAAEKRIHALHRSNETSQRLATIPGIGPIIATALAASISDPSVFKNGRELAAWVGLVPRQSSTGGKERLGRISKQGDQYLRWLLVAGAMSVIKSAKRRETTKRPWLDELIAKKPIKVAAVALANKMARTAWALLSHGGTYREPVVAAS

SEQ ID NO: 332957 - protein, 478 aa, unidentified
MKAKSTSPSRRVVKAIRPANQLPVLHPHAAGIDVGATEHSVCVPQDAVPAGASPVRQYKAFTGDLDQLVEWLQACGVQTVAMESTGVYWIPLYQKLERAGLEVVLVNARHLKRVPGRKTDVLDCQWLQQMHSYGLLSGSFRPSDDICVLRTYLRHRSNLVAGCSQQVQHMQRALDQMNIHLHHVVSDLDGDTGLAILDAILGGERDPKQLIQWRDARCRKSTVAEMEAALKGDWREEHLFVLKQARECYRALQGQIVECDGAIEKVLERVVVNPSAVPEVQRPQNPVAAPPEAGAKKPRRKRSRGNAPQQDLTTPLQRICGVDLTRVVGLNVLSVLMIISEIGVDMSRWPNAKAFCAWLGLCPGNKISGGKVLSSRTARVVNRVAILLRTLAPTLGRTDTWLGVFHRRMKARLGPAAANTATAHKLATILYHLLKYKEEYIDVDRVVYEEKFRRYRVSRLRKQAAELGYEMVELKAAA

SEQ ID NO: 332958 - protein, 362 aa, unidentified
MGESTTIVAFDQHAATTVAAVLLAGHRTPAVHPLTSEPAELRRFVRRLGRVGMVRCCYEAGPCGFELQRALQADGVPCDVIAPALIPRRPGDRVKTDRRDAGQLAILYRAGALTAIHIPSEQEEAARDLLRCREDIRADLLRARHRLSKFLLRHGRRFTATKRSWSKRHEAWLRAQTWPLAALDQTHRAYLRAVDEAVARLRAVDTDLQALLMLDPLRARVARLRCFRGIDDLTALTIAAELGDPRRFPTAPSTMAFVGLVPSEHSSGSKRARGAITKTGNAHLRRVLVEAAWHYRHHPFVGHALRQRQQGADATVCARAWAAQQRLHRRYRTLAARGKPKQHIVTAVARELTGFVWAALTQ

SEQ ID NO: 332959 - protein, 319 aa, unidentified
MGYETLIRRAHVMTRKNTLKSLPTDTEFRVVGLDLAKSDVSVAAIPVDDNTPSLVDRMTYADLLDWAGKISPTLFAMESCNGYSLLCLQLENLGHEIKVISGSTVSMWINTHLSGQKTDLNDAIALARLAVSDAELTPIRHKSITEIRIQTVQAVRQQLMSQRSKSIVSFKALAQQWGIPCAAGHRNLKKLRESIEAKVDLITRPVANAMLFLLDAVKSLDRQIGQLNQTLQELVMSDERGRLLQSVLGVGTQISARVITVVGNVERFNSPRSLVAYVGVAPRNFITGHKNLTKKKHGNCPDLSHKGQGKISRRGDKLL

SEQ ID NO: 332960 - protein, 340 aa, unidentified
MIATTKFFIGIDISKPHFDVALMAVVNHVKQEIATARFDNTAPGIKLFEKWLKSQKTTFNGDSLVVMENTGIYHRLIWTFCSNRNLPIHIGNAAHIKWSFGIARGKNDKIDSIRLCNYAFKEADDLKATAALDPELMLLKDLISARTKLLKQRSGISVSVKELGNVNGKEHQKLIEKALKNAIEGIAKSIRNLEDQIKKIITGNQGFKQNYKLLLSIPGIGHVTAVYLIGCTGNFAGRPSGKELACYAGVVPFEHSSGISIKGKTRVHRMANKELKRLLHMCALSLIQHNQEFKTYYNRKKDEGKHSMSIINAVRNKIALRVAAVIKNQASYKNNYKIAA

SEQ ID NO: 332961 - protein, 411 aa, unidentified
MEAIVERAAGLDVHQKTVVACVLVGAAGHRAKKEVKTFGTTLSDLTELRAWLVEQGVTHVGMESTGVYWKPVYAVLEEAALEVIVGNAHHIKNVPGRKTDVKDAEWIADLARHGLIAKSFVPPKPIRELRDLMRYHRKLVNVRSGERNRLLKLLETANIKVSSVATNVFGKSGMAMLEAIADGQESGEALAELAQGLLKKKKAALGKALEGRVAEHHRFVLRMQLDRLKALEADLAKLDAYVAEKMAPYASQERALKEIPGVGAYTARAMIAEIGVDMNVFRNEHRLAAWAGVCPGNHESAGKRMSGRTRKGNVHLRTALVEASMSAVRKKGSYLRSKYYRLKARMGVKRAAVAVAHKILVAVFHILSDGTVYEDLGDRYLDSLRKARTSKHLVRRLEALGFRVAIEPTAA

SEQ ID NO: 332962 - protein, 387 aa, unidentified
MYFVGIDISKFKHDCAIVDEFGDVITPSWSFQNDREGFSLLKELLDALDGEKKIGLEATGHYGQNLKLFLENNDFSFIEFNPLLINQFVHSKSLRKTKTDSIDVLMIAQYLMTVEYKPYPPSFYTFEKLKSLTRFRDSLIRQRSRQLVELTNILDKVFPEFKPFFKGRFSATALYILSHYASPEKISNMNSKSYEPLRRLSRGRFSMVDFVELKTLARNTVGSTSDYLLQEMEITIDIYNQLQSKVEEIELQIHDCVLALAPPILTIPGIGAASAAVILSEFGDLSKFNNPSKLLSFAGMEPGYFQSGTSESTGKMVKHGSSHLRYAMMNCAQTVINNEPTFAAYYAKKRAEGKEHRVALTHVAKKLLRVIYTLQTKELSYNPDLVR

SEQ ID NO: 332963 - protein, 385 aa, unidentified
MSELNDLSRSLTSLEQDKTIIAVIEMSQSSWLVAGIVPGIERHPLKKLEPSEEELVRLLMRWRTEATKNGHTITRIAVAFEAGRDGFWLARWLRARDIETYVIHPTSVAVSREHRRAKTDRLDTGLLKRVFIGWLRGEPDHCHMAAIPTLAEEDAKRPNREREGLVRERTRIVNRMKSCLARFGIRNFKPTLRKAPERLATLGTPEGVPLPPNTLLELRRDMARLRFIMDQIKEVEEARGQRLEQAPQEKSHAMVRLLARVIGVGIETADMLVHEILSRSLRDRRAVARYAGLTGAPDESGSRRQEKGLAKAGNARVRRGMIQLAWRFLLFQKDSALAQWYRTRTESAGKKRKTMIVALARKLLIALWRLVTIGEVPAGVVLRAA

SEQ ID NO: 332964 - protein, 481 aa, unidentified
MAKASRTSLSSHPQAHGPRKKSWRQRQTDYFRQRYPRIEEMEIIHRQAAGIDLGGKKSHFVALEIGSEVEVQEFGMTTLQLCAMVEYLLEHAVTSVAMESTGVYWMPVCEMLEHAGVEVYLVNPTHAKNVPGRRKDDKMDCRWLQKLHKFGLLSASFRPAKEIRPLRSFLRHRQCLVELSADHLRRLQKLLDMMNVRIHKAVSDLGGATGMRILHAIVAGETDPVVLAAFRDARCACSEDQLREELTGFYPEHLVKQLASVLRLYEGLLEEITRVDADIEDALKSLAPVPAADLAAQVAADAHAWPKGKHAPAFNTSAYVEIITGQDPTRLPGIGPQQSLRLLGELGQDMEKWPSVKHFGAFITLAPVDKISGGHLYASHTRPGTHPAAVIFRQAASRVVQQEGAALAAYYHKVAKRRGKARAMTALAYKIARMYFYLMKNGWAYVEVGEKHYEESYRQQQMAALQKRAKRLGCVVTPMAA

SEQ ID NO: 332965 - protein, 351 aa, unidentified
MMIMGCDWHPRYQIVAWVDEETGEVRKQRLEHGNGEAERFYRSLPPGAVVGMEATFPSYWFERLLNECGHQLWVGDAAKIRASDVRRQKTDPRDAEHILDLLLAGRFPRIWVPSTEERDLRQLLVHRMKMVRTRTAVKNQLHYLAMSQGVCRKRQLWSRRGRAELEALRLLPWASRRRQELLEWLDQLDRSVEELDRAVEEAGRGRPEVERLRRHPGVGPVTALAFALTLGPVSRFPNSRKLVSYLGLNPSERSSGGRQRLGHISKQGNPMLRWLLVEAAHTAARLDPDLHRTYQRLKFRRPSGVAKVALARRLAVRLYWMLRAQKDEAQRVRMSGSPSSAVAPKASESKI

SEQ ID NO: 332966 - protein, 329 aa, unidentified
MTTNPPQIVFNHIVAFEVSKDTLVVHTLPDDEQCTIDNKPQAVRRLIKAEIKRNRNKQIGQMLVICEATGGYERHVLDVALEMGLSVHRAHGTRVRHFGHYCGLLAKTDPIDARLIAQYGLKTENIRLYSPPPPDTAALRALHARRTEIQQMLIAETSRLDHAQHKSVLKSLKAHIASLKAALVAIEADIAQLVEGSEMLRKKVALMQTVIGIGPISAMVVLAYLPDIGQLTKGQAARLAGLAPINNDSGKKRGARHVEAGRTAIRRALYMAAGVAMRANPILKAFSDRLRGKGYPFKYVVTAVMRKLIVILNAVLRDGQSWKGAQMAA

SEQ ID NO: 332967 - protein, 408 aa, unidentified
MNAVGIDVSKGKSMVAALRPMGEVALLPQEFLHTEVGLEQMAYAIIALGEDTRVIMEATGRYHEPVAAALHEYGIYVCVLNPLFIKQSGGGSIRKVKTDKADAMKIAKYGLDNWVDLREYTPMDTVRQQLKLCSRQYNLYMKTVVSLQNNLISLTDKTFPGVNELFSSPERADGHQKWVDFVMTFWHCDCICRVSEKAFTERYQKWCKRKGYHYSAEKALDIYAGSCGHFTTLPKNDNTKLLITTAAQQLLAGKMTLAALRAEMARLARQLPEYDTVHAMYGVGEITAAQLMAEIGDVRRFPRRSSIVGFAGVDPAVNQSGKHAAQSTPTTKRGSPHLRKTLYQIVCTYLRKAPEDEPVYQFLDKKRSEGKPYFGYMTAAQNKFLRIYYARVKECLEAFDAQQNSTQS

SEQ ID NO: 332968 - protein, 400 aa, unidentified
MSVEYAVFLGLDVGKGEHHACALDPSGKKLHDKPLPNDEQRLRTLFTQLGRRGRVLVVVDQPASIGALPVAVARDQGCQVAYLPGLTMRRLADLHPGNAKTDARDAYIIADAARTLPHSLRRVDTGQETLAELEVLVGFDDDLAGESTRLVNRIRGLLVTIHPALERALGPRLHHPAALELLITYGGPDGLRAATADQLLATTRPLAPRMAGRLIEAVTTALDAQTVVVPGTAAAATVLPHLARSLRSVHDQRDQVAAQVEEILDAHPLAGVLISMPGIGIRTSARILLEIGDITAFATPGHLAAYAGLAPVTRRSGSSIKGEHPPKGGNKALKRAMFLSAFASLSDPLSRAYYDRKRAEGKKHNAALICLARRRSDVIYAMLRDKQPYQPSRKPAARAA

SEQ ID NO: 332969 - protein, 342 aa, unidentified
MIDTMIGVDLAKNVFQLHGASMSGEVKFRKKLSRPQFRKFMEEQPACIVVFEACGGAHYWARELEGQGHQAKLIAPQYVKPFVKRQKNDAADAEAIVIAAQRPEMRFVEPKNNEQIARGVVFRSRDRLVRQRTEQINALRSVLYEQGQVFPTGVRQMNKIAEFLEQTDNGLLKLIREECEELLASISDLTTRIEAKTLKLKKLSKESEVSRRLQTIPGVGPLTAMAIEAFAPSMEIFRYGRDFAAWIGLVPKQHSSGGKARLGKVSKEGQVDIRRLLIIGAMSRIGWMGRKSIQDGSWLDRMLKRKPKMLVAIALANKMARTIWAVLTKEEDYRDPAQTVAA

SEQ ID NO: 332970 - protein, 411 aa, unidentified
MHHRQNYLYVGVDLHKEHHTAVMINCWQEKLREIQFDNKPSAFSKFLLEVETYVSDGLSVVFGLEDVGGYGRALAKYLVDHEQVVKEVNPALSFLERKSQVMIQKNDSWDAECVARILVNKFNQLPDAKPNDLFWSIQQLVSRRNALVKAQSALKNQLHIQLNHHYPSYKKFFSELDGKTALAFWQQYPSPSCLEGANIKQLTAFLLDVSNNTCSVKKASDILNFVKEDGHTMKEYQETRDFLVRSIVRDIEFKKTEMKYIERELKQLVKLLDYQLDTMPGIELVTASALIAEIGDVRRFPNANKLARFAGIAPVYFGSGGKGKTHKSKQGNRALHALFYNLAVQQVQVAKGSKIPRNPVFHAYYQKKLKEGKTKGQALVCIMRRLVNIVYGMMKHKTAYELPVVEEKEVV

SEQ ID NO: 332971 - protein, 306 aa, unidentified
MRGGSKDTLDTYWLSKRRHKQFANDKAGLRALIRWVRQAEVSLVVFEATGVYHRLLETSLAAHDLSFARVNPRQARRFAEGTGTLAKTDQVDAAMLARMGSLLELKADKPKSETLHNLKGMETARQALIKDRTAARARLKTATYPLLRKQAILRLRQIERDISQIDAAIETTIAADETLSSKAGILISIPGIAKITAYAMLVEMPELGSMSGKQAASLAGLAPISRQSGKWQGKERIQGGRACLRKAIYLPAVVATRFNPDMKAKYHELIANGKCKKLAITAVMRKLVVMANALLRDGRKWTEMRP

SEQ ID NO: 332972 - protein, 401 aa, unidentified
MNAVGIDVSKGKSMVCVMRPFGEVVLEPFEVFHTAQNLNDLAGKLKALDGETRVVLEATGNYHKPVAFVLHDAGLFVSVVNPVLIHDYDNNSLRRVKTDRKDAVKIANYTLDKWTRLRQYLPEDDTRLALKNCYRQYQQAVAIRTMLKNNLISSLDLTFPDANKLFRSPAKSNGCEKWVEFIGDFWHSECVSSLSTDAFAKKYLKWCQKHGYNFTRSKSDEIYACAVNAASLPKSATSKLLIQQQVAQLKAVSQSVAAFQQEMLRLSQQLPEFDTVMEMYGVGSSLGPQLMAEIGDVRRFSSKKSLIAFAGIEPQPNDSGKIVGNDKGISKVGSAVLRRTLFLIMTVILQNQPQDEPVYSFMDKKRSEGKPYKVYMMASANKFLRIYYARVKAVMDSTSSN

SEQ ID NO: 332973 - protein, 431 aa, unidentified
MNYNQNKKIAQITSQTLIIGVDIAKFKHVARAQDFRGMEFGSPCQFENTKEGFENFLKWISEIKKEQRMSKVMVGMEPTGHYWFNLAHILKENGIKFVAVNPLHVKKSKELDDNSPTKNDVKDAKVIAQLVKDGRYAEPTIPQGVYAELRVAKKIRDLLTEDLQTVQGQVHNWIDRYFPEFLKVFKKWEGKAALQFLKLYALPHEIAVFTEEELLVHLRKSVSRSVGLNKIRELKQAASQSIGLRQGAEMARLELKTILAKYDLIQLQFEELDAKIDSQLDEIPGVQQMLAIKGVGRDTIAGFFAEVGDLGEYNHPRQIIKLAGLSLKENTSGKHKGKTTITKRGRKKLRALLFRVCMILVAKNSAFKALHAYYTQRPDNPLKKMQSLIALCNKLIRIFFSIGKKQFDFNEEKMLKDIPHLAVTKKTEMAA

SEQ ID NO: 332974 - protein, 399 aa, unidentified
MNARYTPNELQIGIDVGSINHAIAISNGNGNIIKEFEISHNNRGFDTFFKIVDKLSIQYQAKVSVAMEGYNGWARPLDTLVLNHGYKLYNVNNVKLARFKEIFPAAAKTDSIDARKIVELFSLQEHLPIAKKVLQEIKPANSINAKLKKLTRRRKQLIEEKKAITNRFNSDLQAEAPDLKAITKSVDNLWFLRFITLRDNLVSLSRIHRNSINSIAYISQKNIKKIIQWQKEARFTKSIEYTSAMLYDDALRILELKDKIKELDNQIKALISSSKIASLIQTIPGFAHISAGSLAGEIDTLERFESEASLALYLGVTNLDNSSGKSKKSKRNLATNKHAKMAIITATMKHAQHVEESKKYIEKKISEGKRYQQAIRSLARHLVRVIWNMIQQDRAYEIR

SEQ ID NO: 332975 - protein, 517 aa, unidentified
MMLVTSPDRAALAPTERIYVGLDIGYREHVAAASPLSVFNVGRNPDGWKRVRPIHFASDAAGFGRFQRYLDRYSSDPRDFLILLEPTGSYGLTVLLYLLSRGYRVLQVENRAVKDYREKIFGSETKTDDTDARLMARMGFLHELVGEEFSIQPVLLMNPDAAALRGMVHDLAKLQKEITRRRNQLQQMAALTFPELKTFFKGSTAAPAARALLEHFATPQDLAAASTEHVSEVLRSVHAYSHATRAAELRGLAQATAGVPTLTHHQWRQGWLIKQLSVLEEARKDLVDEVALATATHPYTRIIESLPIKSPIWTATLIGAIGDIGRFSTVSQFKAYLGWSPQIARSGSSIDTSELAKNGVRSARNVLGQMTVIMLSSTIRPTPFREVYRRFIGRGMRPASALGHVAGKLSVVLYGMLKNMTPYDQDQHRRQLGLVQSADQTGSLPINVSLELVDLAESPNDLVDDDPTIAGELQLGLLPCGQLDAPRPEPWSRTDDTGVPNTASPSPDLSIPRPAGQ

SEQ ID NO: 332976 - protein, 349 aa, unidentified
MRRLYVGIDLGCKTCAGAVRDSKGKLLETCGFPTSAKNLIDFVGKQKGEVRVLVEECELAGWVYRALLPHVTSVEVSDPRHNAWIAKGKRKSDPIDAAKLAELLRGGFYRAVYHPGDEEMANFKIAVQHYDQMTRTTTRLQNQIKARFRQQGIMTAGKGVYGLAGRREAISMLKSEAMAEILRQDFRLLDGAQKERTAASRLVTKLSRDLPVIRRLKKIPGVGTVSASRFVAYVQSPYRFNTKGLVNFSRLAVVKKESGDSIVCGEHLSREGNGAMKALSRTVFNGAMKTTSTNGIRDYYLRSLSRTKNETHARLNTQRKILAVMNAVWRDETEYSDHLVTGRGARRTL

SEQ ID NO: 332977 - protein, 450 aa, unidentified
MVKSTNQPTQNPLAVLNAHAAGIDIGSMLMMVSYTDPSGQQKLLESTGFSEDLIKLAKTLKSEGITDVAMEGTGVYWMAIYEVLEQEGLKVTLTNPRHFKNVAAQKTDVKDCQWLHQLHAHGLLRSSHIAPELYRELKTYVHERNVLQEMKRDTLNRIHKILTQMNIKVQHVISDIEGVAGMKLLRGIASGITDPEKLLSLVNTFKLKATADELLQSLKGFHKKQYTVVLQNQLEVFDFLKSKMKSYELLIEDVLKKMMPSDENGSLPEIKKKTRYTRKNEYSINLKAYLEGILGVDVTAVDGLKEISVLEIISVTGIDMNKWRTQEHFTSWLNLSPRQKKSGGKLLGHEKRFTNNNATQAFRLAAQTMWQNKGPLGQLYKRLAVRKGSKKAIKAVARKLAVIFYKMVKEKCSYNKTKLEKNLEQQRARKIAMLMREASKYGYDLQPVTL

SEQ ID NO: 332978 - protein, 318 aa, unidentified
MAIERWLGIDVSQAVLDAHLLPSGETWSVSNDARGIKKLVGHLKAAQGVLVVLEATGGYQHEAAVALSRAGASVAVVNPRQVRDFGRATGQLAKTDRISAEVLAMFGERLRPEARFVPDEELDLLAALIQRRRQLIEMLGAEKNRLRVTRAPEVQRELKTHVRWLEQRLKNTEKKLDGAVRKSPIWRAKDEILQSTPGVGSVVSRTLIGELPELGKLNRKEIGALAGVAPFARDSGTLRGKRTVWGGRASVRSALYMAALVGVRHNPVLREMYQRLRGRGKLPKVALVACMRKLLVTLNAMLRDGTRWQEVRTYPTIP

SEQ ID NO: 332979 - protein, 408 aa, unidentified
MVVHARPVSAATVVVAIDVGKNEFAVSVTDAARRTLLKPRLGCPMTVPSLRQVIGAIRPLLAADARVKVGIESAGHYHRPLLAPQSWPAEWELLELNPGHVTEQRRVLGKRTIKTDAVDLEAMTELLLAGRGLPIRRGDSVLTELAAWSAHRTGRVQIRTATKNQLLGQLDRSFPGLTRALPDVLGTKIGRLVAAEFADPARLAALGSSRFIRFGATRGLQIRRPTADKLVAAARDALPMPDAAVARAVLAADLRLLADLDAQIAGATAEQRLVPESPFRTLLTVKGWGAVRAGNYGGAVGDPERFTTARQVYRTAGLNPIQYESAGKRRDSVISREGSVELRRALIDLGLGLWLTDPAAKRHATALRARGKKGRVIACAMAHRANRIAFALVRDRADYDPARWLREG

SEQ ID NO: 332980 - protein, 476 aa, unidentified
MARNSQTTAVKAAPVAEDPTATTAPETAVKSEPGGYAAWIGLDWADQKHDWSLCTAEGKRRQGQMKSTPEAIDLWAAALAQEFSGRPVAVALEQSRGSLTGMLCKYAHIVLIPVHSTAVSNYRKTFSPSGAKNDLRDSALILDLVMKHAERFRPQPPDTVATRSLQFLTEERRKLVDRQTGETQRLINWLKQIFPQILQWFDDVSIPMVGALLKRWPTLEKLQGAAPGTLEEFFRRHNSRSEEKIGERIGQIRLAVAATHDPAVLQTGGICVQNCIREMEQKREAIAVFDRLIAETFRQHPDRFIVESLPGAGPVLEPRLIAAVGSIRERFDSAQSMSCFAGIAPVEESSGKACWIHWRWSCPKFIRQTFHEWANCSIRFCDWAREFYDRKRAAGKGHHAAIRALAFKWIRIYYRCWRNRVPYVESIYLASLNKTVGQAILLDKTTAQTALAASSLELQIQWKKSAGFSKPAKVFA

SEQ ID NO: 332981 - protein, 311 aa, unidentified
METVYAGIDVSKAMIDVAITGEKEVQSFSNNEVGVMELVSYLKIKSPVLTIAEATGGLEKLLAGYLTEAGLQLAIVNPKRVRDFAKAKGKLAKTDNIDAHIMAEFALDIKPIVRPLADKDTEEIKAIMVRRHQVREMITAERNRLYLSNIAVKPSIEEHIEWMKNQLKDIDKNLEDQIKKSPIWKEKDALLRSVPGVGKITSITLMGSLPELGRLNRKEIASLVGVAPVNRDRGTMRGRRTILGGRSRVRTRLYMAALSATKCNPVIKEYYNHLIKLGKAKKVALTACMRKLLIIINAMVKNNQKWQYKTV

SEQ ID NO: 332982 - protein, 346 aa, unidentified
MKITTIGIDLAKVVFQIHGVDERGKVAVRKQLKRAEMSGYFANLEPCLIGMEACGSAHHWARKLEGYGHTVKLMAPQFVKPYVKTNKNDMADAEAICEAVSRPNMRFVALKNVEQQTILSVHRARQGFVKARTAQGNQIRGLLSEFGIIIAQGIGAIAKRVPEILEDGENGLPGTMRNLIERLTENLKEMDRQAKELEAQIQLWHRDNAASRKLAEIPGLGPITASAIVATVGDAREFKNGRQLAAWMGLVPKQNSSGGKQNLLGISKRGDTYLRTLMIHGARSVVRVAEKKAEPGSWMRKLMDRRNKNVAAVALANKNARIVWALLAHDRMFRLDYIPAATAAGM

SEQ ID NO: 332983 - protein, 307 aa, unidentified
MRFYTKQHQFYCGIDLHARTMYLCVLNQDGEILLHRNMPAGPEPFLKAVAPYRTDLVVCVECIFTWYWLADLCAREGIPFILGHALYMKAIHGGKAKNDKIDAQKIAVLLRGGMLPQAYVYPAAMRATRDLLRRRMHLMRKRAELLTHVQQTHWQYNMPEIGKKIAYKANRAGVAERFADPAVQKSVEVDLALIDYYDELLRDLELALVKTAKQHDAHTLYLLQTVPGIGKILSLVLLYEMHDIARFPRVQDFVSYCRLVKCAKESAGKRYGASGTKIGNAYLKWAFSEAAVLFLRNNPAGQKYLAR

SEQ ID NO: 332984 - protein, 353 aa, unidentified
MEEGANVMLMIGCDFHPGLEEVAVLDTETGQRRQHTLSHALGPDPVRQFYARLQHPVRVGLEASGYSRWYEEMLEDLGIEFWVGDPAKIRKAAPRKQKTDRNDALLLLQLMEENRFPRIWVPDRSTRDLRQLLMHRHKLVVMRGAIGNQLQAIALNRGLQRKGRLWSQQGLDQFRSLDLPPWTTRRRDDLLTLREQWDREIAELDQVVLKEANRLPEARYLMHHQPGVGPITALTVVLTLGPVERFASARKVASYAGLVPAEYSSGARQKLGHLSKEGNPFLRWVLVESATVACRHDPEMKRMYWRLVERRGKPIAKTAMARKLLTRLYWMLRQRSQARNSVQRSRVAGKPEA

SEQ ID NO: 332985 - protein, 341 aa, unidentified
MSESALIGIDLGKHTFHLHGQDKSGCEVFRKKCSRAQMMQFFGNVPSCVVVMEACAGSHFVARQLMAMGHTAKLISPQFVKPFVKGNKNDFVDAEAICEAASRPSMRFVTPKTESQQTLSVLHRMRESLVHDRTKTANQMHGFLLEFGISLPKGLAIMKRLASVLAEHELPVRLTVLLQRLHDHFVYLDEQIKELDKELAGQLANDDLGSRLLSMPCVGPITASLLAVEMGDGKQYRCGRDFAASVGLVPRQYSTGGKANLLGISKRGDKHLRQLLVQCSRVYMQRLDHQKGALADWVKTLLSRRHSNVVACALANKLARIAWAIAARHTQYEAGPDALNA

SEQ ID NO: 332986 - protein, 353 aa, unidentified
MNNIKYVGMDVHKLVTVIAVINEQGQVESLTKIKTKAENFHDYFRGLSGTVHVVFEEGGWSAWLYKLLKPLVSSVTVCETRHNKLIGAGNKSDDGDAEILARLLRLGELKAVYKGDDQQQQLREIFRAYDNLVEDATRVQNRLKAIYRGRGIDCDGHHLFRTDQRSDWLGKLPEQAARFRAESLLKELDALQELRKEAKTKLLSESKQSPDYSLLLKLPGIGPVRAASLLAIVGRPERFRTKRQFWPYCGFAVVTHTSADYIDIGGRILKQQKKASTRGLNRNHHPRLKAIFKGAALTAIHNETWQAYYYGLINSGTKPELARISVARKLAAVTLAVWQRREEYDQNKVFAKA

SEQ ID NO: 332987 - protein, 443 aa, unidentified
MSNLSKICPNSAGIDIGSEKVFVAIEDHPVRNFRTFTASYRELGIYLKENKITHVAMEATGIYWITLYDILEEMEFDVTLVNPADSKNLPGRKTDVQDCQWIQQLFSYGLLKKSFVPQDVVRKLRVYTRMREDKLQMASSHVQHMQKALIQMNIRLPEVLSQTHGASGIAMIQQILAGERNAAKLLNYCTSSLKKRKGADILLALEGNYKEEYLFELQQAYDGYMFYLDQVHKCDTEAEKILQEYSNQAAKNYKDDNPIKPIRHNKPNINHLHELLLGIQGANPTVLPGMTDYSFMRLTAELGNNIDQWPTVKNFVSWLGLAPGKNQSGKINKRSKKRAVTRAGQIFKQAAQSILLSKQPGLGAFARKIKARRGPAIAIKATARKLAELYYKMFSQGMQYVEQGVKMYEEKIKQQQIKFVIRKANELNLRIIDDHLLTEIRQW

SEQ ID NO: 332988 - protein, 318 aa, unidentified
MNPQQATEFVGVDVASAHLDVAVQGQASVRRFANTPQGIALLLRTLRPASVLALESTGRYHVPLALAAHAAGLHVYVLNPLDARRYAQSVGQRGKTDRMDALVLARYICREHAQLRQWQPPTACQAVLRELLAHRATLVRQRSALAQAGNHSKDLARLDEPVLAALQQAIEHIDEQLASTVQADPASQETFKCITSVPGLGLICGSLLVMLFGRLQTRSADAVIAFTGLDPRPNDSGKKTGQRRLSKRGWPETRRLMYAAAMSAARTKTWNGFYCAQRDKGLSTTAALVVLARKLLRVAFSLFKQQALFDPALIAGRT

SEQ ID NO: 332989 - protein, 346 aa, unidentified
MSYSTTVGVDLAKNVIQISVVSGRGKELSNRSLTRKRFAEFLGKQSPSLVAFEACASAHYWARAAKRHGHSARIIPAKAVAPFRQGHKTDSNDALAVAEAALRPNIKDAPMKTVEQQGLQSIQRSRYLLIQECIALSNHMRGILLEFGVTIPQGFASLMRTLPEVLEDGDNDLPDLYRPTLHRLYGRMLELRIDIDAMTKEIDSLVKQHPVCSKLTALEGVGPIGALSLYAALGSGAAFTKSREFAAYLGLTPRQHSSGGKTNIVGLSKKIGNRRLRSILIQGALAYVYRMKEPRTSKDRWLKDLIERAGPRRAAVALANKNVRTAWALVTQGTEYQSREQLEMAA

SEQ ID NO: 332990 - protein, 354 aa, unidentified
MAILKQSIGIDISKASFTACLCQKALAGDLTFSKSVDFANDRTGFNQFLRWVKIGSAVGPELVFLMEATGVYYESLAHHLHKLKKKVHVVLPNTSKHYFSSLNIKTKTDKVDARVLSQFGVERLHRTWTPPAPLLRELRNLTRYYVQLQEQKTALGNIKHSKDCSHDVQSFILKSNGKLIDQIDKQITECKKAIEKLIGSDPELREKIRKALTIKGVGLITIATIVAETNGFYEFNSAKQLASFSGYDVVERESGTSIKGRTRISKKGNRYIRNALYFPAMVACRFNADLKATYIRISTNKPSKMIGQVAVQRKLLTLIYTIWKNETEFIEGYKTSSPNSKAGTTQDSSKVELL

SEQ ID NO: 332991 - protein, 318 aa, unidentified
MGTVMNQTSSVYIGIDVSGSTLDVAIHDTTEHFSVDNESAAIEQLVQRLITLNPTLIVMEATGKLELAVLKALCQAGLPAVAVNPRQVRDFAKATGKRAKTDRIDAFVIAHFGAVIKPVVRPLNDMQTEQLQALLLRRAQLIDMLVAEKARLDRAHAAARESLNDHIKWLKQQLTVADRDIDSFMRSSPAWRQKEDLLRSVPGIGPGAAATLIAFMPQLGSLNRREIAALTGVAPFNCDSGKHQGKRRVQGGRAIVRRALYMACIPALRFNPVIRAFYDRLRKAGKPFKVAMTACIRKLIVTLNAMVHNSTPWSPSAD

SEQ ID NO: 332992 - protein, 424 aa, unidentified
MKVTYQTCCGVDVHKSFLVATIVKTTGGIEPSYQKKRFSTFNNSILAFKQWLLDNDCRDVCMESTGKYWVPVFNLLEDEINVVIANPKWVKAVKGNKDDTKDSKWIGDLFRLGLVKGSYIPCKTVRVLREYTRYRYKLVSCRSSEKNRYQNALTVCNVALDSVVSDIFGKSSTSIIDYLLEQSGTSINHEEIASKLLRSLKSKEDAVIESVEGYQMTDAQKYRMRLVRAHMDYITAEINDVDKMIENMISSNADFENAVQFLCTIPGVKRDSAVTIISEIGADMSQFSSSKRLCCWAGLTPSSNESAGKKKSVRITRAGVYLKPALVQCAHAAVKSDKSPYYKKKYESLVKRRGKKRAIIAIARMILTAIYQMLSTGEQWNPSDLYKIDMPVALVEKQKAKAINQAKKLLQREGILPPNEPLAS

SEQ ID NO: 332993 - protein, 436 aa, unidentified
MTLINFVAANQKYYAFNLLSVFIMVFWSVQYLLQHLLVQTQVSHQLLQPLILILQLPQTPQFRHARPGKFFLPVNGMDYFLPLRLTVRNVLTRRITMNIVFLGIDLAKNVFQLCGLNQAGKPVYTKRTGRKELLQTLANIPACLIGIEASTGAFYWQREFEKLGHKAKVISPQYVRPFVRGQKNDGNDAQAIAVALMQPTMQFVPPKSPEQQDIQALHRARQRIVNHRTATVCQIRGLLLDRGIPIGSAVSRARRAIPLILEDAENGLSSRMRRTIAELYDLFNDLGRRIHFFDKEIETVFRQSEACPRIAKVKGIGPKTATAVVAAIGKGTEFKNGRHFAAWLGLVPRQHSSGDRQVLMNMTKKGDKHLRTLFIHGARAVVRVATNNNDGHMNQWVNQLKERRGFNKTTVAVANKNARIIWSMLRNDTGYQVVCN

SEQ ID NO: 332994 - protein, 343 aa, unidentified
MQISTIGLDLAKHWFQVHGVDAYGRVVVRRRLWRSGVIAYFRSLEPCLVGMEACATAHYWARELMALGHTVKLMPPAYVKAYVKRNKNDAADAEAICEAVTRPSMRFVPIKEAEQQAVLMLHRARSLLVRQRTMLVNALRAHLAEFGIVAPQGLRYVEILTKTIAHQQARLPELARSILQTIVDQLNGTMARIQEIEGRLARWHRQSRVSRLLATVPGVGIMGASAIAATVTDPSLFRSGREFAAWLGMTPRQNSSGGKERLGRTSKRGDKYIRSLLTAGAVAVLPHARNRPTRDGEWVRALVARKPTKLAAVALANKTARIVWAVMMRADGYQPREVFRQPA

SEQ ID NO: 332995 - protein, 342 aa, unidentified
MEITTVGIDLAKSIFQVHAVDAAGQVVVRKALRRAQVVPFFAKLPPCLVGMEACGTSHHWARELIRLGHDVRLMPPAYVKPYVKRGKTDANDAAAICEAVTRPSMQFVPVKSTEQQAALALHRTRDLLVKQRTQLVNMIRGLLAEFGIEMARGLRHALELAARLSAGDAAEVPHLAQRVVTGLADQIGAVQIQLTRLEKELLAWHRDSDLSQRLATIPGVGIVSATALAASVSEPERFRNGRQFAASLGLTPLQNCSGGKERLGRISRMGDRYLRRLLVVGMTSLVRRAKATPTSVDPRLPALLQRKPVRVVTVAAANRTARVAWAIMTRGGTYRAPAATAA

SEQ ID NO: 332996 - protein, 414 aa, unidentified
MEVIHRRCAGMDVSKKDAKVCVRVAGAGRRRTVETVRTWASTTNAILTLRDHLLSEEVSLVVMEATSDYWKPFYYLLEDAGFELMLVNARHARNMPGRKTDVTDAVWLAQLGAHGLVRASFVPPAPIRELRDLTRTRVMLTRERGREIQRLEKLLEDAGIKLSSVASDITGVSGRLMLQALIDGHRDPAALADLAKRRLRHKIPELTEALTGRFSEHHAFLAGIFLDTIDQRTRQVEELNHRIDQAMAPFRAFCDLICSIPGIGRQTAEVVVAETGADMTVFPSPKHLASWAGVCPGSNESAGRVKSTRTRPGNPYLKAALGTAALSIAATRGTFLAAKYKRLAARRGGKKALVAIEHTILNAIWSMANTGAYYDDPGSEYYLRHHPERARRNATRQLERLGWTVTLTPAAHTA

SEQ ID NO: 332997 - protein, 302 aa, unidentified
MNIVFLGIDLAKNVFQLCGLNQAGKPVYTKRTGRKELLQTLANIPACLIGIEASTGAFYWQREFEKLGHKVKVISPQYVKPFVRGQKNDGNDAQAIAVALMQPTMQFVPPKSPEQQGIQALHRARQRIVNHRTATVCQIRGLLLDRGIPIGSAVSRARRAIPLILEDAENGLSSRMRRTIAELYDLFNDLGRRIHFFDKEIETVFRQSEACQRIAKVKGIGPKTATAVVAAIGKGTEFKNGRHFAAWLGLVPRQHSSGDRQVLMNMTKKGDKHLRTLFIHGARAVVRVATNNNDGHMNQWVN

SEQ ID NO: 332998 - protein, 381 aa, unidentified
MSRSLVALDQNSTIIAVVELSQSSWLVGGVVPGIERQPRKKLEPSPERLLAVLHRWRDEAVRAGRTITRIALAFEAGRDGFWLARWLDVRGVEAHVIHPSSVAVSREHRRAKTDRLDTELLKRGFLGWLRGERGHCSMARVPTIAEEDAKRPNRERDCLVGERTRIVNRIKSTLARLGIRNFKPTLRKAAERLATVHTPEGMPLPPNTLAELQRDMARLGFVVSQIRQIEDARQKRLEQEPETGSHAMVRRLARIVGVGVETADMLVHEVLSRPMRDRRAVARYAGLTGSPDESGAQRREQGLARAGNARVRRSMVQLAWRFLRFQKESALALWYRVRTADRRMGTRKTMIVALARKLVIALWRFVTTGEPLEGVVLRPAS

SEQ ID NO: 332999 - protein, 350 aa, unidentified
MTTIARSITGGVDTHLDVHVAAALDERGALLGVESFSTTASGYRDLLAWLEAFGTLELVGVEGTGSYGAGLTRHLHRQGVSVVEVDRPNRQRRRRTGKSDPLDAVAAARAAQGGDANGWAKTRDGNVEAMRVLRVARSSARSSRTRAINQMRSLVSTAPEELRSELRDLSIYQVLRLASAFRHTPKTDVTTVTKLTLRTLARRALALEEEVKEIDRLLKTLVAETAPELNAINGVGTDVASALLVAAGDNPERLKNEATFAKLCGVSPLDASSGKNERHRLNRGGDRQANSALWHIVFTRMVCDPRTQDYIERRMKEGRTKKEAIRCLKRYVAREVFAQLPRSELTLDSP

SEQ ID NO: 333000 - protein, 467 aa, unidentified
MLSGAMQTLAGRDADMWAEAPDATSQRRVASCPVRERPRISWMRGDAPPRISFGRLRSRALGQAPPHRRREPGMIYAGVDIAKTDHVIGAVDERGAEMCRPMPFKNTEAGLERAVAWLEGLAGSPSDVVVGMEATGHYWMACYSFLIARGYSVAVINPMQVKAVRKLKKLDKVKNDRIDAWLIAETLRIGQYDETRLATDEVASLRSLSRYLQSLRGMAAELKTQCVCLMDAHFPEYAGIFSDMFGAGSRAVLSKSPLPFELARRRADSLARDIAEASRRGGKSAGYAARIKAAARSSSGVRLGQEAASFQVKSLIRQIEFADSECAKVEARVRALLDEVEPLVLTIPGVSYVTGAQIVSEIGDVSRFRNASALVSYAGLNSSVSQSGQFDSGGGPITKHGSPYLRRALWLAANRARQYDPGLRAFYDKKRAEGKPHRVAVTAVARKLCHIVFAVMRDRVPYDPGRE

SEQ ID NO: 333001 - protein, 365 aa, unidentified
MASVSHLAPIHLGLDVHRDTISVGVLVPGEEVPAVDKIAHDEPSVRRLVGRLGDPRQLQACYEAGPTGFELARLLHSMGVSCQVIAPSLIPKAPGERIKTDKRDCRRLARLHRAGELVAIRIPSPAEEAVRDLCRTRGDMVEDRMRARHRLSKFLLRHGRIWREGKAWTLAHERWLVTQRFTEPALQTTYDHYRAVLASRDAQLEAIEADLAVWQDRAPFAEQVARLAAYRGVTRLGALHLAAEVGDWRRFARAGQFMGFCGLVPSEYSSGQVTRRGHITKAGNRHLRTQLVESAWAYQHRPSVGARLASRQQSLDPQVVARAWAAQLRLCGRFRRLRARKPSTNIVATAIARELAGFLWAEMAA

SEQ ID NO: 333002 - protein, 324 aa, unidentified
MIDGILGIDVSKNTLDASVSSRSKGRARSFANSPDGWRHLLDWLITQRVGRVHACLESTGRYSLGIACALNEAGHVVSIVNPAQIRDLARTKLGRNKTDGVDAAHIREYCELFKPQPWAPPSDAHRRLGELQTIRAGIIAGLTEWKNRRNSGMVDAVAQSLADVTISHFTCQLGAVDEAIAQTIDNDSVLRRKRDLLLSISGVGETLAGVVLAELPGPDILRSSAEVVAYAGLNPRQHQAGTSIDRVTRISKIGNAVLRAAFYMPAMSAMRYNPAIVALVTRLKSRGRLKPKQIVVAAMRKLLVLCFGVLKTGRPFDPAIAMGC

SEQ ID NO: 333003 - protein, 340 aa, unidentified
MKLYGAIDLHSTNNVTVVIDEQDRVVYQKRLPNDLALVLKELSVYQSELQGIVVESTYNWYWLVDGLMEQGYQVHLANTAAIQQYNGLKYTDDNSDARWLAHLLRLGVLPEGYIYPRADRPVRDLLRKRSQMVRQRTTNLLSIQNLVTRNTGSSLSAKRVKGLDVQQVDELLPNPDLALAVKANLSVLYSADEQVQLLEQTVTQRVKLRPQFSFLKTVPGIGEILALTIMLETGDIRRFSSVGNFASYCRCVGSQKISNGKKKGKGNTKNGNKYLAWAFVEAAHFAIQFNSKIKSFDQRKKAKTKGVVAIKAVAHKLCRACYYIMRDRVPFNITKAFGQK

SEQ ID NO: 333004 - protein, 377 aa, unidentified
MKNVRFIGLDVHAETIAVAVAEPDGEVRSLGTIPNRAESVRRLIGKLGKPESLKVCYEAGPTGYVLYWQLTELGVACEVVAPTLVPVKAGDRVKTDRRDAEKLARCYRSGDLTAVWVPDAAHEALRDLVRARLSAKRDQLRARNRLSKFLMRQGRRAPEGATAWTVKYMDWVKQQHFEHAAQEATLVDYLHEGEHVAERIVRLDRDIDAAVERTPETLRAVIAGLQSLRGIAKISAVTLVAELGQLSRFAHPRQLMGYSGAVSREHTSGPQVRRGPISKAGNAHLRRIVTESAWAYRHRPSIGRALAARNREQSEAVKAIAWRAQHRLHARYCALLARNKTKQKVIMAIGRELLGFIWAIGVEIERGHTAQEVKRAA

SEQ ID NO: 333005 - protein, 450 aa, unidentified
MVKSSNQPTQNPLAILNAHAAGIDIGSMLMMVSYTDPSGQQKLLESTGFSEDLIKLAKTLKSEGITDVAMEGTGVYWMAVYEVLEQEGLKVTLTNPRHFKNVAAQKTDVKDCQWIHQLHAHGLLRSSHIAPELYRELKTYVHERNVLQEMKSDTLNRIHKVLTQMNIKVQHVISDIEGVSGMKLLRGIASGITDPEKLLSLVNTFKLKATVDELLQSLNGLHKKQYTVVLQNQLEVFDFLKSKMKSYELLIEDVLKKMMPSNENGSLPEIKKKKSYVRKNEYAINLKAYLERILGVDVTAVDGLKEISVLEIISVTGVDMNKWRTQEHFTSWLNLSPRQKKSGGKLLGHEKRFTNNNATQAFRLAAQTMWQNKGPLGQLYKRLAVRKGSKKAIKAVARKLAVIFYKMVKEKCSYDKTKLEKNPEQQRARKIAMLMREASKYGYDLQPVML

SEQ ID NO: 333006 - protein, 344 aa, unidentified
MDISVLGVDLGKNVCSVVGLDVSGAVVMRRKVRRETLIALAEKLPPCVVGMEACCGAHHLGRVFAAHGHDIRLMSPEYVRPYIKAQKNDDRDAEGIAEAVTRPTMRFVDLKSQDQLDMQTLHRSRDRLVGERTALINQLRAILLERGMVAPQGKRKLEQFLAVLMDEQGGAGLSSRMIVLVADARAQWAELDRRISAFDAEFVRWVKENEEARRLTTIPGVGPIIASALVAAVGSAESFDRGRDLAAWLGLVPRQFTTGGKPKLLGISKRGNKYLRRQLIHGARAALPYVAERDTPLGRWAKGLMSRAHRNVVVVAFANKLARIAWAVLRRGERFAAPGMPVAA

SEQ ID NO: 333007 - protein, 458 aa, unidentified
MYRELIPLRQALSVELKANLPSDIPGLDPEHLLQAYLGRLTMYVGGDVADQTFTLFAVDAAGNELGHLLDVPNTPAGFDTAWAWLENLRCQHRLRIILLAIETSGVYYWAWWDFLAARPNLARVLYNPRTTEHMTEVLSKKVRTELVDAYALAEQVRLGSTPEVVLTEDADLLSARFCSRAARDLAQQVNRQKNQLRSLLRAYNPALGQVFPGAKLHHPAVYALLQHYLFPDEFVAAGVDSITAILSEHCRTAFGRDHAHQLVTLCAQTLTHPIGRPPIHQRVQQLTQDILSDQQHKQNFLKTGYTLIQDRTETKLLRAASGAGFSNTLALVSELGGFSRFPDGEHMASFLGLTTSKHISGTTLFESKRITKQGSPNGRYAAVNLAQHLKRHVPKYQQMYERITNRKPPHKGHFVALVAIARDFIANVLYDTWRNQRPFFEKVEDYRAYRQTHPRSKD

SEQ ID NO: 333008 - protein, 436 aa, unidentified
MDKPDVFVGIDVGRHHHQCSFVDGERKPIAKTLRIREDRDGFQALKLEMDNIVQKKDEVRFHIGLEATGHYHQNLMAFLQAIDDLDVEVTCINPVQTKRFIQMQMLREQNDKVDARAIAEYMCVQRPAPTPRKRSDMQPLRDLSRLRCQLITQRTASLNQLHAILDHVFPEFEQIFTDVKSEPLAWTLLSRYPCPQNLITAKTSQLMSVQAKKGGGYLGKERALQLKKFATQTVGSSRGEVYAFQVKILVQNVKSLQQQIEETDKAIENSMQALELPPWKTIPNVGILTMATLLGDVGDPRLFGSAKKFASFLGLTPRGKQSGSSINRKGHISKCGPSHARQKLYMCVVSALSTKKNPLIIEIYNRLVSKGKPKNVAIVACMNHLARIIYGVFKSNQPFNPEYQGLNSGLGRPQNGNLATMPGVLLPRPLGNITAT

SEQ ID NO: 333009 - protein, 346 aa, unidentified
MLIIGCDFHPGFQQVAIFDNVTGEIQEKRLQHRAEAEQFYRGLAGQEVRVGMEACGHYPWFERLLAELGFELWFGDAAKVQASVVRKQKTDRRDAEHLLDLLRENRFPQIWVPSLEVRDVRQLLVHRHKQVQARTRTKNQLQAMALSQGVQKKYKLWTKAGREELEQLPLLPYAAQRRKQLLQSLDGLEAEISELDRRVADEARQRPEAVRLMTHPGVGPVTALALVLTLGPADRFESAKQVGSYFGLIPSEDSSGGKQRLGRISKQGSSFLRFLLVEAGQTAARLDPQLKRFYRRLAARKNRSVAKVAVARKLATRLYLMLREDWTYTQLCQAVMQVSPSHSVAG

SEQ ID NO: 333010 - protein, 335 aa, unidentified
MKEITTVGVDLAKSVFTVHGVDAMGRVVLRKTVRRAQLVELIAGLPPCLIGMEACGGAHEWGRKFQICGHRVGIMMARFVAPYRKSSKNDGNDAEAICEAVARPNMRFVPVKSAEQQAILSLHRVRQGFIEQRTATINRIRGLLAEFGVVLPQRAEQVRRAAVVMAEGLPVLAREAIADLRAHLTYLDERITRYERQLVSLARQREAAVRIQRLPGVGPLTASAITASISDGHEFANGRQFAAWLGLVPRQYSTGGKARLGRITKRGDPYLRTLLMLGARAVLQNAAPKTDRLSRWAMALRARRGYHRAIIAVAAKNARIIWALLAKNREFVLPA

SEQ ID NO: 333011 - protein, 343 aa, unidentified
MKEISVVAVDLAKNVFQVHGFSRSGERILAKRLNRAGFVRLLGELPVSSEVVMEACGSGHHWARACQRRSLRVRLLPPQHVKPFVVGNKTDRHDADAIYAASQRRELRAVPVKSVAEQDVLMAHRVRERRKRARVAVMNQVRGLLAERGQVCGQGVAALRALLSTTLAHGPEGEITASFLTQLGELQAEWRGLDEQVASAEREIRRHARTTPACQQLETMPGVGPITASAAVAMAGDGSAFRDGRQFAAWVGVTPKEHASGEKRRLGGITKRGDAYLRSLFVHGARAVVRAATGDDARSRWIRALVERRGHNKAVVAVANKNARIVWALLRTGETYRAAVAAP

SEQ ID NO: 333012 - protein, 412 aa, unidentified
MTETNQFAAHVGLDWADKKHDVCVQFKNGERTFHVIEHTPEALDVWLTELHQKVKGRIAIAVELKKGPVVYALQKYPFITVFPVHALSLARYRQAFSPSGAKDDPQDAELALELMLRYPQKIKAIEPDNADIRLLQQLVEQRRQLVEDKRRFVNRLINTLKQYYPQPLEWFSHRGSLLLCELIMRWPSLQQLKRARRDTIRNFLNAKGGRAMALTEQRVVSIDNAIPLTTDPSVIEANALMATALATQIKVVSEIIKTYDERIETLFDTLPDSGLFKSLPGMGPCLGPRMLAALGDNRDRFNSAEEIQNYAGIAPVTERSGQKSWVHWRWQCAKFVRQTFVEWAAKTVNSSYWARLYYRGLREKGKSHQSAIRALAFKWIRIIYRCWKTKTQYDEAKYLLALEARKSPLLKP

SEQ ID NO: 333013 - protein, 491 aa, unidentified
MSTTGKQSRKKKDPTLNARASRRNASMSHCQQGKGGQRRSKLTIANPNAAAVDVGSQVHYAAVPEGRAEQSVRSFGAYTAQLDELVQWFKDCGIKTVAMESTGVYWIPLYQKLEEAGFEVLLVDARQVKHVPGRKSDVQDCQWLQQLHSYGLLRAAFRPEDSICRLRTLQRHRKNLVECGAMWIQHIQKALSEMNLHLHHVLTDISGQSGQAILDAILAGERDPKKLATLVDHRVKKSQAQIEAALTGDYRPELLFVVSQTLHDYRQMQQQIVQCDLNIEKQLATIAARTEPKHGPKQTPPPPQGAAVKARTRKRKPKDALELSLAEHLKRILGVDLTAIPGLNVLAVLSLISEIGTNVAKWRNEKAFVSWMGLSPNNKVSGERVLSSRTRKVNNRAATTLRLAAMLLGRTDTPLGSFYRRKRAHLGAPKAITATARKLGCLIYRLIKDGQAYQEPDLHTYELKYKHQILSSLRRRANGFGFDLVELPKAA

SEQ ID NO: 333014 - protein, 344 aa, unidentified
MDHYAGIDVSLEQSSVCVVDATGKIVREAKVASEPDALVRFFADLGFPVVRIGLEAGPLSQWLHAGLSEAGLATVLLETRHVKAALSAMVVKTDRKDARGIAQLLRMGWFRSVHRKSADAQEVRALLVGRKLLQSKLRDVEFSIRGLLRGFGLKVGEVSKGRFAARVQELIEGHAMLEEVVGAMLTARAGLHSEFMRLHRKMLAIVRADEVCRRLMTVPGVGPLVAVTFTATVDDPARFTSSKAVGAHFGLTPKKYQSGETDVTGGVSKVGDAMVRTALYEAANVLLSRTTKFSTLKRWALEVAKRRGVKRAKVALARKLATVLHRMWVDGSEFRWGKEAPVAA

SEQ ID NO: 333015 - protein, 356 aa, unidentified
METAYDGRQVVGMDLHRRRSVLVRMTEDGRRLGTAKITNSPAELRRAIARAGKHPRVVLEATYGWYWAADVLAAAGAEVHLAHPLGVKAFTYRRVKDDVRDSADLADLLRMGRLPEAWIAPHEVRELRELTRYRIKLVRLRTSCKDQVHGVLAKLGVAVTCSDIFGVAGSAWLDGLRLPQPYAGKVTSLRHLAGELTTEITMLGEVIASLLAGDRGYQVIQQLPGIGPVLAAVIIAEIGEVTRFRNAGQLCSWAGLTPRHRESDTKVARGHVTKQGSRLLRWALIEAIQRIPRDSVIGAVKDGITGRRGKEAKNIAKVAAARRLLTLIYYGMRDGQIRCLSRPPAGPPVTETARAA

SEQ ID NO: 333016 - protein, 407 aa, unidentified
MQKRESYLYVGMDLHKKTHTAVLVNCWNEKIETLVIENKPVEFEKLVKRVNKKALSLGLTPVYGLENAYGHGRSLAVFLLEKGCVVKDVNPALAYDRRRSAPTMKKNDEYDAYCVGMVLIDQLHILPDAKPADNYWTLAQLVNRRDTIVNDGIRLKNALHEQLSVPYPSYRKFFSEIDLKSALYFWKTYPSPIHLKDKTAEELTAELRAIAANISKSKAALILDCIQNDGDTLRDYQSSRDFITQSLVRDLERQQAELSQVDSEIEKMLKTFDYKLTTLPGVGSAIAGKLIAEIGDIRRFPNAHKLASFAGIAPKRFSSAGKGRDESNKQGNRALHGLFYFLAVSMVCVPKSGRPNNPVFYDYFCRKLGEGKTKSQALVCIMRRLVNIVYGMMKNKTAYIAPSMDEH

SEQ ID NO: 333017 - protein, 354 aa, unidentified
MSIVADVYRFVVGVDTHAATHSYCLVEAATARTVDQATFPTSSAGLRRAIAWIERRTGTRIRETLISVEGSSSYGTRLTRELLRAGYRVVDAPSPRRERGGSKTDAIDAHKAAVTMLARPSDGLADARTGDLHECLKTLLPARDRMTREKTRQFNAMVALLREHDLGIDARGKPTLTIVKQIARWRERPSDSRAKQFARAEVITLAQRIVALHVQLAQNLAAVRELVAAHAPVLLELPGVGPISAGLILNAWAYRGRVKSEAAWAALAGVSPIEISSGQRQYRRLNRGGDRQLNRALHAIVLTNSRCDQQTKEFIAARITQGKSPRAIRRILKRYLARRIYRILNQPGAVTTAA

SEQ ID NO: 333018 - protein, 355 aa, unidentified
METQTNLEKSFFENKELFVGMDVHKAKWVVTVRSYDLELKTFSMQPLAEMLEKFLLSTYPKAKYKIVYECCFSGFWIYDYFFEKGYSIIVTPTNRIYKDGNTIKTDKIDSRKLAFQLSRGLLREVMVPAKKIREYKYIFRIYDKQKMRKGQILRQVKAFLEQKNHPLKWEKWNKGLIEKLKLLTFEDKLFDLKFGNLLKEYEYVVSQIKDSEEIIERIKEDEVLGPRITRIEKINGIGIISSVRMSVYLFDRKDRFESSEKLNHHLGLTPSERSSGDKVNRGRSGMCGNRQLRSIIIQLAWKSVRKDGALLDKFERVYKKSGSKQKAIVAVARKLMSKLYAIIIKEEAYRVNLAA

SEQ ID NO: 333019 - protein, 362 aa, unidentified
MLKTKYIHNLKPYQYAKVNIYVGIDVHLKTWHVTTLTETGCKYSFAQHADAKELFDRLNKKFPEAHFLSAYEAGFCGFSAHYALTEQGIENIVVHAADIPTTGKEKAMKTDAVDSEKIAWALKRNELTGIYIKDKRYMDDTNLIRLRQRFIMDLSRQKNRTKHLLYTQGVTYPERFHNCRTHWSRNFMKWLREEVELLSEQKMSLLLLCEQVENTRKAILKVTREIRRLSTTDRYKENYDLLVTVPGLGLITSMSMLTELDNDIVRFPNERSFVSMLGLIPTCHDSGEKKVSGEKINRGNKHLGPLIVEASWVAIQRDYQLGAYYSSCCQIMKPHKAIIKVARKLACRAYAVLKTKTKYELS

SEQ ID NO: 333020 - protein, 411 aa, unidentified
MRIHHTICCGIDVHKKSVTACLMWGPADREPQVEIRRFGTMTSELKTLGEWLKQARCEVAAMESTGAYWKPVWNVLEGEIPLILANAKHVRALPGEKTDNKDGKRLASYLRHGLIRSSFVPPRDIRELRDLTRYRKKLLGNGAAERNRIQKVLEDANIKLGSVLSDVFGVSGQRMLHALVEKPAVDVEAVAALAHWRLEPKIAALKQALEGRITAHHRFMIDLSLGHMQYIEQQILRLDEEIARHVAHYQKQFELLQTIPGIAENASAAVLAEIGPDMSPFDNDGKLTSWSGICPGNNESAGKKFSTNTRKGNPHLVSTLVESAWAATHTKGSHFKAKYHRIKARRGSQRAVVAVAHTLLRTIYVVLKTGQPYQEPIRPPLSETQRTRKAQRLTRELQNLGFEVALKTKTA

SEQ ID NO: 333021 - protein, 412 aa, unidentified
MLIPPKVHVAVDVGCRRHSVAIGLSSGELLEAFDIDHRPEGFAEFFRRIERHHRRYPSGVPTVAMEGYNGHARPLDTLIRERGWRLLNVNNLKLARFKQMFPAAAKSDRIDTRRMLDLLQLGEHMPQARRALQEVHAPTPENAELKRLMRRRRALVDEKSRLLARLQSDLRAVCPGLLDITTDAENLWFLNLLSHGDDLQKLARLREKTVRAIPAIGAKYAAIIRQWQQHAQFSHEAPYAGPMIVEDARRILALKGSIQALERRCEALAQTSDIARLIDTVPGFALVCSAELAGEIGTLDRFASEASLAVYLGMANLDNSSGDRQGARAPGQVNKRAKAAMMTGVDRHRKQVPESQRYYEKKRAEGKAHNQAIRALGRHLCRVLYRMLKHGEPYRVREPVAPQPAVAQPLAA

SEQ ID NO: 333022 - protein, 351 aa, unidentified
MLQKTNAVAVRTIGIDTGKNTLHLIGLDQQGTIVLREKLARGRIGRRLANAAPCLIGIEAGMATHYVARELLALGHDVRQVPPAYAKPFRQGHKNDFRYAYAIAEAVLRPSTRCVPVKTDDQLDLQALHRVRSRLVGQRTAVINQIRSFLLERGIAVRQGPRFLRQQLPEILAKRTDVLSPRMIGIIEDLSGDWRRLDERIECVTEEIEQLAHGSESCRQLMTVPGIGPLIASAMVAAIANGAAFAKGRDFAAWLGLVPKQMSTGDRTILGHISKRGNRYLRTLFMQGARVILLRPANWARHSFGPWLTAAAKRLHHNVFATALANKLARIAWTVLAQRRNYETRVVTEAA

SEQ ID NO: 333023 - protein, 351 aa, unidentified
MQIITDRPQAPTAIRTDLGAIFVSLELSRSTWLITSLSPGGGEKMSKHTVSSGDVAGLQTRFSQLKDKVQVRTGQVVPIIVIQEAGLDGFWIHRLLQDEGVESHVVDPASIATSRRRRRAKTDKIDGEALVRALLAYKRGEPRVCAMVRAPTPQEEDRRRICRERKTLTAERVEHVNRIKGLLFAQGISDYEPLLRKRRERLEELRTGDGRLLPEHLKAQIVRELDRLELTLQQIKSVETERDAMLSPSDEGTPAPGAMLKSLKGIGPEFAGILWSEGLFRSFSNRRQVAAYAGLAPTPWRSGSVAHEQGVVSAPSSTTPAVTYFQKAISSFRAKATIRTFRTRPPLNCTR

SEQ ID NO: 333024 - protein, 356 aa, unidentified
MKAKVTKQHIGIDISKDDFQVCFMQRLGTDKIRIKGSRSFKNTLSGYKNFKTWVFKKASSELLVSYSLEATGVYHENLAHYLYEQKYPVSVLLANTVKAYSKSLNVNTKTDKSDAKYIAQMGIERSLKLWSPISPQMRQLKQLTRERGSIQTSKTALSNQLHALNYAHLANKEVLKLIKQRIKLLDKQLLTVNQYIEQAVRKDDFLKERIEKICVLKGLGLITVVTILAETNGFQHFSSKAQLVSYAGYDVIEKQSGSSINGKTRISKRGNSRIRKALHFSALTAKKHEPVFTALYNRVFERTKIKMKGYVAIQRKLLVMIYSLFKNNVAFDPEFHKKLTNIEEKCRQDTMPAYSG

SEQ ID NO: 333025 - protein, 464 aa, unidentified
MNRTRRPTSRKARVSPTALDRLNPDVAGIDCGAAEHFVAVPPDRDATPVRSFATFTPDLVRLVDWLLACRIRSVAMEATGVYWIPLYELLEARGIQVVLVNARHLKNVPGRKSDVSDAEWLRELHSVGLLRGSFRPTAEIATLRAYLRHRDTLIESAGIYTQRMQKALVQMNLLLPRVISDITGVTGLRILREIVAGQRDAQMLARHRDQRCQATESEIVAALTGHYRPEYLFALQQNLELYDACRAQLAACDRAIEQHLQGITASLATPAMPLATRRRQRTRNDPSFAVSPLLHHLTGGIDLTQIDGIGEHTALKLIAEIGTDMTRWPSDKHFTAWLTLAPNNKISGGRLLSSRTQRSANRAALILRMAASSLYRTQTALGAFYRRLSSRIGKAQAITATARKLAILVYRVLKGTLTYQDPGADSYDLQQRTRIARRLRQRASALGFDLVNRATGEILRGRPA

SEQ ID NO: 333026 - protein, 409 aa, unidentified
MRRSKGKRSASSIVGCAPKCAEPHAETPEGVLTASIQRRQTVNKNITSFVGLDVHKDSTAIAEAEAGREAPRFIGTVGPDLGQLLKALKSLGKPETMLVVYEAGPCGYGLARQLRSRGYSCEVVAAGKIARRPGERIKTDRRDALTLARLARSGDLVKVMVPDERDEAMRDLSRAREDGVRARLKARQQLKALLLRHGHRYGGKSSWTLAHERYLAAVSFAHPAQDIAFAEYRQAVREGHERVERLTEALRTQSEQWRLKPLVAALSSLRGIDFVAAVTLAAEIGDFSRFAHPSELMGFLGLVPSEYSTGDTRRQGDITKTGNSHARRVLVEAAWNYRFPARISRILQIRQEGQPKVVREIAWRAQLRLAHRYRRLSSRKLHPNKICVAIARELAGFLWDIARQVKVAA

SEQ ID NO: 333027 - protein, 419 aa, unidentified
MSFKIFKFNCCGLDVHKTWIYACIGITDSNNRTEYKQARFSSFTKGLNELCDWLAKYHCTDVCMESTGKYWIPVFNILEQHSFWVTLSHPKYTKPMKGNKTDRKDAKWICDLYMCGMVKPSFIPPADIRELRDLVRYRFKLTCMITGEKNRAQNCLTVSNLKLDDVFSDVFGKSSRSITEHILQHPGEKFDIAPFVDSRCKTPITEIQAAVDGAISKEQVVKLRQCLDHIDELNKHISEVEQEILRLSDKYEAALNLIRTVPGFNKNPLTAIQVLSEIGGDMSVFPTAKHLVSWAGCCPRTDQSHQKIKSTRISRAGSYFKPVLVQVANALIKSKKHSEFTSRYKRIKARRGHKKAIIAICRMILTAIWHILSDLKPYTPEGFLESRPVKEGKVLSTSQALNLLKQRGYIIKGEPLAVS

SEQ ID NO: 333028 - protein, 365 aa, unidentified
MQKAELSCEADSENDLGGSSETMYSIGLDVHKRTISYCVKDAAGRVHMEGKIGSTRRELDSWIKTLPQPRTIAMEATIFTGWIYDHLLPHAEKVKVAHPLMLRAIAAAKRKNDKIDASKIADCLRCDFLPECYMTSTEIRDRRRTLRYRGLLVKQMVQMKNRISGLLMEKGVTHTKRRLHKVGYFAELMAGNEEIDQSIRPLLKLSREHIVRAQKLDYALVSSLERDPLLVERLKRLRTVPGVGPITALTWALEIGDVARFRSIKQAISYCGLCGAEKSSADKMLRTPISKQRNKHIQHVLVEAAKLAPRQCHELALIYEKEMQRGNRNRATLAVARKIVAYLLAVERREKDFVPTEEFGGTAAA

SEQ ID NO: 333029 - protein, 327 aa, unidentified
MIIIGVDFHPEFQQIASVDTDTGEFQEKRLAHPGEAEEFYRALTGKKVRVGMEASGHARWFERLLAELQFELWIGDAAEIRTKRVRKQKTDRQDAQLILRLLLEDRFPQIWVPSWENRDLRQLLWHRHRMVQARTRIMNQLQAVALNEGLRCKKRLWRERGRQQLESFPLAPQASRRRDDLLELLDRLNPTIAELSHAIEQEAEKCPAAQRLMTHPGVGALTALAFVLIIGEANRFHCGKQVASYLGLVPLEDCSGIRRRLGHIPSLSCSRLLSRSVKVFARPGGFASAKLPALLLYAPQIPRLRLISSRNLSAWGSCGRTAGSIGR

SEQ ID NO: 333030 - protein, 411 aa, unidentified
MSEPSRSSIVRFFGVDLHKHFLFIAAVNSLQEIIFKPLKITLEKWPEWARDHLLPTDIVAVESTTNSWDFYDGIVSLVAAVQIANAGQLPWINKSRVKTDKHDAIKIAKLCAAGLIPQVWVPPVHIREARCLLAHRRRLVGIQTMTRNRLHSLLHRHMLELPPGVPFSDKNLPWWDSIPLSPTEKIILRHSLEILDHLKPQIAQLDAEISRLSDSPEWRDSMTFTLQIPGFGVNLGLTILSAIGDISRFESPKKLVGYSGLGASVHSSGQTFRQGRITKSGRRDLRTALIEAAWAAVNFDPYWKGEFDRLSERLVPGKTIVAIARRLLVVLWHVLSKRQSYRHLTDTQIASKMMRWSWKVRKHHPEAVASRLFIRRRLMTLGVGKNLSSFQYNNLPRGLASEEEALALTPE

SEQ ID NO: 333031 - protein, 339 aa, unidentified
MNFIGADLHKKTITVCVMNEKRTVLVRKTLYCNQPDQIVEFFRQFRPFTVVVEATASYLWFVELLEPLAEKTVLANPKKLRVIAESTKKTDRLDAQVLAEFLVRDMIPQAFMPTPRQRQHRRLVRYRQYLRGRLTSVRCKIRHILGDYNADRKDLFSAQCGQAYLKTVALSDADRFVIKQLWSEFEDHQARLLAITKKLKAFIAKAPTREAEARQIVKTAPGVGAVTAEVVLSELGDVTRFRNAKAICAYAGLVPAVRQSGGKKSKDMQITKEGSGLLRWALVESAWRLVNTSPKWTAVFCRLRKRSGNKRAIVAVARKLLCVLYAMLRTSTPYRVIAT

SEQ ID NO: 333032 - protein, 354 aa, unidentified
MNTIKYIGIDVHQATSVFAVRNHRGKILSEAILETEPTAIIDYLKAQRGTLWVTFEEGTYSHWLYDIIQPQVTKVVVCDPRKNKQDGNKNDKIDARRLAELLRLNALKAVYHGQHNMQALKELARSYLSLQQDSTRVINRLKAIYRGRGIRCRGTSLYQPKNRKEWLEKLNGTGARRRAERLLKQLQSIDELLIEAQRELTRESRKHPSYKILRQIPGLGPIRVALLMAFAITPHRFRTKRQFWTYTGFSIISRGSAEYEIAQGELKRTKRKPLPRGLNHNYNRVLKNVFKGAALTAAYRGPFKKVFDQRVANGTAPNIALVILARKIASITLALWKKGEKFDIERHLLSEQTT

SEQ ID NO: 333033 - protein, 401 aa, unidentified
MQETTQHDAVDVFVGVDVGKGQHHAVALDRNGKRLYNKALPNDEVKLRALIAELKTHRRLLFVVDQPSTIGALPVAVARAEGVLVAYLPGLAMRRIADLHAGEAKTDARDAAIIAEAARSMPHTLRSLRLADEQLAELTMLRGFDDDLAAQVTQTSNRIRGLLTQIHPALERVLGPRLDHPAVLDLLERYPSPSALAAANEKTLANRLTKLAPRMGKNWAAEIVQALNEQAVIVPGTQAATIVMPRLAQQLAALRKQRDEIAAEVERLVLAHPFWPVLTSMPGVGVRTAARRLTEAAQKAFATAAHLAAYAGLAPVTRRSGSSIRGEHPSRRGNKVLKRALFLSAFAALRDPVSRAYYSRKIQQGKRHNQALIALARRRCDVLFAMLRDGTIYPPKSAPNA

SEQ ID NO: 333034 - protein, 415 aa, unidentified
MALKIVYKICCGIDVHKTFVVACIASTNDKGITSYESHRFSTYTSGLKTLLQWLLDRNCKDVCMESTGKYWIPVYNILESDCSIVLAHPKYVKAIRGKKTDKKDAKWIADLFKHDLVAGSFMPPADIRQLRDLMRYRFKLTCFKSSEKNRLQNCLTVSNIQLGNVVSDTFGKSAQAILDKILENPADTSFDLEPLVYKSLKKKLPELRDAIDGYITPEQAGKLKVIKAHYENLESRKAELEELILALAAPYQQELAILQTAPGISSDFTAIGIISKIGTNMEAFPSAKHLCSWAGLTPTNNESAGKKKSVRVSKAGCYIKPLLVQCANAVVKSTKHPEMRNRYLRLKKRRGHKKAIIAIARMLLTALYHMLKNGENYNAELYQKSDLLPVDREITVEQALMIARNQGYKIKSATA

SEQ ID NO: 333035 - protein, 400 aa, unidentified
MLSIGIDVSKGKSTVCGMKPGGEIVYAPFEVQHTREGMSELVSLLRSSGEEVRAVLESTGSYHCPVVAALLENGIFVSVVNSLRMKRFCSQSIRKVKTDRIDAMQIALYGLAYWQELQPTRLPEDTYRELQLLARQYYQMTSLLIKAKVDFNAICDQVLPGMQELMNDHAGRHKLSDFVLRYRHTTHILEMGETRFRKDYCKWAEKKGYRNCERMAALIFATAQNGIPVLPNAPSTQIVITEAIRVLHTVEASRDAILTQMQALAKTLPEYSLVREMPCIGDTLAPRLIAEIGDVRRFHSKRALIAYAGIDAPPYQSGKFCANNRHISKRGNRYLRKTGYEVMQSYVMHKPANDPIFTFIEKKRGEGKSGKLAMVAGLNKFLRVYYGKVTELYRSLSAIE

SEQ ID NO: 333036 - protein, 320 aa, unidentified
MSGSSMVVGIDVAKAKVDVASTPSSTPIGTFDNEPEGHSLLVGRLESLRPDLIVMEATGGYEHALACALQAAGFAVAVINPRQARDFARAMGYLAKTDVIDAKGLAELGRVLLTRDDVAKYLKPLETAEQQDLAALVTRRRQLVAMLGMERQRLSHTRPIAKKSVEDTIDFIRGQLDGVDGDMARHVKTHYAELDALLQSTRGIGPVASATLIADLPELGTLTRRQIASLVGVAPYACDSGVMRGRRRIQGGRFEIRRTLYMATLTATTHNPVIRAHYQRLVANGKLKKVALVACMRKLLTILNAMAKTNTTFNPQHVRA

SEQ ID NO: 333037 - protein, 352 aa, unidentified
MIIIGVDFHPEFQQIASVDTDTGEFQEKRLAHPEEAEKFYRALTGPKVRVGMEASGHARWFERLLAELHYELWIGDAAEIRAKRVRKQKTDRQDAQLILQLLLEERFPQIWVPNWENRDLRQLLWHRHRMVQARTRIMNQLQAVALNEGLRCKKRLWRERGREQLEAFRLAPWASRRRRDLLELLDRLNPIITELTHAIEQEVEQCPAAQRLMTHPGVGPLTALAFVLIIGKADRFQCGKQVASYLGLVPLEDSSGNRRRLGHITKQGSSMLRFLLVEAAQVTVRSLPEWRSKYFHLAMRRGRKIAKIAMARRLAVRLYWMWRKGWDYEQLTKFGSHAGQPGNRHGVQSNTE

SEQ ID NO: 333038 - protein, 449 aa, unidentified
MHGAHIGGQRAGAFLDLVRGVDPERVLLVGIDVAKATWFVVASNLLGEVVVDGVRLVADRAGLAELERVLGAASARVNAAMVVVGIEAAGHQHQTLTAHLLDRDELVVRVLNPAQVAAVRKQQGNRRRKTDWLDAAAICELLARGEGALVHLDGSAAAALRPLWSGRKDLVDTRSRLRQQAGALVDCLWPGCSAKDTVAGVTPVLCDLFATKAGRVLLELLAQGWTPARVAATSVAALRGLFAVRGCRLTRPLATRLIGRAQAALPAHPAATAGKAATLAALLGTIDTLDREIACLEAAMAPLLARTQGAKLTQLRGVGVVAAAGFVAFVGSTDRWAEWSKVWRAAGLDPARSQSGPADARLGISREGSAWGRRAILDLAAAVCQQPGPWRDRLRTRTTQQHKPAKVALAATANAIGRTLFALMASGADFDPRFEAKRAAARKAGGQAA

SEQ ID NO: 333039 - protein, 385 aa, unidentified
MTEQIFKYSVGCDISKDTFNVCILEVSQDMQSKVKASHKFKSETKGFKEFETWVKRHKKHNVQIGFYMEATGVYYENLAWYLFEQEYNVFVLLPYKTKHYLKSIGIKSKNDKIDAQGLARMGSEQKHNPWRPHSKSIYTLRALTRQHESVTKLKTSLQNQLHANEYSAVRNTIVRKQLNATIRLLEKQLMELSGEISILIDADEKLNEKYCQIESVRGISKLSWATIIAETSGFEAFENQRQLVSYAGYDVVENQSGKHVGKTKISKKGNSRIRRILYMPSLVSVRLKEPTLFNLYQRVHERTGIKMKGYVAVQKKLLVLIYHIWKNDKAFQSDYSKIFGEEESKDLFPFGFGETIKESSPDKRATQDEHSYELSSKVLSPLAQI

SEQ ID NO: 333040 - protein, 343 aa, unidentified
MSMTMIGLDTAKSVFQVHAVNEAGEVVIRRKLRRNELIAFFEKQAACTVVMEACGAAHHWARVLTGLGHDVKLIAPEAVRPFVKKGKKNDAADAAAICEAASRPDMRFVPIKSLEQQGVLALHSARSLLVKQQTMLANAVRGLAAEFGLVVPQGISRLGELMTLIDADAAVPEKARQAIRGPLDQGRWLAESIETFEAEIVAHARHDDTARRLATIPGVGPITASLIAATVADIGVLPSARHFAAWLGLVPRQHSTGGKTRLGRITKTGNREIRRLLALGATSMVHRAPGWNSAAGAWTRGVLQRRPVRLVTVALANKMARIAPRERPSAFPPLWGRIASRWR

SEQ ID NO: 333041 - protein, 414 aa, unidentified
MEKQKNIVCGADIHKKFIMATILSRDGNKIIERFGMTLDEILRFKNWVISNNCESVAIESTGIYWISIYTVLEGNIEVILANAYKVKHTPGRKTDKRDSKWLAELCLNGMIEPSRIFPKEDRDLRALTRAREKLVNNSTQMKNRIHKELESACIKISSVLSDIFGVSGMKIINGLIEGKNIDEILKMITSKKILKKEKELRDALKNSLDPARILMIRTYLELIEKIESEIEVLNNEIMCRMQRFKEDLEIAMSMTGMGFASASTILAEIGNYKDFETAEHLASWCGLTPKVSQSADKLVTGNITKQGSKHVRRMLVQVAHAISRSRNSRLKIFFLRLLAKKGKKKAIVALARKVLCILHHLLVNRERYQDDKILKPKKVKLNWDSSPVQMTEEDMINVLVGAGYTVQKMNESIY

SEQ ID NO: 333042 - protein, 442 aa, unidentified
MSHQTQQPEPEFAAFVGIDWADRQHFWACQMPGSRRIEQGELPQTPEAVEEWAMELHRRFGGAPVAIALEQSRGALIFLLGKYAHLILYPVHPTSLANYRKTFRPSGAKDDPSDASLVLDMLVHHRDRLRRLSPDTAETRTLQMLVEHRRKLVNDRTRFTNRLTSQLKLYFPQILEWFDAVDSPLVGDLLERWPTLQELQKAKPATLRRFFTQHNCRGQEKIDQRLEQIRRAVPATGDSALLTASRSVVCALVAMLRALRYAIVAHDEQIEPLARCHPDFAIFASLPGAGPVLVPRLIAALGTQRDRYRSAHEIQCYSGIAPVKESSGQQIWVHWRWACPKFVRQTFHEWAGHSIGFSQWARTYYDRQRALKKGHHAAVRALAFKWIRILFRCWQNRTPYDEAIYLNALRRRQSPLIVPPQPIVELQLKKRGGFWKITPADA

SEQ ID NO: 333043 - protein, 312 aa, unidentified
MEKLSYGGIDVSKDRLDVVVLPEGWFFSVSNDTAGWAELVARLRPLAVSAIGLEPSGGYERGIIRALLAAGLSVRRINPNKLRQFARARGVLAKNDRLDARLIAEYVAIMPTRVVQRDDAVERLAEIVTMRRQLCDEHVAVENQAGHLEDVMLRRLSKRRLIRLEADIRLLDKRLAEMVATNAAFAQLYELLTSMPGVGPVLAFTLIALLPELGKMSRKQIAALVGLAPYDFDSGKLRGHRSIYGGRMPIRNVLYMAALSASRYNPALKTFSNRLAHANKKSKVIIVAVMRKMITTLNAMLRDNAAWQPQSN

SEQ ID NO: 333044 - protein, 353 aa, unidentified
MGIVVALDVHRKQITYKTLDRETGEVKRGRIAPAARADLRAWLARFAGCEAEFALEGTTGWRFVVEEIKRAGHRAHLADPAETAAKRGRKRRAKTDSADCDLQLRLLCAGELSESWIPPAHLLELRTRVRMRKTLIDQRTAWQQRLQAQLFHQGLPAGLRPRTRAGREALVSAELSPAGRELVSLALRMIDAIDRELAPLDRQLCSFARRQPGCRALMARLYGVGPVCATAILAELGDCRRFARSDDAVRHSGLDVTVYQSDEKRAPGHLSHEGPELLRWALFEAALSAARAGSPDHAYYLQVAERIDHNRACLSVARKLCRRAYHILRELGDEALAPVEGDAYAEEAIAAAA

SEQ ID NO: 333045 - protein, 353 aa, unidentified
MDKYIGIDVHAASCTIAVVDARGKQTGSHVVATNGQEIVECLRGIPGQRHVCFEEGTQSGWLFEILEPHAVEVVVAGVAAGSRGPKDDKRDAFGLAEDLRLGAIKTRVFKNGGPYKALRELARTHRMVVRDVVRTKNRIKSMYRSRGVAAAGKSVYTSAGRGPWQEQLPEACRGPVRTLYAELDALEEVRDDAEKALVREARKFSITKLLATCPGLGAIRAAQLVPIVVSPHRFRTKRQFWSYCGLGIVMRSSSDWIRDKNGQWQRAQVQQTRGLNLTHNHHLKAIFKGAATTVIAQHPDEPLNLAYQRWLAAGTKPNLAKVSLARKIATIALVMWKTEEEYDSSKHNQTVSP

SEQ ID NO: 333046 - protein, 347 aa, unidentified
MRFYTQQHPFYCGIDLHARTMYLCILDQAGETLLHRNMPATPEALLKAITPYREQIVLAAECMLTWYWLADLCADHGIPFVLGHALYMKAIHGGKAKNDKIDAQKIAVLLRGGMLPQAYVYPAEMRATRDLLRRRLHLTRKRAELLAHIQNTNSQYNLPEIGKKLAYKANREGVEEHFPDPSVRKTVEVDVSLIDHYDQLLGEVELYITRTAKAHDVQTFSRLQSVPGIGPILALVLLYEIQDIARFPRVQDFVSYCRLVKCAKESGGKRLGTSGKKIGNAHLRWAFAEAAVLFLRQNQLGKEYFTKLEHKHGKAKALTVLAHKLARAVYYMLTRQQAFDLNRFVTA

SEQ ID NO: 333047 - protein, 317 aa, unidentified
MEQMEFSRKTAGVDVGKHHLDVAVHGLEDLARVSNTAAGHDELRDWLKVRGVGRVGLEATGGYERAARLALEAAGFEVVVHQPLEVRRFAQLKRRRAKNDRLDAQLIAAATAQVEAVRAAQDPRLAELAERMTAYEQITDQLVELKTFLEHVTLKDIGSALRTQVRALEALKLRLASQILTAIKAHPDLLARYRLLVSLPGVGPIVAATLLIRMPELGGMRRGQAAALIGVAPFDRDSGQWKGMRFISGGRARPRRMLYLAALVAKRFDPGLRAFGETLRARGKPPKVVTVAVMRKLIEAANLVLQRGQPWVKTQPA

SEQ ID NO: 333048 - protein, 364 aa, unidentified
MHSINNIELSSLEETRGQFNGGRCAIKLGIDVHQDFYTVVMQMGGANPKPPQRFHKEAFLHWAGRLKQKSGAEVYAVYEACGFGFSLQRKLSALSIKCYVVCPQKLDERNKRVKTDGLDAKALCLKLDRFVQGNRDALALVRVPTKEEEQSRAIHRQREQLVKVRKQLEAQGRSLMVNHGLEPVQNWWKERQFARLAVPDWMKQLLQNSQPVLLALQEKIGSLTVLLQSAASPGQPRGLGKMTSVIIDREIGDWHRFSNRRQVASYTGLCPGEYSSGNTRLQSCVTKHGNTRLRAALVELAWRLVRFQRDYKAVRKWRQILAKGALATGAARKKAIVAVARQLAVDLWRIKTGRLRAEELGLIK

SEQ ID NO: 333049 - protein, 464 aa, unidentified
MSKTLGVDVACRAAHQGSLAVDGRLIWTGRRFFTRPADLERLWADLDLADPAELTVVVEPTRNAWIVVAAWFRRRGAKVVMVPTTQSADLRAYYSKHAKNDRLDSALLARLPLLHPEGLREFTGDGPADPLRRLTKQRSSIVKRRTAVLQRLDALLELLGPAWYEVLGSNYGKAALMLLTRYGDPHALIRLGQARLARFLARHSRGWWKDDHATRLIAAARESLELWGSGGIDFAELAADIAIEAEQAQMLTEQIEDLDERIANLYQDADPDGFVASAPGVGPVTSAIIAGRIGDPHRFKSLAAIRAYSGLVPKVSQSGVVETRGGITKAGDPLLREALFAAADAARKTDPQLAAKYARLMATDRHHESAICHIATTLLTRIAASWRAGEHYALRNTDGRIITPEQGRQIVRDNHKVDPKIRDTAAHRRMAQRQKNRTSREQKKSQSAPASRPVPTRIEPADVA

SEQ ID NO: 333050 - protein, 408 aa, unidentified
MTIICVGDDWAEDHHDVYLQDESGRRLAARRFPEGLTGIAGLHELIAEHANDPSQVIIGIETDRGLWVQALIAAGYQVYAVNPLSVSRYRDRHAVSGAKSDAADAKLLADLVRTDRHNHRLVAADSDTAEAVKVLARAHQNLIWNRTRATNRLRNSLREYYPGALAAFEDLASNDALAVLGRAPDPDTGAGLSRAQIRSALRRGGRQRRLDERAAEIQAALAGPQLHASAQVSAAFAAVTTSAVTLIAETNRQIDALQASLAEHFEQHPDAAIYLSLPGLGEVLGARVLGEFGDAPDRYAEVKSRRNYAGTSPLTVASGKKRAVLARHVRNRRLYDACDQWAFCALSSSPGARGFYDQHRAAGDTHHQALRALANRLVGILHGCLRTGTAYNEHTAWAHRTPPATAAA

SEQ ID NO: 333051 - protein, 429 aa, unidentified
MNSCEQTAQDWLAHRGFGGLDWASQKHNVVVVDPRGKVVEDFEIAHSALGWKKFRERMAPYGAIPFAIETSQGSTVEQLLEAGMKVYPINSKSAKSYRERKAPSGVKDDWLDAWSFADACRIDGQGWRALRPEDPLVKELRLLCRDEVELIQQRTSFICQLRHALGEYYPTALEAFEDWGSMSAWMFIQRFPTPQLLQAAGKRQWEKFLHARHLWRTESGPRRLELLAHATELCGTVPMANAKSQLALSLISMLLALEKQLGIYRRRIEELFSRHPDHDLFGSLPGAGPKLAPRLLSEIGDDRGRFEEGPQALQCLAGSAPVTRRTGKCKVRANPDHWPCHQRWACDKHLRHAMHLFSEHSLGQCVWAQIYYQHHRQKGSSHADALRRLAQRWLKIIYRMWMDRKPYDAMLHHQNQVKHGSWVFELKTT

SEQ ID NO: 333052 - protein, 344 aa, unidentified
MEITTIGLDLAKSIFQVHGVDATGQVVFRKSLRRAQVLPFFAKLPSCLVGMEACGTSHHWARELIKLGHEVRLMPPAYVKPYVKRGKTDAADAEAVCEAVRRPTMRFVPVKSPEQQAALSMHRSRNLLVKQRTQLVNMIRGLLAEFGIDIPKGLERALLMARRIVDGEAPDVPIEAAKIVGTLSQQALDIHLRIRQIDRDLLIWQRGNDVARRLMTIPGIGPIGATALAASVTDPHQFRSGRQFAAWLGLTPLQKSSGGKERLGRITKMGDKYLRKLLIVGMTSLVRRAKYNPKTIDPRLANLLARKPVRVATVAMANKTARTVWAIMARGETYRAGHQPAPAA

SEQ ID NO: 333053 - protein, 483 aa, unidentified
MIRSVGIDLSRTGRHQARCLDEQARPCDSFTFDSTMEGLETLEKHVFSDGATPTIVFEPTGLAWIPLATYLRARHPDSRLVKARLQKVAALRKYLRGHAKSDRVDGVTLAKMPFIDAEQLEEAYLPPAEYHALQRLTRQRERLMKSITIHKNRIGAIVEGYLPGLRAAFTNEWSVHARAFYRSRLNPFTVVRDGKQALQDFLAGVYARGSQAQSYRLYRTCQTLSEFYKRAEAAGMVNEDFFNDLQDEIARELRLMDAEETEVESVSKRVEELYRRLHPSDNLRTIPGIGVRTAQVFLAVIGDPHRFRNQSAFANWTGVVPGANQSSDSEGKGLRMTKAGPAMMKRALYQAGDIARRYDPQLAYLYYREMVHHGKTHLQAMGAVMSHLAARILTVLQDDRPYELRDIDGRPVSKTEAIKLIQSRFRVSEEIRQARRHRKPHEGRPQRRGTREAAEAPQSRHTPTSPMPVYSATAGQSMGQMRT

SEQ ID NO: 333054 - protein, 354 aa, unidentified
MRKMQKHILKGKDIFVGLEDSKRKWHLCVRSQGMIVDERTVASVYGTLQGYFRNKYPECRIKVMYEAGFNGFWLGDLLHADGISCIVTPPHKVCEEKCNKVKNEKHDARRLAKNLEQNDYTACWIPDEELREDRQISRTLIQVGKVQIATKNRIRKFFDFHGLNGDFKPGRWGAQEYRRVKEIRLSESLQICMDKLLEQLELTQRHKRELRRSLFRLGKKERYSRTVALMSSSPGIGKYTGIRLALEWGDIKGRFRTGRQLANFLGLTGGEYSTGEYEQRLGITKQGHGFVRRWLIECSWVAIKKDPVLLDKFNRVWGNSGDRRTAIVAVARKLAVRLWSVVVHDTDYCVGVAA

SEQ ID NO: 333055 - protein, 385 aa, unidentified
MQVMIEGQSHLQPFGLPYWGFENLNKGVGSMTACYDYHIGVDYHKSYSHLVVQDSSGKTLRSGRVKNDRQSLGGFLERYRENSHAVVEATRNWMVMYDWLDDICDDVVLAHPLKVKAIADAKIKTDKIDATVLAHLLRADLVPEAWAPSEKSRDLRVALRERMFYVRLRTMTKNRIVTVFDRYPEQTAQLKTLGDLFGKAGRVQLAQVNVSEIDRIQIDRGLAFIADIDVRVKQSEATIRAMTKANTNVKLLKTIPGIGEFFARLIDAEIDDIKRFRNAKKLAAYAGLVPSTYSSGGKTFHGKIIRQGNKWLRWAFVEAVAPALASDPQLRAQYEHLKSRGVNKARVAIARKLLTIAFQILRDQRPYERRGGRSEDCASTISRLS

SEQ ID NO: 333056 - protein, 377 aa, unidentified
MKKKLYLGLDVHKDWITIAIAFEGRNGEVRLEGTISNDLQALEKWLARLRKAHGKETRLYACYEAGPCGFGIARRLKQLGVECEVVAPSMTPTRSGDRIKTDRRDARKLARLLRAGELTAVYIPEATDEAMRDLCRARTDAVDDRRRARHRLKGFLLRHGYRYQGKSSWSPAHERYLRELMLPHPAMKVILEEYLQGIAAAGERIARCEAGMGELLTKWRLEPAVRALMAMKGFQRVAAMILVSELGEVHRFAHPRQVMAYLGLVPSENTSSDKRRQGRITKCGNSHARWLLVECAQHYATPPKVSAHLSRRQQGQAKEIRAISWRAQNRLHQRYTRLLGRRLQRNKAMVAIARELCGFIWELLRTQPCYHHPVTSI

SEQ ID NO: 333057 - protein, 417 aa, unidentified
MIEGEHRVKAFCGIDRAEDHHDVAVVDQAGLLLAKRRIDDSAEGFEELLKLLADVGEDPGDPIPVAIETPRGLLVAALRSTGRKVFAINPMAVARYRERHSVARKKSDHIDAMTLAGILRTDAHAHRPLPDDSDLAKAIAVLARAHQDAIWRRTRASNMLRSLLREYFPAFLAAFAGDRSTNLAGRDARAVLALALTPTAAARLSRTRIAAALRRAGRQRGIDELARRVQQALRRPHLHQPPLVEDAMGVQARALLAVLDAECDNVDRLGQAVAETFAQHPDYEIITSFPGLGDELGARLLAEIGDDRGWFADARALKAYAGSAPVTRASGRSVSITRRSIKNNRLAATGFRWAFCAAAKTGPPRSHYQQRRDHGDRHAAALRNLFNRMLGQLHHCLQTRQHYDPAKAFTPPVTAAA

SEQ ID NO: 333058 - protein, 331 aa, unidentified
MSRSAGIDVAARTAVLTILHEDRVETTKIIEQTAKGHQQAVALLSKCKPDRVVLEATGIYYLDLALALAEAGLPVSVINPKSSHHFAKGMLEHNKTDQVDARLLAQYGERMRPRLWTPPTATQLSLRTLGRHANRLVAARTRAKNQLHAYTASKEQVDLIVEDLKDEITAFDRRIERIRKAAIEQIESDQRLQHVAKAILAAPGIAEVSLISILAELTTLPDTLKSSQVSRHAGLDVRLTQSGTSVNKPGRLGKAGNTYLRSALFMPAMSAVRFDPYAKGFYDVLLGRGKKKMQAIAAVMRKYLTGIWACMRSGEPFDTAKLFSEKHLLKA

SEQ ID NO: 333059 - protein, 344 aa, unidentified
MDHFAGLDVSVKDTSVCIVDDTGKIIREVKVASEPHALLAVLTNPAYHFKRIGLEAGPLSQWLFSALAEAGLPAICVETRHMRAVLKAQINKTDRNDARGIAQMMRVGLYRPVHVKTLRSQKLRMLLTHRKLLQSKAIAVDNDLRASLRNFGLKVGVVGAVKFEGRIKELVEDLPDLAVLIEPLLVVRRVLRGQIDVLHRRLLAVVRDDDVCRRLMTVPGVGPVVALTYRATVDVPARFRKSKSVGAVFGLTPSRDQSGERDRPGTISRCGDEMMRTTLYEAAQIMLMHSAKWSWLKAWAMKIARHRGRKKAIVALARRLAVIMHRIWVDGSEFRWTREVIAAA

SEQ ID NO: 333060 - protein, 348 aa, unidentified
MAVTIVETRPVTGGVDTHADVHVAAALDPIGGLLGVKEFAATPAGYAGLLGWLVGFGTVCLVGIEGTGSYGAGLARHITAAGIRVVEVDRSDRQDRRRQGKSDPLDAVSAARAAQSGRARGAPRGRDGSVEAIRALMVAKRSARAERTQTINQARSLIVTGPDDLRARFARHTVAALVTETASLRPRPGSTVGYATRIALRELGRRAEFLDGQLERLDELIVPLVTARAPGLLALYGVGTDTAALLLIAAGDHPERLRSEAAWAHLCAVAPIPASSGKTVRHRLNPGGDRQANHALWRIVITRMSSHPPTRAYVERRTAEGLSKTEIIRCLKRYVAREIYARLRAAAG

SEQ ID NO: 333061 - protein, 349 aa, unidentified
MIVVGIDPHKRTHTAVALDRATGAKLAELTVKARTPGFERLVEWARGLDQQRRFAIEDGRHVSGHLERHLIARGERCVRVPPRMMGEARRADRVRGKSDPIDAAAVARAALAHPDLPEATLAGPEREIGLLVAHRESLVRERTDKISKLRWLLHDIDPDLAPPLRTLDRFKALDRLAGMLGAMQPSVQTEVCLELVGRCREITVRANELERRIGSLVKTHAQALLQIPGCGALTAAKIVAETAQVSRFPTEGHFARYSGTAPVPASSGASHRHRFNRRGNRQLNAALHRIAVTQMRIHQPATDYLAKKRSEGMSKTEAIRSLKRLLSRVVFKTMTSMTKPTDRLTAAAS

SEQ ID NO: 333062 - protein, 356 aa, unidentified
MQNNFQSPESVILGVDTHLDIHVGAVISQAGKLLGTRIIQTNQIGYQELFDWAKSFGVLERAGIEGTGTYGAALTRFLIKNGIYVVEVNRPDRSKRRLEGKSDPLDAENAARTVLSGSSKAIPKMQSGVCEALRIISVARRSAVKARTQAINQLRSLLVSAPQDVRDKLWKSKPHECVAACINCEVSEYSPLRIALYSTLRSLAKRWGALTEELNELDESLDKLTRKYASNLRSQFGVGPQTAATLLAVAGDNPERLKNEAALASLCGVNPLPASSGKTVRHRLNRGGSREANNALWAIALVRMRSDPRTRIYVDRRTGEGLSTKEILRCLKRYIVRELYPLILSDLTYANRPLLT

SEQ ID NO: 333063 - protein, 461 aa, unidentified
MVAEGATGTVECCLRARASDFLIFPALPGTDAGSSTCESTGRWWSWILFTPGAPGIDVSKRDAKVCVRVAGAGRAGATSTVTTWGSVTSQVLALREHLVGEQVTSVVMEATGDYWKPFYYLLEDGPFEVLLVNARHVKNLPGRKTDVSDAAWLAQLGAHGLVRGSFVPPEPIRQLRDLTRTRTTITRERAREIQRVEKLLEDAGIKLSSVATDISGVSGRAMLEALIAGQRDPAELAELAKRRLRRKIPELTEALTGRFGEHHAFLARLHLDLIDQHTRAIDDLTARIEVMIEPFRAVRDLIVTLPGISTGVADVTIAETGADMTRLPTAGHLASWAGTCPGSNESAGRVKSTKTRPGNPYLKGALGVAAMSAARGHDTYLSAKYRRIASRRGPIKALVAVEHAMLLEIWHMLTNGVAYADPGGDFYTRRNPDKTKNRAIDQLHKMGYAVTLSPLQTAVAQ

SEQ ID NO: 333064 - protein, 370 aa, unidentified
MQKVRSFVGMDVHKETISISVAEDGRNGPVRFLGVIPNAADDVAKMAKRLSKHGELDFCYEASGCGYGIHRQLTALGHKCSVVAPSMIPRKPGERIKTDRRDSEKLAILHRSGDLTPVWVPDTTHEALRDLVRARVDASMHLMRARQQLLAFLLRHGRSYPTGKHWTQRHRSWLAGQTFQEHAHGIVFQDYLETVWTAQQRRDALIERISAMVGSWSLGPLVEALRGLRGIDMISAATFIASTGDLSRFESPRLLMGYLGLVPSEHSSGGTIRRGGITKTGNREARRMLIEAAWSYQYPARIAKEKAEILVRLPKTIRDIAWKAQTRLCTRYRSMVARGKKPTVVVAAIARELAGFIWAIGQEMRAQMAT

SEQ ID NO: 333065 - protein, 341 aa, unidentified
MEHIAIDLGGRESQICVMSAEGEVVLEERRPTRGLGAFLAKRPAGRVVLETCAEAFGVADAAQKAGHEVAVVPATLVRSLGVGMRGIKTDVRDARNLAEASCRMKRLPSVHVPGTDSRQRKAVCGLREVLVGTRTKLINSVRGWCRTTGMGSFRSTPEVFPARVRRHVAERGGAIPAAVERVLAMIEAENLQIKSADEEVEEMAQKDPVCVKLMTVPGVGPVTAVRYAAALDDHSRFDNAHAVQSYLGLVPGENSSSDRHRITSITKAGAPQVRWTLVQAAWSARRWRKTDPMVLWALEVEHRRGRHIAIVALARKIAGIMYAIWRDGSVYDAKRGAAVSS

SEQ ID NO: 333066 - protein, 337 aa, unidentified
MDHIAIDLGSRTSQICVRDAQGQIVEERACTTRHLGAYLHRRPVGQVASSEAFGVARMAQAAGHQISVVPSVLSRALGVGYRGTKTDVRDARALSEASTRVALPSIHIPSEQSVHWRAMSTSRQALVRTRTLLINRVRGYLRTQLRTPVRGTSKTLPKAVRRTMESSEDGLPSHIEAVLVSIETLSVQIADIEAEMATILDGEPVAQLLLSMPGVGPITALRFIVAVDDISRFPSAQALISYLGLHAGERSSGQTRRRTGIIKAGSSVVRHALGQAAWSLWRTRPQDPMVLWARRIAERRNRQIALTVLSRKIAGVLCAMSRDGRPYQPQPTAQPTP

SEQ ID NO: 333067 - protein, 320 aa, unidentified
MMAQIDNVVAGIDVAKDKVDACLRSIAERPVLPSTTEGRRRLIAWLRQHNVAKAVMEASGGYEKEWAKALRKAGIEVWVVDPKRVRNFALSAGRMAKNDKIDADTIAWFAETFKEGPSQIHDADQEELQGLVKARLGLVEMRARLCQSGHGATGLAQKANARILKQLDGEIAKFEAAICAKVKSTPELAERAEIIASVPGLGEVSAANLVAGMPELGRVSGKVAAALIGVAPYDDDSGKRRGDRHVKAGRRWVRNAIYMPCVGAATLNNSILKAYYQRLIARGKEPKVAIVACMRKLIVILNTMLTRRQKWDPRRAIVVS

SEQ ID NO: 333068 - protein, 342 aa, unidentified
MQITTIGLDIAKNVFQVHGIDAKEKVVVRKQLRRNKVMGFFKALSPCLIGMEACATAHYWARELTKLGHEVRLMPPKDVKAYLKRNKNDAADAAAICEAVRRPTMRFVRVKSEEQQGQLMQHRTRDLLMRQRTQLINALRGHLAEFGIVAAKGDAGLKELLAIVADDRDERLPSDARASVIVLAAQLEAAQTMLRSLDKRIMKQHRANEASRRLESIPGIGIIGASAIAATVSDPMVFRSGRDFAAWIGLVPRQDSTGGKQKLGPISKQGDRYLRRIIIIGAHAVLRRAKENPHKYPWLTQLLARRPFKVVAVALANKMARTAWALLAHGDTYRAPELVAAA

SEQ ID NO: 333069 - protein, 419 aa, unidentified
MSFKIFKFNCCGLDVHKTWIYACIGITDSNNRTEYKQARFSSFTKGLNELCDWLAKYNCKDVCMESTGKYWIPVLNILEQRSLWVTLSHPKYTKPMKGNKTDRKDAKWICDLYMCGMVKPSFIPPADIRELRDLVRYRFKLTCMITGEKNRAQNCLTVSNLKLDDVFSDVFGKSSRSITEQILQHPGETFDVAPFVDGRCKTPIVEIQAAIDGAISKEQAVKLRQCLDHIDELNKHISEVEQEILRLSDKYEAALNLIRTVPGFDKNPLTAIQVLSEIGGDMSVFPTAKHLVSWAGCCPRNDQSNQKIKSTRISRAGSYFKPVLVQVANALIKSKKHSEFTNRYKRIKARRGHKKAIIAICRMILTTIWHILSDLKPYTSEGFLESRPVKGEKVLSTSQAFNLLKQRGYIIKDEPLSVS

SEQ ID NO: 333070 - protein, 423 aa, unidentified
MDILYERVAGLDVHKDTVVACVRMVADGKTTRECRTFATTTEQLVALRAWLEECRCTHVAMEATGVYWMPVFRLLDAGKFKLIVANAAHIKNVPGRKTDMSDAMWIADLLACGLIEASFVPNEEVQELRALTRTRKQLVREQTRHVQRIEKTLAEANVKLSSVISDIVGASGRRMIQAMIDGVRQPNKLAELAGKQIKATPKELYDALHGRLTDHHRFLLALHLKQWDSIDEMIRKLDVEIDQRIGRMTAEAEGNETPFRALIGLLTTIPGVSAVAAPAILSEIGPDMSRFRTAGHLVAWAGLCPGQNESAGKRKSSRLRKGAPWLKTMLVQCAWAAKRTKDSYYRAQFFRLQAKRGPQKAICAVAASILTAIYHILKHGTEHHDLGSDYFDRRPVELKASRLVARLKKLGFTVQLQPIAEAA

SEQ ID NO: 333071 - protein, 314 aa, unidentified
MFKKRVPNDLGLILETFEPFRKDLQGIVVESTYNWYWLVDGLMDAGYRCVHLANPSAIQQYEGLKYSDDKHDAFWLAQLLGLGILPEGYIYPKEDRPVRDLLRKRSFMVRQRTEHIHSLQSMIERHTARRLNGNEVKKLYSEDLEGMFEHEYSTLAADADSCAIRFLTERINQNEKAVLEKVKLKEPFKRLLTVPGIGEILALTIMLEVGDIGRFPKVGHFTSYARCAPSGRISNGKKKGEGNRKNGNHYLGWAFVEACNFARRFYPKFRSYHQRKASKSHPFVATKAICNKLARICYYVMRDGVCFREEAIFY

SEQ ID NO: 333072 - protein, 343 aa, unidentified
MQIARIGLDLAKYVFEIHGVDAHGKTVLRKTLRRHAVSTFFANLPPCLVGMEASNGAHFWAKTLLDLGHDVRLISPQFVTPYVKSNKNDRNDAEAICEAVGRPNMRFVPVKSAEQLAVQAVHRIRTRLVADRVRLVNQVRGLLGEHGIVVAKDIGNLRRALAGLGDNEDRALNPMVRALMGELREELTELDARIVGYDRKIRELYRNSEICQRLGKVEGIGPVTATALVAAVGDRSSFKNGRQFAAWLGLVPKQRSSGGRARLFGISKRGDRYLRTLLIHGARAALGRVRDKQDPRSLWLGKMRQRRHPNVVAVALANKNARIAWSLLTSDNVYDASLSVGAA

SEQ ID NO: 333073 - protein, 354 aa, unidentified
MSQTLNTAIAVVGIDIGKNSFHVVGHDERGAIVLRQKWSRGQVEARFANMPPCLVGMEACVGAHHLSRKLKALGHDARLMPAKYVRPYSKGQKNDFRDAEAIAEAVQRPTMKFVATKTADQLDLQALHRVRARLVSQRTGIINQIRAFLLERGVAVRQGLRFLRAELPRVLATPPDVLSPRMVRVIEDLAGDWRRLDERIEVLSSEIEAVARQDAGCERLMTVPGIGPIISSAMVAAIGTGDGFSKGRDFAAWLGLVPKQMSTGDRTILGKISKRGNRYLRVLFVQAAWVVLIKPKTWERHGLKPWIEAAKKRLHRNVLAIALANKLARIAWSVLARGRNFEARAITHATTQAA

SEQ ID NO: 333074 - protein, 345 aa, unidentified
MPIVGGMDIHRKQITFDYVDLATGEVVCGQVAPADRRHLRAWLERFEGIPDVAFAFEACTGWRYVAAELARAGVQAHLAEPADTAAARGRKKRAKTDRADSRLMRDLLLQGRLPECWIPPEYVLECRALLETYHALRREHTAWVQRAHAVLFHQGATRLREGGTGTAGGRELLREIAAGQLSPAGQQQIGLYLRMLEVTEAELDALRGQLTGAARRLAGAKALREQLYGVGPVTALALTCWLGGAGRFSSARKAVRFAGLDITVYSSAGKRSPGHLSRQGPPVLRWCAYEAGKVHAHGQAPDHGYYAQVKDRIDGKRAALSEARKIIRQACHLLAELGDDALATG

SEQ ID NO: 333075 - protein, 340 aa, unidentified
MSITTIGLDIAKNVFQVHGEDSTGKIVVQKKLGRAKMLTFFSKLPPCVVALEACGTSHYWGRTLRGLGHQVKLIPAAYVKPFVKRNKTDARDAAAICVAAGRPDMRAVAIKSEEQQASRGLERARELLVKQRTQLTNHVRAMMAEFGIVAAQGWRGFAELAARLASADPGIPATLAEALRALLAQAAGLTPTIEAMETKIASIARSDATMRRLTTIPGIGYLTAHAVVAAIGDGRQFGSARDFAAWAGLTPREASSAGKRKTKGVSRQGEARLRKLFALGAATLMRNTRSRPERGTAWQRGILARRPMKVAVLAQAAKSARIAWAVLTSDAEYIRPAAAA

SEQ ID NO: 333076 - protein, 467 aa, unidentified
MWLDVVFSHVGGIDVHKKRVTVTVRVPDPRKPGQRWERTRTFRTFYADLLAMGGWLAEHGVTRAAMEATGAYWWPVYEALRQAGGAGLTVDVVNAAHVKAVPGRKTDVKDSQWLARLLEAGLLRGGFLPPDDIREIRDLTRYRTKLTEERSREKQRLLKVLEAAGIKLDVVASDTFGVSGRAMLDALAGGERDPQVLAGLARGVLRNKAADLRLALEGRFTDHHGRMVGMHLARIDHLDQMLGEVGQQIGHGGRPATARREAAEPAGLVAPFADQVRLLATIPGIGEHAATVIISEIGVDMSRFPSAKHLAAWAGLAPGNNESAGRRRRARHRKGNTHVQSILVEAAHAAAKTRTRIGARYHRLHRRFGGRANTTAAKKAAFAVAHTLIKVIWTVLSKGQPYTDLGHDYYTHGVDPDRRLRRLIAHLEAVSGKKITLTDHDEPDRDDPGDGPQQPGPGNTSRNETAA

SEQ ID NO: 333077 - protein, 423 aa, unidentified
MSHDTKDVPFQQQFKLFAGFDWASDHHDVVAVDPDGQIVLELTIDDTAEGWATLRDKFAKHVGQDLSAVAVAVETNNGPAVERLLAMGCAVYPLNPKVAERYRERKSNAGCKDDRLDAFSFADALRTDGHTWRRLKPDDPVTQELRLLCRDEIQLIGQRTALVNQLRAALREYYPAALEAFEDWTSDGPWAFVQAFPTPQALVAAGKRRWDKFLHANRLYRRETYERRLEIFARADQFCGTPPVTRAKSRLALALAAQLRVLEKQLVEYRQNIETLFSQHPDHDLFGSLPGAGPKIAPRLLGELGNDPSRFDTHESLQCYGGSAPVTKQSGKNRWVSFRRACNTTLRATLHHWADKSRDKCAWAQAYYQHKRDHGQSHAAALRCLANRWVKILWKMWQTHTLYDEALHTRNQVKHGSWVIQLT

SEQ ID NO: 333078 - protein, 413 aa, unidentified
MKRIRDRVAGLDVHRDTVMAASWVLDRETGEIVEDQEQFSTVTSGIVRLGRWLLDHGVSTVGMEATGDYWKPVYYGLEGMFDELWVCNAAHVKNVPGRKTDAGDAAWLADVVAHGMVRASFVPPEPIRELRDLSRYRKTQVDIRAQEIQRLEKVLQDACVKITSVASTVWSKSSRRMIEALIAGQRDPVVLAELALGRMRPKIRELTEALACNWRAHHSLVAGEIIAHIDHLDASIDALSKEIGQRCDPFGDLIERMCEVPGISRNVAETVIAETGADMSRFPTPQQLCAWAGVAPANRESAGKRRPAGTRKGQRHLRRALIEAAKSLARSDNSFLAARYKRLARRRGPNKAAVAVAHSILIILWHLMANPTERYHDLGVDFYERRRDPEREARRLVAKLAELGYTATLQPAA

SEQ ID NO: 333079 - protein, 427 aa, unidentified
MSVTQNEKIRQVTDTTMVIGVDIASEFHWARAFDRRGLELGKTVKFENSAEGFNFFLRWVSELTVEQKKDSVMVGLEPTGHYWFTLAAHLQGGDFKLVLVNPYHVKRSKELDDGHPSKSDKKDPKTIAKLVLEGRYVYPYIPQGLYAELRVAMNCRWRIRKELASLQNQIQRWLKIYFPEHSKVFGRFTGAGSMALLHSAPFPSDLISLGVEGISGIWKQMKLRGIGRKRAQRIYEAAQTSVGCTTGMEAARMELQILLEDYDAKLQQYERVMQVVENLCSQIPAVAELLKIQGLGRVTVAGLFAEIGDIRRFESPRQIQKLAGLAITENSSGKHKGPTEISRRGRSRLRAILFRAAIPLLAKNREFQLLHRYYTTRQNNPLQKIQSVIAICCKLLRVFYALATKDCAYSPEKMLADIQRNQPLKAA

SEQ ID NO: 333080 - protein, 402 aa, unidentified
MIVTLDIGKGSHYGYFRAPDGQEVEPFVFYQSYDSFHSFWKKLSRFKKAHGCRQVIVGFESTGPYAEPITHFLKQRPVTLVQINPMHSKRIRELTGNSPNKTDRKDPRVIADVIMLGHALRVVIPQGSSAHLRRLTQARERAIKDRTAMLNQVQHLVFVIFPEFLQVIKNISCKTGLYLLRHYPTRQAIAALGEEKLTTIIKQVSRGRMGQGHARELFHSAQRSVGINEGQDSIVEEIGHLIDKIVRENDFIDRLQCQMRAHLEQIPYSSCLLSLPGVGLITVAGLIGEVGDFRQYRTVAEITKLAGLDLFEVSSGKHQGRRRISKRGRPLMRKLLYFAAINAVKSTGIMHQPYTQMVERGMPKIKALVAISRKLLRVMYALARDQSMYMEKCDHNRYQFAA

SEQ ID NO: 333081 - protein, 318 aa, unidentified
MNTAPAPIPAPFVGIDVSKDHLDIATSDGRRWRIVYEPARLDELVEVLRGARLVVLEATGRYEAPCAAALGLAGIPVAVVNPRQVRDFARATGQLAKTDRIDAALLAAFAAKVQPEARPLPDAETQVLAALTARRRQLVGMLVAEKNRTRLAAPAVQKSLSKHVRWLERELGQLDRDLDEAVRQSAVWRAREDLLRGVPGVGRVLARTLLAELPELGRLSRQQIAALVGVAPFNRDSGLLRGRRSVWGGRAAVRSVRYMGALAAVRSNPAIRAFYARLLAGGKPRKVALVACMRKLLITCNAILRDGVGWSPSYAAGA

SEQ ID NO: 333082 - protein, 313 aa, unidentified
MKKTICGVDVSKAKLDVCIEPGHRFASFDNDTAGIAKLAAFCREHAVELVVMEASGGYERRPFIELWEKGISCALTNPRSVRRYAEAMGILEKTDRIDSSVIARFADAKNLAPTPLPSRAQQRLRRCWARLRQITDDLIVQKQRRASLLDNIEMRESIDEVIALLKRQSRKLEGEIASMIDDDPLWAKLAETWREVKGVAGRTVARLHAELPEIGILSNKAIAKLTGLAPIANDSGKRKGKRPTRGGREGVRSILFLVAATVARYDKSLADFRDRLIAAGKEKMVIRIALARKLLVRLNAKARDARTAYANAT

SEQ ID NO: 333083 - protein, 430 aa, unidentified
MGLVVPTTMHPEREDQPLPYDWFVGIDWGSEKHQVCVLDGDRRRVGERVVEHDGASLTQLAAWLWALTRGQPQRVAVAIEVPRGAIVEGLIERGFHVFAMNPKQLARFRDRHTMSGAKDDRRDAFVLADSVRTDQPSFRRLQLEDPQFILLRDLSRAVETLLEDFRRSANRLGDQLHRFYPQMLQLCSAADESWLWDLIDVAPTPAHAALLSAEQVQRVLTVHRLRRVTAQEVLACLQTPALPVAPGAAQAAQAHCAFLLPCLRVLAEQLQACSQQVSALLSTLAGAPGEGEGPSDVAIVLSLPGVGRKITAWLFAEASQPLAERDYQVLRTHGGVAPVTRQSGKRRVVVMRRGCDPRLRHALYHMARVAMQRDAHFKSVYAALRAKGQRHGQALRNLADRLLRILMAMLRHRTCYDASQIHREPVVQMG

SEQ ID NO: 333084 - protein, 429 aa, unidentified
MRLCDYLFVGIDLHKLTHTAMVLDSCGKELGTITFDNVPTDFSKLERKVKKCIQKMKLSQGVEVEAFYCLENAYGYGRALAVWLIDKGYIVKDVNPALSNRQAKHRAMYRKSDEDDARAIAMAGIHEFNKLPDACPLDEYWSIQQLVHRRDTIMNQRVRLVNQLHEQLHRAYPYYKEFFQDISRPTALHFFETYPSRKYLIGVSVDDIREELLPVSHNKCSSKVCQNIYEIVSADTSKVCEYQDSRDIVTRGIISDIQHSDKMLAEIDSELERLYKELGLTLATMPGMKIIMSMKLIAEIGDIRRFKSSEKLARYAGIAPMPYGSAGKNKDYATKQGNRRLQATIYYLAVQQIQISPSGKPRNPYFRNYYAQKLLEGKNPKQALICISRKLVKVIYAMLKNKTAYVMPEALESKEDKVSDSCDVTKEAS

SEQ ID NO: 333085 - protein, 460 aa, unidentified
MSRERSKKQQRAGQGGAVPRLHCIEPNPAGIDVGAPEIFVAVPPDRDASPVRSFETFTQDLHRLKEWLQQCRITTVALESTGVYWIPLFQILEEAGLQVCLVNAQHVKHVPGRQSDVIDCQGLQYLHSVGLRRASFRPEDRVCIIRSLLRHRDRLVQMAAAHVQHMQKALTQMNLQIHHVLSDITGRSGLAILDAIVAGEHNPAVLAQLRQPQVQASAEVVMKSLVGDYRREHLFTLRQSLEAYRYYQDLIPRCDQEIEEQLQNFDRQLPPDAPDLPPEAYPHSRRKNEFHFDMGSELYRIFGVDLTAIPSINALTGYTLLAEVGTDWSKFPNVHAFASWACFCPPNKKSGGKVLSAKTRRTANRVNRALRLAAQTLERSTSYLGIFYRKMCARLGRPAGITATAHQLARIIYHMVTTGRPYDESIFAAQEQRQRKHLESSARRKAAKLGYPLIPLPQTA

SEQ ID NO: 333086 - protein, 332 aa, unidentified
MEMLAVDLAKQSFHVHGVTGDGEVISRRVGRAKLLALVERLGPRTIAMEACATAHHWGRAFIAKGFGVRLVNPRFVKPFVREDRLDAADAEAIFDAASRPTMRFVPVKTTDQQDLQSLHRVRDRLVAQRTSLINHARGLLAEYGLVYPKGAARFGARARAGLAEAGLSTMARDTFEALLDELDGLEARLAKLDQRLVAICRENEACRRLMSLPGVGPVVATALVAAVGDARQFRSGRELAAWIGLVPRQHSTGGKATLGGVGRRANHYLRRQLVHGARAVALRLATKTDGRSRWFQSVIDRRGFNKGIVAMANKTARAAWAMLTRKETFAPA

SEQ ID NO: 333087 - protein, 342 aa, unidentified
MDEYDGRQFVGIDLHRRRSVIVRQSESGEQLSAVRIVNDPVALELQLEQAGVDPEVVLEATYGWYWAVDVLQAGGARVHLAHPLGVKGFRYRRVKNDVRDAADLADLLRMGRLPEAWIAPPQTRELRELVRYRAKLVAIRSGLKAQIHAVLAKAGVLIAVSDLFGVTGRQRLAKVPLRPAYAERIRSLLELIDILDSHEARFAAMIAERLATHRGYQAIQQVPGIGATLAAVFVAEIGDVHRFTDPAHLCSWAGLTPRHRESDTVVHRGHITKQGSKAVRWAAIEAVQRHPTTAKIAADKQRIEARRGKNIAKVAAAPKLLTLVYYGLRDGQIRALDRARAA

SEQ ID NO: 333088 - protein, 340 aa, unidentified
MRPPNKPLQGRVVTHAHRTVATPTRGLLELSDWLRATGVTHVALEATGVYWKPVWHVLEGAFTLVLANAMHIRNIPGRKSDKNDATWIADLLAVGLIRGSFVPPAAIQELRDLTRTRKQLVREIGRHTQRLQKTLEDANVKLTEVVSDLLGTSGHAILRAVLAGETNPEALADLTTGRRKATRDALVDALHGRVTDHHRFMLQLHLTHIEALRTAVATLEARIQEALAPFRAAVSLVMTMPGASATAAAVLVAEIGESMAVFPTAGHLLSWAGLCPRLDESAGKRRSTRTRTGAPWLKTLLAQIAWGPPGRRTAISRRSFVDSRPAAVRRRPLSRWPRLC

SEQ ID NO: 333089 - protein, 356 aa, unidentified
MSKIKDNGISFKGQHFYIGLDVHKKRWSVTIRNSGLTLRTFSMDPSPEALKAHLENHYPGGSFKLVYEVGFTGFWICRRFSELGLDCMVVNPADIPTGHKERDRKSDPVDSAKLARELENGNLQRLYVPLEKDQHLRSLCRLYRKAVQSNTRIKNRIKGHLYFNGVHVPHQSSYWSGNLINYLNELDMDNGPAKAYLRLCLEELDQHRQRLVRILKELRYWIKQRGDERMIQNLRSVPGIGFKTAMILYTEVMDINRFRKLDHLKSYAGLVPSTWSSGETDRTRGLTHRRNRQLRYVLIEAAWISIRKDPVLLHRYNQLTLRMTKQEAIIRIASKLLNRVRYVWKNDTPYVVGVVE

SEQ ID NO: 333090 - protein, 346 aa, unidentified
MSHYVGLDVSLKETSVCVIDGSGHAVWRGTCRSEPDAMAATIRKRAPEAERVVLESGILSTWHWHGLKELGIPIVCVDARQAKAALSGRPNKSDELDAEGLAQLARTGWYAEVRVKSLDSHKIRSALVARAKLVGLKQTLSNTIRALLKTFGLFTKRSNGKGFAETVRSHISDEPLLGKGIEALLSSWERISTEIKILNNLLTGVARRDPLCRQILMTAPGVGAMTALAFKTVIDDPGRFQRGEEVSAYLGLAPKRHQSGEVDRMGRISKCGDALLRSYLFEAATVAMSRIRRENSPAAWAKMLCKRVGAAKARVALARKLAVILFSMWRTNKPFRWSTPHPVPTA

SEQ ID NO: 333091 - protein, 353 aa, unidentified
MEYIAFDAHKHYTLASVARPDGQLVREQRLPHERGALQQFLARCEPGSPVAVETIGNWYWIVDEIEAAGCVPKLVHARKAKLMMGEINKTDKLDVRGLNQLQRNGTLPTVWIPPGELRDQRDLPRTRMVLVRQRTQLKNRIHATLAKYALHNLDVSDLFGVRGRALLRQRLDLLPPYTAYATQQLLEQVENLDRQVRGFEHQMQTVFKPTPTIQLLLTLPGIGLLLAVVIALEVGSIARFATAEKLAAYAGTTPRVHASGGKTRLGPSRPDVNRYLKWAFVEAANAICLNRGRAPRRHVSRLYERVARRKGHQKAIGAVARHLAEATYWILTKQETYREPKAAAVSSTGDKRG

SEQ ID NO: 333092 - protein, 314 aa, unidentified
MINSDTISVGIDVAKAHLDAHCYQTSKTLSVPNTEAGIAKLIRWISKQSASALVVIEPSGGYELPLQRHVLATPNIQLAKVNARQIRDFARAKGRLAKTDAIDAQIIAEYGEIMQPRTMLIPSQQQQELADLNIRRRQLAKALSDETNRQDKITHTASVASIERTVAFLKAEINALDKAIKTLIDSHAELAEAKTIATNMRGIGPIVAATLLAELPELGRIGNKEISSLVGVAPHNVDSGTMRGQRSIQGGRASVRKALYLAALTATRYDGPIREFYGHLISKGKKPKVAIIACMRKMLITLNAQMRDHYALAA

SEQ ID NO: 333093 - protein, 347 aa, unidentified
MLIIGCDLHTRTQQIAMLDTETGEVVEKRLEHENGEAKRFYAGLQEPALVGMESTGYARWFQELLAELGHELVVGDAAKIRAMEPRQQKHDRRDAEHLLHLLVRGDFPRLWLPSAEERDVRVLVEYRHQLVELCTRAKNGLQAMALSYGLRRRSRLWSEAGQQELQKLPLREGMARRREDLRRLLAQLNQWIKELDPRIAQEVARRADAQRLMTHPGVGPLTALGTVLVLGPVERFPDAKHVTSYVGLIPREHSSGGRQRFGHLTKQGNRLLRFLLVEAAQTASRFDPGLRRGYRRLAFRKGAASAKVAVARKLLIRLYIMLREGIDYAEFCRRGSHAGMLVSEPLV

SEQ ID NO: 333094 - protein, 358 aa, unidentified
MKKPAQHLIAEVPRRQAKVEITIGIDLGDVWSHFCTLNHDGEVVDRGRFRTTPKAIEKWFTDVPQARVAMEAGTHSIWISAQLQELGHEVIVANVRELRAISHSDRKSDQVDAEKLARYARLDPNILRPIAHRTVQQQEALTLIRARALLVRLRTAAVNAVRGLTKACGHRMPASATTCFAQRSLAVMPPGLAQALGPVLQQIAEMTLKIKHYDRQIQQLGQTEYPETQALLKVHGVGHLTALTFVLTLGSKERFGRSRDVGCYLGLRPRRSQSGDHDPQLGITHAGNAYLRSLLIECSNHILRPHGRDSTLRQWGLHLAARGGKQAKSKAVVAVARKLAVLLHRLWTTQEPYMPFTP

SEQ ID NO: 333095 - protein, 371 aa, unidentified
MQKISTMRATGSGIFKVRQLTIGLDLGDRWSFYCVLDEAGEVILEQKLPTTPEAMKRAFERMLRSRIALETGTHSPWVSRLLTELGHEVIVAHARNVRLIGNSSRKDDRIDAQTLARLARIDPRLLGPVRHRSAKAQIHLTVIRARAGLVSARTALVNTARGLAKSYGERLRKCGTQQCGTQQVGRELAAGLSAELRTVLEPLLEEVEALNQRIKEYDKRIEQIAKESYPEIALLQQVKGVGTQIALTYVLTIEEPHRFRKSRDVGCFLGLRPGRRNSGQSQPQMHISKEGDRYLRTLLVQGAHYILGPFGEDSDLRRWGLKLAERGGKNAKKRAIVAVARKLAVLLHRLWVSGEVYEPLRNSQRVVQAVA

SEQ ID NO: 333096 - protein, 401 aa, unidentified
MKSLPGGIDIGSEQHHVIILNEEDKILYDRKVAHRFSEFHQAIKEFREIEAREKGVITFAIEGKNGYGSPLDRVLIENGFTLYNVDNLKLKRFREVFGAEWRNDRRDARMLAKMLKLRNYVDAEKEKAFVEVGKVLLVKEKLKLLSRHQQILIREKVRIQNRLRKRLLEICPDILRFGNTDNKKLLRLLIKYPNFTSYQKLTWEELLKIKAIGKKRAALILAGLGNLHYTEELAGTYETIISSYARRTLELKEEIEMLDRKLKELGEGSLEVKRLRSITGVGTKLSSRLMGEIVDINRFKNERQLAVYCGVACIDDDSGKRKETKVVYKANKICKATMIEIAGCTIRYVSESKSYYAKKRAEGKKHNHALRCLARQLIKVIFMMLKEDRDYILKDEVKKAA

SEQ ID NO: 333097 - protein, 416 aa, unidentified
MKSASNTLPDQAPNDVTAGIDWARDDHAISIVNGSGHEIARTKIEHTATGLRELVEFLGRHGALEVAIERPDGPVIDTLLAAGLTVVVISPNQVKNLRSRYGSAGNKDDRFDAFVLADTLRTDRPRLRRLQPDTPATIALRRACRARKDLVSHRVAVANQLRAHLRNVFPGGVGLFAELDSAISLAFLTRFTTQDAADWLTPKRLGHWLSTQGYSGRTDPAVLHGRLLAAPRGITGDDAATQAAITRALLAVLLTLVEQIKTLEKQISAQLAAHADAHIFTSVPRSGQVRAARLLAEIGDCRAKFPTPESLACLAGAAPSTRQSGKLRAVTFRWACDKQLRDAVTDFAGDTRHDNPWAADLYQRARGRGHDHPHAVRILARAWLFVIWHCWQDNVPYDPAKHKALQRFLATKTDAA

SEQ ID NO: 333098 - protein, 421 aa, unidentified
MRGLRAKRVRTVKEGTLIATVDIGIASNTGYCTTLDGRSTKSFRFDNTKEGFEKFWGMTIASKNRFGCDEVVVGYESTGPYAEPLVHYLANKQVNIVQVNPMHTKKMKEVNDNSPLKTDDKDPRVIADIIRLGRSLSIVVPEGDAASLRRLNNARERHVGEQTALLNQLQQLVFLIFPEFKTVLKNMKSKTAQYILKSYSTPERIGSLSKEVLGEEMRKRSMGKFGIKEAESLIGLARETVGIKEGLGGIFMDIRHILLQLEAEVRFISEIEAEMGAILERIPCSLRLLSIKGLGTVSVAGLIGEVGDFSKFSTQSEILKLAGLDLYEISSGKRKGQRRISKRGRSLLRKILFYAAIQMIRKNGILYDYYARLTGRGMERMRALIAVSRKLLRIIHAIVRDNRDYVGQYQTPERRVIKMAA

SEQ ID NO: 333099 - protein, 332 aa, unidentified
MENFYFIGVDVSKKKLDFCVMFEGKVVHEEETANHQNAIMALLHQFEEDYGIAGGQMLVCAEHTGQYTFPLACAYKAVECKLWLENPAEIKYSSGVQRGKNDKVDAKRIAIYAKRFQDRVQYYERPTEDIERLKQLESERTLYVTDLAKYKGQMKDQKDYMPRKLYERKMKCLQTLMDDLEKAIQAITYEMDEVIASCPVLCRQRELLMSIDGVGRVVATNMIITTEAFTRFDDPRKFNCYAGVAPFSYSSGSSQHSKARVSHRADKVMKRLLHLAAVAVTHRIGGELKKYYERKVAEGKNKMSVINALRAKIVARMFAVIKRNEKYKPILS

SEQ ID NO: 333100 - protein, 428 aa, unidentified
MNNEKIIRREQFCQIKSEIRGSDQYLVVGIDVAKDKHHAFMGSATGKSFLRKLVFENNLEGFRKLQERSEAIRNQNALSKVVFGMEPTGNYHKPLGAYLVGNGHHLVMVTGKAVKNNRELLDGRWDKNDIKDPANVADLICQGKSLYYDYPPASINQLRQLLSLRRRLKKEDHSIRMRIRNNLLAQYFPELDRFYSACETESLAIVRWFLDPSMIAAMEFDEFFSLVTSTKRGIAQKQRLEKIHRLAAESIGCPMGPAAEFEAKLLVVKLKEVRQQLKKTADLMEDFCLEFTEYSILLTIPGFGPYIAARVLASISNPWRFDRSNQVIKMAGYDLGANRSGKKSDGAVPVISKRGNSELRYALYQAAHVASTRNPYFIRYFTRTLRGRERERGIKTKMKVKLAAKMLKIAWTLMKKNQGFDPDYLITE

SEQ ID NO: 333101 - protein, 438 aa, unidentified
MTILLHKKYSLINKVEEIIMAQNQYIESISILHPVCCGLDVHKNKISACLIFQQDDAPCMEIREFSAFTDDLFALRDWLLLHQCPIVAMESTGIYWRPVHNILENSVQVILVNARHYKNVPGRKTDIGDSQWLAELLRHGLLTGSFIPPAEVRRWRDLVTMRNHYVATESDFRRRIQKLFETANIKIDSVVSDLFGVSGRNLMELLLSVSTDEITIDDVQQCLRGRLNKKGPELHRAIQGFFTDHHRFILGHYLHVIDTCRHIIGAIDTRIEDLMKPYNDILTRLQEIPGIGPTAAAAILARTGTTLDEFQNSAALCSWAGVCPGNNESAGKRHSGRSPVRKHPLKTLLVEVAWSAVKVKGSYYRDKFHRLKARRGAKRAIVAIAHRILKAAFAIIKHGERYQELGEEYLAKRNEKLQLFRLRKLAERHGFDLVAKAA

SEQ ID NO: 333102 - protein, 310 aa, unidentified
METTIVGIDVSRDRLDVHLHPVGERFVVSRNAEGLDALIARIVPLGVQAVAVEATGGFETVVAASLGAAGLPVIVVNPARVRAFAQSLGKRAKTDPIDAAIIARFVEGTKPEIRPLPDADTRLLADLVARRRQIIQMLVAERQRERQLPTRYLKKSAARLIKALEKELNVLDEGIDESVRGSPVWCEKEDLLKSVPGVGSVVARTLLAEMPELGTLNRHEIASLAGLAPWTRQSGMWKGKSFTGGGRTTARTALFMAALVATRHNPLLKAFYQRLTAAGKPKMVAIIAVARKLVTILNAILRDNTPWQTA

SEQ ID NO: 333103 - protein, 387 aa, unidentified
MPQPNDLSRSLVALDQDSTIITVVEMSQSSWLVAGMLPGIERQPCKKLEPSPERLLALLHRWRDEAVKAGGKITRIALALEAGRDGFWLARWLQAREVEAHVIHPSSVAVSREHRRAKTDRLDTELLKRGFLGWLRGERGHCTMARVPTIAEEDAKRPNRERECLVGERTRIANRMKATLARLGIRNFKPTLRKAAERLATLHTAEGVPLPPNVSAQLQRDMARLGFVTSQIRDIEEARQKRLEQEPDTGQHAMVRHLARVIGIGIETADMLVSEVLSRPMRDRKAVARYAGLTGSPDESGARRREQGLAKAGNARVRRGMIQLAWRFLRFQKQSALAQWYRFRTADSRLGTRKTMIVALARKLLIALWRFVTTGETLEGVILRPAG

SEQ ID NO: 333104 - protein, 437 aa, unidentified
MKKKIQYHPLDVQQISAQTAQEHFPAGSRVLVGVDVAKRHFVAALCDAAGEAKLHVRFELPGQMHDLVQRLRELSDSGRTVEVVMEPTGTYGDTLRFHLQSHDIPVFRVNNKHVHDAAELFDGAPSKHDAKDASVIGWLHAQGRSRRWMPLDADRRDMRALVRQRDLYDDPLRRLISQMEPLLARHFPELEQLFDLSRRKTPYRLLEHFGSPAAIAATQAEPLGVLLRRYARRTKHDDVLALLRAARTTTGVPMQPQEVELVRSIATEVLRLMTLRKQVDDRIAEHCHQLEVLQAMRSCLGPVTAAVLFAYLGDPRTYSSAAAFEKAAGLNLVESSSGTNPRAADRASRRISKRGPGIVRKYLFLAAMRLVQTDPVARAWYQQRRAFQGGQKIKALIAIERKLCRALFHVAKGQPFDVNRLFDARRLPTMPEAQEAA

SEQ ID NO: 333105 - protein, 342 aa, unidentified
MLGEKGEVLEEGSVGNNRAALSELGGRYPEALVVMEAGCHSPWVSRHLEQAGCEVVVSNPRKTRAIYQHERKSDRRDALMLARIARMEPALLYPVRHGSEEAQQELLRIKLRDSLVRARVALINSLRFTLKSLGYSIANPSTERFHKVIQSALPQSVAQVIAPSVQALEELTLRIKLLEREISDQARSKYPDTAWLEQIPGVGPITALYFVLKIEDPARFKRARDVGAFLGLCPRRDQSGENDPQLRISKRGDAYLRRLLVSSAQYILGPFAPPSALRQYGLALASGATARAKKRAVVAVARKLAVLLLTLWKNKSSYQAFPQRSSREKMRTNDLERLRCIA

SEQ ID NO: 333106 - protein, 432 aa, unidentified
MGKERCFYISIGIDVGADFSLMAAALPSQEIVGKPYKILHSSRRSVQGAIDRIFSLSQQYGLPARVYMESTGIYHLPLYHKLKDAGLDAFVLNPLVTHANKDTNIRKIHNDKLDAKRIALLGLRPDLKTSIIPDDEVAALKALLREYHTMKKEISSYICRLKNQLRQSFPQYLPIFSKLNGKASMAVLSRCPSPESILEAGIDTLAGIVEQASGKGAAKAQKKAAALLAAAQDAMFFGHGNKGICYLIQHYVEMLRLLENQTAAVLNQIKQYLCERPDSHLSQQVKLLQTIPGAGFLTAVTLVCEIGDFSAFRRPKQLYSYFGLDPAVSQSGNSAGADMEISKRGSPYARRSLYVLALQSVSLRINGEPKNPVIRAFYQEKCKSKAKMTALGAVMHKLCNIVFAVLRDEKPFELISPQEHRQRFQTTSIKAA

SEQ ID NO: 333107 - protein, 460 aa, unidentified
MNRKRSKSRVDRTLPMMHPNAAAIDVGATIHMAAVRADRAPEPVRSFGTFTTDLHRLVDWFTECGVETVVMESTSVYWIPIFELLDARGFTVFLVNARDAKHVPGRKTDVSDAQWLQRLHSYGLLRASFRPKGQIAELRAYVRQRERLLEYAASHIQHMQKALTEMNLQLHHVVADITGSTGLRIIRAILAGERDPEVLACLRHYSCHSSAETIAKALTGSYRTEHLFALEQALALYDAYHEKASACDVRIEAVLKELSIHRGRDIGSVPPASRRRHRTDQANALAFDVRAALFALLGKDITRIDGLGPYLSLKLIAECGDDLSSWPSAKHFTSWLGLAPSNKVSGGKMLSSRTRRSGGRAAALLRLAAVTVGRTDTALGAFYRRLSSRIGKAKAVTATARKVAVLFYNAVRHGMEYVDPGASSYETRYRTRVVNNLHRRAKAFGFVLQPLEPKADAVVS

SEQ ID NO: 333108 - protein, 390 aa, unidentified
MFFVGIDVSSAKHDCCILDSSRKPIRSFMILNNRKGFSGLSAVLTELAAPEDIKIGLEATGIYGDNLANFLRRKGYNVCTINPLLCKKHQSATTLRKTKNDRSDAKNIALIVASEDLQPDQPLSYHIVELKSLSRARFLTVKDRSSLKNKVKRLVTVLFPELLDAFTDLFGASGMALMTRYPSAKALAACNLDTLTELLRTASRSRFGREKAEVLRKLAKESIGTFSDSAVFQLRLLLKRIELLNTQIEMYDDEIRRLMDQLDSPILSLPGIGYTLGAMILSEIGDIKRFSSPAKLLAFAGLEPSVYQSGKFNPASGKMVKRGSPFLRWALLQAATYAPAFSITFAAYYDKKRLEGKSPSVAHSHVAKKLVRVIFALLSKNASFIDSFAA

SEQ ID NO: 333109 - protein, 352 aa, unidentified
MVVVVGIDVHKMTHCAVAVDEAGRPLGQPLTVRATDAGHRQLLRWVRRQFAQEVVEFAVEDCRHVSLRLERALLDAAATAVRVPPKLMAQTRTSARTRGKSDPIDALAIARAALREPNLPRAEHTHASRELKLLVDHREDLVRIRTGLQNRLRWRLHELDPEFDLPARGLDLIKHLDRTQDRLGALPPSTCRRLALEELADIRAFTCRIIAFEKEITELVRIQAPQLLALPGCGPLTAAKLVGETANPVRFRSEACFAMHSGVAPIPASSGKTDRHRLARGGNRQLNAALHRIAVTQIRLDGLGRVYYQRRRAQGNTTMEALRALKRRLARIVFNLLRPTDQLAAAPLPQAA

SEQ ID NO: 333110 - protein, 428 aa, unidentified
MSRKQSRVQRGCGIDIDKQWLWASLYTVTPKGNVKEKFKQFSNDAPGIEELKGWLSSHKVVDVAFESTGVYWQLLFDKLECEFNPMVGNPCKMKGMRGYKTDRGDGRWIATLLRLGAIEPSFVPPRSIRELRLLTRQYQTMTCDRTKVKNRIKKTLRQVGITIDLCMKNLYSKTGRAMLEALIACKDAVAVASLGIRLKTSYSDLLKALEGAPLTPKLGRVLARYYRMMTYLDSELEMLWSEIEDAAKQYDEQISLLESVPGIGRKTAIFLIAEMGADMSVFKSVKNLASWGGLCPGNNSSGGQRKKSKATKGNKYLRTALVQAAWAAIRTQGSSYRDWYYSNKARLGHPNKAAFAVAHQLLRACYSVLSTGSEYTKSCSEAVERRARRIKKQLRAIPTEELEQELEDRRRKLEMLEGQPLVSVPLPV

SEQ ID NO: 333111 - protein, 392 aa, unidentified
MTLINIVAANQKYYAFNLLSVFIMVFWSVQYLLQHLLVQTQLSDQLLQPLILIFQLPQTPQFRHARPGKFFLPVNGMDYLLPLRLTVRNVLTKRITMNIVFLGIDLAKNVFQLCGLNQAGKPVYTKRTGRKELLQTLANIPACLIGIEASTGAFYWQREFEKLGHKVKVISPQYVKTFVRGQKNDGNDAQAIAVALMQPTMQFVPPKSPEQQDIQALHRARQRIVNHRTATVCQIRGLLLDRGIPIGSAVSRARRAIPLILEDAENGLSSRMRRTIAELYDLFNDLGRRIHFFDKEIETVFRQSEACQHIAKVKGIGPKTATAVAAAIGKGTEFKNGRHFAAWLGLVPRQHSSGDRQVLMNMTKKATSICGHFLFMVPALSSGLPRITMMVI

SEQ ID NO: 333112 - protein, 461 aa, unidentified
MTRYGRKKKGVPQKGGSFPIINNDAAGIDIGSEEHWVAVPEGRDENPVRPFGCFTSDLHAMARWLKKCGITTVAMESTGVYWIPPFQILEEYGFEVKLVNARHVKNVPGRKSDVSDCQWLQRLHTYGLLSGSFRPDDQICVLRSYWRHRANLVRYASDHIQHMQKALTQMNLHLHKVLSSVTGVTGMNIIRAIIVGERDPQKLALMRESGVKNTSETIAKALEGDYRQEHLFALKQAVELYDFYHRQIEACDGEIENYLQVFETKIDPLQNPLPKRKGRGKKPIRNESFVDLRTELYRISGVDFTQIPGLDVLTVQTILTEIGLDPAKFPTEKRFVSWLGLCPNNRITGGEVKSTKTRKTVNRAANAFRMGAQTLANSNAALGGFYRRIRSRLGSPKAITATAHKLARIFYRMWTTGQAYIDLGKDYYENRYKERVLRNITKRARELVYDAVLQPIEERVA

SEQ ID NO: 333113 - protein, 430 aa, unidentified
MNCNTQNAKIKSITEKALIVGIDVGSETHYARAFDWRNYEYSKKPLSFSNDEAGFATFKAWMEDMMEKHEKTAVITGMEPTGHYWFNLGAYLQEQGFKPVHVNPHHVKKSKEMDDNNPNKNDRKDPKTIAALVNEGRFSYPYIPTGIYAEIRNLSNLRLQTQEEITRIRNRIARWFSIYFPEYKTVYKQPDSVSGMMVIRQSPLPCDIKKLGVDGINKIWRDAKLRGAGLKRAKTLISAAEHSIGSCEAPESARMEIQNLLKDHEVYQGRMDELMAAIERKLAEIPYIDKLMEMKGIGIKTVSCFIAEVGDIRRFDNPKQVQKLAGYAIVSCDSGKHQGESHISYRGRKRLRYALYEAAISVIGKNREFKEVYDYYRTREKNPLKKMQSVIAVACKLIRIFHIILIKGVDYDGERMLRDIMRPEIAVQAA

SEQ ID NO: 333114 - protein, 417 aa, unidentified
MAEEIEWFVGIDWASQSHQVCLVDARGECLGERAVAHGGPGIEELCNWLIARTGATPEVIGVAIEMTHGPVVEALLERGFCVYGINPKQLDRFRDRFTVAGAKDDRRDAHVLADSLRTDRHAFRRLSNDEPVIVKLREWSRMTDDLQQERTRLASRMREQLWRYYPQVLELADDLAADWFLDLWNQAPTPAKAARLRETTIERFVKAHRLRRWPAPEVLRILKQKPLSVAPGVVEAASDHIRTLTVRIRLINRQLKTAHCKLDELCAQLIPSEEDEPGQQCGQRDVVILRSMPGLGRIILAVLLAEVWQPLRRRDYHALRSLSGVAPVTRRSGKTCVVVRRYACNKRLANALYHWARLATQHDALSRRRYAALRQRGHSHGRALRTVADRLLSVACTLLEQQTLFDPSYEVRDAAGA

SEQ ID NO: 333115 - protein, 358 aa, unidentified
MYKFMKKFFIGVDVSKDTVDVSFFDDDRMKSPEYLAQYSNSPKGFREMVKDLRMCCHGVSSGQWLFCCETTGRYDHPMCHWLVDHGMVVWRESALQIKWSSGIQRGKNDRVDSLRIAEYAWRHQDKMQKFVKPSESLSNLKAAFTHRRRLVEKRTATRCQLKSMSSEKGLSASLARMIVRDLSREIERLSASIATMDESIQKIIRSDSELDRNYRHIISVKGVGPITAVALIVCSGNFKAITSAKKMACYCGVASFRSQSGTSINRKASVSNLSNRQIKSLLSMAARSASRSNPVFAEYFNRTLSRGKPVALVYNNLRNKIITVVYKLIERDCDFDVDYMRMHSTGQRANEPAIREAV

SEQ ID NO: 333116 - protein, 384 aa, unidentified
MIQVDDLSRSMVEFDHDSTLVVVVEMSESSWLVAGMIPGVDRQPVKKLAPDPDALQRLLERWRAEATKTGRKIQRITLGYEAGRDGFWLARWLQTRGIEVHVFHSTSVTVSREHRRAKTDRLDAAMLMRVFLGWLRGERGHCSMVAIPTLEQEDAKRPSRERENLVGEQTRIVNRMKAALVRLGIRGFKPELRKAPQRLTTLRTPEGTTIPPNMLDEIRRDMARLAVVREQIDRIEQTRLERLKKAPAEGSNAMVSLLARVIGVGIETADLLVQEVLSRNLRDRRAIARYAGLTGSPDESGSKRREKGLAKSGNARLRRSLIQLAWRFLRFQKDSALAQWYRARTEIARKTTMIVALARKLLIALWRMVTTGEIPTGIILREAA

SEQ ID NO: 333117 - protein, 429 aa, unidentified
MTKKYILKNQTVPAERSAVETYLAPPPPSKGKIIGLDCHPDTFTAAVFAGQTPHDARKIGSRENLSLEALLKWAVAELTPQDIILMEAGSNSFELCKRLGNLGLKACVLESCHVGKHAKTYADNDKMAAARIALVYLAGNAPCVWVPDEQSRERRELLHAYRKSVDDHTAATNSIKSYLNGRGLRLGKHSLNEKTTSQWILEQADWSVLQKNILAEHLANITESKERRKRLYRLIAAEMAADPKMMRCMKVLGVGIVSAFALMAVIGDIGRFHSPEKLVAYIGLNPGQRQSGKGKDIRLGVGRRGRGDIRNLLIQGAHAIMRSGRNTPLGQWGWKLFARKGNRNVAVAAIARKLLVQVWHLLHGNPPLALESDTSFRIKLQKLAVALGSTLRTGIGLGKTLEDTVKTLLSRCQTNPEPSASPRETPQPA

SEQ ID NO: 333118 - protein, 348 aa, unidentified
MRPYTTTHAFYCGVDPHARSLFVNVLDDTGATRLEQDLPASPAAFLDAVQPYRDGLVVGCECMFAWYWLADLCERERIPFVLGHALAMKAIHGGKAKNDKLDARKTAGLLKGGFFPTAHVYPRANRDTRDLLRRRSFFVRQRAQLIAHVQNTNSQYNLPPFGKKLTYKGNRSAAIADRFEHPSTQLSIRADLALIENYDTRIAALESRLIKSAKVDDPTTFAFLRTIPGIGPIPGLVMLYEIDSITRFAEVGNFLSYARLATCTHESAGKVKGVGGRKIGNAHLKWAFSEAASRMLRSFAPAKAWVQRQSKTRGAKKAHAVLEARLGRAVSHLWRKQAAFDAKKFLAS

SEQ ID NO: 333119 - protein, 411 aa, unidentified
METLIRRCAGLDVHKASVVACVRVIDENGELLSFTQSFGTTVSDLLKLNDWLASYAVTLVGMESTGVYWKPVYTLLEAEFECWLLNAQHLRNVPGRKTDVADAAWIAQLVAHGLVRPSFVPPKEIRELREVTRYRKTVIQERSREAQRLHKTLEGSGIKLSCVATDILGVSGRDMLQGLIAGTHDPDVLADLARGRLRKKLPALREALMGWFSPTHRILVSELLAHIEYLDESIERLSGDVAKMIAPFAAAIDLLDTIPGVDRRNAEVILSEIGPDMSRFPSSGNLASWAAMCPGNNESAGKRFSGKTRKGSKWLRVALVESAQAAAHTKNTYLAAQYARIKGRHGHKKAIVAVAHSILVIAYHVLQRGQPYNELGGDYFIERQNKDAYQRRLVKQLERMGYEVALTTHAA

SEQ ID NO: 333120 - protein, 355 aa, unidentified
MSQKLDTSPAVIGIDIGKNSFHIVGQNLRGAIVLRQKWSRGQVEARLANLPPCRIGMEACVGAHHLSRKLTALGHDARLMPARYVRPYSKGQKNDYRDAEAIAEAVQRPTMKFVATKTADQLDLQALHRVRERFVGQRTGIINQIRAFMLERGIAVRQGLRFLRAELPGILATRTDALSPRMLRILEDLMADWRRLDARIEELSSEIEALARQDNGCERLMSIPGIGPIISSAMVAAIGTGDAFSKGRDFGAWLGLVPKQLSTGDRTILGSISKRGNRYLRSLFVQAAWVVLVKIGPKHWDRYGLKSWIEAAKKRLHHNVLAIALANKLARIAWAVLHKGRAFECVKTNAASQPA

SEQ ID NO: 333121 - protein, 445 aa, unidentified
MAMRNRTATFELAHPNAAGIDVGSASHFVAVPADRDEQAVREFKAFTEDLKALADWLADCGVDTVAMESTGVYWIPLFELLESRGFTVYLVNARHVKNVSGRKSDVLDCQWLQQLMSFGLLSGAFRPQEQICVLRALSRQQEMLTKYQSRHIQHMQKALAQMNIQLGNVISDIAGETGQKIIRAILAGERDGAKLAKLKNLRIRASDEEIVKSLQGNWREEHLFALKQAVELYDAYARTLQECDRQLVLQLERLARHELPVGPTKRRGRPPSSTKVQWRNALFRACGVDLTHVDGIDLSTALKILAEVGPDLSRFKSAKHFASWLGLCPGTKISGGKVLSGASKRTANRLAQALRMAATTLRNSQSALGAYYRRLCARLDKAKAVRAAAHKLARLIYTLLTKGTAYVDQGQNYYEERHRQRVLHHLHRKAAAMGFTLTPVEPLPA

SEQ ID NO: 333122 - protein, 304 aa, unidentified
MEFDIHKSVLVSTVQGKGIKTETRSYDAFTESIEQLRDWLKSLGITHVAMESTGVYWKPVYNILENDFEIVLVNARHLKNIPGDKTDKKDSRRIAKLLLAGLLKGSFIPPKPIREMRDLTRYKRRLIEQIASEKNRIHKFLEDANIKLSSVVSNMSGATATKLIDAMIEGEGRVEELAKLRHGKMKASEQELMVALTGNLTEHHRFMLKMVKQSIKDKELLISELDEQIDNKLKENEMVLDAELLSTIPGVDKEAAAYILSEIGNDMERFPDEQHLASWAGLSPGNNESAGKKKAQRPRMAISG

SEQ ID NO: 333123 - protein, 411 aa, unidentified
MENVFACCAGLDIHQKSVEACVRRLEPAGPLHQQTRHWGTMTRDLLAMADWMAAQGVTHVAMESTGVYWKPIYNILESRFTVLLVNARHLKQVPGRKSDVRDCQWIAQLLQHGLLKGSFVPPRAQRELRDLTRHRAQLVEEKTRTVNRLHKVLEDGNIKLASVATDILGVSGRAMLEALMEGQEDPVKLADLAQRQLRGKIPELEKALEGHLTEHHRFMLRLLWKELGQQEELIAELDRKIEEQTRPFANEIERLDAVPGVDRRVAEVALAEVGSDMKPFPTHSHVASWAGMCPGNEESAGKRRRQRLTPGNRWLKRSLVQAAWAASHTKHTYLASQYRRLAGRRGRKRALVAVGHSMLVIFYHMLKDRTTYKDLGGDFFDRLEPERLTRYYVKRLEDLGHKVTLESSVPA

SEQ ID NO: 333124 - protein, 419 aa, unidentified
MNRIETKKLRIVNAKTLIVAIDIGKVTPVGYCRCPGGRDCKCFEFSNTTEGFKKLWDRICWMKTAHHLEEVVVGFESTGPYGEPLVCYLKQKPVKLVQVNPFHTKRVKELEDNSPGKTDRKDPRVIADLIELGRVLSVVVPEGAAAELRRLTQARERKLQKRTASYNQLHALVFLLFPEFLSVMKDLRTQSAQFLLEHYPTAEAIQTCGLAQLQLVLRRVSRGKLGQDRAQALFEAAKESVGLDEGRRAMLLELKEILREIKNADQFIKEIEKDMSQYLKQIPYSGCLLSLKGIGEVTVAGLIGEVGDFDQFHRLPEIMKLAGLSLYEISSGTHQGIRRISKRGRSLLRKLLYFAALNTVRKKGVMHIPYQKLLQRGMPRTKALVAIARKLLRILFALARDRSQYVQNYSPLKYLDKAA

SEQ ID NO: 333125 - protein, 482 aa, unidentified
MTKRTIFPYQSQELNTIFEEAGNNAKVMCIPIDYAKKEHVVMFCNGHGNILRKPFPIKNSPKGIEYLTQQVLSSCRHRGIDPKYAFFGGEDVGSYAENFINTLRSGGWIVAGVNAHDAKKQRANAQASTDALDLMGIASMLLNRRANCSPAQTGIYRNLRGLTRHRKKLVDMSTEEKNRIYTVVDQIFPGFLDEKNTGISPFSNSSLYLMADRFSPAQIRRRKRQKLIETLRRYGTVKPEVSADKLQLYAAHVLNTPTEYLSALQISLAQHIKHFNCLQESTEQLEKEMALWLAQTQGAFLTTLRGIGIVLAAGATAEIGDPTKQKPVANLVSYSGIIPRVKQTGGPEGQTRTGKVSKRCNHILKNYVVQSAHHIGLHGPEDLMADYKRRDANGQHADFGIGRRYIRTAMCLMRNAQIYIPKRLRSKGINPEERAGYFLMIWPSLRDKWAKLGALETAFTNDNPLGRWRNMVQELYEIKLKL

SEQ ID NO: 333126 - protein, 408 aa, unidentified
MKTLHRRCAGLDVHSDSVVACARLTVRTKASHEVRRFSTTTRDLMELADWLAAQGITRIAMEATGVYWKPIWHILEGRFELVLANAAHIRNVPGRKSDVNDAVWISDLLAHGLIRASFVPPAQVQDVRDLTRTRTQLAREIAQHIQRIQKTLEDANIKLTSVISNIIGTSGRRMLKAMIAGETNPAKLAQLGSTRLKCPRDELTAALDGRLTAHHRFLIAHHLSLIEELERHIEAFDARIEKLLAPLRDAVAQLITIPGVSQVSAQVILAEIGAEMTPFPTAGHLLSWAGLVPRLDESAGKRRSTRVRKGAPWLKPVLVQCAWGAARSKGTYYQAQFFRLKARRGPKRAAIAVAASLLTAAYHMLKNGTFHQDLGADFLVKRNKARIVTKLASRIKDLGYDVSITPAA

SEQ ID NO: 333127 - protein, 355 aa, unidentified
MKDKKLNFKGQNIYIGIDVHKLRWIISIVFQGMLIKRFSMDPNPKILNEYLRKHYPGGNYYSVYEAGFSGYWADRELRELGINNIIVNPADIPTKSKERRRKDDKIDSAKLARELSVGNLEGIYVLSSSEESLRNLVRVREHLKKDQTRQKNRIKSLLNFIGAKLPEDISERHWSKRYITALRKMSIKEPETKQALNELLDSLESIRRQISRIIKNLREIVYSKEESREIIELLMSVPGVGFITAITLYSEIVDINRFKRLDELAVYVGLSPSVYSSGDKEKTLGLSKQRNKYLRNILIESAWVALRKDPALQMAYGKLRNRMPVQKAIIKISRKLLNRIRHVWINKEKYVLSVV

SEQ ID NO: 333128 - protein, 343 aa, unidentified
MQAVTTIGLDIAKSVFQVHGVDAAGQVLIRRQLKRRAVLAFFEKLPVCLVGIEACASSHYWSRELQALGHSVRLMPPAYVKPYVKRQKNDMADAEAICEAVARANMRFVPTKTPKQQSCLMLHRTRHLFIRQQTAVINSIRAHLAEFGIVAPVGRKGVTELLHIVADPSDKRVPEVARACLAALGNQLLSLKEQIVKFDRMIMVWHRSNETSKRLHYIPGVGPMLATALVASVADPRTFRSGRNFSAWIGLVPKQHSSGGKDRLGSISKQGDRYLRSLFVAGALAVIRYAKIHGTKHRPWLTALLARRPTKVAAIALANKLARMAWAMMAKGERYRQPVALAA

SEQ ID NO: 333129 - protein, 420 aa, unidentified
MKGVRSKKVGVVKESALIATIDIGMTSNTGYCTTADGRDIKPFKFNNTREGFDKFWDMIVISKNRFACDEVIVGYESTGPYAEPLVHYLTNKPVRIVQVNPMHTKRMKELNDNSPLKTDDKDPRVIADIVRLGRALTVVIPEGDAAYLRRLNNARERHIRERTALLNQLQQLVFLLFPEFKTVIKNMTVKTARYVLKQYTTPEMIGTLFKETLGEEMRKKSRGKFGIKDAEALISLAQGTVGIKEGIAGLVLDVKHILMQLEIIEGFIAEIESEMEKTLREIPYSIKLLSIKGLGIVSVAGIIGEVGDFSKFRTQSEIMKLAGLDLYEISSGKRKGERRISKRGRSLLRKILYYAAIQTIRKNGIMCEYYAHLIAAGMKRMMALVAIARKLLRIIFAIVRDNSEYKADYVLTRKVIKKAA

SEQ ID NO: 333130 - protein, 391 aa, unidentified
MILVGVDVAKDKHDCYIMTSEGEVLFKSFTIANNMEGFNQLYEKILSVIDNFDNVKIGLEATGHYSYNILGYLLDKGLTPYVINPLHSNLYRKSLSLRKTKTDKVDSRIIASMLMSDVSLKPYSNTLYHNEELKSLTRYRFTKVQERAKLKISISRLVTILFPELEKLVPTLQMNSIYALLYEFPSAHAISKAHLTRLTNLLNTTSKGHYTKDKAVLIREAAKNSIGSNMPAKSLELKHTIKLIKELTSEINEIEEEIKIIMNKINSPILTIPGIGLSTGAQILAEIGDFKNFSSPDKLLAFAGLSPSTYQSGNMYSSNAKMEKRGSKYLRFALFNAAIYVSYWEPTFSQYLKKKRVEGKHYYVAISRVVKKLVRVIFHLEKTNERYSTVV

SEQ ID NO: 333131 - protein, 431 aa, unidentified
MRTHRRGVRPGPGPSSTLITPDRAGNVVGVDPHKRTLTATIVDPRGGIVAWEHFRVSGDGHRALEAWARQFGAIARVGVEGASAWGRHTAIFLAARGYDVRDVCPNRTARHDRARQRGKSDMLDAERIARETLAHPLLPRAFKRAGQDHGPDQHAELLAVWWGARCSLIKRRQHLLTEVEALLRELPLALIESLPDTERVRPRLVALARLTRRRRFDPPTMVRLTVLGSYRVEIAKLDAEEKQIRSELARLIQASGSTLEELCGLSTVSVAELLVETGDPRRFTIGGFGRFNGTAPLAASTAEGPGEPIRHRYNPGGNRRVNAILYRMALTQLRCEPRAKTIYANARANGHTKKEARRILKRHLSDVVYRRMIRDLEAQLTRPAPPGRVTVRGRRAVKSGPTGPSAASCNAAPLTAIAGHAPPSRQEGTLT

SEQ ID NO: 333132 - protein, 392 aa, unidentified
MYIIGIDIGKNHHEASIVSPEGKQIGHSLRFATTHKGADSLMSFIFNNIGNSSCIFGMEATGHYWYPIYSFLKARGYTIYVINPIQSDSLRKMYIRQTKNDSIDSFLIAEVIRFGQFTTTSMADENILAMRQLCRYRDSVISSRTEIKLRISTIMEQIFPEYEKQFSSLWVSTSMGILEKYLTPENIENAPIDELFEIIKDKSHNKLTMKKAISIRDAASDTFGIKIAQDAFSFQLKQLIDRMNFLDKQIEALDCQILEYYEKFDCYLHTIPGIGMIAAATILAEIGDINRFKSSSALVAFAGIDPTVRQSGEFSSTHNHMSKRGSPYLRHAIFLAATTCSFHNSPLNAYYKKKRDQGKHHLTATGAVARKLTTVIYAVLRDSKPYEPKKFC

SEQ ID NO: 333133 - protein, 316 aa, unidentified
MESPSIFIGIDVSKARLDIAMRPSGECASVAHEEDAIQSLVKRWNQVRPTLIVLEATGGLERSISGALASAELPFVVVNPRQVRDFAKATGQLAKTDRIDALVLARFGEAVRPAVRPLADEASQELKALSARRRQITEMIVAERNRASRAPKSVGKRIDAHIRWLEAELDRADKDLDQSICQSPIWQENEDLLRSVPGIGPIVSRTLLAELPELGQLNRKQIAALVGVAPLNRDSGQFKGRRTIWGGRAAVRACLYMAALVASRYNSVMKAFYTRLRSAGKKPKVVLVACMRKLLTIINSMIKHRAHWSESNLQTT

SEQ ID NO: 333134 - protein, 314 aa, unidentified
MDKQEHTTFIGIDVAKDRLDVHVLPDGKNFFVTRDAKGLAVLIRRIGKHETPLVCLEATGGYEREVVSALADAGLHTVVMNPRQVRDFAKATGRLAKTDRLDAEIIATFAKAVRPAIRPLPSAQERRLCALSRRRRQGGNMMTAEKIRLKREREPSLQTQIRAHIDALSLMRDELDSKMRALVQADAIWRQKAQLLQSVPGVGEITAFILLAGLPELGSLHRNPIAALVGIAPLNRDSGAMRGRRMIFGGRKLIRNALYMATISAVQFNPAIRAFRDRLRAKGKPAKVVLTACMHKLLTILNAILRDQKEWKTA

SEQ ID NO: 333135 - protein, 433 aa, unidentified
MLKLNYMSTLFVGIDVSSKTNAVYAMDFEENKYISSSFGNNQPGADQLVNMIAECMQKHKNLNTILIVLESTSVYSVHISNFLSTSEVLMPYKPYVFCVNPKATSNYRKSYIGMEKTDPTDAYLIADFGRVGRTKKLEPWRGGQFISLKRLTRHRMHLSECITREKTYMVSNLYLKFSELQLLEGDDKPFGSLYGATSSAVLTEFLSPQEIIDMPEEELLTFLAGKSRNRISDLSKTSELLRKAARDSYRLDKCMYEPLSISLASSFNCIHAYQKEIKLIEQAIEKCINGMNPNALLILQSIPGIGPIWASGILSEIGDITVFHSSDALAKYAGLYWPKGDSGDFTSEDNKMSKAGNPYLRCYLGEAANSVRKHIPEYADFYARKYAEVTKHQHKRALALTSRKLVRLVFGLLVKNQLYTGEKLDTEYNIESN

SEQ ID NO: 333136 - protein, 482 aa, unidentified
MKAKPQEKNKRATNHPTQHHWHEMNRKQRRETMRKIQSEDLSLEVIHPDAAGIDIGNESHYAAVPPSRDSQPVRCFGCTTAELKAMAAWLQQCRIRTVAMQSTGVYWVAVYDILEQAGLEVYLVNARDTKNLPGHKSDVQESQWLMKLHTYGLLRNSFRPSQKIRTMRTYWRQRNDLVQSASRHILRVQKALTQMNVQLANVLSDISGVTGQAIIKAILAGERNPHKLAEFRDPRVQASEEEIAHYLEGNWQPDLLFVLKQEQDGYEFCQQQMAECDRQLAQYLQQREDRSQGAPLPEEKRKGRLKKKSGNKPQFDLRTGLFRMSGTDLTRIDGIDVMTATTVISEAGYDMSKWQTENHFVSWLRLCPDNRISGNKVIGKGRLPTHNPISIALKIAATTLRQSQTYLGAQFRRLRTKLGAPVAIKAMAAKLARLVYRMLRYGMKYVDQGAAVYELKHRELQVQQLKSKAAKLGYKVTLLPAA

SEQ ID NO: 333137 - protein, 339 aa, unidentified
MKLYAGIDLHSNNSVVSVIDEADQVVFEKRLPNELERIVLALAAFRDALVGIVVESTFNWYWLVDGLMAAGFRVHLANPAAIVQYEGLKHSGDEHDARWLAHLLRLEILREGYIYPKAARGVRDLMRRRMQLVQTRSTQLLAMQTQLMRSTGRSLSSAQLKGAQAAALLAGLVDEPNVVSALQANLAVAQALSAEIERLEREIVSQVKLAAQFEPLLSVPGIGKILGLCIMLETGEIARFAKVGNFASYARCVDSERLSNGKKKGEGNAKCGNRYLAWAFVEAAHFAVRYNGRIQRFYQRKAAKTNQMVAIKAVAHKLARAAYHVMRTCEPFEEERAFA

SEQ ID NO: 333138 - protein, 398 aa, unidentified
MDLPVYYELETNNGNRDYRIQIGGHYMNYNTVYVGMDVHKESFTLCSCKYEDEKASHYQRTPASYKNVLRYLAFLRTIYGEDTRFVCGYEAGCLGYSLYHQLENFNVECVILAPTTMLEQRSKRRIKTDKRDAEIITKSLAQHNYSPVHIPTKMDNQTKEFIRMRDDHKAELKKIKQQILAFCLRQGYQYDGSGNWTAKHVKWLRSLKTEGLYKEILDEYLLTYTILTDKLNRLDQRIEELASEEEYKEPVSKLTCFLGIKTHTALSVIVEVGDFQRFASARKFAGYLGLVPGQHSSGDDRNGLGITKAGNTHVRRLLVESAQSYTRGKIGYKSRVLRSRQAGNSPQIINYADRANERLRRRYYQMVLKDGKKYNIAKIAVARELACFIWGMMTDNIY

SEQ ID NO: 333139 - protein, 359 aa, unidentified
MQTRGQSLDFSGQNIYAGFDVHLKSWSVTIMTDEITHKTFSQPPEPEVLHQYLQRNFPGGTYLSAYEAGFCGYWIHHKLLSLGIHSIVVNPADIPTTNKEKVQKDDKRDSRKIAKALRSGDLVPIYVPSAKTIEDRCLVRTRSMLVRDSTRNKNRIKSFLHFHGIKILASFENSRTHWTKRFIYWLEAIEMKEDSSKLTLSLLVSECKKLRGTILTVTRSIRELSQTEAYIKQEKLMRSVPGICPITAITFLTEIETITRFSNNDQLHSFIGIVPSTNSSGEDEIIGDITPRGHSILRSAIIESAWIAIRHDPALMKAYHDYCKRMEPNKAIVRIAKKLLNRISFVLKNMQPYSLCVVK

SEQ ID NO: 333140 - protein, 373 aa, unidentified
MEKYSEVFVGMDVSKSRIAVGLAEGGGAGEARFLGEIEASEASVTKFVRRLSAKHGKLMFCYEAGPTGYGLYRLIGELGHACRVVAPSLIPRKPGDRVKTNRRDALSLARLLRAGELTAVWAPDERHEAMRDLVRARSAAAADLRVKRQQTGAFLLRLGRVYPGKKTWGGAHRKWLASQNFGHLEQRIAFEELVRAMEEAKARVARLERAIEEAVPDWSLAPMVTALMAMRGIDLVAATTILAEVGDLGRFQTPRELMAWLGLVPSEASTGDRVRRFGITKAGNGRARRALIESAWCYRFPARIGSAKLARVEAASPAARRIAWKAQTRLTARYRALMRKGKLKTVAVTAVARELAGFVWAMHRALAEEQAVA

SEQ ID NO: 333141 - protein, 345 aa, unidentified
MPYVVSVGIDISKSKFDISVTSRSKVFNIKYFSKSNHHCSFNNTTKGIEKLCRKLSKLNISKNSKVIMESTGDYHLLVAYMLQDKYNTYVINPLISHGVIKTNVRKVKSDKADSLVLSRLGIDNNNLEIKKLNKFKISKNQISKNKLLSFTKCINKHKAALKLSIKNLKETTGKFNITDMNDPIKAMEDIVKQMEQTIDSISRIIEEKIENKVLQKSLANVKGLSLKTASQVISTIEDKTFKTKNSIVSFAGLDISTKESGTFKGRSKLTKRGNEILRAQLFFGAWGLMMHNDKFKEYYEYQKQKGRKYKEILVMIARKLLKMIYGAMKDNNEFNINKFQFNYSK

SEQ ID NO: 333142 - protein, 356 aa, unidentified
MSSEVKYIGMDVHKEAIVIAVRDTRGHVVMESIVETKASSILQFIRGLQGELHVTWEEGTWAAWLYDLLKPHVHRVLVCNPRRNALLKEGSKNDKVDARKLADLLRTGMLRPVYHGEHGLRTLRELARTYQTLSQDLNRVMNRLKALYRGWGMACGGTQVYAPRYRDEWLGKIEHAGVRRRAELLYQQLDGLQALRRTLRSELLAESRKHKASKLLRQIPSIGPIRAARLVALMQTPHRFRSKRQLWTYSGLGIETHDSAQYRFVRGELQRAKKPQQIRGLNRNHNHEMKDIFKGAANRASCGVGPLHDFYVALLDKGMKPEMARLTLARKIAAIALTLWKKEERFNAEHLKTQAA

SEQ ID NO: 333143 - protein, 450 aa, unidentified
MAQRSGLTRGDRRRNAKIEELRAVVRSDRAILAIDLGEDKQVAALLDHDGRVLGRRVARDKAHALGGLLRWAVEQAGRHGFVGVVVGCEPTGHRWRSVMQLADAAGLGFVCVQSLRVHLAREADDYTRDKTDHKDAVLIGKLIARLDCYLPERAEEDWARLRHLGQRRFRLVGEMVACRNQIDDLLSCCWPAALECAVKPFDSTTWLACLAVTVDRCNGNPAKLRGLGRGRFSAAVRRELPRFGAQRVCHKVADRFFAALTDGRGVTVQRRGALERVGMLIDDWRSAIARLGEVEARMLAVLDGLGLTTLVTSVPGVSAVGAAVILAETGDLSRFATARSVVKHAGLNPAENTSANFRGQTRVSHRGRPALRAAAWRAAWGALPHNPVLGARFTHLTTRERDRLAPGQARVACAATLLRWLYAIVTTRESWNPDRAAGIRAGQAGEAAAA

SEQ ID NO: 333144 - protein, 357 aa, unidentified
MHKLEGQTGFKGSVHNILLPRARRVDCTICLEARLHLSLEVFVMEAIHPIACGLDVHKNSITACILVERKKYLRTFGTMTEDLFELLDWIKDMGCPIVAMESTGVYWKPVYNLLELSDIKALVVNAKHIKNVPGRKSDVKDAQWIAQLLQHGLLKGSYIPSREQRELRELVRYRRSLVEEVSRESNRIQKVLEGANIKLGSVASNVLGVSGRKMLRSLINGEDNPEIIAELSLGKLRNKIPELKKALKGLIGTHQQFMLTTQLNHIEYLEKQVESIDREISRRLEECKEDLELIQTIPGIGKRTAEQILAEVGTDMSIFKDEKHLASWAGLVPVENESAGKKKANKPGRGINIYEVL

SEQ ID NO: 333145 - protein, 431 aa, unidentified
MKNRTNQRLEAITAGTLIVGVDVAKSLQWARFVDYRGVEVGKAISFKNNRKGFESIVSRIKEVVKLKIFKEPINNILIGMEPTGHYWKTLANYLMKLGYTVVGVNPFHTKKAKELDDNSQTKSDKKDALTIARLVKDGRYFDPYMPQDIYAELRVLTNTRVSILKRNSNLKNTITAVLDEYFPEITTVFKNPLTGKASRQILKSCPFPKLLLNLGEEGILAEIRKAVKRTVGIKKVRELIRAAEDSIGVEYGLESAKLKLSLLIEELDLIEHQLDEVESAMEKMLAATGYAEYILGIKGIAVVSAASFLGEVGDPTRFNNARQIANYAGYNLVEDSSGKSKSGTCISKRGRKQLRSILYKMAFSMVGHNAEIKALYRHLTTRKDNPLKKKQALVVVSKKIITIIFSLIKKQEQYKPELVLGSVRKEILLAA

SEQ ID NO: 333146 - protein, 387 aa, unidentified
MRPTRNPTVSTAALDYDSTMISALELSSKKWVFAVQLPGVNKHTRHVLAPNGAALVELIERLKARSKAAGLPIARVIVTHEAGRDGFWLARFLQRRGVEVHVMQSSSLPVDRRARRAKTDVIDVEMLLRTLLAWLRGEPRVCSMVPIPREEDEEARRAHREREDLIGERRSILNKIEGILATLGIDGYQALRRGRRSQLANLRQPDGEPVPPAARGRIERLLDRLELVMTQIKAVERARDAVVTKKAPEDENERMIRDLVGLRGIGVESATLLVREAFCREFRNRQALGAYAGLTGTPFSSGKMEREQGISKDGNRRVRALIVELAWFWRRFQPESKLSIWFDARMGGARGRMSKVMIVALARKLLVALWRYAKDGVIPEGAVMRTA

SEQ ID NO: 333147 - protein, 324 aa, unidentified
MNYAALDLHERTVQCVLKNQDGRIVKESKTVKDEGRILAFLDGTNASVVMESGRNHQHIYDVLKERGYDVTVAHPLMVKAIAYAKVKTDKVDARVLADLLRADMIPESYVPGRDIREIRDLVRRRHYMVKLRTMQKNKVHAELATRWLKYEGDPFTEDGKIYLRSLAIDAVIDYLETIEFLNRKIHQLDEKVRRVVESDKSAKLLMTVPGISYYSALLISSEIADIDRFPDHEHLCSYAKLSPGVRQSGETRHTSKSMGNSMMNWIMIQCTRVHVRKYDSAITRFYQQVSKRRGEKVAIVAAARKLMRAIYIMLKEEQAFRLDG

SEQ ID NO: 333148 - protein, 339 aa, unidentified
MEYNTIIGLDIAKNVFHACKMGREGVVLERKRLYRSDVISYFSNSPKSLVAMESCGGSSYWARELEKLGHTVRLISAQFVKPFVKSQKNDALDAEAICEAALRPQMRFVSPNTITQQDLQNIHRVRSRLVKSRTMLANQIRGLLMEYGIVIPQGISKLRTALVEILCENDNSQRDLWRVTFSDLHEELARLTSRIEFYDKKILELCRAHPIASRLSKLRGIGPITATAIVAAVANPYDFKNGRQFAAWLGLVPRQCSTGGKTKLLGITKRGDKYLRKLLVHGARIETRFAKKRENTWLLSLQGRAGFNKAAVALANKNARHIWAVLALEDKYKNKAMGI

SEQ ID NO: 333149 - protein, 357 aa, unidentified
MASQRIAHQDRGVTIGVDTHGDVHVAAAFTSDLGRPLGHLEIETTPEGYRRLLAWARRLGDQPRFGIEGTGSYGAGLARFLRHEECEVIEVNRPNRQTRHARGKSDPVDAEAAARAVLSGEATCIAKRDDDLAGMIRTLRVARRSAVRVRTQLMNQIRALIVTAPAELREQLRPLSGEQLIDIAAGLRPGPITSPAAATKLALKILAHRHQELQTELVTLDSELDRLTAAAAPRLRALHGVGADVAGALLVAAGDNPERMRSESAFAHLCGVAPLPASSGKTTGRHRLNRGGDRQANNALWRTVMVRLSCHQPTRDYMARRTREGMSKKEIIRCLKRYVAREVYRALVPSRELARAA

SEQ ID NO: 333150 - protein, 469 aa, unidentified
MNEKEKRFLGIDVSKGYADFILLDKEKKIVEKNYQLDDNKAGHQLLKEQLLHQVKQGFKVICGLESTGGYELNWARAIKELSVKETNVEIYKLNARGVKHQLQSELRRTITDGVSAEGIAIYLINNYAVKKEDWQKSLQKATALSSRQMFCKLIVSQQKHQTAKYNQLEKLVYQNFPELLQFCKNGIPKWVVRLLEKYPGLAAIKNSKLIGVDAIKGIIEQKAALVKELAKNSVGVAVKDEMTEAMLQTLASEIIHISKQVEELKDRLIKSGVNEEVQLLTSIKGVAEWTAIGILVHLTDVSLFKDADQLAAFFGVHPILKQSGDGKWGAKMSKQGNKTMRSVLYNAAANVVQHNPYFKNIYANQRAKGKTHRSAIGIIMHKLLRVIFGMLKNKTAFNAGVDLENQKKNSNSATNENAINITTRRYQELNTAAPISGRNYRKRKVVLEGCQALTNANTASPKNNLTLQT

SEQ ID NO: 333151 - protein, 314 aa, unidentified
MSPLVFVGIDVSQARLDIAVRPGASSSHPHNESAIAAVVEQLCALSPTLIVLEATGGMEIPLTSALATAGLPVVVVNPRQVRDFAKASGHLAKTDALDAQVLAQFAEVMRPQPRPLPDAETRALAAVLTRRRQLVEMLTAEKNRLLSAAAPIRKRVRVHIAWLERELDHTNTDLAEAIRHSPVWREKDDLLQSVPGVGPVLTSTLLASLPELGTLTNKQIAALVGVAPLNRDSGTLRGRRTVWGGRAQVRAVLYMGAIVAARFNPVIRTFYQRLLRAGKAKKVALTACMRKLLTILNAMLKHRTPWRVVEAQHA

SEQ ID NO: 333152 - protein, 474 aa, unidentified
MKENQRRCCGIDVHKNSVTVCVLAPVGGRHIETKRRKFRTFTRDLKQLRAWLKNCQVTEIAMESTGQYWRPLWNLLEGEFSKLLLVNPQHIKGLNGYKTDPKDAQWIADLLEGGKLRGSWVPPRPIRELRDLTRHRVNVLADLNRAKNRIEQMCQTGNIKVSSVATDLFGVSGRQMLKDLVEGEKDAGWMADCAKGKLQIKKRELTLALEGTFTPEQRWLLEKELGQIEFLESQVQTLEQEIEQRVVQFEEAVRRLVTIPGINRKTAWTIIAEIGVDLSAFADAKHLASWAGLCPGNRESAGKRMSGRTRKANRYVKRAMCQAGWAASHTKKTYLAAFYRRMAIRKGAPKAVMALAHHMITVVYQVLSRKEEYVEFGADYYDQRNKPKTVARLVARLARLGYEVDLKPQRAFPTQSAAEEGNPDGEPLPEEPERPQKRRGRPCKCIERGMICKHRTSAHVNTLTHQPLAAGKFS

SEQ ID NO: 333153 - protein, 300 aa, unidentified
MLTAEADKCKTKVVVNTAAGVQALLAWCAKHGAQPAQLHAILEPTGLYHEQAATALPQVRVSLVNPAQARDFAKALALRSKNDALDSYVLARYGQTLSPALWHPAPLHARQLRALLTRREALSKDLLRELNRKEKSQFSPSAPLVDGSIDKAIAFLREQIKQIERAIDQHIDNHPDLKQDCELLNSIPAIGPQAGNAILAVMHNRHIDSAQSLAAYLGVVPVQRQSGSSLNSCARLSKAGPSQVRATLYMAALVGTRHNPHIRALYQRLLKAGKSKKAALGAAMRKLVHLCFGVLKNRIP

SEQ ID NO: 333154 - protein, 391 aa, unidentified
MTNRYESVACGGMDVHYKFSTVTWRDELGGIVLRERLDHTDRSRLLDQMAGWPKGVPLVMEASFGWGWLSDVATGLGLEVCLSNCYKVEQMRKARGWVKTNKKDADLLSLLAFEVTPWWRVWRAPAAVRDRRERIRHRADLVAIQTETKNRIHAVFHRHGVFHEFSDLFGGKGRRFLLGLCHDGRHAGGVLSDGALEALRGQVSLLLHLRGELAFLARGLRANLERDALTKRLTGIPGIGLILSHVMRAEIGRIERFGGHRSLASYSLLAPRSSETGEPRPGRAPRGRHLGRQGNRTLKWAFIEAAHGAVRHGGKWRAMFDRYTDGGKKSRGRGYIKVARELVKVVYVVWAKGATYTETPPPRPGSRRRRRKAKRTSRSGTGQPCTAMVGA

SEQ ID NO: 333155 - protein, 323 aa, unidentified
MNKDIKYFGIDISHLVFDVTDSDGNYHQFKNKLSGFKKFAKLLNSNSHCVMEATGYYHYQLAYYLLENGIDVSVENPLSVKRFIQMRLSKIKTDKSDSKLICDYAQEVDLKLWKGNSKEVQECLQIVRTLSVYTKQRTMLKNKLHGESVLGEPSKAVLRSLKRSLKQLDKEMKTLEAKLLVLVKETHQDLFTRIKTIPGIGRKTAIMLIVLTGGFERFSSASELCSYAGLTPVIRQSGSSVKGRPRISKMGNQKLRNLLFMCSFTACKYNKACRDIYERIVAKGKSKKLALIAVCNKLLKQAFAIAKSGLIFDQEYKSTLVKN

SEQ ID NO: 333156 - protein, 328 aa, unidentified
MAYLGIDVSKSWLDVALLLSDQVLTAQFDNQRRGWHSLVNWLTKRLKDKSVHICLEATGRYGDDMSAYLYERGFKLSVVNPARIKGYATSRLSRNKTDQVDARLIAEFCQAQASNLPLWTPPDPAQHHLQALVRQLDDLDKMRQQERNRLQSGQTTETVLQRLKAHIAFLDAQIEAVKQEIEDHIDHHPDLKQQRDLIASIKGIGHLTAAKLLAEIPNIQAFDNPRQLVAFAGLNPRQYRSGSSIRGHSHISKIGCSAIRAALFMPAVVAKKTNPLMQPLVQRLHERGHCKMSIVVAVMRKLLHLVFGILKSGQPFDPNYLDQKAAIA

SEQ ID NO: 333157 - protein, 415 aa, unidentified
MAANLKLIGQRGIKEMNAVGIDVSKGKSTVAIMRPFGEVVAEPFEVSHTDVELRKLACFLEKLPGETRIVMEYTGSYWQPIAKVLHDSGLFVSVVNALLIYKYGNNSIRKGKTDKLDAVKIANYCLDRWTDLERYAPADQIRQTLKTCRRQYDQYIRLKVNLKNNLIALLDGTFPGLNTLFKSAPRDTDGHEKWIDFAAKFWHIECIYGSSEKAFTNQYQKWCARAGYRFSEEKAASIYAYAGSQVNTLPMTDAVKCLVTLAVSQLNTIIETISVIQHKMLSLAAQLPEYPVVMRMFGVGPVLGPQLMAEIGNVRRFDRKQSLVAFAGVDAPPCQSGTFESKNRHISKRGSPRLRKTLFQVMSTIIQHAPADDPVFQFLDRKRQEGKHYYVYMTAAANKFLRIYYGTVMAYLEKL

SEQ ID NO: 333158 - protein, 469 aa, unidentified
MQKYFLGADVSKGYTDFILLDSNKEVVIDSFQLDDTFQGHNELHDILNDFLDEHADARIYAGFESTGGYEDNWLYFLRKLKKDYPIEVTRLNPNFVSKTRRAELAGNVTDKISAKAIAYHLINTLPKIDFNRGDPYSNIRRTWTHLRMLKKQKTQLLNLFESSLYITHTQLISHCKEGVPEWVLKLVIEYPTADTLSRGHVSKISKIPYITEEKAKKLKQQAKTSVASASDDINAEMLKDLAENILSHTEKIKKWENKLINRCNLAEVKLLTTLPGIAEYTAVGLMLNIGSVEKFGHVKKLASYWGVHPEIRVSGDGRKEPGMSKKGRPVPRELLFTAVFSSIGSGNYIDELYQKYVQEKGKKEMSAIGILMHKLTRMIYGMLKNDTVFDPEIDRKNRAENKSQNTKNDDYDKKRRYQKFDPNAPISKRENKKRRERVETQGTYAPNTGSSTSPSSNNKVGNKIKESNQ

SEQ ID NO: 333159 - protein, 421 aa, unidentified
MSNSTLSKKLASVKPGTLFVGIDLALDRNVAVVLSERAEQLTRFGFPNERDGYDYFYRRLEAIQEQQQAPAVLVGMEPTNYFWKLLAADMEQHRPDYGYRLVNTYTVKKNREGAQLDRSKDDNRDAFTIGDLVRTGKYTETRLLHGAYAELRQYVTLYARLRRDVRRQKTLIRNVAGQLFPELPGVFEDLTGMTALAMLHNHAAAAVVRMMSQDAFIASVRLNLPGQRVQVAKLRRAHVLARRSVGLSDAVEALQLALRLHIEALAGLEQQLEEVCKALVDAFLALPESAYLLSVHGLGIITAATILSEIGDPSHYTNARQLVKLAGTQPVPNTSGRKSRSKTPMSHKGRPRLRTALFFAVMRLVQVDQAFARDYRHLQTREENPLTKMQALGALMNKLLRILWALMRHRSFYDPELQLAD

SEQ ID NO: 333160 - protein, 412 aa, unidentified
MTEETLTWFAGVDWGSERHQACLLDAVGTIVAERECSHSGTGLAELGDWLLSVAGVASAVAVAIEVPHGPVVDSLVDRGFVVHAINPKQLDRLRDRFSVAGAKDDRRDAYVLADGVRTDRRLFRRLHIADPRLIELRAWSRLAEELKEEQRRLSNRVGQQLWRYYPQIRKLTDDLAAPWFLELWTIAPTPAKARQLRKPTVERLLRQYRIRRVDADTVLCTLREPAIKVADGVAEAASIHLRSLIARLGVVNRELRAAEGQLEKLCMSLGETNAASGECLRRQDILILRSLPGIGRINLAALLCEASGPLGSRDYQALRTLCGAAPVTRRSGKSHIVVMRYAAHVRLRNTIYHWARVASQRDPKCRARYVAFRQRGHSHGRALRGVADRLLALTCVLLQRQTLFDPHFVRTE

SEQ ID NO: 333161 - protein, 408 aa, unidentified
METLHRRCAGLDVHQKEIVACRRSVSGRKVRSELARFPTTTRGLVDLSTWLSEATVTHVAMEATGVYWKPVWHVLCHDFKLILANASHIRNVPGRKSDANDATWIADLLAHGLIRASFVPPEPIQELRDLTRTRRELTREIVRHTQRIQATLEEANIKLTSVISDILGLSGRRILKAIVAGESDPRALAGLRHPRLACPHEELVAALDGRLRDHHRFLIGQHLKTIEQIETTIAEFDARLETALAPFRDATERLKGIPGVGDNVVQTLIAEIGADMSAFPTADHLVSWAGMCPRLDESAGRKRSKRLRKGAPWLKPVLVQAALSATKVKSSSMRARYLSLTPRLGHKKAIIAVAAAMLRIVYHMLKDGTFYQDLGPDYRRPKNPQRAANNLAKRIRALGFEVELKIAA

SEQ ID NO: 333162 - protein, 353 aa, unidentified
MKKVLKEVAGIDVAQKELVVSLGRLYENLDIEIISYKVFKNTDKGIKSLIDWVASHSDNADSVRYVMEATGVYHEKLAYSLDQSGFDLSIVLPNKISNYFRTLDINTITDKTASQAIMRFGLERKLDNWSRPKDVYRQLKQLTRERDQIVDQRSMVKNQLHAEKTEAMPNESSLKRIAERIKFLNKQEKEIKMDIATLLKDYPDIMERVKNICTIPGVGELTAVIVLAETNGFELIRNKKQLTGYAGLDVREKQSGTSVKGKPRISKKGNRHLRKSMHLPSLSSVKYNKSHRDLYARIVNKSGIKMKALIAVQRKMLELIFVIDKNKTKYENDYQQKRTLNANAESILLLTSL

SEQ ID NO: 333163 - protein, 312 aa, unidentified
MTNKNLFIGIDVGKDWLDFSIAGTNKIVRYGNHTDGISKLLEQIGLLEPKLIAVEASGGYESDFVNELLQTDHQIAVVNPTRVRALANARGLLAKTDQIDARNIATYAELIQPEPKQAREDLDIRIRALIIRREQLVDMRAAEGNRLGTCHETSKADIREHLDWLERQIGILDNEIKQLVKSSQKWTNQTELLETMPGVGFITAVTVTASMPELGELNRQKIAALAGLAPYNRDSGKKRGKRRIFGGRQSVRRVMYMAALSATKHNPIIKKFYERLIEKGKPFKVAITACMRKMITIMNVMVKHQSAWTCQG

SEQ ID NO: 333164 - protein, 353 aa, unidentified
MVYSPNEYDIFIGIDVDQKSFSFTVKNHDTMNNSHKIPADPENLYQHIRNRYNNKRVICAYEVGVTGYYLHDYLTSKDIRCLMVPPPSIPKASNDRTKNNRLDSERISQHLKNGDMLPIRVPDYDCRELRQLLRSREEYVNMRKVTKQRIKSLLLFAHLHTLLKDTTQYWSYLHIKRLKELPCSPATRQRLDLLLKDLEYARNQTLIILKELKTFSEQNAGLKRNIHYLRSIPGIGFITAITILANIGDIEQLRNPRELAAFTGLVPSEYSTGERISRGRITHLGNSILRSLLVEAAWANISKDARLRQFYDRIRAKHHPQVGARKAIVAVARKLTLIIYRVLKEQREYITNI

SEQ ID NO: 333165 - protein, 402 aa, unidentified
MNAVGIDVSKGKSMVAIMRPFGEIVSAPFEIKHTTSDINSLVELINSVEGESRIVMEHTGRYYEVLAHQLSEANLFVSAINPKLIKDFDNDSLRKVKSDKADAVKIARYALDKWQNLKQYNVMDELRNQLKTMNRQFSFYMKHKTAMKNNLIGILDQTYPGVNTYFDSPARSDGSQKWVDFASTYWHVDCVRKMSLNAFIDHYQNWCKRKKYNFSQSKAEEIYGKAKELVPVLPKDDITKLIIKQAVNQLNIASATVESLRTLMNETASQLPEYPVVMAMKGVGTSLGPQLMAEIGDVSRFTHKGAITAFAGVDPGVNESGSYEQKSVPTSKRGSSDLRKTLFQVMDVLIKTHPQDDPVYQFLDKKRAQGKPYYVYMTAGANKFLRIYYGRVKEYLSSLPES

SEQ ID NO: 333166 - protein, 465 aa, unidentified
MKNNRRRTGSPRRSSAVLDRINRDVAGIDCGSAEHYVAVPADRSPSPVQSFKTFTGDLLRLADWLVACRVTSVAMEATGVYWIPIYDILEARGLTVLLVNARHVKHVPGRKSDVSDCEWLRDLHSVGLLRGSFRPTEGIVALRTYLRHRHRVVESAGIYIQRMQKALVQMNVQLPLVVSDITGVTGLKILRDIGAGQHDPEHLAGHRDYRCRATRAEVVAALTGYYQPEHVFVLQQNLALFDACQIQLAACDRAIEAQLQRLNATQDVPPTPLPAPRVPRRPIDNDPVFDIRTPLHHLTGGIDLTQIDGIGPYSALKLIAEIGTDMTRWASEKHFTSWLTLAPKNKISGGRLLSARTEPSANRAAAILRMAAMTLGRGSTALGAFYRRLAGRIGKPQAITATARKLAVLVYRTLKGELVYRDPGAEAYDGQQRSRVLRRLRRTATTLGFDLVNRDTGEVLHAAPL

SEQ ID NO: 333167 - protein, 436 aa, unidentified
MRRERGSVGVVLPAAPVSERFRDEEGRVRIIGLDIHRAFAEAVAWEEGKLKRLGRVSMRRDVLSRFATTLSRSDIIVVEATGNAASVAAVISPHVNKVVIANPKQVRIIAYAKVKTDKIDAGVLAQLYASGFLPEVWIPDAPTQALRRQVTRRNQVVRQRSRLKNIIQSILHSHLIPACPHQDLCGPTGRAWLASQVVPEDERLAIERHLREFDRLGEDLKVIERDLARSALADDGVKRLMTIPGIDMVVALAMTAAIGTIGRFEKPEKLVSYLGLNPSVRQSGPGPAYHGRITKQGRGHARGMLVEAAWAAVRAPGPLRAFFLRVRARRGQHVAAVATARKLAVLIWHLLTKNESYVWSRPALHARKMRDLELKAGQRGMRGRKGSAQAYNIRSQREAERRWVEQAESAYKRFVAGWSPSGPKRVRTGASPGERQ

SEQ ID NO: 333168 - protein, 346 aa, unidentified
MTIVETTRPITGGVDTHLDVHVAAALDGNGGTLGVESFPTTTAGFAQLHAWLSTFGAVVRVGVEGTGAYGAGLARYLRGRDLEVIEVDRPNRQQRRRAGKSDTVDAVEAARAALSGRASGIAKTADGNAEAIRALLIAKRSGRDTRIMCLNQIRHLGFTAPDALRERLRGVPRRRLAHTAATLRPCSGTDVVTHATKLALQTLGRRVVDLEETTERIDQQLETLVRTTAPSLLALEGVGIDTAAILIVAAGDNPQRLHSEAAFAHLCGVAPIEASSGKTTRHRLNRGGNRQANHALWRIVFTRMRSDERTRKYVARRLAEGRSKPEIIRILKRYVAREVYKYLRHD

SEQ ID NO: 333169 - protein, 438 aa, unidentified
MSNKVFFNLDDLFISVGIDVGADFSWMSIALPNQQFVGKPYKILHNSIDSLTTAVSKIKEAEELYSLESRIFLESTGIYHYPLFCYLRDKGFNCSVINPIITKNSTNINIRKVHNDRFDSKKAALVGLKPDLKVSLMPSDLALNCRNLCREYYDLMDNRGAYVNKLQGELRMAFPQYLGIFSKVTINTSLTLLETYTSPSAFLEADKQEIIDIIKSTARFGLTYAQNKYNAIIQAATDANQFGYIIDSNIKRIRLYISFIRKYDEEINNILESLHELVDANEDADFVKQIHLIETFKGAGFLSAVSIMGEIGDFSAFSKPKQLFAYFGLDPAVKQSGKFEGTKVQMSKRGSAIARRVIHTLTLQSISISRNGEAKNPVLREYYLKKCDSKPKLVAMGAVSHKVCNMIFAILRDNKSFEIITPQEHIKQYNASKCDMAA

SEQ ID NO: 333170 - protein, 400 aa, unidentified
MHYCGIDIAKRKHEASVIGESGRALSRSFPLDNSADDAAKLFQFFSDNDITKEDVVIGMEATGHYWLPMYSFLTEKGYDVKVINPIQSDAFRKMYIRQTKNDSKDSYVIAQIMRFGEYHTTELAEEGVIALRQLSRYRLCLVESAGNCKRRIITLLDQVFPEYADLFSGIFGASSLELLETYPLPDEIMNVPTQQLADFLSKASKGRFKEEKARELKTVARGSFGIAFAKDAFCFQIKQLVAQLQFLEEQISDLEQEIDLLMQSTDSPITTITGIGSILGAAILGEIGDIHRFDDPSKLVAFAGLDVKVVQSGEFTGTQGKMTKRGSPFLRRALWLAATVAAFKDPTMAEYYGSLKQRGKHHYVAISAVARKLCNIIFAILSENKPYDPYYPKHNQIVAG

SEQ ID NO: 333171 - protein, 369 aa, unidentified
MAKSITYVGLDVHKDTIAVALAAAGLRGEVREHGKIPNAPGALRALAVKLAAAGRELRFCYEAGPCGYGVQRQLTEAGHECAVVAPSLIRRKPGERIKTDRRDAINLAKLHRAGELTPVWVPDQAHEAIRDLVRARQAAVRTLRQARQQLSGFLLRHGRHYHRPAWTQLHRRWLASLKFDQAVHHIVLEDCIAAVEAAMARRDRLETHIEAVLPEWSLAPVVEALQALRGVRLVAAATLVAELGDITRFTNPRQLMAYLGWVPSEHSSGRTRHQGGITKAGNGAARRMLIEAAWSYRFPARISRELLLRQERQVKPIRDIAWKAQERLCRRYRKLARAGQQPTVITAAIARELAGFIWAIAKQVQPMAT

SEQ ID NO: 333172 - protein, 389 aa, unidentified
MSATHVSESTTVTAPVLYVSFELSWGTWKLAFTTGSGRSPRIRTIAARSTARLVFEISTAKRRFALPDDAKILSCYEAGRDGFWLHRFLANAGVANVVVDSASIEVNRHKRRAKSDRLDALELLSMLIRWHNGEQTVWRTVRVPTVDDEDRRHLHRELIDLKAQRTEHSNRIQGLLAGLGLSLVVDKKLPDRLAQLRQWDGAPVPPALQQRLRREHERWQLVGRQIDELVAQRKQQIRADDNPEVKQVRQLLRLKGVGENGAWLLVREVFGWRQIRNRRELASLAGLTPTPYGSGESQREQGISKAGNRRVRWMMIELAWGWLRYQPASELSQWFRRRFGPGNTRMRKVGIVALARKLLVAFWKYVENDELPAGAEVVEKKILGLKRAS

SEQ ID NO: 333173 - protein, 664 aa, unidentified
MSRSCQNRRRAAARTATNQDAGGAVHAAAMPTEGPVPSTTDPKTSRSRAAPGDTPAATPVAIGVGIDTSRYGHHAIFLDADLQPAAPELKFVESAQGYQQLQSRLAALRHKHGPVHFHFRLDVAGSYADNLLAFLHGLPEPRTISCGDPQRNKNYRAAIFGHKKSDATEANATARYALTEKPKPMPVVAPAVQQLCQIASRLESQARHCTRVVNQLHNLLGRTFPELALLVKDLSAGWVLTLLDRYPTAAKLAAARSSSLEKIPYLPHEHIARLREQARTSIAALTGPVTEELVRELVGQLQDAHVRHKALEKLLVSAYRQLPEPNHLDSIIGFGEVTAAILTAKMVTTGRFVEPAKLTGYFGIYPVEASSGIDRDGQSRLPLRMVMSRRGNDLVRRYLWMAALSAAQHNPAVRPLYQRVRAKHPDQPGIAIGHAMRKLLHLALAVWQTGKPFDPEHYPWDQAAHLPGSQQPATAEPVAPSPTHEHTGPHAQAAGHKNPVTTPVRSVVTAACVPTSVTEAASAGNDSTRSVASEHPEATACDMPMSQDAQAEATALAWIDFAHLKTQLPLQRVLEHLNLLTDLRGRSSQRKGPCPVHAPSGKSRTFSVNLDKNLFQCFDPHCGSKGDVIDLWAALHKLSLRDAAADLIQTFNLEPASRTEKRHG

SEQ ID NO: 333174 - protein, 457 aa, unidentified
MREKSKRTKGIEEAHPFSGMSRIHPHAAGVDIGAIEIVACVAGDENTQIVKAFGNYTVDLQALAQWLKSYSIKTVAMESTGVYWIPLFEELERQGFECLLISSRSLRRVAGRKSDISDAQWIQTLHSYGLLEGSFRPQAELVALRTLLRHRSQLVEHRSPHIQHMQKSLLQMNVQLSQAVTDVTGMTGQKIIRAILAGERDPQTLAAMREPGCKKSAEEIGKALTGTWREEHLFVLKQSVMLYDFYTEQIQACDLEIERLYGLTRPDWESGEVAPVTKRKRNSHSKNIPQHPEEIRKHLKRISGVDLSAVDGFGVSLAQTVIMEVGTDMSKFPDEKHFCSWLGLAPKHEISGGKVLKKNTLKTKNRAGQAFRLAANSVKQAECMFGVFYRRLRARLGPAQATVATAHALARVVYRMLKYKVEYEPLSLNEYQKHYEEQQIRYMRKKAAKLGFQLVPT

SEQ ID NO: 333175 - protein, 399 aa, unidentified
MTHYIGVDISKDNFHFCILNHEAKTLSSGKLPMSLQGFSDFFNLLKTLSEPVVVMESSGRFHIPLYCFLVEKGIQTFILNPKIVHRFFEFVSANNPSKYDKKDAKILALFALNNPEFLKSYPENPELRSASRLIQKLKHELAEAKTQIKYALTVLFPEAEKHFNIYSHSFLNILLKYPSAKTLKKAKPNEISKIIKSSVPKGKTPSFSPDEVITLAKNSIGVDNPYLSQTLIFYIEKLFFLEPRIKKLEEMLIEKMDEDQQEQIKLISSIKGISSKLASLFLAEIRDVKRFSNAKKLIKFAGTDPVTKQSGKYKAKMSISKQGSSFLRNVLFQMAVGVVKWNFYFRSYFIRKKKNFGSYKKAMIAVVNKLIRVIYAICRKRTFFNPAFSKFPVLEVSHV

SEQ ID NO: 333176 - protein, 315 aa, unidentified
MAMRVTLEKPIIGVDVAKNELVIYHDQYDRLEAIPNTKVAITQWLKALASSCAIAIEATNVYHVLFADAAHEAGCDVYMVDGYQLSHYRKGVNIRAKTDAQDARLLARYLKNELDELRPWIPASPLYRQLLSLFRRRAALVQARTGLVQSWTNEPFLRTAFANQVNSMKRFEALVEKKIRDVLQEAGLMRQVNRCMKVEGIGFLTAARLVTSFQRGEFSAANAFIAFLGLDLRVSKSGQSDGPRRLTKRGDPEARRLLHNAAMSGSRTPAWKPFYEEQRKRGFSTTQALVMLSRKLARVVFALLKNQSEYQTKVA

SEQ ID NO: 333177 - protein, 409 aa, unidentified
MNVLYPRCAGLDVHKDSVVACVRLHDEGGTPQHVVETFGTTTTALLGLSDWLTGHGCTHVAMEATGVYWKPVWHLLEDSFALVLANAMHIRNVPGRKTDVNDATWIADLLAHGLIRASFVPPTAIQELRTLMRTRKQLVREKVQHVQRIQKTLEDANLKIASVISDVIGPSGRALLQALIAGETRAEALLAVTTGRLQAPRARLLEALSGRVRPQHRFLLRLHLDQIQSLEHAIETVDAEVGSTLEPFRERAAHLRTMPGISDVLAQVIVSEIGVDMSRFPTAAHLVSWAGLCPRNDESAGKRRSTRLRPGAPWLKTAMVQAAWAAARAKTGYPRAQFLRLRSRRGPKKAAVAVAASMLTAAYYIIRDNVDYRDLGADHFDRTDRTRTAHRLVRKLGDLGFHVELTEAA

SEQ ID NO: 333178 - protein, 320 aa, unidentified
MSKPSEEGFVGIDVSKTQLDVAVGQAGETWSAGNNETGIAQTVERLKALRPQLVVVESTGGLERRLLQTLQQAGIPFALVNPHRVREFAKSLGLWAKTDKIDARLLARFGAAIQPEPTHLPGEAEQLLSALIARRTQLIDFRTAELNRLASAHPAIQASIQLLLNQLAEQISLLDQQIQQLISQNEAFHNKDEILRSVPGIGPITSAILIADLPELGCLDRKKVAALVGVAPFNDDSGYRSGKRRTKGGRAAVRKVLYMAAISASRFNPVIKAFYEHLLKRGKLKKVALVACMRKLLTILNAMLCSHTPWRTNEFTLHRP

SEQ ID NO: 333179 - protein, 343 aa, unidentified
MQVITTIGLDIAKSVFQVHGVDADGQVVIRRQLKRRYVLAFFQKLRPCLVGIEACASSHHWSRELQALGHTVRLMPPAYVKPYVKRQKNDATDAEAICEAVTRANMRFVVTKTPEQQSCLVLHRTRHLFIRQQTSVINAIRAHLAEFGIVAPVGRNGVDALLAVVADLTDKRLPETARACLAALGVQLRVLKVQILKFDRQIMAWHRSNETSKRLDAIPGVGPALATALVASIGDPKAFRSGRDFSAWIGLVPKQHSSGGKDRLGSISKQGDRYLRSLFTIGALAVIRYAKIHGTKHRPWLTALLARRPTKVAAIALANKIARMAWAMMAKGERYKEPVALAA

SEQ ID NO: 333180 - protein, 350 aa, unidentified
MNNSVLNNSVSTFDPCGLEVSAQTLLVALGREGRAAARREFPNTPQGHQAVLGFLARWGRPVRVVMESTGLYGLDLARCLHQARVAVMVANPRAVRHFATALMQRSKTDLLDVEVLRQFAARLPFVAWRPPSAAAFKLVAVARRLEALTDMMAAEKNRRHAASLSAALPPLIRRDVERSIQTQQRALQRLTRAAEEFVLTDPALARRYELLLSIPGIATTSALHVLAELALLPEDLDVRQWVAHAGLDPREYTSGTSVHKKVRISKAGNRHLRRALYMPALVAIVHEPHLRAFYEHLLGRGKTKLQALVATMRKLLHAIFGMFKHHQLFDGARVYVLSSAQLTAVVQEVA

SEQ ID NO: 333181 - protein, 403 aa, unidentified
MVFVGIDWAEAHHDICVVDDDGQVLAKRRVPEGIEGVGKLHALIAEHAEDPAGVVVGIETDRGLLVGSLVAAGYKVYAINPLASSRYRDRHATSGAKSDPGDARVLADLVRTDRHKHRVLAGDSNLAGAVQILARAHQGLVWTRQRQVNQLRNALREFYPGALSAFEDLDASDALAILERAPTPIRGRALSQAKIISALREGGRERNLEAKAAQIQAQLRLPQPEAPTLLAEAYGHSVAATVAVIKQLNLQIAALEQELASSFETHPDAEIYLSLPGLGVVLGARAMAEFGDDRTRFLHPKARKSYAGTAPITRASGTRKVVLARVARNRRLADACYQWAFSALTRSEGARHRYDVLRARGQTHHQALRALANRLVGILHGCLVKRQPYSEHIAWSALVEVAA

SEQ ID NO: 333182 - protein, 384 aa, unidentified
MQRATNTATVSANTLHCALELSKKTWLLAIQFPDREQPSVYPVKGGDAGALMTKLIAARDRWAKVSGSPPSIVLCYEAGYDAFWLARFLKGHGIECLVLDPGSLEVNRRSRRVKTDRIDLKKLLRTLTAWCRGERHVCSVVRIPTIDEEDLRRSHRERSRLICERTAHINRIKGLLFAQGIRVGNISSKTLTLDKLVTGDGHRLPPRLAAEVEREIERLALVQKQIDKVECERDTAPAACKETEKKRHLLLQLKSIGPTNAALLSREVYYRHFDNQRQLGSFIGLTPSPFKSGDEEHCQGISRTGSGHVRAAMIEAAWLWVQHQPKSALTRWFNQRTAGQSKRVRKIMIVALARKLAIALWRFVELGLVPEGAILSPRVIAKAR

SEQ ID NO: 333183 - protein, 339 aa, unidentified
MKKRYMGVDLHRNCFTVYTRKEDGSGGSQEWSIRSLKAFAKTVKAKDEVAVEATGNVRLFCEALKGRGCRVVVVNPYQFQVISRSVKKTDEHDAKVLAEFLSKGLLPEVRMKDEVHARVASLAQTRDKLVKLRTTLKNKVNNLLAGRGILIGKESLSSEKGLTAVLVSAVSELERMELEILVGEIRHLNESIKKLEELLREQGKKLPGWKNVTSIKGIGDTGGSILLSTIGNIEDFADEGKLAAYFGIVPRVSNSNETERSGRITKRGCKLGRTVLVQCALIAARYSPYLQKYYRRIAACRGTGKAIIALARKFLGIIYKTLKNNWIFEDFPQFVLAKG

SEQ ID NO: 333184 - protein, 453 aa, unidentified
MPKTVPSNAQDLKRMNPRAAAIDIGATMHMAAVNPDADDVPIRAFGTFTHDLHDLAHWFKSCGVTSVAMESTGVYWIPAYEILEQHGFEVILVNARYAKNVPGRKTDVSDAAWLRQLHSYGLLRGSYRPNAQIATLRAYLRQRERLVEYAAAHTQHMQKALMEMNLQLHHVVSDITGVTGMRIIRAIVAGERDPEVLATLRDIRCHSSVETIRASLVGNDRDEHIFALSQSLDLYDFYQQKMLECDRKLEQAIATMAHNVEKPQSPLPKIRTKTKQPNTPSFDVRAALYGLVGTDLTQIHGLGSSLALKLIGECGTDLRAWPTAKHFTSWLCLAPGNKISGGRLLSSRTRRSSSRAAALLRLAATTIGRSDTALGAFYRRLAGRIGKQKAVTATARKIAVLFFNALRFGMAYRDPGAEAYDERHRGRVLANLQRRARALGYQLDPIPDAESVS

SEQ ID NO: 333185 - protein, 341 aa, unidentified
MEQATTIGLDIAKYVFQVHGADGAGHVLFRKRITRAKLLGFLASQTRCIVAMEACAGAHYWAREIAKLGHHVRLIAPAYVKPFIRRQKNDAADAEAICEAAQRPSMRFVPVKTEEQQANGIVFRARDLLVRQRTQCVNALRGHLMEYGYVFPKGITHVETLVALVEDLQSSLPDSVRVILKLLVDTFTALEAQITALDAEINQRSKSDPTARRLMTIPGVGPIASTAITALVPAAEGFPAGRDFAAWLGLTPLQKSTGGKQKLGAVSKRGERTIRRLLIIGASAVVQQASRRGAPKGSWLAQMLARKPKMLVTVALANKMARIIWALLVKGGTYRTPIAAA

SEQ ID NO: 333186 - protein, 347 aa, unidentified
MDTIGLDLHKRESQLCTLHADGRITEQRIVTSRERLMAVFAHRPSARILLEASTESEWVAQCLEGFGHEVIVADPNYAPMYATRTRRVKTDRRDARTLAEALRLGAYRPAHRVSAARRHVRAELAVREALVRARTRYIAIAKAFVRRDGLRVPSSESHLVAKRVAALEIPALLEAELAPLFAVLEPLNAQIVAAERRIAAVEQSDPSVALLATAPSVGPITASAVVATIDDVTRFRSAHQFEAFLGLVPGERSSGEKRRVGRITKAGNARARFLLVEAGWRILRSKSPETAALRGWARKIAVRRGNRIAVVALARRLAGVLYAMWRDNTPYNAAKLRVPQPLVSRAS

SEQ ID NO: 333187 - protein, 354 aa, unidentified
MDQISRIGMDTSKHIFQLHGVNAAEMPVLCKKLRRKDMVAFFEKLAPTVIALEACGASHYWARLLQSFRHTVKLIPPQLVKPYVKRGKNDAADAEALCEAMSRPTMRFVPVKTAEQQAALMLVGVRDRLIRNRTQLANAIRGYAAEFGLTAAKGMAHLGPLLDRIQADVTLPSLARDLFAAQAEELTELQARIDAVDAKLMVWHRTDECSQRLAKIPSVGPIGAMLLRMKTPQPELFQSGRQFAAWIGLTPKDHSTAGKATLGVITRAGDEALRSVLVVGATAVIPTCSTQRKGIALACRASQAQVAQVGRDRTGQQNGTHRAEDDDNRGDIQSDCRACRLGGFGPEINQPCLT

SEQ ID NO: 333188 - protein, 409 aa, unidentified
MDVFHERCAGLDVHKEVIFICVLIGRGSGYQKIKLKFGTFHHQLVEMRQKLVELGVTHVLMESTGVYWMPVYDALEGFVEIVVGNAQHIMNVPGRKTDESDAEWLAKLLRFGLVKPSFVPAREFRELRQLTRYRRAVVQTRASEQNRVEKHLQIAGVKLSSVASHVFGVSGTDMLNRIAKGTTDPGELAGLARGRLRKKMPQLRDAFAGSISEHTQHLIALQMEQMNRLESTIAQAELKIDEKVKPYEEILARIDAMPGLNLRSSIDVLAEIGTDMSPWATHRQIAAMAGLCPGNYISAGKRLKNRSRQGNPYLKSILVQAACSAINVDGSYYQAKFKALKKRRGHKRALVAIAHAMLVAIYHMIKKGEPYREIGAKVVSDHEHGRKKEYLIKQFQNLGYSVSLTPLTE

SEQ ID NO: 333189 - protein, 381 aa, unidentified
MSKGITWVGMDVHKKAINVAMILPDRKEYVEWQVSNEPRAVKRLAKKLVRMAPGEVRVCYEAGPCGFVLQRQLQAGAPLVCEVVAPSLIPTKAGERVKTDRKDARKLAQYFQSGLLTEVQPPSEEEEAVRDLCRCRERTKQDLTRSRHRVTKFLLRRNVFYRGPGNTWTRKHRAWLRGLRFGIAVDQMVFEEYLQAVEHLEERIKGLDEKIEAISKEDPYREPVGHLRCFRGIDTITAITVVAELYKFMRFNSPRQLMSYLGLVPSEYSSGDHYSRGSITKAGNSHVRRVLVEAAWNYRHHPAVGVALRKRRKGQPDWVIRIADHAQQRLCRRYRRLTAKGKPKNKAVVAVARELAGFIWSVLFETRMRGGAMTEPAQLSA

SEQ ID NO: 333190 - protein, 352 aa, unidentified
MMVLGADTHKRSHTIAAVSAATGEMRGEKTVAVGARGFAALLIWARGLDGGRVWALEDCRHVAGSFERFLIARGERVLRVPTKLMADSRRAARTRGKSDSIDAIAVARAALREGIDTLPAAQLDGPELDLRLLVDHRERLVRQRVGLNNTLQWHLHDLWPELELPGGALFSTKWSAKIGRRLARAEQTMRVRIARDELRRLRELTQSIRALEAEIAQLVARVAPQLLSEPGFGPLTAAKLVGEIAGAHRFSSDAKLARAAGIAPIPVSSGNTSRHRLDRGGNRQVNATIHRIAVTRLRCHAETQDYIARKRAEGKSTKDAIRCLKRHLTRRIWHLLQSQAPIPAKTLTPTIS

SEQ ID NO: 333191 - protein, 438 aa, unidentified
MQVVYSRCCGLDVHKDQVTACVLVFEGKSERQIRKKEFRTYWKELQRLKMWLYANKVGHVAMESTGVYWKPVWHVLEGHFPLLLANPYHMHNIPGRKTDQNDAEWIADLLAHGLLKASFVPPQPIQELRDLTRYRVKVMGEFNRVHNRMAKVLEDANIKLGSVASDILGVSGRQIIRALIAGEQRPEWLADKAVSSLRSKREELRLVLRGEVSEHHRYLLRELMDDLERIEAKIGRIEGEIVQRMAPYEKQLERLDTIPGVDWITAWTLLAELGDDMSAFPDAHHAASWAGLVPGSYESAGKRKSSRTRHGNRWLRRALSQSAWAVTHKKNCYLTANFYRRAARSGTKKAIIATAHEILIIAFHILRDGSVYQERGGDYFDRLNPERTQRRLTARLERLGWQVVLKPIENPSEPTAPPRKRGRPCKCAERRIDCKHRH

SEQ ID NO: 333192 - protein, 409 aa, unidentified
MDAILERCAGLDVHQETIVACVMYGPLDKRAKKEIRTFGTTTKELLQLQDWLTEYNCSDVAMESTGVYWKPIWNILEGSFHLWLANPQRIKNVPGRKTDMKDAVWIAQLLRCGLIEASFVPPEDIRDLRDLTRYRRKLLGDATAEKNRVHRILQDANIKLTTYVSDVFGVSGRALLDSLVNGEVLDPQQVEQMVKTSLKKKVPQLIEALNGRIRLHHRKMIQKHLNHLAYLEKEIEVLESDITQLLFPYQEAVDLLVTIPGIQKDAAAGILAEIGCDMTMFPSEGHLASWAGVSPGNNESAGKKKSTRTRNGNKGLKSILCQAAWAAAKAKNSRLSSFYHRLVKRRGPKKANMAVSHLLLRIIYQMLLRNQPYSELGWDYLPKKEKSLEYWVQRIKTLGYNVELQPDIA

SEQ ID NO: 333193 - protein, 312 aa, unidentified
MADMVRLAGIDVSKEKLDVHVTPSGESRTVSYDRRGLAGLRRWLVGLGVALVAVEASGGYEREVSEVLEEAGLIVHRLNPLRVRRFAQLKGRLAKTDSLDARTIAEFARAHPQERQLRRDPRRERLAEHLLVRRHTQEAIHDCINQLEHLRDGRLRRLVTARKASMDRTLAKLDRCLVELIAEHDDLAELSERLRSVPAVGPVLATTLIALLPELGSLTRRQVACLVGVAPFDRSSGRKIGAKSIQAGRVFVRNTLYMAAMVASQHNPVITAFAKRLAAKPGKVRLVACMRKLIVTLNAIVRDATQWQPRTA

SEQ ID NO: 333194 - protein, 402 aa, unidentified
MNCVGIDVSKGKSMIAVMRPFGEVVISPFEVQHTASELSELAKLLKSLDGETRVVMESTGNYHTPVAWLLHDAGLYVSVVNAMLVHDYGNNSLRRAKTDKKDAVKLANYGLDHWLTLPRYVPEEDTRLLLKNCYRQYQQYSKVQTMLKNNLISLLDAVFPEVNRLFNSSPRADGSEKWVDFVSTFWHCQCVSTLPLKSFSARYLKWCRKHGYYFSQEKAFEIHSKAQSCIGVMPRNETTKLLVQQAIAQLKATSAALAALKQEMQSLAASLPEYPVVMEMFGVGSTLGPQLMAEIGDVRRFHSKKALVAFAGIDAPPCQSGQMDIHSRRISKRGSAALRRTLFLVMGIYLQSAPLDEPVYQFMDKKRSEGKPYKVYMMASANKFLRIYYASVTAYLNTLARI

SEQ ID NO: 333195 - protein, 383 aa, unidentified
MSEYTTQVGMDVHARSVSCRALRPDTGECWSGTFRGEGFERAVLEWLRRLPQPVRCAYESGCTGFWLSRFLEGAGVACGVVAVSTMPRSPRDRRHKNDRRDAAVVLREMCNPASDVSYVWVPDPQTEGARDLARAADAAARDVRSARQRVSMLLLKHGFAWCERTPSGNLRKTWTREWRRWALSRDLGDALSNRALEMEFGAVERLEREAAGLAAAVAEEAGRPRWRPYVDALVRLKGVDVQTAFLACAEFGDFSRFRSGRAVSRWIGCTASESSSGEADRRRPRRRRAAPQHPRARRGRGLDAAPERAPEARAPGPRGVPRGRGDGRSRQRAAPAALRAPQGRRQARQRRQGGGRERDGALDLGDRPAGAARARRRLARGAR

SEQ ID NO: 333196 - protein, 365 aa, unidentified
MNCVGIDVSHGKSIIVVMRPFGEVVVSPFEVLHTDSELSKLAGLLKSLDGETRVVMESTGNYHAPVAWLLHDAGLYVSVVNAMLVHDYGNNSLKRAKTDKKDAVKLANCGLDHWLTLPRYVPEEDTRLMLKTCYRKYQQYSKVQTMLKNNLISLLDIAFPDANRLFTSPPRADGSEKWVDFVAAFWHCECVCNLSEKAFTAKYHKWCRKHRYKFCEDKTLDIYSSACGHFGVIPKTDTAKLLVEQAVFQIRATSTTLAALKQEMQSLAASLPEYPVVMGMFGIGPALGPPLMAEIGDVRRFHSKKSLVAFAGIDAPPYQSGQMDIRSRSISKRGSASLRRTLFLVMSVILQHAPMNEPVYQFMNK

SEQ ID NO: 333197 - protein, 345 aa, unidentified
MQTVTTIGLDIAKSVFQVHGVDAQGKVIVRRQLKRRCVLAFFQKLPPCLIGIEACASSHYWSRELQALGHTVRLMPPAYVKPYVKRQKNDCADAEAICEAVTRASMRFVATKTVEQQSCLMLHRTRHLLIRQQTAVINAIRAHFAEFGIVAPVGRTGVEELLKVASDGNDKRLPDVARVCIAALGAQLQMLKARILEFDRLIMAWHRSNQVSKRLDEVPGVGPALATALVGSIADPKAFRSGRDFSAWIGLVPKQHSSGGRERLGGISKQGDRYLRSLFVAGALAVIRYAKKRGSKHRPWLAALLARKPTKVAAIALVNKIARMAWAMMARGERYKQSVALVAAW

SEQ ID NO: 333198 - protein, 382 aa, unidentified
MLDQACSEQTPVATQNEMYAAIELSGVSWLVAIHVPHADKISRHQIESGNGTALIDLLDAIRERSERVLGREIAIYSCYEAGFDGFWLHRQLVTAGINNAVIDPASIQVNRRARRAKTDSLDVEALLRALMAWRRGEKRVCAMVRVPTVKEEDDRRISREREALIKERIRHVNRIKGLLATQGVRRYEPLRSRRQERLDALRTGDGRPPPPRLHAEISRSLRRLELVLEILREIEIVRDEEAAVSARTNGVVGRLMMLRSIGPEVATILHGEALHRTFDNRRQVAAYAGLTPSPWSSGTLQKEQGISKAGNPRLRRTMVELAWLWLRYQPGSRLSAWFRERVGDGKGRIKRIAIVALARKLLVALWRYIETGLVPEGCLMKV

SEQ ID NO: 333199 - protein, 366 aa, unidentified
MKKTSTVRVNGNMIFKGHKLTIGVDLGDRWSNYCVLDEAGEILLEQKLATTPEAMKQTFERMPRSLMAMETGTHSPWVSRLLKELGHEVLVAHAQRVELISKSTRKDDRHDARTLARLARIDPELLGPVRHRSAKAQIHLTVIRARAELVSARTGLVNAARGLVKSYGQRLPKCGTQQVSRELATELSAELREVLEPLLKEVESLNERIKEYDVRMEKIAREGYPQVELLKQVKGVGTQIALTYVLTIDDPHRFPKSREVGCFLGLRPGRRDSGQSQPQMHISKEGDPYLRTMLVQGAHYILGPFGEDSDLRRWGLRLAERGGKNAKKRAVVAVARKLAVLLHRLWVTGEVYEPLRNSHKAMRAVA

SEQ ID NO: 333200 - protein, 350 aa, unidentified
MIIIGCDYHPGFEQIAFVDTETGELQERRLQHREESEKFYRDLAAQGIKVRVGMEASGHARWFERLLSELQFELWIGDAAEISAKRVRKQKTDRQDAQLILRLMLKDDFPQIWVPSWENRDLRQLLWHRHRMVQARTRMMNQLQAVALNEGLRCKKKLWREAGRAQLEAFKLAPWASQRRTDLLELLDRLNPTIAKLTQAIDREVEKCPAARRLQTHPGVGPLTALAFVLIIGKADRFQCGKQIASYLGLVPLEKSSGNQRRLGHITKQGNSLLRFLLVEAAQVTVRSLPEWRSKYCHLTLRRGRKIAKVAMARKLAVHLYWMMRKEWDYEHLRKFGSYAGKPGHRDGVK

SEQ ID NO: 333201 - protein, 340 aa, unidentified
MEAIAVIGIDLAKSVFQVHGIDTQGQVVVRKRLSRAKLLPFFAKQPRCLIGMETCASANYWARELMGLGHEVRLMPPQYVKPYVKRSKNDASDAEAICEAVTRPTMRFVGVKSPEQQSVLMLHRTRSILTRQRTQIGNAIRAHLAEFGIVAPVGRQGLDRLIAVIGDEQDARVPIPARRCLAMLVEQHRLVLAHLLDTDRAIRADSRASELGRRLQEIPGVGPLVASALVATVSDPHVFKTGRGLSAWLGLVPRQNSSGGKERLGGITKAGDTYLRKMLFVGAMAVIRHAERYGTRRPWLTKLLSRRSPRVAAIALANRIGRTAWALMTSGERYREPVVA

SEQ ID NO: 333202 - protein, 312 aa, unidentified
MEFLHRPPLRCLGVDVAKDNLVAADGTRVITVANNRRGIQRLLKEMQPDFIICEPTGGYELMLLEGCLKAGLACHRADVMKLKAYIRSLGTLGKSDAIDAIHMAAYGHERWARLALWRAPDTDEVELQALVRRRADLVALRVAEQNRARAPGAKTIAASFKAMLAAITRQIDLLDRQIAALVQENLDLARRIRICTTVSGVGTITAASLIAQMPELGTLHRRQAAALAGTAPHPSESGNAKGRRRQRGGRPQVKTALFMPAMCAAQGKGQFAPFYKRLIENRKPPILAIAATMRKILVTINARLRDDNSQQS

SEQ ID NO: 333203 - protein, 405 aa, unidentified
MKQPATLHYAGIDWATRTHAVCVVDQTGAIRARFQVPNTGKSFAGLIKRLAKLQVAGVATERPDGPLVQAMVGQGLRVVVVTPRQVKALRSRYRAAGAKSDPADAYLLADVLRTDGHRLTALTHDSDPTKVLRALSRTRKDLQEARVAPCNQPTSQLERCFPGAIGLFAELHSAVAVAFLRRYPTGHAAARLTQAKLAAFLRRLHYPGRTPVGVLLGRIQAAPAAGISPGEAAGRAVCVLALLDAIQACARQERELEAEIVERLEVHADAATFTSLPKAGHGVRAAALLGELGDVRARFPDNDCLAALGGAAPVTITSGKRRVVKFRWAGDKKLRNALVDFADDSRHASPWAATVYADALARTGRHPHAVRILARAWIRVIWRIWQDRVAYDPAKHRGAVRLLAA

SEQ ID NO: 333204 - protein, 353 aa, unidentified
MISRVIEPVLEHGAPSAGSIRNPNSRSGRKVSPHSQGRVIEQPSSPSFVGIDVSKDRLDVHILPAGQAFAVARNGEGLDHLVTELRTRAPTLIVLEATGGFEVTVAAVLAGAGLPLAVVNPRQIRDFARATGRLAKTDALDAQIIALFAERIRPEPRPIADAESQVLAELVARRRQVVEMIGMEANRLRQARSPRVRRTIEATRKTLEAQLVELDKDIDDSVRGSPVWRAADDLLTSVPGFGGITARTLIADLPELGRLDRRRIAALVGVAPVNRDSGQMRGHRAIAGGRTAVRNALYMAALSAVRWNPVIKAHYTRIVATGRPKKVALVACMRHLLTILNAIIKTASPWKTA

SEQ ID NO: 333205 - protein, 378 aa, unidentified
MRLYTQQHQFYCGIDVHARTMYLCILNRDGEILVHRNMPAGPAPFLKASAPYREDVVVCVACLFTWYWLADLCAREGLPFVLGHALSMKAIHGGTATNDKIDAQKIAVLRRGGMLPQAYVYPAEMRATRDLLRRRLPLTRKRAELLAHIQHTNSQDNLPEIGKKIASKANRAGVAARFPEPAVQKSVEMDLALIEFYAQLLRDVALTIVQTAKQHDAQTFYRLQSVPGIGKILRCVLLYEMHEITRFPRVQDFVSSCRLVKCAKESAGKRYGTSGAKIGNSYLKWAVSEAAVLFLRHNPVGQQSLARLEKKHGQGKALTVLAHTLARAVYDMVRRDTACDMHKFLNGERSGVSEPTASLDLSGICLRMMLWKALTLRR

SEQ ID NO: 333206 - protein, 343 aa, unidentified
MQIRSVGIDLGKTTFHLVALGDNGKVLLKKKFTQKQLIAFTANMQTSLIGMEACSGSHFLGRALREQGHDVKLIPAQFVKPFVKSNKNDFIDAEAIAEAVERENMRFVPIKTDDQLDLQALHRVRDRLMARRTSLINQIRAFLLERGIVFAKSPIRLREALPEVLENVNENLTPRMRNLVAMLWSEWKDLELQIAEMNDEVERIASSDEACRRLRQIPGIGPLVATTIVASIGNGAAFRKGREFAAWMGLLPKQHSTGGKARLYGISKRGNSYLRKILIHGARAVVLRSKRDRIAMGAWMTSLETRAPRNVLIVATAHKLARIAWAVLSSGQDYRAVPEALTV

SEQ ID NO: 333207 - protein, 470 aa, unidentified
MEDYRASRRPLLRHLIEQKPQEGHYISLMDSRAKGRQHKKELVKAMNSPSDQASGGWLENRGFGALDWASQKHSVVVVDPKGKVLEDFEIDHSALGWKKFRERMKPYGSIPFAIETSQGAAVEQLLEAGMQVYPLNPKSAQAYRQRKAPSGVKDDQLDAWSFADALRVDGQNWKPLRPEDFLIKELRLLCRDEVGLIEQRTAFINQLRHALAEYYPTALEAFEDLGAMSAWMFLQRFPTPQLLEKAGKRQWEKFLHSRHLWRNESGPRRMELFAKATEFCGSEPTANAKSMLALSLVKMLFALDNQLAEYRKRIEELFESHPDHDLFGSLPGAGPKLAPRLLGEIGDDRERFDGDAQNLQCLAGTAPVTKRSGKHRECHQRWACNKYLRYAVHLFSEHTITRCAWAEIYYKAHRTKDHSHARALRCLGQRWLKIIHKMWMDRTPYNAELHHLNQVKHGSWVFQIKTVNCK

SEQ ID NO: 333208 - protein, 343 aa, unidentified
MQPATHILGIDIAKDKFDVNLRRLEASDSRWAATFPNNPKGFKALHPWLVQHGPRFSHQVHACLESTSRYGDALAQFLHQEDYQVSLVNPRRTRHYADSQLTRTVNDTIDARLIADFCAAERSTLSLWEPLSPEHRQLRDLTRARQALVDERERFANMLETASGLARKAFLKQVRQLDRQVKDLDRAIQQFVRLVPQLHQQVALADSVTGVGPITAATVIAELPPIEKIPQAAQAVALFGLDPIKKTSGSSVNTPARLSRMGSRHGRKALYMPALVALRWNPIIRQLGQRLQNKGRTGKYVVVAAMRKLLRLIYGVIKQGRPFDPNWSAPAQRDPQAQTPVLA

SEQ ID NO: 333209 - protein, 397 aa, unidentified
MLVQSSQRSYCPTEFNLFIGMDVDKKSIDLTCADFRQIIRSVHIPNDAEHLVRYVRRHFPDQKVLFAYEAGPTGFGLFDGLAAGGFACVISPPSMIPMAPGQRVKTNRLDSKKITEALRAGQLKSIHVPSPTYRHLRHLTKIRDLVARQIAGHKCRIKALLLYEGIPFPDAAPKSHHWSRSVIVQLQKLPCSGAVRFRLDRLLEALEFQRQQYLKITREIRIFCRQDPELSRCLSYLTSIPGIGQIVAPHLLARIGSWQNLQEHRVDELAGLLGLVPTEHSTGDRVHRGSITHGGDGRLRSKLIQSAWTAIRQDPELREFYRSVCRRHPQHLAARKAIVAVARKLTTRIFAVLKEQRPFVVRPVIHSRPLLPGEIGPRERLDASQKKEDGNLPSFDS

SEQ ID NO: 333210 - protein, 347 aa, unidentified
MEYFAGLDVSLETVNVCIVNAAGDILLEKKIAAEPAAIIHLLKSFGSPFKRIGLEVGPTSSWLYGELRAAGYGAVCLECRHVKAGLSAMRNKTDRNDARGIAQLVRLGWFRQVHVKSEEAQRTRMLLVNRQQLLTKALDIENSVRGSLKVFGLRIGVVARRGFEARVLELVADDPIVLAVTKPMLRVRRALLEEFERLDRLCQQLARRDPVCRRLMTVPGVGVVVALTYRTGVDAPERFSKSRDVGAHFGLTPKRYSSGQTDYDGRISRCGDEMVRTALYQAANVLLHHGRWSSLRSWAMRIAKRGSVKGAKVALARRLAVVMHRMWTDGTDFRWSDTSRMTAPTAA

SEQ ID NO: 333211 - protein, 423 aa, unidentified
MEVMHERVAGLDVHKETVVCCVRIVAGGKVSRECRSFETTTAGLEALLAWLTQSGCTHVAMEATGVYWKPVWNILSDGKFELILANAAHIKNVPGRKTDVSDAAWIADLAAFGLIKASFVPEEAIQDLRSLMRARKQLVREQTRHIQRIQKTLEEANIKLDSVISDIMGVSGRRMIEAMIQGVRSPQKLALLADRRIKASPKALYDALHGRLTDHHRFMLRLHLGQYDALASSIAEIDGQVDEAIARIDEEAAAGRGSFRELTALLDTIPGIASLAATSILAEIGTDMSRFPTAGHLVSWAGLSPGQNESAGKRKSSRLRKGAPWLKTLLVQCAWAAIKKKDSYYRAQFNRLKARRGPKKAICAVAASMLTAIYHMLKDGVEHNDLGAGHFDRRPAVIKANRLVAQLAKLGFKVELQPQAEAA

SEQ ID NO: 333212 - protein, 312 aa, unidentified
MPQNADHVGCDVSKDWIDVMVLGRGERFRVGNDESGRAEVVERLLALAPAAIGVEASGGYERALIRALLGAGLPARQVNPYQLRRFAQALGIKAKSDRLDAEVIARFVATLPTRPAVRAPEIERLAELVLARQQLCEDKVRIENQAEHARAVEVERLCRRRLRALALEIALLDKRIAALVAADPVLAARDRLLRSAPGVGPVFSHTLIALMPELGQLTPAEAAALLGVAPFDHDSGKLKGQRCIWGGRMRVRNVAYMAAMSAMRHNPVLAETRQRLKAKGKAAKVVIVAVMRRLITILNAMLRDGTPWRAEA

SEQ ID NO: 333213 - protein, 456 aa, unidentified
MKASVFARPEERRINQNLKMNQTKLNRKTTVASGRGDFAALIGLDWASQRHALCLYDCATGKRENSTLEHTPEAIAQWAQGLEQRFGGKKIALCLEQAKGPLIYALLEYPFFVLYPVNPATAARYRQAFKTSRAKDDPADAQVCLELLLHHREKLTPWLANDGATRELSRLLEARRSLIDLRTLLTNMLRDALKSYYPQALELAGQDLFAPLGCQFLLKWPSLQELQKARTESVRKFYYAHNCRRMDVIEKRLQGIAQMKPLCRDRALIEPALIQVKMLARQLLQLGTALKEYDSRIEHLFAQYQDASIWQSFPGAGPTLAPRLCCAFGSERSRYQSALSIQEYSGIAPVQEKSGKNQHWIHRRWARPHFVHQSFFEYASQSALHCPWAKLFLKEQIARGKTYPTAVRALAFKWQRIMFVCWRDRVLYHETTYLQSLKHRGSHLARKLDQELPKAA

SEQ ID NO: 333214 - protein, 355 aa, unidentified
MNNEKYIGLDVHQATISVAVMDSMGKVIMESILETKVATILEFVAGLRGTLSVTFEEGTWAAWLYDLLKPHVDELVVCNPRKNALLKDGNKSDRIDARKLADRLRLNDLKPVYHGETGVRMLRELARSYLNLVKDQTRVMNRLKAMYRSWAIPCAGRDVYYARHRAEWLGKIREAGVRRRAEHLYQQLDMLQHLRQQARRELLAESRQHPITAKLRQIPSLGPIRSALAVALIRTPHRFRTRRQLWAYSGLALETRTSGEYRCVEGQIRRSKKQVSIRGLNKDHNHDLKGLFKAAATRASVQPGPFQDFYQRSLAKGIKPTVVRLTLARKIAAIALTLWKKGENFDADKLKSQAA

SEQ ID NO: 333215 - protein, 339 aa, unidentified
MSIIGCDLHSRYQVVALVDTGTGEMVTRRLEHENGEARAFYATLPKPSLIGIEATGYTHWFERLVAELGHELWVGDPAEIRARAVRRQKTDTRDAEHLLDLLLSKRFPRLWVPTPEERDARQLLKHRNKLVRMQTSVRNQLHFLAMSQGVCRKQKLWSARGRAELEGLSLGTWASRRRKELLETLDQLGPRIAEIDQAVKTEAERRPEAVELMKHKGVGPVTALAFVLTIGPVERFAHSRALVSYLGLNPSEDSSGGHQRLGHISKQGNAMLRWLLVEAGHSAAQFDPELRRKYRRLVFRRGRNVAKVALARHLAVRLYWTLRQASSATPPVRTPGSPK

SEQ ID NO: 333216 - protein, 403 aa, unidentified
MSVFAPGVARPTLVFRGLLGRAEPILITGGRAVSHYREAFVGIDVAKLKNAIAVAEFGRDGEIRYFGEVEASDVSMRRVIQRIAAKFDRVHFCYEAGPTGYGLYRLIKSLGHECIVVAPSLIPRKPGDRVKTNRRDALALARLLRAGELTAVWVPDEGHEAMRDLVRARTAAVETLRVHRQQISAFMLKHGRIYPRKKGWTMRYLIWLQEQRFDHPAHQIALQEMVDAVRVSRERVDRLEKVIEEFVPNWSLAPIVQALQALRGVDLVVAVTFATEIGDVSRFESPRQLMGYLGLVPGERSTGETTKRSGITKAGNSRVRTLLVESAWTYRFPPRIGSKKLYKLEKVPPSVREIAWKAQSRLSARYRLLTSRGKKSTVVCTAIARELAGFMWAVSKEALQPRL

SEQ ID NO: 333217 - protein, 428 aa, unidentified
MKNRNIQKLEAITPGTLVVGVDIAKETQWARFVDYRGLELRKVLKFKNHKNDFDSILASIEAICKNRRLDDVIVGMEPTGHYWKPLANYLLKNKVNVVMVNPYHTKRAKELDDNSQTKSDKKDALTIARLVRDGRYYEVYMPQDIFAELRVLSNSRISLMKRSNALKNTITAVMDEYFPEIVTVFKNPLKGKAAMQILKSCPFPSLILELGIEGVLFEIKKAVKKTVGRKKAQQLVETAKNSVGVGYGLVSAKLKLGLMIEELELLIKQLEQLEKAMEKALADTGYGEIILGIPGIGVVTAASFLGEIGDPRRFDHPRQICKMAGYNLIEDSSGKNKSGTKISKRGRKNLRSVLYQMARTMVAVNAEMKELYQYLKTRPNNPLKKKQALVVISKKIVTIIYSLVKKQTGYQAELALGEFRKNQIKQVA

SEQ ID NO: 333218 - protein, 346 aa, unidentified
MEHYVGLDVSLKLTAICIVDRTGKIQREGVVHSDPEAIAAFIKSNAPHVARIGLETGATSTWLWTELNKLGLPVICIDARHAKAALKMQINKSDRNDAIGIARIMQCGWYKEVRVKDLDSHAIKALLVSRALLVKIKRDLENQVRGLLKNLGLVIGPAKMNTFALRAAELTEDRPELAAAVTPLLNARVAIQQQIADLDRKVMKLARNNAQVQQFMTAPGIGPVTALCFLATIDDPRRFRRSRSVGAYVGLTTRRYASGEIDWTGRISKCGDKMLRSYLYEAANVLLTRVAKWSALKAWGIRLAKRSGLRKAKVAVARKLAVILHRMWIDGTEFKWSSKETADQTA

SEQ ID NO: 333219 - protein, 347 aa, unidentified
MKILALDLGKYKTVGCAYESESGAHQFERTFTTPAALERLVQEVQPDRVVIEVCNIAGWVCDLMGRLGVEVQVANTSDDAWRWRKVKQKDDRRDALKAARLSAVNQVREVYIPQITVREWRALITYRRHLVGRRTKIKNHIRDLLVREGQILARGSRCWNKLGQELLNSMARPLGEVGPAELWRGELWEELQQLQMVQARIASVEEKLNTIAEADKRVQLLRTIPGVGPRLAEAIVALLDQPQRFRKASQVSGYVGMVPKAFDSGESERRGHITRQGSGLVRSLLVEVAWAGLRHNAWMRQTYQRLSGGGKKVRKKIAIVAVGRKLLVRCWAMLRDNCAWDWQPQIT

SEQ ID NO: 333220 - protein, 415 aa, unidentified
MALKIVYQICCGIDVHKTFVVACIASTNKQGVTTYKRHRFSTFTQGLKELLQWLLDNHCKDVCMESTGKYWIPIYNVLEKDCNIVLAHPKYVKAIRGKKTDKKDAKWIADLFKHDLVAGSFMPPADIRQLRDLMRYRFKLTCFKSSEKNRYQNCLTVSNIQLGNVVSDTFGKSSQKIIAKILENPDDTSFDIGSLIHGSMKDKLPELELAIDGYITPEQAAKLKIIKEHFDNLEARKAELEELILALANPYQQEISIILTAPGFKNTFTAIGIISEIGTNMEAFPSAKHLCSWAGLTPTNNESAGKKKSVRVSKAGCYIKPLLVQCANAAIKSKKHPEIRDRYLRIKKRRGHKKAIIAIARMLLTALYHMLKNGENYNSDLYQKSDILPTTREITVEQAILMAQFQGFRIKSATE

SEQ ID NO: 333221 - protein, 370 aa, unidentified
MKPSTSYVGLDVHKSTISVAVADEGRGGEVRSYGVVENRVDLLIRLAERLSRRGQHLHFCYEAGPCGYGLYRLLSGLGHDCTVVAPSLIPKKPGERVKTNRRDATMLARLHRAGELTAVWVPDAAHEAMRDLVRARATAARGLTKARQHLSGFLLRHGKIYVGPRAWTVAYRHWLTTVRFAHPAQQIVLQDYIHAVDDAEKRIARLVAQIELLLEQWSMAPVVAAIQAMRGVAFINAVTIVAEIGDFARFTNPRQLMAYVGLVPSEHSSGDNVRRGGITKAGNSQARRALIEGAWTYRMQARVSRKLHDRIAGLPKSIRDTAWRAQVRLCARYRRLVAAGKKTVVVTTAIAREMIGFIWAIARQVELRSA

SEQ ID NO: 333222 - protein, 369 aa, unidentified
MQDTTFIGLDVHKATISVAVARGERGGEVRNWGSVPHRADHIRKLVEKLAAGGARLQFCYEAGPCGYGLHRQLVEMGHDCVVVAPSLIPTKAGDRVKTDRRDAVMLAKLHRAGELTAVWVPDTAHEAMRDLIRARATAMRVTGKARQHLQGFLLRHGRVYPGKKGWTGAYRRWLATVHFQYPAQQIVFQDYVDAASDAEARVERLTGQIADLLPSWTLAPVVEAIQAMRGVAFIVAVTVVAEVGDFQRFDTPRQLMAYLGLTPSEHSSGASVRRGGITKAGSGLARRALIEGAWSYRMQARVSPKLHARLEALPRAARDIAWKGQLRMCLRYRHLVAAGKAKVVVITAIAREMVGFIWAIARAVSTVPV

SEQ ID NO: 333223 - protein, 479 aa, unidentified
MKSKRQEKTNNQPTQHHWHEMNRKQRREMMRKIQSEDLRLEVIHPDAAGIDIGNESHYAAVPPGRDSQPVRRFGCTTAELKAMAAWLRHCGICTVAMQSTGVYWVAVFDILEETGFEVFLVNARDTKNLPGRKSDVQESQWLMKLHPYGLLRNSFRPSREIRVMRTYWRQRNDLVQSASRHILRIQKALTQMNLQLANVLTDISGATGQAIIKAILAGERNPHKLAEFRDPRVKASEEQIAQSLEGNWQPDLLFLLKQEQDGYEFCQRQIAECDRQLAQYLQQREDRSQGAPLPEEKRKGRLKKKRGNKPRFDLRKGLFRMTGTDLTRIDGIDVMTATTVISEAGYDMSKWKTENHFVSWLRLCPDNRISGGKVIGKGRLPTNNPISIALKMAATTLRQSKTYLGAQFRRLRTRLGAPIAIKAMAAKLARLVYRMLRYGMKYVDQGAAFYEAQHRQVQIKQLKWKAAKLGFQIVQAPAA

SEQ ID NO: 333224 - protein, 355 aa, unidentified
MKKMINYTAKDKEIFVGLEDSKRTWKLCIRSERIVIQETTMPAQYDVLKAYFHNGYPGCKIKVIYEAGFKGFTLHDRLAADGIECVVTPPHTVTQEKNSRVKCDKIDARRLAINLENGDFKTCYVPDKELREDRQASRMLIQVQKDIVRQKNRIRKFLDFHGYEEEFPAGAWYDRDYRRLEELSISEPLQYCLTLSLNMLRHLEEIKKKLVCRLKELCKKPRYEKTFNLFESAPGVGWFTAIRLVLEWGTDIAKRFSSEKKIAAFTGLTSSEYSTGDTIRRGRITGQGNRTVRAWLVESAWTAYKKDPVLLHKFQDIYSRTSSKKKAIVAVARKLAVRLRTLVVTNTPYQLAVVR

SEQ ID NO: 333225 - protein, 345 aa, unidentified
MEPMYYIGLDVHKQKISYCVKDSGGKLSAEGWIPATRHDLDCWMKNLPQPWSAAMEATMFTGWIYDHLKPHAAMLKVAHPLMLRAIAAAKKKNDRIDASKICDCLRCDFLPESYMAPTAIRERRRTLRYRNLLVRQMVQMKNKVGMLLMEAGVSYNKQKLHKAGYFRELLASNPDINAGLRSLLCQCREMVVRLGKMETALIRSLQQDRLLAERVERLMSIPAVGPITALTWALEVGEVQRFSSIKKAISYCGLCGAEKSSGDTVQRTPLSKQRNKHLQTTLIEAAKMAPRYSPTLALLYDREKQRGNANRATLTVARKLVAYLLAVDRGQTHFLVLDRDSCAAA

SEQ ID NO: 333226 - protein, 357 aa, unidentified
MVQSKTLDFSGTTIFCGIDVHKKNWRINIQDSEFELEDFSQNPDAVLLHSHLIRKYPGAKYKVCYEAGFSGFSAQRWLSQNGVDCLVLNAADVATNHKEKRQKNDKIDARKLCEYLQTKKVRSVFIPEVHWEHSRSLVRLRERIVSNQTRCKNRVWQLLHFSGLSLPKGYEAGQYWSKNFINELECLDCGSDVLKTTLKLYIRDFQQTRALLLEATKNIRELCKSPLYEKDIILIKSIPGIGAINAAIILFELQDVTRFKHFDHLCSYVGLVPDTSDSGDKKIAKGITSRSNHNLRTALVESSWTVIRKDPALLMKYKEYCKRMDKNKAIIRVAKHLLSRINYVLKNKKEYVSGVVA

SEQ ID NO: 333227 - protein, 357 aa, unidentified
MRKVQDFIIKGKEIFVGLEDAKKTWKLCVRSDRRVIHEPSMEAKYEVLKSYFLNKFPECKIHVMYEAGFSGFGLHDELERDGYHCIVTPPHTVTTEKVQKVKNDRVDCRRLSKNLESGDYKSCAVPSKQLREDRQISRLYGQIHGNIVATKNRIRRTLEFHGLDRHFPSGAWRDVQYKTLSEQIKALGVSASLLFCFKKMLAELEQLRKHKADILKELRKLAKNERYKSSVSIIGSVPGIGILTAIRLALEWGDVRRFKRKENFSSFLGLIPGEYSSGEQERKGHITKQGNRSVRKWLVESAWICIRKDPVMLGKYNTIVHNTGSVKKAIVAVARKLALRIRSLLIMNKPYLVGVIE

SEQ ID NO: 333228 - protein, 459 aa, unidentified
MFSIRSNATRIKRFRELKENLRTNQDRLLVGIDIAKAQHVAQVRLAHTQILDKSLTIPNTQAGFETFWTHLQRRQQETRISAIVCAVEPTGTYHQALATFLEGHGVDVVLVSNTVAHHNRRTLDGTWGKSDPKDAHNLGDLLERGHVLFYSLPDERVTTLRRLVRLLRHARVELGACKARFRNTLLPALGPAGEPPPPAVAAALPAPLLLLLPTAQRRALPVTGAALPPALAFELTDLAARLVSVRTRIARIEADLVTVATPFPAYQLLLSLPGVGPTLAAILLAELGDITWYTQVSQFRKLAGLDIQRVASGQWAGTARISRCGRPLLRWALYQAALGAARTPFWRARREALIAKRQGDRFAFLKANIELAAKLLRLVWGVWRSGQPYDPARVDGAPAARPAIASPKARAGRRGTPPSGKGLGEIVEPRGSQAGRVSETHALRPNSGTSWRVQRASAR

SEQ ID NO: 333229 - protein, 342 aa, unidentified
MISAPVPSYDLFVGIDIAAATASVAWMTSKQTASRAITIDQTPQGFSLLQQRLLATGHPAKTVLIVMEATGSYWMNLATTLTQAGFAVSVINPAQAHHFAKALLKRAKTDAIDAQTLAQLASLLQPTVWDPPPAIFVELYQRLTERESLMQMRQQLRNQLHALTQCPTVIASVRIRMEHLIEALTKQMIEVETELNAVLALDPSWTASATRLQTITGIGPLTAIWLLVTTLNFTLCDTVEELTAYAGLAPHPYQSGISVHGRACIGHTGNAALRTAVYLATLSAAQYNPVIKTFYDRLRAAGKPMKVARCAAARKLLHIAFAVVTNKQDFDPLYAAKPRKAA

SEQ ID NO: 333230 - protein, 345 aa, unidentified
MQPMYYIGLDVHKRKISYCVKDGSGRIHAEGSISATRLDLDHWMRSLPQPWSAAMEATMFTGWIYDHLQPHAAVLKVAHPLMLRAIAVAKKKNDRIDASKICDCLRCDFLPESHMASTAIRERRRTLRYRNLLVRQMVQMKIKISALLMEAGVSYNKQRLHKAGYFRELLATNPDIDEGLCSLLRLCRETVVRLGKNESALVRSLERDSLLVERIERLMTIPAVGPITALTWALEVGDVQRFSSIKKAISYCGLCGAEKSSGNTVQRTPLSKQRNKHLQTTLIEAAKMAPRNSPELAMLYDKEKQKGNANRATLAVARKLVAYLMAVDRGQRNFQIAETSSSIAA

SEQ ID NO: 333231 - protein, 428 aa, unidentified
MLGVGIDWAEEFHLVALGRPGEGVIEVVRVGHNPPAVDALVNRIVALECDPAQVRVVIETRHGLLVDRLVDAGFVVVPVNPDLISRRRGPAKKKDDAEDARIACLLALDRFAGLRPLIPHGPIAAELRAIARDDERAVRDERRLLNRLRADLLTVFPAAVTIAGKDMGAPRFLRMLQRWPTAEALGSVSRDELVEWCRAQRSGYGERFADRVAAALAAEQFCAPAHLVRAKVDTIRLATAQLLLLGAQRRAWQRRMSELLLGATPTHTGGDDHGQEHKPGQAFAGGEIYLSFPGLGTRLAARIAGEIGDHIEQFSTPNCLQCYAGAAPVTRRSGKRALVVAHRQACNRYLADAVPKWAFASLRRSGWAMEFYQGKRDRGNSHNAALRALGNRWLEVLWHCLHKGVRYQEDIHTANRNRAMSREPTQAA

SEQ ID NO: 333232 - protein, 338 aa, unidentified
MAILDVGIDLAKNVFAVHGVDEHGKPALVWPKVTRDQLHERVAALPPCTIGMEACSGAHHWARLFGDLGHTVRLMAPKFVAPYRLSGQRGKNDAADAAAICEAVQRPNRRFVPIKRVDPQARLTPHRTRQGFVEQRTATLDRIRGLLSEFGVVLPLKAATVRREAAAGLEALPGWARLAIGDLLDEVRRLDERVVEYDRHLAHMAREDERARRLMRLSGVGETTATALLATVGNGHDFRCGRQFAAWRGPVPGQYSSGGKARLGRITKTGDPYLRTLLILGARAVLALAKTKTDPISRWAAVLEQRRGYWKAVVAIAAKNARLAWAVLAKGEAFKMPA

SEQ ID NO: 333233 - protein, 408 aa, unidentified
MNTLYVGIDVSSKSNVVYLMLPNGDKHSNFSVANSHEGSTQLVKRILSALTSHSLDTVLIGLEATSIYGYNLVYFLREDATLAPFNRKIHVLNPKQVKKFHDAYNDLPKNDYVDSFVIADCLRFDRINKEVYMGDYRYKALQNLTRARFFAVQNLVKEKQRFMNVLFKKYSTMTQEKVFSDTFSTTALAVYDEFESAEALANMDLHELTDFIIEKGKNRFPDPDAVAKAIQKAARSSYRLPKTVNDSVNQVLSISITSMKALESQIKEFDKAIKAQMELLPNVLISIPGIGPVYSAGIMAEIGDINRFNSQAALAKYAGLAWKQHQSGGFESEVTRLIPSGNRFLKYYLCEAAFSLVRCDKEYSDFYHLKYKEVNRCQHKRALALTARKFVRLVFRLLKDNRLYCPAK

SEQ ID NO: 333234 - protein, 378 aa, unidentified
MFLHTSDELNTLVTYLKSLEGETRAVIECTGRYHEPVVKSLSEAGIFISAVNPKLIKGQKQNTLRKVKSDPADARKIAKYALDNWAELREYSSMDTTREQLKTLNSQFTFFMKQKVAAKTNLISLLDNTYPGVNKLFDSPTRDDGSEKWVDYAYSFGHVDCVHKIGLKAFTERYEAFCKKHHYNYQKNKPALLFEESKQLVAVFPKEKSYKLLIQQSIQQLRLASEHIEIIRKEMNGLASTLPEYETVMSMYGVGETYGPQLIAEIGDVSRFTHREAITAFAGVDPGVNESGQFKQRSNRASKNGSTRLRKTLFQVMSTYLQNKPVNEPVYQFLDRKRAEGKPYLVYMTAGANKFLRIYYGKVKECLRNLEQSQIEES

SEQ ID NO: 333235 - protein, 392 aa, unidentified
MYIVGIDIGKNHHEASIVSPEGKQIGRSLRFATTHKGADSLMSFIFKNIGNSPCVFGMEATGHYWYPIYSFLKAKGYTIYVINPIQSDSLRKMYIRQTKNDSIDSFLIAEVIRFGQFGTTSMADENILAMRQLCRYRDSVISSRTEIKLRIGTIMEQIFPEYEKQFSSLWVSTSMGILEKYLTPENIENAPIDELFEIIKDKSHNRLTRAKAISIKEAAADTFGIKIAQDAFSFQLKQLIDRMNFLDKQIEALDCQILEYYEKFDCYLHTIPGIGMIAAATILAEIGDINRFKSSSALVAFAGIDPTVRQSGEFSSTHNHMSKRGSPYLRHAIFLAATTCSFHNSPLNAYYKKKRDQGKHHLTATGAVARKLTSVIYAVLRDSKPYEPKSFC

SEQ ID NO: 333236 - protein, 401 aa, unidentified
MNAVGIDVSKGKSMVCVMRSFGEVVLEPFEVLHTAQNLNDLAGKLKALDGETRVVLEATGNYHKPVAFVLHNAGLFVSVVNPVLIHDYDNNSLRRVKTDKKDAVKIANYTLDKWTRLRQYLPEDEARLALKNCYRQYQQAVAIRTMLKNNLISSLDLTFPDANKLFSSPVKNNGCEKWVDFIGDFWHSECVSSLSANAFAKKYLKWCQKHGYVFTRSKSDEIYACAVNSASLPKSPTSKLLIQQQVAQLKAVSQSVAAFRQEMLRLSQQLPEFDTVMEMYGVGPSLGPQLMAEIGDVRRFSSKKSLIAFAGIEPQPNDSGKIMGNDKGISKVGSAVLRRTLFLIMTVILQTQPQDEPVFQFMNKKRSEGKPYKVYMMASANKFLRIYYARVKAVMDSECSQ

SEQ ID NO: 333237 - protein, 280 aa, unidentified
MSETTYAQIARVGVDLAKQVIQVHAVDVAGRRVVARMLKRDQFFAWCVELPVGCMVAMEACSSAHHWARKLRALGIDARLIAAHFVSPYRMEGRSGKNDATDAAAICEAASRPSMRFVPIKTCDQQGVMSLHRVREGLKEERTACINQIRGVLTEFGLVFGKCPKALRANLADTIEDASNDLTALARWVVQRAFEHWRELDEHLRWCDRQVGQHVRASPAAQRAAKIIGIGELGASALTAGVGDFKQFKSGHQFGAWLGMVPRQDSKRRQATLGRNHEAR

SEQ ID NO: 333238 - protein, 347 aa, unidentified
MNKVVAGMDLHGNNVVIGIMDMDGKRLASRKVECDLKEVVKFVAPFKNRLEKVAVESTFNWYWLVDGLQALQYPVVLANPAGIEQYSGIKHADDTNDAFFLADLLRLNILPTGYIYDARLRPMRDLLRRRLMLVHQRTALMLSFKSLYTRTTGQQMSLGRLKELEVKEAQKLYEHRANQLIAGMQIEHIDQLSQSIEKIEKAVLNSARELPCYARLTTLPGVGRILGMTITMEVGDIKRFASAGEFASYCRTVQAQRTSNSKKKGENNSKCGNKYLAWAFVEAANFARRSYPDCLAWFNRKAAKTSNVIATKALACKLAKVAWYVMTQGTDYQGQRMFGPSSEPMRR

SEQ ID NO: 333239 - protein, 339 aa, unidentified
MKITTIGLDIAKSVFHLYAVNEQGRCVRKKQLKRQQLLPYLAQLEPCVIAMEACGGANHWARELKVLGHELRLIAPQYVKPYVKGNKNDYNDAEAIAEAAQRPTMRFVPIKSVEQQDIQNLHCQRERIKKARTALVNQIRGLLAEYGIVINKGVAAVRKGLPDILEDAKNGLTPRSRELFADLLEELRLLDERFQHSQTRIEASNRGNEVCQRLDEILGVGPITASAAYAAAGDGKNFVNGRHFSAWIGLVPGQHSTGGKPTLLGISKRGNVYLRTLFIHGARAVLRHSATKTDRFSVWAQALLERRGHNRACVAVANKMARMAWVIMARGETYRPAMN

SEQ ID NO: 333240 - protein, 353 aa, unidentified
MDLYVGLDVGLEETSICVVDQDGRNVREAKVSTEPAAIRSALEGFADRFSRIGLEASSLGMWLYRELHAAGLPVIVVEARHMHVSLSTMRNKTDRNDARGIAQMMRLGWFRAVHVKNIEMQKMRTLLSNRKLLKRKLVDIENHIRGALRTYGLLVGPISRGRFEARVRELIERADYVFTTMVETMLDVRRAVFDGYEKLHKVLLQVIRHDGVCRRLMTVPGVGPVTALSFKVGVDDPLRFTRSRTVGAHFGLTPKRHQSGTSIDYEGRITKQGDVAVREALCEAAASLLLRVRTWSALRAWGLRIAKRTSMMCAIVAVARKLAGILHRMWIDESDFKVGFGAKVTRKLKLKSA

SEQ ID NO: 333241 - protein, 348 aa, unidentified
MRCYTGQHQFYAGIDLHARTMYTQVLDQKGKTVFEKDLAAQPEVFLDAVKPFRDGLVVGCECMFAWYWLADLCEDHSIPFVLGHALYMRMIHGGKAKTDRIDAAKLASMLRGGLFPMAYVYPRAKRQTRDLLRRRSFFVRQRAQLITHIQNTNTQFNLPPLSKKLTYAANRSPEIADRFAHPSTKLSITADLGLIDAYDQQIAELERHLVKNAKVDDPVTFGLLRTTPGIGPILGLILLYEIDQIARFPEAGNFLSYSRLVRCSHVSAGKVKGSGGKKIGNAHLKWAFSEAACLLLRALPAAKAWMQRQEKKRGKKKALSILEAKLGRTVYHLWRKQVPFDAKRFLAS

SEQ ID NO: 333242 - protein, 359 aa, unidentified
MASNVKVNRINFNGKMVNIGVDMHKQSWRITALVEGEVAFTGTLAKPNYDSFRKLLARFEGNCVRIAYEAGPGGFGLYDILTADGIECMVTPPSLIPTESGSRVKTDKKDSLKLAKLLESNMLKKVWVLSPEERAHRQLVRTRRQIVDHRSNVMRQIKSLLFFHSMDIPFSSRQQWTGPFIKWLHELDLDDQCLNQSLKTLVHLFDYLSVEKKRLTHEVIELAKEEKYTQRVKLLNTIPGIGTLSGMEILVELQEITRFKTSDELAAYLGLTPSQYSSGEYVRMGHITHAGNDRVRTTLVESSWILIGKDPSMRRKYENIKHRRGGKRAIIAIARILSARLRRMLLDQVPYEIGFQKAA

SEQ ID NO: 333243 - protein, 370 aa, unidentified
MKEYSEAFVGFDTAKNKHAVAIADGGRDGEVRYFGEIDSSPTTVAKVLGKLSARYPRLHICYEAGPTGYGLYRQVKALGHHCMVVAPSLIPRKPGDRVKTNRRDAVTLARLFRAGELTSVWVPDPVHEAVRDLVRARGAAAADLRKKRQQLLSLLLRHGRIFAGRAHWSLAHRRWLAGQRFEHPAQQIVFQDAVDAIEDAAARLRRLDQQLLTIVPSWSMAPVIAAYQAMRGVSFIIAATFVAEIGDVRRFDNPRQLMSFLGLVPSERSTGETVRRAGLTLAGNRRARRVLVEGAWTYRYPARVSETLRARLQGLPKTVRDIAWKAQVRLCARYRRLVAAGKKTPVVVAAIAREMAAFLWAISRQVEPLT

SEQ ID NO: 333244 - protein, 385 aa, unidentified
MRRAGKRGPGPSHLLMTPDHAGNVVGIDPHKRTLTATVADARGGILASDHFRVSGEGHRELEAWARQFGQIARWGIEGAAGWGRHTAMFLTGRGHDVRDVCANRTPRSDRARQRGKSDTLDSERIARETLAHSLLPKAFKRAGADSGPDEQHQLLALWNNRRRSILTARQHLVGEAEQLLCELPLELREELPETKAVRPRLAALARRNRRRRYDAPTRLRLQLLDGYRTEIQTLDRQERHVVAELEELVRHSGSTLGELCGLSTRSVAELLVEVGDPRRFTEGGFARFNGSAPLPASTAEGPGEPIRHRYNPGGNRRVNAILYRMAVTQLRCEPRAQRIYANARAGGHTKREARRVLKRHLSDVIYRRMIRNLEARLTDQPLLAA

SEQ ID NO: 333245 - protein, 350 aa, unidentified
MEYLGIDWSYRRAAWCSLSDAGVIVGEGAVPADADGLARLVIERGTDVRAVVEMMSGAIWVRDELTAAGWQVQIAHARKVRDVAPLACKTDKVDARVLAELARRDLVPELWVPPVEDRALRERLRRRTHLVRMRASAMNRIFGLQTQWGLRLSLRRLHGPDAMTLLERQGMPAVWRRSIAEALDVIDLLDARITPIDQELRPLARSDARVILLDTIPGIGDLLGLTLASEIGDVARFGSPRKLIGYAGLAPKISQSGDRSRTGALSKAGSRTLRWAAVEAAQHAWRPSNPWHQLYTDLAERAGKNPAKAAVARKILIAAWHVLSRQQPFKPAAPRRPDPVSASSRCFLAA

SEQ ID NO: 333246 - protein, 387 aa, unidentified
MTVLTVNNLPAATHGETVRCLFAIELSKMSWVIAFNTPLSEKISRRTLTGCKWKRLLELIEEVRARVSRETGRAVEVVSCYEAGYDGFWLHRQLEAHGIHNYVIDPASLQVDRRARRVKTDRIDTERLLRSLMAYLRGEPKVWSVVRVPSVAEEDARRLHRERDRLVSERVQHVNRIKGLCALQGIYDYNPLRPQAMARLEQMRTTQGGALPPRLKSEIKRELQRLELVVEMIAALETERDAIVEDEASTHVNAKKIQNLHKLKAIGPEFAAVLVGEIFHRDFNNRRQLASYVGFAPSPFQSGSVAHDQGISKAGNRKGRTTGIELAWLWLRYQPDSDLSGWFRARVGTTKGRIRRIAIVALARKLLVALWRYLETGVVPRGAVLKG

SEQ ID NO: 333247 - protein, 344 aa, unidentified
MKITTVGIDLAKNVFQVHGVNEFGKTVVKKQLRRDQVSEYFVNLPACLIGMEACGSAHYWARKLQGFGHTVKLMAPQFVKPYVKTNKNDAADAEAICEAVARPNMRFVPIKNVEQQAVLALHRVRQGFVKARTAQANQIRGLLGEFGLIVPQGIGYIATRVPELIEDASNELPGSFRVLVQRLLDHLKELDRQVGELEVQIQTWHRSSEVSIKLAKIPGIGPITASALVASIGDAKSFESGRQVAAWLGLVPKQHSSGGKQNLLGISKRGDIYLRTLLIHGARSVIYRADQKPESCSWINGVINRRNKNVAAVALANKNARIAWALLAHEREFRSDYTTANTAM

SEQ ID NO: 333248 - protein, 451 aa, unidentified
MTKSKRRCPERDFTPTHPNAAAIDIGSRMHVAAVPPDRDPEPVRAFGTCTGDLQQLADWFERCGVRTVAMESTGVYWIPAYELLEQRGFEVVLVNARDAKHVPGRKTDVSDAQWLRRLHEYGLLRGSFRPKGELAALRAYLRQRERLLDYSASHIQHMQKALMQMNVQLHHVVTDVTGETGMGIIRAVVAGERDPAVLATHRDRRCHASEEEIAAALAGNWREEHVFALGQALELYDAYHAKVVECDLRIEIVLRRLRDAAAKPTGRLPPARHRDKTANAPTFDARAALHAVLGVDLTQIHGLGPSLALKLIGECGTDLSAWPNAKHFTSWLCLAPANKISGGKVLSTRTRRSGSRAAALLRLAAVTVGRTQTALGAFYRRLSARVGKAKAVTATARKIATLFYNALRHGIDYADPGASYYEDRYRARVLANLRRRAKSLGYMLHETPASG

SEQ ID NO: 333249 - protein, 338 aa, unidentified
MKIIKSIGIDLGKNVFHLHGRDPRGNVVLEYRVNRKKLREFMEKLPPCQVGLEACPGSNYWAREFIKMGHRVRIMPAQFVSAYVKSNKNDWRDAEAICEAMDRPGMRFVGVKTERQQEIQSLHRVRSRLIRNRTALLNETRGILMELGIVLGRGKTPLERALREIIAGSRSEVSLFLMELMKDLQSELYNLNDRIKRCDSIIQKIYEEEDICRRIGKIPGIGPITATALLGSIGDPRNFKNGRQMSAWLGLVPRQYSTGGRSVLLGISKRGDPYLRSLLVHGARAVLRIASHKQDPRSLWIQKKVQTRGFNKACVAVANRNARVIWAVWAKQEEYRAA

SEQ ID NO: 333250 - protein, 331 aa, unidentified
MKIMETIGIDVSKVTLDVCIHSNQELATFENSNKGFAQLLKWGYRSSPHPKEHIFIAFEHTGLYSERLSEYLSERDIPHAMISGLEIKRSLGIARGKDYRIDASKIALYAYRLRDEIRPSLAQSKEIRTIKKLLSLRDRLVRQRAGYKASSREQKDILKRKDNELLFKVQDRMIRELSKQIKEIENEMQQIIKSSPELDHIFVLLKTIKCIGDQAALFLLVYTGAFTKFRNARQFSAYCGVAPFPNRSGTSLRGTTRVSHLANKKMKSLLDMCAKSSICYNMEIKDYYFRRLAEGKSKMSTVNVIRNKLISRVFAVINRDTPYVDLWKYAS

SEQ ID NO: 333251 - protein, 417 aa, unidentified
MDSDKEIVCGADIHKDFLIATMISRSGLKLQERFNMNQDGLLAFRSWIINHRCQRLAVESTGGFWYPIFTILEGHVEFILANAYQIRNIEHKKTDKLDSERIAIYCLNNLITPSRIYPKDYRDLRSITRARETLVNARSKIKNQIHQSLSACCIKLSSVISDSFGKSGRYIIDRLLEGKTIDQIISGIPSKRIRKKEDELREAIKNGLDPVQVFLIKANLDVIDDISKKIKILEAEIAEKVKPFEDDLKIILSVPGVGFISAATIIAEMGDYRDFPSADKMAKYFGIVPSVYQSAGKLRTGKITKTGSKHMRRILVEVAKAISRTKKNSRLMRFFQRILARCGKKNIATVALARKVLCIIYHLLMNHENYQEPEVTKTKPKIPSSVSPIRMMDIDEMIKIISQAGYLVEKDLKEGCG

SEQ ID NO: 333252 - protein, 370 aa, unidentified
MNRLFVGMDVHKEKIVVVGLPEEGNHPVMREEFGGNDLLRLVKRLQRLAKTYGMEACYEAGPCGYGLARALLQAGMECRVAAPSLIPRRPGDRIKTDGRDARELALALRAHTLSFVRIPTKEEEQVRGLIRCREDIAKEVRRIKHVIAHWLLLHGHRVPQGVKSWTPAHRRWMRGLEVSSLDRTVLDHYLDVVHMLGERLKLIEDQVVALADTEGFRNRVARLQAFKGFSKLSAMRVIAEVMEFARFPKATSFMKFTGLVPSEHSSSDRIRRGKITKAGNSHLRHVLVEAVQRGRSAARPGRSLSPRLAAICGPSRQVALSALTRLHHTFWRLTRRGVSAGKVKVALARELAGFVWAMMTIPETPDATAA

SEQ ID NO: 333253 - protein, 352 aa, unidentified
MIIIGVDFHPEFQQIASVDTDTGEFQEKRLAHRDEAENFYRALAGKKVRVGMEASGQARWFECLMRELQFELWIGDAAAICTKRVRKQKTDRQDARLILQLLLEDRFPQIWVPSWENRDLRQLLWHRHRMVQARTRIMNQLQALALNEGLRCKKRLWRERGRQQLESFRLGPWASRRRRDLLELLDRLNPTIAELTQAIEQEAEKCPAAQRLRTHPGVGALTALAFVLIIGEADRFQCGKQVASYLGLVPLEDSSGNRRRLGHITKQGSSILRFLLVEAAQVTVRSLPEWRSKYFHLAMRRGRKIAKVAMARKLAVCLYWMWRKGWNYEQLTKFGSHAGKPGTGYGVQSNTE

SEQ ID NO: 333254 - protein, 391 aa, unidentified
MIYVGIDVAKDKHDCIILNSNGKVVFDVFTIQNNIDGFEELLFKIKTTEKCPDKVKVGLEATGHYSCNILGFLKNKGLSTIVINPLYTSLSRKSISLRKTKTDKVDARTIACMIMSDVNLKPYPDTLYLNEDLKSLTRYRFNKVAQRAKLKISVSRLVNILFPELEKLVSTLHGKAVYELLSEFPSAQHIASANLKHLTNLLHTASKGRFQRASADQIRQAARKSIGSYLPAKSLELKHTIKLIRELNSEITEIEAEIKKIMDVIDSPIISIPGIGQNLGAVILAEIGDFSRFESPDKILAFAGCSPSTYQSGQLYSSHAKMEKRGSRYLRWALLNAAAYVCKWEPTFATYLAKKLAEGKHYYVALSHAAKKLVRVLYLSLIHISEHTRPY

SEQ ID NO: 333255 - protein, 391 aa, unidentified
MNRNTGMHAGQVIGWMNGLQVVGMDIAKSVFQLYTADMKTGELRDKRLKRDKVLEYFRLMAPAVVAMEACGGAHHWARQLQKLGHQVRLVHARAVRPFVQGNKTDVTDARAIWLAVQQSGMRFVAVKTEAQQAALTLHRQRQQLVKMSTMQLNGLRGLLYEFGVTLPLGRKAMLAQVVSAIDSVAPVLPKVTVDSLLEQVQRIAQLRQAVDQVEVILKQLIKQDRQMQRALTIPGVGILSATAAVATMGDPHHFKSGREFCAWLGLVPRQEGTGGKVKLLGISKRGDKYVRTLLVHGARAVLLRKAQSSDWQTELQKRRHKNVAIVAQAAKIARTIWAVLAKDQDYQANHKSVRPQQSRAAAQEPSQDASPTCPPQRPFVAGDARRRGQVS

SEQ ID NO: 333256 - protein, 376 aa, unidentified
MGKHRLAFVAFDSAKNKHAVAIADDGRSGEVRYLGEIDNSPDAVRKLVAKLRRQYERLHFCYEAGPTGYGLHRQLAELGHVCDVVAPTMIPKRSGDRVKTNRRDSVTLVKLLRAGELRAIWVPDSIHEAVRDLTRARETAMVDLKTKRQQLLSFLLRHGRSFPDGRNWTKMHERWLAKQSYAHPAQQIVFQDQLEAITAAQARLAALEQQLREIVPTWTMSPVVAAYQALRGVSFLVAMTFVAEVGDVRRFATPQQLVAFLGLVPSERTTGDTVRRGSITKTGNHRARRVLIEGAWTYRFSARVGETLRRRLEDLPLSIRTIAWKAQVRLCARYRRLIARGKKSPVVTTAIARELAAFLWAIGQQVAPQTGVTPAS

SEQ ID NO: 333257 - protein, 342 aa, unidentified
MTIVTVGIDLAKNVFAVHGVDAAGKPVLVRPSVARDKLLELIASLPPCLIGMEACSGAHHLAREFDKLGHTARLMAPKFVAPYRLSGKRGKNDAADAAAICEAVTRPQMRFVPLKSADQQGQLMVHRARQGFIEQRTATLNRIRGLLSELGIVLPLKAATVRRQALQHLEDLPGWANTVIGDLLSEVSHLDERIAQYDRHIALMARHSTQAQHLMQLAGIGETTATAIVSTVGNGHDFVCGRSFSAWLGLVPGQYSSGGKQRLGRITKAGDAYLRSLLVMGARVVLAAAMNSKAPKQDPLSRWARALAERRGYWRAVVAIAAKNARLCWAVLQRGDNFKIPA

SEQ ID NO: 333258 - protein, 341 aa, unidentified
MQHELRTVAIDLAKKVFHLVGTDTTGKILWRKRLTRHALMPFIAQLPPVLIGIEACGGAHYWARRFRAHGHDVKLMAPQFVKPFVKSNKNDMRDTEAIAEAVTRPTMHFVPIKEVDQQDRQALHRVRERLIGARTALINEVHGLMHEYGIVLPKGVSKFRQAVVDKLESEQEKLTALSQEMFRKLVEEFGELEKRLASYQDKLEALATTHPECQRLMTIPGIGPITATALVAAVGDVGVFKNGRQFAAWLGLVPKQHSTGGQTRLLGISKRGDSYLRKLLIHGARATLRWVKLQTDDRSRWIRGLLARCGWNRTAVAVANKNARIVWALLSRGGVYGDNAS

SEQ ID NO: 333259 - protein, 347 aa, unidentified
MQVTTIGLDIAKNVFQIHGINATEKVVVRKQLRRSQMLEFFKALPACLVGMEACATAHYWARELTKLGHQVRLMPAKDVKAYVKRNKNDAADAEAICEAVRRPTMRFVQVKSAEQQSRLMLHRTRDLLIRQRTQLINALRAHLAELGIVAAQGNAGLKELLKIIAGERDARLPVDAHASLVVLAAGLHAVQTMIGSIEKRIIVEHRSNEASKRLRSIPGIGLVGASAIVATVQDPKAFRSGRDFAAWIGLVPRQDSTGGKQKLGPISKQGDRYLRRILVVGAHAVLKRARQQPEKYPWLTQLLARRPFKVVAVALANKMARVAWALLAKGGTYHRARALVTAVTAAA

SEQ ID NO: 333260 - protein, 393 aa, unidentified
MICVGIDVAKDKHDCFILNSEGEVLADVFTIPNNAEGFDRLLQTIRRCARPEDKMKVGLEATGHYSYNILGFLLNEGLDTYVINPLHTNLYRKSLSLRKTKTDRIDARTIAAMLMSDVDLKSYTDTAYHNEELKSLTRYRFDKVRERAKLKQSVSRLVTILFPELEKLVSTLHTASVYALLSEFPGAKQVAGAHLTHLKAVLHDASKGRYGRDMATTFRDAARCSVGSVMPAKSLELRHTIRLIHELDAEIEDIEAAIQSMMDDIQSPITTIPGMGVRMGAMILAEIGDFSRFDSPDKILAYAGMSPSTYQSGQFSLSGAYSHMEKRGSRYLRYALYNATKYVCLWEPTFAAYLTKKRAEGKHYNVALSHATKKLVRLIYALEKSKRPYSTAA

SEQ ID NO: 333261 - protein, 327 aa, unidentified
MNNTFYIGIDIACKKFDVAIYKENKKALHNTFDNDKKGFESLLKWINKDTQNLHVVMEATGIYWEELAYFLYDKKAKVSVINPKCIKAYGIGQNLRNKTDKIDAMLIARFAAKEQPQAWQPPPKAQRALLLRLRQLEHLKQAEQKERTRIKMMSDSESIASAERLANFLREEIKAFEKQIDETIKTDTMLKQNAKLLSSIPELGKKSVAWLLAYLGDGSRFKNGKAAAAYAGLTPMHHQSGSSINGKPRISKIGQTDIRKILFMPAVAYSFGNYKDRIYKTFVDNLLAKGKDKKVIIVALMRKLVAIAQTVLKNQMPFDASLHQKTM

SEQ ID NO: 333262 - protein, 343 aa, unidentified
MEESQGLVVGVDTHKESHSAALVDELGAVLGSTDVEANQRGYVQLLQWARGRSSHRTWVVEGTGSYGAGLASFLVRCGEVVYEGDRPQRRKPGASGKSDQLDAIKVAREALAREHHALPRQRGNREAIRVLLSTREGAVSASRQALNQLYALVVTAPEPIHEHLIRLKGEQLVTACLRLRSTAGDIETSVTTRALRQVARRIRSLQAEAADHEAQLESLVAEAVPALLSEPGVGAITAAQLLVSWSHAGRIRNENAFAAMAGVAPVPASSGRFVRHRLNRQGDRRLNRALHVVAVCRSSFHRPTKDYIARRTAEGKSTREIRRCLKRYLARHFFRLLQGLDNP

SEQ ID NO: 333263 - protein, 338 aa, unidentified
MYYTGIDLHKFTSYLTTVDSSGKLVKQADIKNVNHNFIQYFSDLGDENITTVESTMTWYWLNDLLTSMDIPLVLAHAKYVKAIAYAKVKTDKVDSHTLAQLLRMDYIPAAHKISAENRLLRDALRARLKIVQRHTSITNSMQMLLAKYNFDSPTQLTGIARFQYEQLSEVEEILNEQMLELEKQLYPFLIPNDDIQRLLWIPGIGKMNAFTILLEVDDIGRFADVKNFFSYSRLTPSARNSGGKTKQRSSKDGNKYLKIAFCDAAIHAVQYYPVIRKYQSSLLRKKNKQIAKTIIAKELAEIVYHVLKNKTDYNNKFRGQELQHKKSLQWPRITSPYA

SEQ ID NO: 333264 - protein, 402 aa, unidentified
MNAVGIDVSKGKSMVAIMRPFGEIVSAPFEIKHTASDIHSLVELINSVEGESRIVMEHTGRYYEVLAHQLSEANLFVSAINPKLIKDFDNDSLRKVKTDKADSVKIARYALDKWQNLKQYSVMDELRNQLKTMNRQFGFYMKHKTAMKNNLIGILDQTYPGVNTYFDSPARSDGSQKWVDFASTYWHVDCVRKMSINAFIDHYENWCKRKKYNFSKSKSEEIYGKAKELVPVLPKDDITKLIIKQAVDQLNSASTTVESLRTLMNETASKLPEYPVVMAMKGVGTSLGPQLIAEIGDVSRFTHKGAITAFAGVDPGVNESGSYEQKSVPTSKRGSSDLRKTLFQVMDVLIKTHPQDDPVYQFLDKKRAQKKPYYVYMTAGANKFLRIYYGRVKEYLASLPES

SEQ ID NO: 333265 - protein, 332 aa, unidentified
MSAVVCGLDVHKETTYATLLDRDGQVLVQRKMTNEDIPAFLDMTKPDKLAMEASTYIIPLYRKLAEQGYNVTVSHPGKTRLIAEARIKSDRVDSRALAELLRLASLPTSYIPPRDISQIREKVRRRAFMVRQITKLKVKIRDVLAYEGVKPPDGFGLFTVKGVEWLRSLNLEPVDCYLRLIEPLKEEVKLVSGDLKRSAGKDPEVQLLMTIPGVGYYVALLVKSEIGDLRRFSSGDHLASYAGLVPSTRSSGGVERHGGITREGSRWLRWAMVEAAMVHIRYDTPVTRFYHGVAERRGRRAALVVAARKLMEVCFSVLVHGRPYFNPLDAQA

SEQ ID NO: 333266 - protein, 413 aa, unidentified
MDVFCGIDWAEDHHDIALVDAGGQLLARRRISDDAAGLAALTGLLAEHGDGAEDPVPVAIETPRGLLTACLRATGRKVYPINPMAVARYRDRHSVAGRKSDHGDAVVLANILRTDAHAHRPLPADTELAQAIAVLARAQQDAVWARTAAHNKLRSHLREYYPAFLAAFADLRGGITRPEARAILAAAPAPAAAARLTPAQLRVLLRKAGRSRGIDAEAARLREAFHAEQMRQLPLVEDAMGRQALALLRQLDAACAAATDLEQATIESFNQHPDAGIITSFPGLGPLTSARVLAETGDDRSRFADAKGLKAYAGAAPITRASGKTTAVLHRRVKNQRLAATGYVWAFAALTASPGARAHYDRRRNDGDRHAAAQRNLFGRLLGCLHHCLATTQHYDENTAFPNLTAASQATAA

SEQ ID NO: 333267 - protein, 385 aa, unidentified
MIHVGADVHIRNSVLNAKDQDGQVLARGRVGNTILELGTFFAPLERRAKATGEAIRVVMESTGNSRAIQRLLTQYGREAGIDLTAEVLHARKLRVIAESVNKCDRVDADILTELARSNLKLPTCYMPDDDEFALREHLRARTDLVRMRTMLKNRAHAILHRRGILTPDGDLFGRAGGLFLDQLDLDQAGRITLERFRELISQLNSSIDESTASLRTLQRKPRWAKPAALLQTMPGIGLITSLMILAELGDISRFRSRAAVANYAGLVPKHRDSDGKRWSGRITRRGSAHLRGVLGEAAWVAAPRVPVYQALFGRVERKKNRKTAVVAVARRMLEDAWTMLIKDEAFRYVPVYLGAAQVDRTRELAGPEHRELRSRVVQAAPSVAG

SEQ ID NO: 333268 - protein, 366 aa, unidentified
MKKISTVRAFSNEIFKEQKLTIGVDLGDRSSAYCVLNEAGEIVLEHKLPTTPEAMKQVFGSMPRCRIAMETGTHSPWVSRLLTALGHEVIVAHAQKVRLITKSRRKDDRLDARTLARLARIDPALLSPVKHRSAQAQLHLTEIRARAVLVSARTALVNAARGLVKSYGERLRKCGTEQLRRETTRGLSAGLREALEPLLREVESLNERIQEYDRRIEHMSKKTYPETMLLKQVKGVGDLIATTYVLTIEDPHRFRKSRDAGCFVGLQPGRRDSGESEPQMRISKEGDEYLRTLLVQGAHYILGPFGEDSDLRRWGRKLSARGGKTAKKRAVVAVARKLAVLLHRLWVSGEVYEPLRNSQKTMNAAA

SEQ ID NO: 333269 - protein, 259 aa, unidentified
MAIVNRIALDLAKDFIQVLALDESEHEVFNKKLRSNKVLAKLAKLKRTDDCEVTVESCGMSHHWRREIEKLGYKTVALPPRFVKAYLQGEKNDANDARAIAEAASRPNRKSVRIKSIEQQDLALMVSQRDSRRLMTIPGIGPVTAVSLLALIGDVSDFKRGRNVSEYLGLVPRQNSSGGKDRLGGITKKGNTRLRTLLVHGARSALRMAHKRNDKLSLWAQDVAKRRGNNIAAVALANKHARIIWAILTHKEDYRMAAA

SEQ ID NO: 333270 - protein, 351 aa, unidentified
MMIIGVDYHPGFQQIAFLFKETGECGERRLNHSDGEAENFYRDLKARGISVRVGMETTGFSRWFERLLAELGFEVWIGDAAEIKTRRAKKQKTDRLDAELLLKLLLEDRFPRIWVPSPENRDVRQLLWHRHRLVQMRTRIMNQLQALAMNENRYWKGKLWSERGRAELEKLPLAPWTSRRRQELLELLDRMNPTIEELTAAATLEAKKRPEALRLMTHPGVGPLTALAFVLIIGTPERFGCAKQICNYVGLIPSEDSSGGRQRLGHISKQGSSLLRFLLVEAAQAAVRCNADWRRRYRHLAMRRQRNIAKVAMGRRLGARLYWMWRNGCEYSPSLEFGSHAGKLGTGNGGQ

SEQ ID NO: 333271 - protein, 377 aa, unidentified
MGDYSEAFVGLDTSKLRNAVAIADAGRGGEVRFLGEIENTLAATAKLVRKLSARYERLTFCYEAGPTGYGLHRQIKDLGFECVVVAPSLIPKRPGDKVKTNRRDALSLAKLLRADELTPVWVPDGPHEAMRDLTRARETAMLDLRTKRQHVSAFLLRLGRPYPESRKTWTKAHASWIASQKLEHPQQRLVLEEMMLAIRQAQERLQRLEQAVAATVPEWSLAPVVTALMAMRGIDLISATTLLAEIGDLSRFQTPTELMAYLGLVPSENSTGDTVKRGPITKAGNRRARRMLVECSWSYQHPPRVGQAKQPKVDAAPPAVREIAWKAQCRLYRRYRALVRKGKRKTVAIVAIARELAGFIWAVARAVMTGRVAAATA

SEQ ID NO: 333272 - protein, 355 aa, unidentified
MTVTNIVGVDVSKATLDCHLYCQNQSLCAVPNTEKGFRQIAKWLKAHHSKKALAELLVVIEATGYYSHSFEHYLFQRKFVFVKCSALEIKLSRGLQRGKTDKGDARFIARYGWMKKDELIPMKPVPIEVIQLQQLMNFRDRLVMDRASYQGRMKNITDQMKLYNHTDLRASSDTVIRTLKLEVRHIEGVILRYLQGHTDFWKTYQLLTSIVGVGFASAVHFIIATENFTKFSNARKLVCYCGVAPFPYESGSSIRQRARTSVFANKKLKSLLSQGALSALQVDPAFKRKLDQKIKEGKHKLSVLNILRAKLIYRMFAVIKRGTPFQSEVPKTGRQKGAGTDLWTGSWPPSGVTSQ

SEQ ID NO: 333273 - protein, 345 aa, unidentified
MDVAYDGRQVVGMDLHRRRSVLVRMTMDGRRLETARIENSPAALRGVLARCGQRPLVVLEATYGWYWAADVLEQAGAEVHLAHPLGVKAFSYRRVKNDERDAADLADLLRMGRLPEAWIAPPAVRAVREVVRYRHKLVGQRTSCKDQVHAVLAKCGIPVTHSDVFGTGGGLWLDQLVLPAPYAAKVASLRALIAVLDGQIAGLGAEAAVMLAGQPGYAALRELPGIGPVLAAVIISEIGDITRFRKPAQLCSWAGLTPRHYESDTKVIRGHVSKQGSRLLRWALTEAIQHQPAGTRPRAAREAIIARRGPQARNIAKTASARVLLTQVFYALRDGHVRRASDPAA

SEQ ID NO: 333274 - protein, 467 aa, unidentified
MAARKQKQRRMSAQVVEDEDYQLRYEVVAGIDVAKESAVVCVRMPPAAGRKHRTSHLQAVPAMVPAIGELAAELKAAGVQMVSMEATSDYWRVWFAVLEEAGLAVQLVSSSQARNLPGRPKTDKEDARWIARLTEMGMLRSSFVPPPEIRALRVYTRHIWDLTADRTRYWQRLEKLLEDALCKLTSVVSRLAGHQTARAVIEAMIAGERDPRALAALGQGRMRNDRLPALAEALSGMRFGPQHAHAAASLLRAIDLLEAELRDLQERVTAHLAAIPASWGVDADGVTGPAAGRAGDAAVLAAADRLDEIPGLGREAAAALIAEIGLDMSRFPTPQALVSWAGLTPTARQSGPVKGRGKKGRGNTYAKRIAVLAAYAAANTDTFLGERFRRLAVRPGGGGRKKAGCAVGRSILVIVWHLLNDPAARYRDLGPDWHATHTDRSRKARNARRQLEALGYDVIITLREDAA

SEQ ID NO: 333275 - protein, 389 aa, unidentified
MEARTVNNLLPAASHDDAVGCLVAIELSKKSWIVAVNTPLSDKISRHTLKPGDGKELLDLCERIRTRVARETKRRVEIVSCYEAGYDGFWLHRLLEAHGIRNYVIDPASLQVDRRARRAKTDHVDVERLLRSLMAYLRGEPKVWSVVCVPSVAEEDDRRLNRERGRLINERIQHVNRIKGLLAIHGIYDYQPLRRDRMQRLERLRTADGRLLPPRLMAEILRELQRLELVIGMIKTIEAERDAIASAKTEAEHTSAKKIQDLAKIKCIGPEFANTLVGEVFYRSFDNRKQLASYVGLTPAHFQSGAMCHDQGISKAGNAKARTVMIELAWLWLRHQPDSPLSVWFRERVGKLKGRIRRITIVAVARKLLIVLWRYLETGLVPESAALKL

SEQ ID NO: 333276 - protein, 339 aa, unidentified
MNYEPITAVGIDVSKGKSTVAVRRPGGEVVLTPFQVTHDAAGLSSLVKTLQDVGGNIRIVMEHTGMYWRPIALALKEAGFFVSVVNAMLIHDFSDNSLRKVKTDKADSMKIANYALSFWAELRDYSPEDETRQMLKMQNRLYLRTKKSSVILRNGLISLLDQTFPGVNMLFDSQPKRSNGHFKWVDFVKRFWHKDCVAGISLAAFSDAYRKWCARSGYRFSQSDAEKFHTAARNAVATFPKNDSTKLLIAQAVDSLNAVYDALYILRGEMLRLASILPEFDVVMAMQGAGEVTGPQLIAEIGDVRRFTHKGALVAFAGMDAPPFQSGTFDSKNRDVSLT

SEQ ID NO: 333277 - protein, 400 aa, unidentified
MHHESEIDVYLGLDVGKGEHHGTALTPAGKRVFDKPLPNSEPRLRELFTKLRTRHGTVLVVVDQPASIGALPLAVARDAGCRVAYLPGLTMRRIADLYPGESKTDARDAAIIADAARTMPHTLRELAPNDETVAELNMIVGFDDDLAGEVTRLKNRMRGLLTQIHPSLERVLGPRLDHPAVLFLLERYGSPAQLRKAGRRRLITMLKPKAPRMAERLVEDIFTALDEQTVIVPGTEAAALIIPSLASSLTAVLDQRKLLASSIEELLEAHPLSQVLISMPGIGIRTAARILVDVGDGSSFASAGHLAAYAGLAPATRRSGSSIRGEHPSRRGNRQLKRAFYLAAFASLSQPDSRAYYDRKRREGKHHVAALICLARRRIDVLFAMLRDGTFYQPPTAATA

SEQ ID NO: 333278 - protein, 411 aa, unidentified
MSKMLVGIDVSLKSHHVQFMDGDGDSLASFSVPNDQNGADTLIQRILETAKKKKLNLFQIGMEATSNLGWHLAHYLREQLKGYEPSFQSHVYVLNARKVARFKKGYDTLVKNDRIDAWVIADHLRFGRLPMEMKDTIQYEALQRLTRTRFHLMQNITRDKIYFLNQVFLKFSGLRQDNPFSNMFGSTSLAVIEELEPEQITQMSMEELIQFLQEKGKNRFENPEEIAKYLQKLARSSYRLNKAMADPVNISLSVSLSVIRHMESEVKRLDREIAKLMKGIPQTLTSIKGVGDVYAAGLIAEIGDIKRFKNHHALASYAGLRWSQYQSGEFESDDTNRLNSGNKYLRYYLIQAADKVRQHDSEYRAFYQKKYNEVPKHQHKRALVLTARKLVRLVYSLLSTNQLYTPPERRN

SEQ ID NO: 333279 - protein, 367 aa, unidentified
MEKSSKVYVGMDVHKESIEVTLAEQGGEVRRLGQIGGDRGSLLKMARKLQSKGGERVFVYEAGPCGFWIYRELAVLGERCMVVSPALVPKRAGDHVKTDRRDSERLASLARAGELEAIHVPDIRDEAIRDLVRGRDDAVIAQRRVRQQLKALLLRNDIRYVGRTSWTGAHRRWLSELKLPEPAQRIVFEEYVDAITVATGRIERLTRAIDTEVLTWRFAPVVAALQAMRGIQFVHAVTLIAELGDLTRFGSARQLMGYLGLVPREDSSGEHRRQGSITKAGNSYARRALIEAAWAYRHPARVTRIIATRKTGLPKTACDIAWKAQLRLSAKYRRLNARHLHHNKIVVALARELSGFVWAIGQCVKPQ

SEQ ID NO: 333280 - protein, 312 aa, unidentified
MFVGIDVGKYHVDIALSDESEVSRFKNDDSGIEEILRLLDARPVALVVMEASGGYERQLLASLLGAGIPAVAVNPRQVRDFAKALGMLEKTDAIDARVLSRFAQSVRPAVRPRPTQELAEVQDWLTRRRQLVEMMVAEKNRSQQARGGVLKSIRSHIDWLKKRIRDSEKELGDMLKNAPEWNAEVEVLDEVKGIGRVMALMLLGAVPELGSLNRKQIAKLVGVAPLCRDSGTLRGQRTCWGGRADVRACLYMAALAATQFNATIKAFYRRLLAAGKPKKVALVACMRKLLTILNARIRDYRAALPVSRTALS

SEQ ID NO: 333281 - protein, 372 aa, unidentified
MNYNTVYVGMDVHKDSFTLCAYTVDADKGSFHRKTPADYREVLKYLDFLRTVYGNDVGFVCGYEAGCLGYCLYHQLTDRNVNCVILAPTTMLEQRSKKRIKTDKRDAEIIGRCLAQHNYSPVHVPTAGDEETKEFLRMRSDHKLALKKIKQQILAFCLRHNYRYEGKSNWTDRHMKWLRSLKPAALYKEILDEYLMTYTVLSEKIERLDTRIEELAREDKYSESVKKLCCFIGVKTHIALSVLVEVGDFNRFATAEKFASYIGLVPGEDSSGDEQVKLGITKAGNRHLRILLTEAAQCYGRSKTGYKSKELKTRQAGNPPQVISYADKANDRLKRRFYKMVLGKNKKHNVAKVAIARELACFMWGMMTDNIA

SEQ ID NO: 333282 - protein, 445 aa, unidentified
MSDALTAAPSEPEWAAFAAIDWADQKNFWRLLTAGSGRSEAGQLENTPEAVEAWAAGLQQRFGGRPIAVILEQSRGALVYMLTKYPHLVLFPVHPTTAARYRETFAPSGAKSDPSDTESLLDLLLRHRERMRPLQPDTVETRLLHFLVEERRQTVDDKTRQGHRLTDCLKLYFPQILGWFDDVTSPLVGDLLERWPNLEQLQRAHPGTLRKFFQQHNCRSAEKTEERIAAIYQATSATQDAAVLEACALIARLLGAQLATLRGTIAAFEVRIAELVAVHPDTAIFASLPGAGAALVPRLIVAFGTRRDRYQEAYEMQCYSGIAPVTEASGNSEWVHFRLACPKFLRQTFHEFATHSISQSEWAKAYYDHQRNDRKKEHQAAVRSLAFKWIRIIFRCWKDGKPYDEEIYMQSLRRRGSLLAAALGPATSAGWKSVAGFQKLSGNNT

SEQ ID NO: 333283 - protein, 343 aa, unidentified
MLALTTIGLDIAKSVFQVHGVDARGSVVVRRQLKRRYVLAFFKNLPSCLVGIEACATSHHWSRELQALGHRVRLIPPAYVKPYVKRQKNDAADAEAICEAVQRPSMRFVPTKTPEQQSCLMLHRTRHLFIRQQTAVINTIRAHLAELGIVAPVGRNGVEDLLYAVADQRDERIPEVARQCLEALGALLGKLRAQILEFDRQINAWHRSNETSRRLDELPGVGPALATALVASVADPKAFRSGRDFSAWIGLVPKQNSSGGKERLGSITKQGDRYLRSLFCAGALAVIRYAKIHGTTHRPWLAKLLERRPTKVAAIALANKIARMAWAMMAKGESYREPVALAR

SEQ ID NO: 333284 - protein, 341 aa, unidentified
MSQAQQLSNSDPATVFCGIDVSARTLTVAVQQVGQWAQREFANNANGHKELIVWLHKRQAMVRVSLEATGIYSLDLALALQAATRIELAVLNPKKIHEFAKSMRRSKTDRADARVLAEFSQRMAFVPWQPPNRQGLQLRTLSRYIQGLTVQHTRERNRLHAVQNVAHTPRCVLSDLKRSLASLEKRQQQLRREASALIQADPSLRQQFHWLLAIPGIAQISAIQLLAELTPLAQNMTGRQWVAHSGLDPVHHDSGSSVHKPSHISRSGNRHLRRALYMPALVAVQRDPHIKAFYLLLQSRHKTKMQALLAVARKLLHAIHGIFRSHSPYDGHKLFPALLPA

SEQ ID NO: 333285 - protein, 367 aa, unidentified
MEKSSTVFAGMDVHQESIDITLAEPGGEVRRLGQVGGDRGSLRKMLRRQQSKGRKLVFVYEAGPCGFWIYREITALGHACMVVSPSLIPRRAGDHVKTDRRDSERLASLARAGELEAIHVPDIRDEAIRDLVRGRDDAVIAQRRVRQQLKALLLRNDIRYVGRTSWTGAHRRWLSELKLPEPAQRIVFEEYVDAIVVATARIERLTRAIETEVAGWRFALVVGALQAMRGIQFVQAVTLIAELGDLTRFASARQLMGYLGLVPREDSSGEHRHQGSITKAGNSYARRALIEAAWAYRHPARVTRIIATRQTGIPKAVCDIAWRAQLRLSAKYRRMNARHVNHNKIVVALARELSGFVWAIGQSVKPQ

SEQ ID NO: 333286 - protein, 330 aa, unidentified
MKKYVDVIGIDVSKLTIDAHIYNRGVHRVFSNTSKGYKALLSWVEKYLGKDLCFFCFENTGHYSTNLSVYLSENNIDYVEESPLTIKRSSGIIRGKTDQLDSAMIARYAWLYKEELTLSSPKAQDIQELGRLLSFREQLVRDRTGKMSSLKEMQTLLSSPSTDDCCIIVKKMIHYLTKQITTLEQSIKKLIRSDELLEKNYQLLNTLKGVGLILSCQLLYHTNNFKRFDSWRQFSSYCGVAPFAHSSGTSIYRKNRIHKIGDRKMKTLLTLASVSAIQCDKELKQYYEKKVAEGKPKLVALNNVRNKILSRAFAVVKRGTPYVELQKFAA

SEQ ID NO: 333287 - protein, 322 aa, unidentified
MSVTVLGIDIAKQKFDVALLLEGKAKHKTCKNSADGFESLSLWLEKQGSQKVHACLEATGNYGEDLAIYLHEAGHTVSIVNPARIKGFAQSELIRTKTDKIDAGIIARFCLAMKPCPWIPPTPAIRSLKALVRRVDSLVDMRSQEKNRIGTAHESVILLIKEHIAYLDQEIEKIRQQIAELIEQNPNLKQKKDLLDSIPGIGKATIPVILAELDNLEKFTHVREVVAFIGLAPKETLSGTSIKGKPRLCKIGHARLRKALYMPALVSIQCNPVMIAFYNRLKEKGKNGKVIVCAIMRKLVHIIFGILKSGKKYDPNYKPAFA

SEQ ID NO: 333288 - protein, 384 aa, unidentified
MLCSDVRVSQSRRQTMNNDITVFVGLDVHKSSIAIAAAHSGRAEPRFVGTCGPELRELLKALSNLSTPANTLIAYEAGPSGFALARQLATQGWRCQVIAVSKTPRKPGERIKTDRRDALALARYLRSGDLTPVVVPDATDEAIRDLSRAREDAVRARLKARQQLKAMLLRHGKPFPGKTSWGAAHERYLSRVAFDHAAQQIAFAEYRSAVLEAHERVERISRALREQIEHWRFAPVVRALMCFKGIDFTAAAIIVAELGDLRRFEHPRHLMAYLGLVPSEYSSGTSRTQGSITKTGNTHVRRILVESAWCYRYSARLSRPVAERQLMQPKPVRDIAWRAQLRLCSRYRRLCGRRMHSNKICVAIARELTAFIWEAARYVQAGIH

SEQ ID NO: 333289 - protein, 339 aa, unidentified
MDATTYGLDVAKRVFQMYWVEAETGEILNRRFGRDELIRFLAQRPAGRVALEACGSAHWWARKIKALGHEVVLLHAKFIRPFVQTNKTDAADARAIWTAVQQPGMRTVATKTEDQQAMLSLHRIRALLVKFRTVQVNQLRGLYEFGATFRAGRAAGLAEIRARTAELEDALPGTMMCCLQDQLRRIEELQRDIDLLEKRMGVWQKQDAACHSITAIPGIGRLTATALVATMGDAKSFRSGREFAAFLGLVPRQSGTGGKVRLGPMSKRGDPYLRTLLIHGARSVMYHAKVPTPWQRDIQARRPANVAAVALASKIARTAWAILARGQEYQRNYVSVRPA

SEQ ID NO: 333290 - protein, 419 aa, unidentified
MSFKILKFNCCGLDVHKTWIYACIGITDSNNRTEYKQARFSSFTKGLNELCDWLAKYNCNDVCMESTGKYWIPVFNILEQHNLWVTLSHPKYTKPMKGNKTDRKDAKWICDLYMCGMVKPSFIPPADIRELRDLVRYRFKLTCMITGEKNRAQNCLTVSNLKLDDVFSDVFGKSSRSITEQILKHPGETFDVTPFVDGRCKTPIEEIQAAVDGAISKEQAVKLRQCLDHIDELNKHISEVEQEILRLSDKYEIALNLIRTVPGFNKNPLTAIQVLSEIGGDMSVFPTAKHLVSWAGCCPRNDQSNQKIKSTRISRAGSYFKPVLVQVANALIKSKKHLEFTNRYKRIKARRGHKKAIIAICRMILTAIWHILSDLKPYTPEGFLESRPVKEEKVLSISQALNLLKQRGYIIKDEPLSVS

SEQ ID NO: 333291 - protein, 426 aa, unidentified
MTEAIATPVSSLGRGAVAVDVVHERCAGLDVHKQTVTGCVITPEVRETRTFGTMTAPLLELVAWLQHHGVTHVAMESTGVYWKPVYNLLEGSGIEVLVVNAQHIKQVPGRKTDVKDAAWIAELLRHGLLRGSFIPDRNQRELRELVRYRRSLIQEQAREANRIQKVLEGANIKLGDVTSVVLGVSGRQMLKAIIAGETDPEKLADLARGRLRSKRESLVQALTGLIGPHQRRLLAAQLANVEFLDEQIAALDREIAERMRPYEAILERMDELDGLARRTSEEILAEIGVDMSRFPTHRHLASWAKICPGNNQSAGKRRSGNTGQGNAYLRAALVRAAQAAARTRDTYLAAQFRRLAARRGKNRAKVAVAHSILVIIYHMIKHGTRYNDLGAAHFERLNEQATVRRTVARLEALGYKVTLEKPMSAA

SEQ ID NO: 333292 - protein, 336 aa, unidentified
MNRNVVGLDIAKQVFHLFMMQDGKAMKKKLKRSELLAFVAQLPVSVIAMEACGGAHHWARAFQALGHEVVLLNARFVKAFVVGNKNDFNDAEAIYTAACQPNKRTVAIKGIEQQDLAMLQGIRRGKVDERKDLVNQMRGYLAERGIVLPRGVNQFRKQLPSILEDGENDLSALSRKLFAEQYQALRALDEAIRALDREITAVCQQNALARRLIEIPGIGPLTAILAAADVGDGKGYDSSRDYAASLGVVPRQHSGDKQVLLGISKRGNRQLRTLLIHGARAVLKYCGDKSDPLSLWLKGLIERRGFNKAAVALANKNARIIWALATRGGDYVPQTA

SEQ ID NO: 333293 - protein, 411 aa, unidentified
MHNRQNYLYVGVDLHKEQHTAVIINCWQEKLGEIQFDNKPSAFSKFLLEVETYVSDGISVVFGLEDVGGYGRALAKYLVDHEQVVKEVNPALSFLERKSQVMIQKNDSWDAECVTRILVNKFNQLPDAKPNDLFWSIQQLVSRRNALVKAQSALKNQLHIQLNHHYPSYKKFFSELDGKTALAFWQQYPSPSCLEGANIKQLTAFLLDVSNNTCSVKKASDILKLVKEDGQTMKEYQETRDFLVRSIARDIAFKKQEMKYIERELKQLVNLLDYQLETMPGIELVTASALIAEIGDVRRFPNANKLARFAGIAPVYFGSGGKGKVHKSKQGNRALHALFYNLAVQQVQVAKGSKTPRNPVFHAYYQKKLKEGKTKGQALVCIMRRLVNIVYGMMKHKTAYELPVVQEKEVV

SEQ ID NO: 333294 - protein, 347 aa, unidentified
MYKANRRDGLCERSLTMFPVGIDVSKNTLDLCMLYDGIKGRIKTRNIQNNRHSVENILRWLRLQHCSPEDVHVVMEATGVYHERLATELHDAGFRVSLANPHRSREFARGMGIMTKTDKVDAYMLACYAFLKKPHRWEPPAPEIRYLGALLRRRDVLLGDALREENRLEKYLSTDTPADIISSCRRMAQLLREEVGNIERQIKAHIKASPALRRDYTLLTSIKSVGPQLGMHMLVVLRSHNFVSAEQAAAFLGVVPIEKRSGTSVRRRPRMSKIGPPQLRAKLYMSALCGKIYNKRMRNIYDEMCLRGKPKMVAIGALMRKLVHWCYGVLKTGTVFNDEGLKPVLSS

SEQ ID NO: 333295 - protein, 360 aa, unidentified
MDKYIGFDIDSKKTVACVVQKGQKDRFTTLKTDIEIMKKFLQQQHKLGEKLHLTFEVGGEAGYRYDALVDLVDDITVSNPTKMTWIYRTSKKNDRIDARKQAILLSIGEVPKVHIPSKEVRQWRVAIQHRRKIVSKIWQVKNRIRAILKANGFVKSAQSGSWWKVANRLWMRSFVAEMEIKAEELWRMNLADMLEVLDLLESQLKGVTKYLDGYLKKHPGGKLLMSIPGVGPRTSEAVLAYTDDIKRFKKGKQYCAYFGLTPKLDESGLTKRLGHISKQGPSVVRWLIVESAWRVVKKSPSFRAFYERVMCGQKNRKKIATVAVARKLLSIMRAMQMTGELFNGELVCRECGFINVKNSA

SEQ ID NO: 333296 - protein, 413 aa, unidentified
MDVLHPRCCGLDVHKSSISACILLREAGRVQKHQRRFGAMTQELQELAEWLRQFGVTQVAMESSGVYWKPVWNILEGQFTIVLANAQHIKNVPGRKTDQKDAEWIAQLLQYGLLRASYIPCEIIRDLRDLTRMRTSLSQEASRISSRIQKVLEDANVKLASVATNVLGKSGRAMLEDIIAGEDNPEHLASLALGHLRVKIPQLRLALEGKIRSHHRFLLGRLLDQVQFVEHEIALLDERLEDIGRQRPDLAQAVARWDTIPGIDRVAAWALLAEIGDNMAQFPTAEHLASWAALCPGNHESAGKRLRGTTRQGSPWLCRMACQCAWAAARTKNTYLSSQFRRLAARRGKKRAIIAVAHSLIVIGYHLQKNQSNYEDLGGNYFDRIHSDGLKRYLVKRLQQLGHKVTLEPMEAA

SEQ ID NO: 333297 - protein, 368 aa, unidentified
MKKDSTIKQSPKQAAASREGPITIGMDLGDKTSRYCELGDNGELLTEGSVGTTKKAFLQKFAGLKRRRIALEVGTHSPWVSRLLKGLGHEVIVANARQVRVITDSSRKNDRMDARMLARLARVDPQLLSPIQHRSEQAQQHLAMIRVRGALVEARTKLVNAARGFSKAQGERLPACDAATLGVEEMAEFPAGLQEVLRPLLEQVESLTEKIKQADSKLEQIARSEYPETVLLRQVSGVGVLIALTFVLTVDDRQRFGKSRDVGCYVGLRPRQRDSGESQPQLGITKEGDRYLRTLLVQGAHHILGWRGPDTDLRRWGLKLASRGGKNGKKRAIVAVARKLAVLLHRLWVTGEVYEPLRNSAQLAQPAA

SEQ ID NO: 333298 - protein, 331 aa, unidentified
MYNSIGLDISKRLIAVHIPINKTDIEISNDISGMKKLVSKLKKLYKKDYEDIVFIYEPTGSYSSILTKFCNNKNIKCFIINPSQFSNHSKALGQRVKSDKIDAQVLSKAIHLARDGEIKVPAYNEVVEEIKELMGYYKFTTKQRVQNSNHLEALKAKDGSSYAIKDLENNIKILKEKEKEIIYTIQTIIASDDELLQGYNNIISITGIAEIGGIVLLHLFIKYPEANQRQITSLAGLDPIDKSSGTSIQSKSRISKAGSVLYRGSLFLGSMSAIRYDDNFKLFFDRLKSKGKHTTLAQTAVMRKMIIIAHSLYKNNKKYDKNVYKKATGVN

SEQ ID NO: 333299 - protein, 344 aa, unidentified
MEYYVGLDISLRSCALCIVDSKGEVYLERELPCEIEDIANFLAAFEHPVERIGFEAGALSQHLYFGLQSKGFDVVCMEARQVSAALSAMRNKTDKTDAKGIAQILRTGWFSPVHMKSREAHGVRALLSARKALLKKTMDLANEVRGLLKIFGVRLPRTVKHGSFDALVRPMIEMDDVLAHAIIPLLDARVVLFQHYLELDRRVKRAASQDEVCMRMMTVPGVGPIAALTFKAAIDDPTRFKCSRTVAAHFGLTPRRFQSGEHDNPGRISKAGDRNVRATLYAAANALLMRTMAGSQIKSWGMRLMRTKGRRRAVVAVARKLAVLLHRMWIDGSEFRQNQVGGTA

SEQ ID NO: 333300 - protein, 348 aa, unidentified
MAMTIVEADRAVIGGVDTHLDVHVAAALDPVGGVLGVESFAASRSGYAALLEWLGSFGTVAKVGVEGTGAYGAGPCRFLVDAGIEVVEVDRPNRQVRRRLGKSDPADAVEAARGVLSGRSTGRPKSRDGKVEAIRVLLVAKRSARQGRLRAIHQMRQLSYTAPEELRARFKGLSTTDLVAEAAALRPRAGGDTVIYATKVALASLGRRCLELDEEIDHIDSLLAGLVEEAAPELLGVYGVGVDTAATLLVTAGDNPERLHSEAAFARLCGVAPIEASSGKVTRYRLNRGGDREANAALWRIVMTRLSFDPRTRAYMERRTKEGRSKREVIRILKRYVAREVFRVLPRA

SEQ ID NO: 333301 - protein, 316 aa, unidentified
MYLGIDVSKLTIDCCLIADGQNHQKKFQNNKGGFEQLIKWLQSHKVSDKLHCVCEATGTYYEALAEYLYSRYTITVENPRKIKGYAIAELQRSKTDTQDAKLIAQYCQDRKHKLKAWQPPAKEQKQLQEIARYLDHLKQQRATEKAKQHEAPDYIKSHIQTTISNLTAQIKTVKKQLLQFYKDNPSYNNLRKRLKTITGIGEQATAVLLSTYKRHEFKNAKQFTAYLGLDPRKYQSGTSVNGKSRISKIGSSEIRKSLYMPAVVAYRCNAFPEFVGRLKNKGKHIKLILIAIMRKLAVIAFTLLKNGQDFQVERYK

SEQ ID NO: 333302 - protein, 361 aa, unidentified
MGRKKKQRLCVGVDLHKTQFTVSALTEDGEVVLQEEYRTTPDGYSEFIEELHRYEEEDGCSIELAVETTGNARFFKNQMEKEFFDVTVVNTNKFKVITYSTKKTDANDALTLAMYLQKEMLPEAHLCSQTSEEIRRMLKTRRILVQSSVKIKNQIHGMLLGYGIETNAAQFQSKRKRQDLINDLADHDYSEFTASSLEVMLNILDVLAEQIKDVEEQIEQMVEDNEDVELLKTIPGVGKIGAATIASYTEDLERFDGDFKRFAAYIGIVPSVHNSNETVYLGRITKYGPQELRTAFVQVALGMIRLSKQTSNWRLIEDYRRKKKDKGSGRAIIAMTRKIARIVFVMLENREPFNPELMLSK

SEQ ID NO: 333303 - protein, 445 aa, unidentified
MKVMHERVAGIDVHKKMVKVAIRSPGKGRWARKTDVVTFGTFWDELRAMARELRARGVTHVAMEASGVYSDPVYFALAEEGCFEEVLVVNPAHVKGLKGHKTDARDCARIAELLECGLLQGSWMPPQEIREMRDLVRYRQRKVQARTSEVQRLGKVLETAGIKLGSVASEITGVGPMEMIEALIGGERRGAVMAQRARGAARTKEKMAALARALEGRFSDHHAAMCRLITDQVRDLGEAIARVEAQITVKAAAWEREISLLKSIPGFGDATAWAWIAEIGPAPREWFSGHDKLASWAGLAPANHVSAGKRRNAGTTDAGAWIRPVLVQAAWAAIRVKGRLQARYDRLVRRMGGQNSPAARKKAIVAIAHTLLKIAYAVLKSGQPYTEPGPDFYASREAPAQRQAYLQKQIQRLYPGCTVTVTITQPPATTAPPGTPPPGHIPKAV

SEQ ID NO: 333304 - protein, 365 aa, unidentified
MVMWRLGMAVTGGTRRVVGGVDTHKDLHVAAVLDEQDRVIGTRSFATTRQGYRQMLAWMRSFGELQRIGIESTGSYGAGLLRSMQQAKVAVLEVTTPDKQDRRRRGKNDDLDAQNAAHAAFAGQRTVTPRSRDGMIESLRILMACRRTAVSARRVALQMIHNTIVCAPDGLRDQLRSLTRMQLVRTLASWRPDLTGYRDLDSAYRIGLKSLARRYLELHDEIADLDVMIAAIVDELAPNLVARNSIGHIGAAQLLLTAGDNPERLRSEASFASLCGVSPVPASSGKTVRHRLNRGGDRAANSALHIIAIGRLRTDQRTKDYVARRIAEGHSKLDAIRALKRYLAREVFTLITQRRREINATRIAA

SEQ ID NO: 333305 - protein, 424 aa, unidentified
MKNTAARKRKQIPEGYLVVGVDPHKKRHAAVAITQDFTTQAKFKVDNTKEGLDMMLGRAREEMVKCGCRGVMFAIETGGHYWRNIAYYLDERGIPFRFINQYTLKRRREGKDLNRRKNDYRDSEVAAQLLCTGEFVESVIPQGAYAELRTSHNAYQRLVKERTRITNLVKGLLDALFPEFTQVFKDPGGLTALTVLSACPIPGVIACMTEDEFVSTVEARHKGRRLMRKKLRVLHYSARRSIGIQAGARSVSFEIGFLVDKLELIRQQIRIMEETLVKLVDETEEGKYLLSIRGLNYTAVAGLLAELGCFKLYRSAKQMIKMAGSNPTESESAGKKRSKTPMSKQGRPLLRYCAWTAVIPMLRFNADFRAWAKQRRERPAHANPLNGREIVGAALNRLLRLAFALVKNQTYYRDTRPALIPVAV

SEQ ID NO: 333306 - protein, 340 aa, unidentified
MILYGAIDLHSTNNVTVVIDEQDRVVYQKRLPNDLALILKELSVYQSELQGIVVESTYNWYWLVDGLMEQDYKVHLANTAAIQQYEGLKYTDDHSDARWLAHLLRLGVLPEGYIYPRAQRPVRDLLRKRSQMVRQRTTNLLSIQNLVTRNTGSSLSANRVKGLDVQQVDELLPNPDLALAVKANLSVLCSADEQVQILEQTVTQRVKLRAQFSFLKTVPGIGEILALTIMLETGDIRRFASVGNFASYCRCVGSEKISNGKKKGKGNTKNGNKYLGWAFVEAAHYAIRFNSKIKSFDQRKKAKTKGVVAIKAVAHKLCRACYYIMRDRVPFNITKAFGQN

SEQ ID NO: 333307 - protein, 501 aa, unidentified
MRRKAYRATDVKDVRLEEVLKRAPAGAAAAGADIGKEAIYSVVRWSDGSFERPWKAKNPEEVATLVGVLRALAGQRELIVAMESTGSYGEPLRSKLAEAGLAVHRVGGKAAHDYAEVFDGVPSQHDGKDAAVIAELAAFGKASPWPFRAKSAWEAELGSSVDWLDIQQNLQRMWIGRLEALLARYWPEATRVLEFSSVTLLRALAHYGGPADLAKDPQASARLASWGGYWLRKEKIEKFLASAAQTVGVPQGAEEVRRMQQYAAMALAARQETRTARRELKRLAVGNEAIQRQAKAVGIGTACVLWVMLGDPKDYPCGEAYRKAMGLNLKERSSGKYQGMLKITKRGPSIVRRWMYFAAMRTAQSTFVKPWYEAKKAKDKDRGNGALIAIARKLALALHAVGARDTPFEPWRLFSQKVLVRKQQRAKRRATRSRGNSGREVLVGMGAPPPNPRDLSPGANPGDQKNERGRTPPPPSPVLAPGSALGSVPTVALSSAQVKRV

SEQ ID NO: 333308 - protein, 426 aa, unidentified
MKKYTQNDKIEQVTEKTLVVGVDIGSTKQYARAFDYRGRELDHVFCFMDCRSGYELFLDWMQGLRSANGMDKIIVGAEPTGHYWFGLRDFLDAAGIPLVLVNPLHVCRSKELDDNNQTKNDQKDPKVIARLVTEGRYSIPYIPHGVYAELRGMWFLRQRVVDEEVKLRNRIARWFKIYFPEYTQAYHSFAAKSSIALLKAACLPEDILQLGADGIVELWRAMRLRAVGKKKAESLLAAAARSTGQKDGAGAARMEMEMLLEDWEALRKRHEKIDEKLGELCEQIPESKNLLAIKGIGLTTVAGFLAEVGDIKRFDSPKQIVKLAGLALRENSSGKHKGKTTISKRGRARLRRLLFAGVMPLLATNDAFHSLHVYYTTRKQNPLKKKQSVIAICCKLVRIFYALLTKGTAFDSSKMLGDIHRPPMAA

SEQ ID NO: 333309 - protein, 391 aa, unidentified
MIYVGIDIASEKHDFFMIQAETGITFSKSSITIKNSDDGYKKLHESIQDFCGATGDSQIRIGLESTGIYHTNIISFLLSQNYQVMMINPILTNMARKASKVHCPKNDNLDSQTICKYMIDNSDKFSPYTLSLYHNEALKSLSRKRFYIVQDLRKAKLAVNSLVQQIFPEFKSFFSNIYGDSAIAILKEYGTPKNLAKAHTKKVASLIHGRCKCTAEQLIAAAKVSVGISEPHLAFQLTDAIEEMEHIQKRIKTYDAQIKEYVDMLCPNLLSIPGVGYTTAGLIAGEIKDIDRFHSAESLISYSGVDVTVYESGKYKAQHLMMSKKGSKYLRYALFQAARIIWQHDPVFQSYYNKKKAEGKHYYVILGHIQKKLCRVIYSVLKSGSLYSSAS

SEQ ID NO: 333310 - protein, 353 aa, unidentified
MKCDKYMGFDVHQATTVVAVLDAEGKLVLETIVATEAAPIIRLLQGLSGPLHVTFEETTQAGWMYDVVRAYVAEVIVCDPRRNKLLGEGSKGDKPDARKLAELLRAGLLRAVYHGHETTRTLKEFVRAYETLSVDTMRTMFRIKAIYRGRGIRTPGSGVYQLKQREQWLVRLTEPGVRQRVKWLYEELDHLRPLRKQAKQAMLTEGRKHRAFTLLRSIPQLGPIRCALIVATLDTPHRFRTKRQLWAYCGLAVVTHMSAEYEIKAGQVVRSRKPITTRGLNPNGNRRLKDVFVGAATGGMQVEPYRSYLRGLEQKGMRTEMARLTLARKIGAIALRIWKKGETFDPKKLNWTT

SEQ ID NO: 333311 - protein, 416 aa, unidentified
MKKNSKSPMKKEQKAKRAKAQRPVQREPKEVLAELVEKLQGKLGLKARSASPAEAGPGAELSPNLDRLTVGVDLGDQWSHYCILGLQGETLSEGKLQTREAEVAEFFQALPPARVVMEVGTHSPWMQEIIAGEGHEVLVANPRLMEGSKRRKRKSDRIDAHKLARLGRVDPPSLHPIRHRSREVREDLVVLRAREALVAARTQLINATRGLVKSMGTRLPKCSSPSFEQKVKDAIPEQVREALQPLVQLTDALSDCIQSYDQKIAELGSEKYGHTKLLRQVKGVGPITSLAYVLTIENPEHFAKSRDVGPYLGLVPKQEDSGESQPQLGISKTGDTMLRKLLVGSAQYILGPFGPDTDLRRYGLRLCERGGKNAKKRAAVAVARKLAVLLHRLWVSGEVYEPLGYASSRAIVQPAA

SEQ ID NO: 333312 - protein, 386 aa, unidentified
MKRNDLSRSLVAFDQASTIVSVIELGLRTWLVAGLVPGLARQPLKKLGADAEALLMLLRRWQGQATKSGSPISRIVVAFEAGRDGFWLARWLQARGIEAYVIHPTSIPVSREHRRAKTDRLDAGLLMRAVLGWLRGEPKHCSMVAIPTIAQEDARRPNREHQTLVQEQTRVVNRMKATLIRFGIRNFNIKLRKARDHVATLRGPEDELLPPNTIAALLREIALLQLIREQIKAIEKARLEQLKQTPRKGTHPMVLMLAQIIGIGVETADMLVHELLSRKLRDQRAVARYAGLTGAPDESGTRRREKGLARAGNARVRRGMIQLAWRWLMQQKNTELAQWYLTRTTDAKPGLRKTMIVALARKLLIALWRYVTTGVMPTGVALRPAT

SEQ ID NO: 333313 - protein, 347 aa, unidentified
MKYVSTIGLDLAKHVFQVHGADIAGSPLFNRKLRRGEVLRFFEKLPSCLVGMEACGGAHYWAREIANLGHDVRLIPPAYVKPFVKRGKTDAADAEAISEAVIRKTMRFVPIKTAEQQADAMVLKTRALLVQQRTQSVNALRAHLAELGIIAAGGLPSVAALMTIVREGEDTRLPAAARFALMAVADQIDTLADQIFKLERAIVTEAKRDEDMRRLTTIPGVGAITAATIKALVPDPGGFKSARHFAAWVGLTPRPHSSGGKERLGGISKMGNPELRVLLVLGATAVLRIARNDDRARPWLKALLARRPFKVAAVALANKMARIIWALLNKGGIYHRPDPLSIAAVAR

SEQ ID NO: 333314 - protein, 340 aa, unidentified
MKEAITTIGLDLGKKVFQVHGVDAAGGVRVRRSLRRSQLLGWFAKQEPCLVGMEACATAHYWGRELSRLGHEVRLIAPAYTKAYVRRNKNDAADAAAICEAVSRPGMRFVAIKTAAQQAAGGLHRVRDLLQKQRTMLINQLRGLMAEFGIVAAGGPQHVKDLLAVLADPADARVPELLRGPLLGLAQVLGDLERRVEALEGRIVAWGRGNATYRHLITVPGYGPILAGAFAALVVEPSTFRSGRDFSASLGLVPRQEGTGGKLRLGPISKRGNGYLRRLLVSGAMSVLNTKRACQDPWIARLLASKPRKLVAVALANKMARIGWAMMVRQEDFRPRSAVA

SEQ ID NO: 333315 - protein, 341 aa, unidentified
MGIVVAGFDVHRAQITFDALDTETGEIATGRIRAAPEAVEQWVGRFAGREVHVALEACTGWYFVTRSLERAGAVAHLAEVAETRALRGRKRRAKTDRADARWLRKLLSEGRLPEAWIPPDHLCWLRIRTRLRKTLGDEAVAWRQRAQATLFHLGLPALPTGYEGQRARQWLSELKLPAAARERIEVCLAMIEAIEAQMAPVESELRAYSRRQRGCQALERLFGIGGVTAPAILAELGDVTRLHRSRQAVRMAGIDIGVNRSDRRSRVGKLSKQGAPALRWALYEAAQSACRPTSPDHAHYLALKERGLSHPRTSLTIARKLARRCYHTLRELGPAALEEPA

SEQ ID NO: 333316 - protein, 397 aa, unidentified
MVHPDAAGIDIGNESHFVVVAPGRDTQPVREFGSWTSDLNCMAEWLKSCGIRTVAMQSTGVYGFAVYDVLEQHGLEVFLVNAHHTKNLPGRKTDVQESQWLLKLHTCGLLRNSFRPLEQIRKLRTIWRLRDRHVKEASRSIQHMQKALTSMNVHWQEDLLLELEQAVAAYDFVQKQLEECDRRLQTYLTAMPSRVMAENNGGDKPATPPAGERGTGGKKKKRIPSRNAPKSFNLAVELKRICGVDATRIEGVDVMTVQTIVAELDADLQSYWPSENHFASWLKLSPQRDISGGKVIRHTRETSRNRVAAMLRMAATTLLRSDSYLGARYRALRTKLGAAKAVKAMARHLACLIYRLFTKGQEWVDRGSQNFERKCEEREKAALQRKATALGLKLVAA

SEQ ID NO: 333317 - protein, 346 aa, unidentified
MTIVESARPVTGGVDTHADVHVGAAVDVNGGVLGVESFATTPSGYVALAGWLAAFGTVDRVGVEGTGAYGAGLARHLRGQGLLVIEVDRPNRQERRRNGKSDELDAIEAARAALSGRASGIAKSADGDVEAIRALLVARRSGRNVRIKYLNQIRHLGFTAPAELRERLRDVPCDQLARTAAALRPTVGGDTVVYATKLAIATLGRRVVALEVDGERLDRLLDTLVHRTAPRLLEVYGVGTHTAAILLVAAGDNPHRLKSEAAFAHLCGVAPLRASSGKVDRHRLNPGGNRQANHALWRIVFTRMSGDERTRKYVARRVAEGRSTREVMRVLKRYVARELYPHLVRG

SEQ ID NO: 333318 - protein, 426 aa, unidentified
MMNSNNTYPIHPKMTRTYIGVDSHRDSHTIVILNCFHEKLGQIKVGSTPSEFAKFIKQAKKYLQTGTTWAIGFEDVSAYGRSFVKYLVDRGYLVKHVDASKVATERGQTLHKTDEWDAECCARVLINQFDKLPNANPEDKFWILGGLVTRRNAITKINVMVKNSLHTAVAENYPHYKKFFSRLTTDSALAFYATYPAPHHLDNVTIEELAEFLHSASKGRLSTTKAELILTTVERDQVEQVEFQDKKDFTVRSLVRQVKTQLAEIAEIDKEIEEMLTHFDYPLTSIKGIDTLTSAKLISEIGDINRFKNAKALAKYSGVSPVTYASGMTNLQMANARGNRKLNEIFYRIALTSVMPLGVNKALINPIFYDYYHKKISEGKLKNQALKCVMRRLVNIVFNVMKHQRPYENPQLGYVPKEETQSKEVA

SEQ ID NO: 333319 - protein, 430 aa, unidentified
MKSNTQNAKIEAITEKTLVLGIDVGSETHYARAFDYRGVEYSKKPFKFSNTEAGFVTFKAWVLDIKEKHGKDKVIPGMEPTGHYWFNLGKFLQDNEMKPVLVNPHHVKKSKELDDNHPTKNDRKDPKVIAGLVREGRYMIPYLPDGVYADLRTASNIRFQLQAELTRIQNRINRWFNIYFPEYKTVYGKPDAKSGILILKEAPLPEDILTLGIDGVNQIWRDAKLRAVGKARAKTLIEAAEHSVGSKEGAVSARMEIRMLLEDYESRNIRLQEVMGLIEGLVNQIPMAEKLLEIKGVGIKTVSGFLAEVGDIRRFNDPKELQKLAGLALVENSSGKHKGKITISRRGRKRLRYLLFEVAMSLVAKNPEFRELHNYYTTRRLNPLKKMQSLMAIAAKLLRVFYAILTKGVGYDPKKMVNDIRRPAAYAQAA

SEQ ID NO: 333320 - protein, 417 aa, unidentified
MDTLFPKVAGLDVHHKTIQCAVRRQQQSGKLLKETRCFGTMTRDLRALADYLVAMGVTHVALESTGVLWKPVWNVLEGRFTLLLVNPVHLKRVPGRKTDVSDAEWIAHLLQCGLLRGSFVPARALRNLRDLTRHRAQLASEHTRVANRIHKLLEDSNIKLGAVASDVLGKSGRAMLRALLQGETDTEKLAEMALGQLRKKIPQLKLALEGNCTEHHRYVLGRLLSHLGYLESQSEMFSERITKRLDELLEVADFERLDRIHGMNRITIENVIAEIGVDMSVFPDEHHMVSWCGMCPGNEESAGRRLRSRTRKGNRWLRRAMAEAAWAAAHTKDSYLSAQYRRLVPRRGKKRALMAVGHSLLVIIYHVLKHKVEYKDLGPHYFDQLEPERLRRYLVKRLERLGYDVTLSIRSPDDHAA

SEQ ID NO: 333321 - protein, 314 aa, unidentified
MNAPIFVGIDVSQAQLDIAVRPGTRFAAANDEQGIVTVVEQMRTLAPILIVLEATGGLEVPLTGALATVGLPVVVVNPRHVRDFAKATGKLAKTDALDAQILAKFAEVIRPATRPLPDEQTQALAALLTRRRQLVEMLTAEKNRLSTAPKPIRKSVRAHITWLERELMHTDTDLAQTIRESPVWREKDELLRSVPGVGPVLTTTLLANLPELGTLTSKQIAALVGVAPLNRDSGTLRGQRTVWGGRAHVRATLYMATLVAARFNPVIRTFYQRLRTAGKAKKVALTACMRKLVIILNAMLKHRTPWRTEGTAHA

SEQ ID NO: 333322 - protein, 465 aa, unidentified
MARKSKNVKSKDHKRLPRSLKTIHANAAGIDLGSREHWVCGPPREDGTPNVERFGTTTPELFRLADWLKEQGVKTVAMESTGVYWIPLFELLDSRGLEVLLVNARHISNVPGRKTDMLDCQWIQLLHACGLLRGSFRPSDDICRLRALIRERNTMVEQRSDWVRRMQKALDQMNVCVHHAVSDITGVTGMAILRAIVQGERDPLALARLRDARCRKSEKQIAEELTGNWRPEHLFNLRQALKMYDQLCAVIEDYDTEILTYITKYQPQEAASHPAPAHGSKSKARTLAKRGQEPLRQALYGFSGFDLTTIDGIGVDTASVILSELGLDFTMFPDESHFVSYLRLAPNLSISAGKKVPSKFKPTTCTRVSTALRMAALTLRNSQSALGGLYRRIAWRKGASVAIFATARKLAQLIYRLVRYGQAYVDTGTKAYDARFNQRRLKFYTKALKEMGYTLQPLTENALTA

SEQ ID NO: 333323 - protein, 427 aa, unidentified
MKYNQNTKILQVTEGTLIVGVDIASAVHYARAFDHRGVEIGKLLKFPNDAEGFGQFISWVKAIGERAKKSKVMVGMEPTGHYWFNFAQQLKDQSIKIVLVNPFHVKRSKELDDNNPTKNDRKDPKTIAMLVKDGRYMEPYIPEGIYSELRTAMETRWQIVKQLNTIRNRVKRWLSIYFPEFNKVFGDWEGKAAIAVLRDFPTPVKIIEKGVDGIIGRWKQDKLRAVGRKRAMELFEAARMSVGVREGIIAAENDLKFLLENHEMYLQQYERIMNLVEQLAKEIPGLEEMLKIKGVGLITAAGFVAEIGDISRFEHPRQMQKLAGLNLKENSSGKHKGKSSISKRGRRRLRSLLFQAIMPIVAKNKEFGELHQYYTTRSQNPLKKKQSLVLLSCKLIRVFFALLTKGIVYDPQKMLKDIKRPLLQEAA

SEQ ID NO: 333324 - protein, 352 aa, unidentified
MKYYKTMTKYNCGIDLHTRQMYICVMDKDGEVHVHRNVRGNDFEYFLNLVEPYKHSLTVCCECTFNWYWLADACLDAGFEFVLGHALYMRAIHSFKSKNDRQDCWQIAHLLRSNLIPPAYVYPKEKRSVRALLRQRTTFVWKRAEILTQMSMSVMANGHKPLNSNNRPRDKWIEELRELYSDPMDLLAVDASVQMVKQFDETIHKLDWALHKHTNDHFGVEYNTLKTTPGIGITLALIILYEIDDIRRFKSVQDFLSYCRLAKGTVASAGKIKGTQGSKIGNGYLKYAFHEAAVLGKRRNPELKKYFQRLEAKKGKHLANGILACKLARAVYFMLRDHKVFDVSKVTRQRSA

SEQ ID NO: 333325 - protein, 381 aa, unidentified
MKTMTRDLESSVGVSVLMAFELGQRWWKVGFTTGVGQRPRTRRIAAGAMEVVLTEVGRAKARFGLPEATPVISCYEAGRDGFWLHRYLSAHGVTNHVVDSSSIEVNRRARRTKTDQLDLAGLLTLLARYQAGDRRCWRVVRVPSVEDEDARQLHRTRETLQADRTRLINRLKATLAVLGLRLAVRRDFATRVDAATLPDGRAIPPGARQRLARDWALLSAVEHQLTELDVARDALSIDPTTPLGHAVARLQRLRAVGPAGAWVLAAEIFGWREIRNGRQLGALVGLVPAVYQSGETRRDRGITRAGNQHVRRLMVQLAWGWLRWQRNSALSQWYQARFSTGGPRLRRIGIVALARKLLVALWRYVDQDVVPEGAVMKAATP

SEQ ID NO: 333326 - protein, 408 aa, unidentified
MLNAVGIDVSKGRSTVAVLQPGGVVIRKPFDVYHNKSDLNDLASFIKSLDGDTKAVLECTGRYHRPIVEALHRAEIFVSAVNPHLIKNFGNNTIRKVKTDPADAKKIARYTLDNWHELREYSDMDSKREQLKTMNTQFDFFMKQKTAAKSNLIALLDQTYPGVNNLFDSPVRSDGSEKWVDFAYSFWHVDCVRKLSLNAFKERYTAFCKKHGYIFNELKAEEIYSASKSLVATLPKENGYRDLIRFSIKQLNLESEHVEKLRVDMNSLAAQLPEYPVVMGMYGVGTTFGPQLMAEIGDVMRFTHREALTAFAGVDPGRDDSGQRVAKSVKASKCGSARLRKTLFQIMTCLLQNMPEDDPVYQFLDKKRSEGKEYYVYMTAGANKFLRIYYGKVKEYMRTLLDEQSQNK

SEQ ID NO: 333327 - protein, 331 aa, unidentified
MFPVGIDVSKNTLDLCMLYDGIKGRIKTRNIQNNRHSVENILRWLRLQHCGPEDVHVVMEATGVYHERLATELHDAGFYVSLANPHRSREFARGMGIMTKTDKVDAYMLACYAFLKNPHRWEPPAPEIRYLGALLRRRDVLLGDALREENRLEKYLSTDTPADIISSCRRMAQLLREEVSNIERQIKAHIKASPALRRDYTLLTSIKSVGPQLGMHMLVVLRSHNFVSAEQAAAFLGVVPIEKRSGTSVRRRPRMSKIGPPQLRAKLYMSALCGKIYNKRMRNIYDEMCLRGKPKMVAIGALMRKLVHWCYGVLKTGTVFNDEDLKPVLST

SEQ ID NO: 333328 - protein, 387 aa, unidentified
MEVRIENTPSARTNNDPVHCFVAIELSKSSWVVGFQTPLSKQTSRYQVKACDAEPLLELIERIRTRVAREVGRPVEVTSCYEAGYDGFWLHRVLEAHGIHNHVLDPASLQVSRRARRPKTDRIDADRMVRALIRHLRGEPEACSVVRVPSPEQEDARRLHRERRRLITERVGHVNRIKGLCATQGIYNYEPLRSDRLERLDKLRTGDGRALPARLKTEIVREIKRLEVLLEMISTVEAERDAILKDKKSTHLNADKIKMLAKLKAIGAEFSTTLVGEVFYREFSNRRQLGSYVGLASSPFCSGSLDRDQGISKAGNSKARAMMIELAWTWLRYQPDSALSRWFQARVGNLKGRPRRIAIVAMARKLLVALWRYLQTGVIPTGAELKA

SEQ ID NO: 333329 - protein, 376 aa, unidentified
MQTSTARTPINGHSATICVAIELSQRSWVIVMHGPDQDRLSRYKLAAGDCEGLLALLARVRRRAGRALGQAPAVVSCYEAGYDGFWLHRRLLAAGIENLVIDPASLTVERRARRAKTDRIDGEKMLRALLAYRRGEPRVMSVVRVPSPEQEDARRHTRERERLIKEHTGHLNRIKALLRTLGIAAGEPGHGEWPAWLVRQRDRQGNPVSPRLVAELAREHARLRLVREQIAALAEEPVPAATTPARVQLARLKGIGPVFAATLAGELFWKTFDNRREVGAYCGLAPSPWQSGGVARDQGISKAGNRRARHVAVELAWLWLIHQLQSALSRWFHARVGDLRGRVRRIAIVALARKLVIALWRFLTTGLVPTDAVLKA

SEQ ID NO: 333330 - protein, 414 aa, unidentified
MDVVVERCAGLDVHRDSVVATVRVPGKGKSRRRRAQQTQSFGTTIDQLERLADWLAGFGVTLVGMEATGVYWRPVFWVLERRFECWLLNAQHLHNVPGRKSDVIDSAWCCQLVEHGLVRPSFVPPPEIRRLRDLTRLCIAQVEERTRAIQRLEKVLQDAGIKLSSVASATYSASARAMLEALLAGVSDPAALAELAKARLRAKIPQLREALANRFELAHHGVLVAGLLAHIDALDQTVATLDARIDAATEPYAELVELLCTIPGVSVNTARVLIAECGVDMSVFPSAQHLVSWAGICPGTNQSGGRHRSGKTRHGNRWLRKTLTEAARAAARSKNTYLASHYWQIRGRRGDAKAIGATRHDILIAYYHITRDRVPFRELGPDWLARRHSPEHRTRRLVKQLEALGHTVTLEAAA

SEQ ID NO: 333331 - protein, 352 aa, unidentified
MSSIKRDGVDLGDRNSWYCILDETGHIQVEERVRTTAKALQEVFGGMPRSRIALEIGTHSPWISRLLSELGHEVIVANARKVRLIGESRKKDDRLDAQTLARLARIDPQLLSPVKHRSAQAQADLMTIRARAGLVRARTALANTARGLAKSFGERLRGCNVRNMNPEKTEGLSPELQQALQPLLVALEGLSEGIAEYNQRIEKLAEQSYPQVELLKQVKGVGTLIALTFLLTLEDPHRFLKSRDVGCFVGLQPGRRNSGQSQPQMHISKEGDPYLRTLLVQGAQHILGPFGPDCDLRRWGLKLAERGGKSGKKRAIIATARKLAVLLHHLWVSGEVYEPLRNGHRMAVPAAA

SEQ ID NO: 333332 - protein, 380 aa, unidentified
MASMHDSVRFKTTVYAAIELSKKSWVVAIARPDRDRPSIHRIAGGDLADLIGRLRKAAGEKQRIVVCYEAGYDGFWLARSLAKIGIDCRVLDPASIQVNRRARRVKTDRIDSLALLRALIAIDRGERHVCAVVRVPTVEEEDARRSHRERQRLVRERTGHINRIKGLLFAQGIRGIEPKRRRTRIDFGKLTTAEGRPLAERLRRELEREYQRLELVQSQLRIVEKERDTADAQDPAVERKRELLCALQGVGGASAAILAREVFARPFASRRQLGSYLGLTPSAYDSGSTTRCQGISKAGNSWARRVLIEVAWLWRKYQPGSPLSHWYARKTADQSPRIRRIMLIALARKLAISLWRYVETGLVPDGAVMAKTTPHMAAAT

SEQ ID NO: 333333 - protein, 342 aa, unidentified
MSIVYVGLDLGSSNFQQVALNHDGVSRVNRDFTTSECNLVKAFSDLKGEIHVHLEAGELAPWAASIITPLVTRVVCSHPKDNAWIAKDADKCDRIDAYKLAELLRLNRFKEVHYAPDQPRRNFKQLVQHYDEMTGQQARLKTKVKARLRMQGVIVTGERLFSATGRKEVLAKVEPRDLRTAITQLYAVLDQSVSAQAEARLLMLRAAQAFPEIKLLRTVPGIGPIGACRFSAYIHTPSRFSSKRKLWKYCRLSVSHRSSNGKPLRRPRLDRSGCGRLKDVSRKAFEVAVRSQKDNGFKRTYQRAFETTHDKTHARLTVQRKIVSTLRAIWLRRTPYCDELIR

SEQ ID NO: 333334 - protein, 326 aa, unidentified
MEHELHYIGIDTAKEKLDVDVLRPDGRHRTKKFANTTKGHDELVSWLKGHKIDHAHICIEATGTYMEPVAECLYDAGYIVSVINPALGKAFAQSEGLRNKTDTVDARMLAEFCRQKRPAAWEAPHPLERALRALVVRHQALTDMHTQELNRTETAREVQRPSIDAHLLWLEAELKRLEKQIKDLTDDDPDMKHRRKLLESIPGIGEKTSAVLLAYIGLKDRFAHARQFAAFAGLTPRRYESGSSVRGASRMSKAGHVSLRRALYMPAMVATSKTEWGRAFCDRLAANGKKGKVILGAMMRKLAQVAYGVLKSGVPFDASRHNPVAA

SEQ ID NO: 333335 - protein, 340 aa, unidentified
MDKHDFSGIEVSAKELIVAVEREGRTVPLECFANDAQGHQAVLRFLRGGKHPVRACMESTGVYGLDLALVLARAGIEVMVANPRAARHFATAMMQRSKNDRLDARVLLEFVRRMPFQAWTPPRPAILQLHALSRRLEALKDTLVAEQNRLHAARATDTTPAAVRRDLERSLRSLRRAVARLTVEAVKIIRQDSGLQLRFDLLLSAKGIGETSAIALLAELAVAPQDLDVRQLVAYAGLDPREHSSGSSVHKKPRISKHGNIHLRRALYMPALVAIRRQPNLHAFYEHLRARGKAKMVALVAVMRKLLHAIFGMFKHQTAFDGNKAFALPTPDISTTEAAA

SEQ ID NO: 333336 - protein, 353 aa, unidentified
MNTIYIGVDFHARQQTICSLKTDEGVVSTHNLKHQDKDEVRAFYQQFSGRVIVGIEASGYSPWFEQLLEELGHEVWLGDATEIRRRARWRQKNDRRDAELILDLLVHDEFPRLHRPSPQSREILRMLRYRQKLVKIRTIGKNSLQALALQSGLAKRSHLFTKAGQQELRTVQMSPAMQWQREQWFQLLEPLNERLVETMLWLKQQSQNDARIKLLRTHPGIGLLTSLCVVHTLEPVSRFRNQRKVAAYAGLEPMERSSAERKHFLGISKAGSRVLRYLLVEAAHTAVKKDDDLKRFYQRLAMRRGRPKAKTAAARKLLIRTFIMLRDEIDYAEFRRRAVAARLARQSSRPPCL

SEQ ID NO: 333337 - protein, 408 aa, unidentified
MQVEHPVCCGIDVHKDTLTACLRRVDTNGQVSKESREFATTYTALLTLSDWLVEQHCPIVAMESTGVYWKPVYHVLVGTVEVYIGNAHELRSRPGKKTDKRDAAWIAELLAHGLIHPSFVPPPEIGALRDVTRTRVAFVQTRSQSKNRVHKLLEDTNLKLGSVVSDLFGVTGRRMLAALVAGERDPHVLASLALGALKRKRPQLELALTGQFTDHHGTLLGLLLELIEVLDRQIATLDQEIGALVAPLQAQIAQLDSIPGVDIIAARDILAEIGTDMSRFGDAARLASWAGVCPGNHESAGKRYRGKTRKGNRYLRRVLVQCAWGARQTPTFLGHTFRRLEVRIGKKKAALAIAHKILVIVYHLLAAGTCYEEVRYDQYNPRQEARERQRAIKALERLGYTVTVERAA

SEQ ID NO: 333338 - protein, 415 aa, unidentified
MALKIVYKICCGIDVHKTFVVACIASTNSKGITTYERHRFSTYTSGLKDLLQWLLKRNCKDVCMESTGKYWIPIYNILENDCSIVLAHPKYVKAIRGKKTDKKDAKWIADLFKHDLVAGSFMPPADIRQLRDLMRYRFKLTCFQSSEKNRLQNCLTVSNIQLGNVVSDTFGKSAQAILDKILENPEDTSFDLEPFVYRSLKKKLPELRDAIDGYITPEQAGKLKVIKAHYESLESRKAELEELILALAAPYQQELAILQTAPGISSGFTAIGITSEIGTNMEAFPSAKHLCSWAGLTPTNNESAGKKKSVRVSKAGCYIKPLLVQCANAVVKSKKHPEIRNRYLRLKKRRGHKKAIIAVARMLLTALYHMLKNGENYNAELYRKSDLPPIDCEITVEQALIIARNQGYRIKSATA

SEQ ID NO: 333339 - protein, 343 aa, unidentified
MQTTTTIGLDIAKSVFQVHGVDAAGQVVIRRQLKRRYVLSFFQKLPQCLVGIEACASSHHWSRELQALGHTVRLMPPAYVKRYVKRQKNDATDAEAICEAVTRANMRFVPTKTPEQQSGLVLHRTRHLFIRQQTSVINAIRAHLAEFGIVAPVGRRGVEELLTVVADPNDKRVPEIARACLSAFGAQLRSIKEQVLEFDRLITAWHRSNEMSMRLDEAPGVGPVLATAVVATVADPKVFRSGRNFSAWIGLVPKQHSSGGKDRLGSISKQGDRYLRGLFVAGALAVIRYAKIHGTKHRPWLTALLARRPTKIAAIALANKIARMVWAMMAKGERYKEPIALAA

SEQ ID NO: 333340 - protein, 362 aa, unidentified
MTTVRQLNVFEEEAKMRFYSQQHRYYCGIDLQARTMYLCIIDQSGTVLVHRNMPSERGALLRAIDSYRDDLVIAVECIFTWYWIADLCDQLEIPFVLGHALYMKAIHGGKSKNDKIDSQKIAGMLRGGMFPLAYAYPQAMRSTRDLLRRRNYLMHHQSELLAHIQNTRSQYNLPAFEKRIAARSNRVDLADHFEEPMVRKSIEADIRVLDTLHEVLLTLEQSVLTQARHHDPVALQLLRTVPGIGKVLSLVILYEIQDVRRFPEVGNFISYARLVKCPHESAGKKSGSGNNKIGNAHLKWAFSEAAVLFLRDHKPAKDYHHKLVGRYGKAKALSIIAQKLGRTVYYMLKRKEVFDPNKFFSS

SEQ ID NO: 333341 - protein, 321 aa, unidentified
MTEVASDTGKATFVACFELADKRFKSEFKNSESGWRLFEKWLRKHGVKDVHLFFESTGRYGDDLAAWAFERGWNVTALNPLRTRRFAQAQGIYNKTDSVDSESILDFAKSSKGNGIRLWRPWSKSERELKDIYMELVGLQKMIIQESNRLESRIKSDIVKQSILTNIQNLEEVKDRLELEALRVIKGDPKLKGAYIALRSMKGIGDKTAIAILAKVDFDAFKKGRQIVAFAGLAPRKWESGTSVRKKEMISRVGHADLRAALYMPAIVAMTHDPEMKAFKLKLEAKGKPKKVIICAVMARLLRVAFAKVRDSKIVSLKAAA

SEQ ID NO: 333342 - protein, 370 aa, unidentified
MKKHATLFIGLDVHKDSISVAHVADDRRAEVTYVGRIGTRVVDVDRLIRRLEDKAVSLVVAYEAGPCGYTLHRHLTSRGVACLVVAPSLIPRKPGDRVKTDRRDAVTLARLLRSGDLASVYVPSVEDEAVRDLARAREDTVVTLKAAKYRLKAFLLRLGLHYTGRADWNDAHRRYLSRVVCPTPAQQVVYQELRHAVDEQVARLARLEAELRDQAERWRLAPVVRAFQALRGVQDTVAITVAAELGDLTRFDNPRQLAAFLGLVPSEDSTGERRRLGGITKAGNGHARRVLVEGAWAYRFPAKVSPHIQKRLEGLPQNVRDIAWKAQVRLCRRFRHMLARGKNPNVVVTAIARELAAFMWAIAREVPFNA

SEQ ID NO: 333343 - protein, 371 aa, unidentified
MTSMTVDPAAQVASRQIFIGVDTHKYAHVAVALDHLGARLAAQHVAANREGYAQLEAWASSLAGNGRVVAYGVEGTGSYGVGLASFLRRTGHRVIEVNRGDRRSRRSNGKSDSLDAEAAARAVLGGQAAAIPKSADGTAEMIRQIKIARDTARKARTSAIVTLKALVVTVPGELREPLGGMSDKALIEKCSALRPGAVSSPTASAKHSLRALAKRYQALEAEIREHDTILDDLTRSHAPTMREAIGIGADTAAEMLIVFGDNPDRIHSEAAFAKLCGASPIPASSGLTNRHRLSRAGHREANAALYRAVIVRMRFHQPTIDYVTRRTAEGLSKRDIIRCLKRYLAREIYQAVMTDHRARQHAASGGSATKS

SEQ ID NO: 333344 - protein, 410 aa, unidentified
MEVMHPDCAGLDVHKNAVVACVRHMLKGKAATIVKTFKTTTQELIALSDWLSVEGVTHLVMEATGVYWKPVWHILSDGGFELVLANAAHVKNVPGRKTDVNDATWLADLMAHGLIRASFVPDEPTRQIRDLLRTRKQFVRERSGHTQRIQKTLEDANIKLDSVVSDIMGLSGPRMIEALIAGQTDPSALADLAHRRLQASGAELEAALRGRVTTHHRFLLRLHLEQVDALDTAIARIDQQVDANVEPFRVAVEVLSSIPGVSSLSASVIVSEIGLDMSRFPSEGHLISWAGLCPKNDESAGKRRSTRMKKGAPWLKTTLIQCAWAATRAKQTYLQAQFLRIRSRRGANKAIAAVAASILTAVYHMLKNGAFYHDLGANHFDNRAKGRQVLRLVTRLQNLGFTVEITPHAA

SEQ ID NO: 333345 - protein, 361 aa, unidentified
MKLALKDNQDAFTGQEFYIGIDVHQKQWTISVQSNQMSLAKPLTIDPSAGSLSSYLKRQYPGGKYYAVYEAGYSGFWPARDLLTQKIETMVVNPADIPTMHKERSTKTDSVDSRKLARSLENKELRAIYIPERKAEEYRLLNRYRSQLVRDETRIKNRIKAILAEFNYRVPVAMEGNRWSGAYLRWLQAVTFETPFAQKAYNERLEQLAESRKRLSNVLRELKQMAIQEPSIGFLVKLLQSVPGVGFLTAFLLVVEVIDMHRFKRFEELVSYIGLAPSIHQSDERSYSRGLTKRQHKELRSRMLESAWIAVRKDPALTLKYGQLCKRMDKNKAIIRIAKMLLNRIRTVWKTQTLYAYGVIE

SEQ ID NO: 333346 - protein, 344 aa, unidentified
MLKSNIFGIDLAKTVLQVCQISQHGELVMNKALNRQKLKELLANAKQSIVAIEGCGSSNYWGRYAEQFGHEVRIISPKKVKGFLQGQKTDANDALAIANAALQIGLKFSKPKNEEQQSLQSLETSRVFLSRNITSLGNHIRAMLYEYGITSSRGVLGLKKAVQDTIDEPSLIPACLISTLRQLWEQYLHLKIEFTKLEKVKNALVRQLKPCKNLMDLEGVAEICSGMLYSTIGDGKQFTSGRQAAAFVGVTPKQHSSGGKTNMTGIIKNGGVKELRCALYQGALSYISRLPDEPTTLKQAWLIQLRERLGIKRTCIALANKTVRTAWAILRYETKYQKQLLITE

SEQ ID NO: 333347 - protein, 402 aa, unidentified
MSRMRPGASASGRKEPLAWMNTQRLLLTQSNGMDSSSPKRHLGAKLVSDTTSKRKGGVTMKLSRVGIDLAKNVYQLHGVDRSGKTVWKRRLKRHQWFKVLLDTVGPECEIGMEACAGAHHWGRQLQSRGYTVKLIPPQFVKPYVKSNKSDAKDAEAICEAMNRPNMRFVTVKRVEQQDVQATHRIRAELMTQRTAKANQIRGLVAEYGLVAPKHLSSLRAAIPCWLEDAENGLTGDFRTLLQGVWADLLLLDDRVCEMDRTIKRLADNNEDCVRLQQLRGVGPMTSTAMIATVGDARQYQKSRQMAAAIGITPKQHSSGDRDRLLGISKRGDVYLRTLMIHGARAVVARAKHRDDRLSRWVTNIANKKHPNVAAVALANKTARMAWAMLRHETDYDPDFAIR

SEQ ID NO: 333348 - protein, 422 aa, unidentified
MLEETHDDQEIIARVAALDIGKAELVCCTRLPSQNGSGRRVQEVMTYSTMTRSLQVMVDRLLELGVTRVVMEATSDYWKSPFYLLEAHGFDVWLVNAKDVKHLPGRPKTDRLDAVWLAKVAERQMIRPSFVPPKPIRRLRDLTRYRVALVADASAEKNRVEKLLEDAQIKLSVVASDIFGVSGRDMMNALISGQRDPAELAQLARRRMRVKILQLEEAFHGYFTDHHAFLLASMLTRIDQISADIAALEARIEAEIAPFAPAVERLDQIPGVGLIAARVIIAEIGLDMTRFPTPAHLTSWARFAPGVNESAGRKKGAGSTGHGNRYLASVLGEAAISAAKTDTFLGERYRRIARRRGKKRALVAVGRSILVIVWHLLSDPDAQFQELGANFYDTRLGTERAKRNHVQHLQALGYKVTLEPAA

SEQ ID NO: 333349 - protein, 345 aa, unidentified
MESMYYIGLDVHKKTISYCVKDRSGQIHREGAIPATRVGLDLWMKTLPQPWTAAMEATLFTGWIYDHLLPHAAALKVAHPLMLRAIAAAKKKNDRIDANKIADGLRCDFLPECYMASTEIRERRRTLRYRNLLVRQAVQLKNKISGLLMEAGVSYNKQKLHKVGYFRELLATNQEIGEGLRPLLRICRETLVRLQKTESALVRSLEHDPLLAERVERLMTIPAVGPITALTWVLEIGDVKRFSSIKKAISYCGLCGAENSSANMIKRTPLSKQRNKHLQSVLIEAAKLAPRRSSGLALVYDRERQKGNANRATLAVARKLVAYLVAVDRRQKEFLTVEKENRTAA

SEQ ID NO: 333350 - protein, 331 aa, unidentified
MNYSYFVGLDVGKQSFDASLMSSDEEELCHRRFANSESGIHSLLDWVSSRVTTLDRALFCAENMGSYVTSLCLCSQQLGFSLALECPLAIKKSIGLQRGKNDRVDAFRIASYAVSRHRKLKLYKLPDKNLVQLRAWMCIRDNLVKQKVSAIKLLEITTETSVLTNLSACRTFLEEQLSMIKEKISYVEQEMEKIINSSVLLAENYELLTSIKGIGMINAIVLLCVTDNFRRFSDPRKFACYCGVAPFEHTSGTSIRGKTRTSQLANREVKVYLTRAAITAMVWDPQLKAYYKKKTGEGKHKASVINAIRAKIIARCFAVIKRRTPFVTLRA

SEQ ID NO: 333351 - protein, 410 aa, unidentified
MKIAGIDVHKKVLMAVVVDASLPEEKPARRRFVTMPSELHRLLTWLREQGVEEAVMESTAQYWRSVWLELEPHMRLHLAQAFSNRAPRGRKHDFKDAERLVRRLIADELILSFVPSGEQRNWRGLTRMKLQLTRDRVRLQNQIECLLEEMRIKLSIVVSNLLGASGLRILRALAKGETDPQKLAQLGGERLQCTEEQLADALTGRAQPVHGAMLALQLERLQLIDQQMAQLNSMIAAAMKPHQDAVIRLAEVPGLGVDSAQQIIAEVGAQASTFPSAAELTSWVGTCPGKEESAEQNHSSRSAKGNKYMRRVLNQAAHAAVAKKGSHFQAVFRRLLPRLGYQSAIWAVAHRLCRLVWKILHEGVRFIEQGHEVAPREKKKRAQMLARALRKLGYEVTITPINQVAPMAAV

SEQ ID NO: 333352 - protein, 401 aa, unidentified
MGTVRDNATRVKRFRELKASLRTDRSRLLVGSDIAQAEHVVHLRHAHTRVVVPTLTIPNTTRGFTQLWARIQQAQRTTGCREVVCGLEPTGTYHQAVATFLATQGADVLLLSSSVAYWNRRTQDGTWDKHDRKDAANCADLLEQGKVLFYSQPTGPLAELRYLVKLLRRARGELAACKARWRTTLRPALAPMGEALLQRLWAELPAVLQAWERAAPGRPALAKGRLPLGLASAWADLGAQVTGVQARIAAIEQALTPVAERLPAYPLLRTIPGIGATVGAILLAEIGDIAWYTQFSQLRKLAGLDIVRVQSGQFAGQARISKSGRGLLRWALYHAAIGLARTGAGRTRLAALKAKRRGDRFAGFKAIVELAAKQLRVIWGVWRSGLPYDPRRGGGLSRQAC

SEQ ID NO: 333353 - protein, 396 aa, unidentified
MLFVGIDVSKDKSDICIKDQLGNDLIQRFKIANNKADLGHLYETIERIISKTSGNSDVVFGMEATGIYSLPLYSALKRDGYKVKLYNPIQTSGFRKMNIRKTKTDPIDSAIIADMLRYSEPPQVNEIKDLNLYQLRELVRIRHRLIEKQTLCKIQLVRNIDTIWPDYKSVMPRVFGATSIAILKKYSVPSKLRAKSFEEFYELVYKTSRSKISRAKAKEIYDHAGNILTIPELDSIITIEIKTLITQLELFDKQIESAEIKIEQMMKLIDSRIMSIPGIGDILGPIILGEIGNVERFSSVKKLIAFAGLDPVISQSGRFENLTGPISKRGSPLLRQALFLAANVARQNDDNLKRFYDKKISEGKHHYSALNAVAAKILRIVYWVLKNNKEYQTQAI

SEQ ID NO: 333354 - protein, 340 aa, unidentified
MRIIGCDLHARQQTIAMLDDETGEVIEKTLTHEGEDVREFYGGLPPPVTVGIEASGSMGWFLQLMEELHIRCRVGHPATIRKAEVRRQKHDRRDAALLLQLLVENRFPAIWMPSSELQDLRALVLHRHQWVRLQTRVQNALQAIALSHGLRRGATLWSEAGQTALGALPLEPYAARRRNELQTMHRRLQDQIRRLDAQADDEAQRRVAARRLMTHPGVGPVTALATEVFLGDPVRFHDGKAVASYVGMIPAEYSSGPRQRLGRLSKQGNPLLRFLWGQAAIHAVRKDVALQRFYRRKLQQKGLGKARVAAARKLGIRLWIMLRDGIDYTEFCRRGSVRAS

SEQ ID NO: 333355 - protein, 410 aa, unidentified
MEIVREYVSGLDVHKKSVVAAVITPQGRRVKTFSTTTRALLELVDWLKAEGVRHVAMESTGIYWRPIFNLLEQTEMEVLVVNAGHMKQVPGRKTDVKDAEWIAELLQYGLLKGSFVPHRGQRELRDLLRYRRTLIEQRADEVKRVQKLLEGANIKLANVAADVLGVSGRAMLEGLIEGQQGTAELAHLARGRMKSKQRQLEEALEGSFGPHQRWMLRRHLDLIDFHDGKLKELDAEVAERMRPFLAALNHIDAIPGLGQQTAQEIVGEIGTDMSQFPTDRQIASWAKLSPGSNESGGKKRPGRTGKGGPIRHIMIRAALNVSRNPNSYYGAMYRRLCKRGCKERALVAVAHALLVAIYHMLRDGTVHQDLGANYFDERRREQSARNAVRHLQRLGFRVTIEKEPGQRPAA

SEQ ID NO: 333356 - protein, 315 aa, unidentified
MTTKSTEIYVGIDVSKAKLDVAIWDSEVSWNFRNEAEGWQELVKRLKTCKPTLIVMEASGGLEQSIVAELYLEKLPVAVVNPTRVRDFAGSTGQWAKTDKLDARIIAHFAQAVHPKVRPLRTAEEERLNALVTRRRQVIQILVAEKNRKATTHSSLQERVQQHIDWLEDELLDLDREIEHFIQESPEWQEKAALLRSVPGVGPVTASTMLAELPELGTRNRQQIAALVGVAPVNKDSGKKRGKRRVFGGRAAVRRALYMATLVATRANPVIRRFYERLLAKGKEKKLALTACMRKLLIILNSIIRNRQPWRLNWA

SEQ ID NO: 333357 - protein, 378 aa, unidentified
MKRILKIGMDVHTTNYTLCAMEPIIGEDDRVFATIKVTPDYKNILMFIENLKLKLGLNDEYDIQCGYEAGCLGYSLYNQLTAVGIKCVILAPTTMLTPQGVRIKTDMRDAYMIAQCLSYGGYHAVYIPTEDDDSVKEYLRMRNDHKLALKKIKQQINAFCIRHGFCYDGTKWTLSHLKWLKKLEITNGLYRETLDEYMASYEEQEAKIERYDKRIGEIAEQTRYHDKVKKLGCFLGIKTHTALSLIVETGDFERFAKGNQYASYLGLAPGENSSSDNIHRLGITKAGNSHLRQLLIEASGGICKGAVGHKSKELRARQNGNTAEVIAYADKANTRLRSRYYKFIRHGKKRNVAVAAIARELACFVWGMMTDNIEMKVA

SEQ ID NO: 333358 - protein, 313 aa, unidentified
MLPSLVYVGMDIAKATLDLHACSPSCPESRQFANRPAGHRALVRWLRGLGPAHVVCEASGGYERSVVTALQQAPITVSVVNPRQVRDFARAQGRLAKTDRLDAQVLAQFGQHLQPAATPAVSAAQRQLAELVARRQQVQQLRNAEHNRLEHTTHPAVRRQLQRHLVGLDRQREQLDAWIAELVQAEPALAHKVARLCAVVGVGRITAVVLLATMPELGTLNRRQAAALVGVAPFNRDSGPRRGHRLIGGGRAVARRALYMSALVAAFANPRFIVFYQRLIAAGKAPKVALVAVMRKLIILLNQLLKNPEFQPT

SEQ ID NO: 333359 - protein, 358 aa, unidentified
MRIIGCDLHARQQTIAMLDTDTGEFVEKTLEHDGEELQKFYSGLTRPVLVGIEATGSMQWFLKLMEELSIECRVGDPAKIRAAEPRKQKNDRRDAQLVLKLLSENRFPTIWMPSSEQRDLRTLLRHRHQWVRMRTRLQHTLQSMALNHGLRRGHSLWNQAGQQALRALPLAPHASERRKALMTLYPRLQESIDELDREVSQQAQNHPAARRLMTHPGVGPITALATEVFLGDPLRFTDGKAVASYIGMIPREHSSGGRQRLGAMSKQGNALLRYLWCEAAMHAVGRDPELKRFYRRKLVQKGMGKARVSAARKLGIRLWIMMRDQIDYQEFCRRGKARQESGSVCAGMSDITNGPAEA

SEQ ID NO: 333360 - protein, 391 aa, unidentified
MFIVGIDIGKRNHEATIIDQTGSIIGKAFRFANSITGFNRLKETVRRVTGNDVVFGMEATGHYWLALYTHLRKEGFVIHVINAIQSDALRAMYIRQQKNDSRDSFIIADVIRFGRFCETTVSPPDLFALRELCRHRFYIVDSVSDIKRKVIALLDQVFPEYENLFTDTFGKASLELLSEYTTPEEILNVDTDKLVEIINIASHGRFGLKKASEIQDAARNSFGILLATDTIALLIRQYIEQIRFVEKQIDVLDAEIARLLSAFETQLTTITGVGPTLAAVILSEIGDVKRFNSAAKLAAFAGVDPTMKQSGDFTGSRNRMSKRGSPYLRRALWLAATVASFKDPAISAFYQRKRSEGKSHLTALGHVTRKMVNIIFAVLRDNSPYSPTIAI

SEQ ID NO: 333361 - protein, 336 aa, unidentified
METFTFFIGIDISKATLDWAVIMANKLLFHYQSSNDKKGIDSFVKHLKQQYPEASFKNSLYCMEYTGIYNNHILSLLQVNKANIWVEHPIHIKESLGMIRGKNDKVDAQRIALYAYKNREDVRLWTPKREVIQQLDRLTATRSRLVKVRKMLQSPLTDSDGFISKKDHNAEKKSCQKTLDALTKDIKQIQADIDAVIANDPYLKELYGYVQSVKGIGPAIATELLIITNEFKDITDPKKLACHAGVVPFVYSSGQYRGKAKTSNKANKPLKALLHNGAMSAIQHSQELKDYYIRKTGEGKNEMLVINNVCNKLIHRVFACVHRREKYKDFYSTAVA

SEQ ID NO: 333362 - protein, 355 aa, unidentified
MSQEKYIGLDVHQATISAAVMDATGKLLMECLLETKAATILEFVQGLRGALSLTFEEGTWAAWLHDLLKPHVSRLVVCDPRKAALLKEGNKSDRIDARKLAESLRTNQLKPVYHGEHGLRTLKELGRSYLTVSKDVTRTMNRIKSLYRSWAIPCGGSAVYAPRHRAEWLAKIVEPGVRVRAEHLYEQLDSLQPIRLQARRELLLESHKHAAVNLLRQIPSIGPIRAALLVALLQTPHRFRSKRQLWAYSGFAVETHDSGEYRWVRGKLQRNRERITVRGLNDNHNADLKNLFKSAAISASTRPGPLHDFYVARVEKGMRPTMARLTLARKIATISLTLWKKGASFDPQHLHRQAV

SEQ ID NO: 333363 - protein, 335 aa, unidentified
MDIRYFIGIDVSKSTLDWAVFDGRTIVFESHSPNTESGIKQTLRTISGLKGFTITTSLVCLEHTGIYNALLLAELANSAYPTWLESSLQIKQAGGLQRGKSDRIDSQRIAEYAFRFRDRVRLWEPPRQLLQELDCLDALRQRLLLVRSQLEQPINEQAGFVDPKRQRQLVKNCKASLEAINSDLRSVNRQIEQLIQSDEQLNELFSLITSITGVGVATATEVILATDEFKAISDPKKLACHAGVAPFEHRSGTSVRGRTRVSRHARKRLKSLLHMAAMSAIRAEGDLRAYYLRKVAEGKNRMLILNAVRNKLVHRICAVVRRREKYEKNYTPSLV

SEQ ID NO: 333364 - protein, 439 aa, unidentified
MSETVASKSEETWAAFAAIDWADQKHFWRLVPADSEQQEQGQLENTPEAVEVWASALQHRFGGRPIAVCLEQSRGALVYMLAKYAHLVLFPVHPTTAARYRETFCPSGAKDDPNDTASLLDLLLRHRERLRRLHPDTDETRLLQFLVEERRKMVDEKTRQHNRLIDCLKLYFPQVLRWFDDLAGELAGAFLERWPSLQDAKRAHPGTLKRFFHEHNCRSEERIAERIQSIRENLPGTSDVAVLEACSMTTRGLVALLATLRQNIANYEKRIEELVAAHPDGALFASLPGAGAALVPRLITAFGTQRDRFDNAFQVQCYSGIAPVTEASGKSHKVHFRWSCPKFLRQTFQEYASQSIRHCEWARDYYQMQRDRHKSHHAAVRALAYKWIRIIFRCWKDGKPYDDQMYLSSVRRRTAVLGSALAAATGCGWKDVAGFKRFC

SEQ ID NO: 333365 - protein, 316 aa, unidentified
MTSQVAVIGIDVAKETLSVCDTRSGEVFELANDRRTIKAWLKTLPGCCAIAIEATGIHHMDVAILAHAKGHRIYVINGLRLSNYRKGIGGRNKDDRSDAQLLARYLSHEQTQLEPWQPPSKAYCRLQTLLHRRATLVRSATSLRQSFSQDRTLANALKPVLKRMAALERRLEKATQTTLDEAGLKEQSKRCQAIEGIGPLTAAALNLAFLRGYFRNSDTFIAFLGLDVRIKESGRYSGRRKLTKQGDPEIRRLLYNAAMSAARAKRWKEIYLGYLARGLKKTEALTILARKLARIAFALMQTQTAYQPQEVRPSLT

SEQ ID NO: 333366 - protein, 351 aa, unidentified
MYTLGIDLHKKSSVWVLIDEQRTELWKDNVLCHPQYISIAVEKIPVPHTEIQVAIEPVAGWRWVSKQLEEAGMKVHIAHPRKIQLIAKSIKKTDDEDSRTLANLLHSGFFSEAHKSREEIYQLRLLLRERTFIVRQRTSVKNQIHGIATTQGLHHIIGGNPLFKRGKVGIMNGENFVLKELHHLDEDLEKRTKPFDEKLQMEIDKYPEAKILQTIPGVGFVTALTIISEVDDFKRFKTGQKLTSFAGLVPRQRSSGETVRYGSITHAGSAPLRTALVETAMRIREENAPELFAFVKRLTPICGAKKARVALARKLLVIMWKMVVNNTPYNPNILFSSCTTNVSDLDTGSGN

SEQ ID NO: 333367 - protein, 389 aa, unidentified
MHIDAYHAGPSISTNSVIYFRCSSQTHLARFWAAPGQRETARSFPNTAAGAAALLAWEEERTGGDRSRVVVGFEPTGSYWQGFIRRLVAAGVRVRVIAPRHTKKYKELFDNSPNKSDAKDAGVIAERTKRGHGLLLRLPEGGYADLRALSEGDHRATQRITALQNQARDVAFGLFPELVAAIDPFSATGRALWAATPTPAAWLAKRRSTRERLVRQASRGRLGGPWVAQLTEGARDSLGATEGLEARVAELAFLLAERDRWEARRAALEAALTATLDGCPEGASLASVPRLGRASAARILGETGPLADFASVQAVLKHAGLNLYASASGKRTPERVVYRITKRGRSRLRHVLYFAALRLVQRGGAGRFTPTTADWWTTTGWSSSAPWWR

SEQ ID NO: 333368 - protein, 314 aa, unidentified
MEALRTHVAGVDVHKEILAITVLIGAHAEKPESTQLECSTYTDDLMACGLKLKAMGVTDVAMESTGVYWKPVFNVWDSLGLKVIVGNAHHIKNVPGRKTDMNDSHWIAQLHRFGLIRASFIPDGEFQRMRLLSRHRTNLVDDLARVRNRVQKVLEDGNIKLGSAVSDVFGVAGLAILAEIAKGYTSPEVLVAAVTTKVKRMEDVKKAMTNCLTKEHCFVISELMEQFYFLRERINTTEQELFARIQPYKHLVEKLDEIPGIDVILAMGIISEASTQMDAFKDERSFAAWAGVAAGNNESAGKKKDPNAVMEIRT

SEQ ID NO: 333369 - protein, 347 aa, unidentified
MRFYTTQHPFYCGIDLHARMMYVCLLDQSGEILVHRNMKTDPDTFLKAIAPYRQGIVVAVECMFTWYWLADLCADEGIPFVLGHALYMKAIHGGKAKNDKIDSQKIAALLRGGMLPQAYVYPAKMRATRDLLRRRMHLAHKRAELLAHVQNTNSQYNLPAIGKKIAYKANREGVAERFADAAVQKSIEVDLALITYYDELLRDVELTIVNTAKHHDPNTLYLLQTVPGIGKILSLVLLYAIHDVNRFPRVQDFVSYCRLVKCARESAGKRYGTSGAKIGNAHLKWAFSEAAVLFLRDHPAAQKHLARLEKKHDKGKALTILAQKLARAVYDMLKRQGAFDKDKFFQR

SEQ ID NO: 333370 - protein, 347 aa, unidentified
MRFYDREHQFYCGVDLHASWMYLCIQDDRGTILLHKNLPTSREAFQVAVQPYRQDLAVAVECMFSWYWLADLCSELDIAFVLGHALYMKAIHGGKIKNDKIDSKKIASLLRAKMLPVAYPYPAATRSTRDLLRRRMYFMHHQSELLTHIQNTNTQYNLHGFSKRIDRQSNRVGLPEHFPDPMVRKSIEADMKLLDVYHGVLLQLERQVLEQARHHDPVLLGLLRTVPGIGKILALVMIYEIHDIRRFPSVGDFISYCRLVKPARESAGKNQGSKNSKIGNVHLKWAFSEAACLFLKGNPPAKELHQRLVSKYGKAKALSIIAQKLGRTVYSILKHRQPFDPQKCFLS

SEQ ID NO: 333371 - protein, 340 aa, unidentified
MTITTVGIDLAKNVFAVHCIDQNGKAVLVKPKVSRAALSELIAGLPPCVIGMEACSGAHYWARLFRQYGHDVRLMAPKFVSPYRMAGKTGKNDAADAIAICEAVQRPHMRFVPVKDESQQAMQCLHRTRQGFIQERTATYNRLRGLISEFGVIAPQSTDALRHVVSDQKETLPVQVRLCIDDLLTHVTNIEEKIAEYDRVLSRVAKTDHRSQQLMQLKGVGPTTASALVASIGNAHDFKNGRQLAAWLGLTPSQYSSGGKSKLGRITKAGDAYLRTLLVQGARSVMVGAENRTDPFSRWVCSLIGRRGYWRAVVAIAAKNARLCWASLHYGDDFRLYSTT

SEQ ID NO: 333372 - protein, 344 aa, unidentified
MTNIQHKETAHETKPDLFAGIDVGAEELILVIRKNGKLFDPQKFANTPADRDRLVKKLVKLPGIMVCLEATGIYHFDLSLAFHDAGVLLMVVNPKASHNFAKVLMKNSKTDAVDANTLAEYAARMDFVAWTRPSDETIALRSFARRINALTGQKAAAKNHLHALNATSETPKAVLKDAKLAITQLEKRIDRLTDEALVLIGKHSELTRILALLIGIKGVGETSAIALMGELLLLPPDLSHREWVKFAGLDPRAFDSGKSVHKQTRISKAGSRHIRAALYFPALSAKQHDKHVKAYFQHLMDNGKTPLQGVCAVMRKLLHAIHGMLKNNEPFDNTRFYAIPESNG

SEQ ID NO: 333373 - protein, 417 aa, unidentified
MNSPPETIPIVRYIGIDIHKYYVMIGGQNRHQEWILRPRQVQMAHFRSWAKKNLKPGDEVVVEATSNVWDIYDIVVPLVSRTVVANAYKVRQIAEARVKTDKEDIRRLITLLIADIVPEVWVPPQHVRELRSLISFRWRLTKQITMSKNRLHSVVQRFNLNAPEGGLLTDKNKSWWEVQEFTDLTGFQVERDLEIVENLESQKAAIDQKLAELSNIEPWASDMVYMMQIPGFGLIFSMVILSAIGDIKRFSHPKKLVGYAGLGAGVHASGEKYQEKSITKAGRKELRWALVEAAWVAVRFDPYWKAQFIRLKKRMHVNKAIVAIARRMLVSIWYILTRRESYRHFDEETIAYKMLIWAQAIGEEGRQGLTRQQFAKYGLLRLGIGHDLERIVKGGGPRRIAPTEEVLALKPELAPPR

SEQ ID NO: 333374 - protein, 401 aa, unidentified
MHDSTAGYAGIDWATDAHAVCVVDDHGRVIVEFEVAHTADGLGDLCRRIERAGARRAAIERPDGPVVDALLAAGLEVVVVASRSVKALRERYGTSGNKSDRSDAYVLADALRTDGHRWRSLEPDSPATVTLRTHVRARKDLVETRVAVANQLRAHLRIVFPGAVGVFRDLDSPISLRFLERFPSATRAAWLSEKRLGAWLRANGYCGRKSPADLHARLVAAPAGIEGDARGAITLAYVTVLKTLRAQIDELNTRLDELLDAHPDAAIFRSLPRCATIRAATLLAEIGDCRARFPDAEALSCLAGVAPSTRASGRHRAVTFRFSSDKKLRDALCDFAGDSWRGNVWAEQRYRQLRASGKTHPHAERILARSWAHIIWRCWTDRMPYDEAKHTALQRLICEAA

SEQ ID NO: 333375 - protein, 351 aa, unidentified
MTMLAETVDLVIGVDTHKHTHTAALVTSTGALLEERTVTTDPRGYAELLELACARGTHRAWAIEGTGSYGAGLTRFLEERGEQVIELDRPWRAKRRDGAKSDSIDAARAARDALSRTKLSAPRSGAQRAGLAVLLATRRSAVKASADAQRQLQAFVVAAPEALAAMFRGRSGVQMLRVATGLRIDPSWDPETLATATVLSSLAHRVLELTAEAEAHKRAISALVRSLRPELLKVTGVGPIVAATILCAWSHPGRCRSEAAFAKLAGVSPIEASSGQTTRHRLNRYGDRQLNRALHTVVLTRLRCHDATRAYVVRRRSEGKSDREIKRCLKRYVSREIYRLLEQGPKGLDAT

SEQ ID NO: 333376 - protein, 459 aa, unidentified
MYTIGLDLAVQAAHKAVVTDEQGSFITPVLTLRTRPRELEQLLVRARNGSQETALRVVMEPTGMAWFPVAVYLVRHDVTVYLVNSQEVADLRRYYKRHAKSDRIDARVLARLPLVNPEKLHRLHLPSAKALACQRSCKQLDRLSTHIGAIQNRVQAIDRFAWPGLEEQVFADPFAPAARWMRAHWYDPQRVLEAGAATIGEQWQASGEATASAGAWCEALVDLAAEVVSLYGAEHQYLDFAQLQAEVCREQEWLATLEQQHQTLRKKTVRPLYRQIHPSRNLETLKGVGQDSAAVYASFIGEAQRFRSTRVFRGWSGMVPDSAQSAGSEAKGLHITQAGPDLIKKFAYLDAEIARRWDPQMAAIYYDQMINKGKHHKQAVCACATHLLDRVLVVLREDKAYEVRDVDGTPVTVEQAQAIIAQRYTVPPEARRRTTKRHRRERAERQAERNSKGKMANAW

SEQ ID NO: 333377 - protein, 348 aa, unidentified
MRFYTEQHQHYCGIDLHARTLYLCILNAEGNVLLHKNLPCDRARFLEAIEPFREDLVVASECIFNWYWLADLCAEQDIPFVLGHVLYMRAIHGAKAKNDRIDALKTASLLRGGLLPMAYVYPAGMRSTRDLLRRRTHFVRKRAQLMAHVQNTFHQYNLPRPPGRLVYKYQRAPIPDAFSDPLLKKSVETDLALCDTYDELIRDLEKTVVRQARVHDPQTLLRLNTIPGIGEIPSLTLLYEIHDIGRFASVQRFASYARLVKCEKSSAGKRIGTSGHKIGSVHLKWAFSEAAVSVIRHLPQSQRLHDRLKRKYGKGKALSIFAHKLGRTVYFMLKRNQAFDAGRFLANT

SEQ ID NO: 333378 - protein, 350 aa, unidentified
MSKVTLDLSSVTVVGLDLAKLVFQVHCVDEAGKVLLNRALKRREVTDFFRKLPMCRVGIEACGSSHHWGRQLLALGHDVKLIPPAYVKPYVRRQKNDAADAAAIAEAVTRPSMRFVAVRSIDNQALLMRHRVRETLVGQRTQLLNSLRGHMAEAGLIAAQGARNARALAGLLSSGHPDIPSCVAQALLPLATQIAELDTAIDVLDKEFAAAAKANADARRLMTIPGIGPQTAHAIVATLGPDGIGQFSGPREFAAFLGLVPRQNSSGGKQRLGRISKMGNAYLRKLLVVGAHSVLHYCERHNDPLRNWAKELLTAKPFKLVAVAIANKMARIVYALLSSQSAYAASTPAA

SEQ ID NO: 333379 - protein, 413 aa, unidentified
MDAIVERCAGLDVHLDTVVACVLYGKLDIKPKKEVKTFSTTTKGLLELLDFINQKECTHVAMESTGIYWKPVWNILESGAFELIVANAKKIKNVPGRKTDVKDAEWIASLLRCGLIEKSFVPPERIRDLRDLTRLRKELLDEVNRNKNRIHKVLQDANIKISSVLSDVFGETGKSILNQIIDNQCITEEFIYSLYEGRGKSKLKSTPMEMYEALNGKIRGHHVILLGMHNSNIVFLEKQINELEKEIDILLQKERDSLELLETIPGISKISASSIIAEIGTSMDVFKTEKHISSWAGLCPKNNESAGKKKRSGIKSGNNWLRSMLCECAWSATKKKDSRFKNKYWSMVPRMGRKKALIAIANMMLRLIYHLLKTKSTYKELEIQYFIDKDKRREDRIIKELKSKGYLVEKDSL

SEQ ID NO: 333380 - protein, 356 aa, unidentified
MEKITRVGVDLAKNVMQVHAVDAAERVVVRKAIARERFVIWFANLEPCLVVMEACSAAHYWARKLRTLGHEVRLIPPQFAAPYRKGGPHVKNDAQDAEAICEAASRPHMRFVPVKSPAQQSVLVLHRMRTGFVEERTALVNRLRGLLAEFGVFLAQGIRTLHQHIVDRIEDGSNELAGPARQALMRGWAQCQALDQEIAWLDKQIAEHAGHDPQAQRCMDVCGVGPLTASAAVATVVDARQFKNGRQMAAWIGTVPRQNSSGGKQRLGRITKQGNDYLRTLLFQGARSAVLTAHRRDDRLSRWIVQLQARVGYYKTLVAVANKHARILWAVLAKGEKFDPSHVCIAPRAMICATNS

SEQ ID NO: 333381 - protein, 356 aa, unidentified
MDEDITTNSGLTIGLDLGDKYTDGCVLSSAGEVIETFRVATTMTAMARTMNGFEASRVVLEVGTHSPWISRLVTKAGHELIIANPRRVRLIAENDSKSDAVDAELLARLGRVDPTLLRPIVHRGEQAQHDRILLLARDGLVRARTQLINQVRGFAKSLGHRMPSSSTEAFPRRVREKFEEDLFPGQSAMLEMIGRLTAEIKRMDQEAERLCKESYPETRVLRQVKGVGALTSLGFVLTLEDPSRFAKSRTVGAYLGLRPRSRQSGDHQPQLRITKAGDALLRRYLVSAAQYILGPFGPDTELRRFGLKLAERGGKAAKKRAVVAVARKLAVLLHRLWTTGEEYQAVGYGKQTQEAA

SEQ ID NO: 333382 - protein, 320 aa, unidentified
MMAQNDLVVVGIDVAKDKVDACIRALALRQACPSTTHGHRKLVAWLRKHQVNKAVMEASGGYERAWARVVREAGIEVRIVDPKRVRNFALSAGRLAKNDAIDAEMIAWFAETFSDAPGQKHDAAREELQTLVKARLSLIDFRMRLVSQSEHAAPGLVQKAHAHILKSLISEIARLEAAICAKIKSMPDFAERAEIIESVPGFAETSSANLVAGMPELGQVSDRIAAALIGVAPYDDDSGKRRGERHIKGGRRWVRNAIYMPCVGAATLNNPVLKAYYQRLIAKGKEPKVAIIACMRKLIVILNTMIARRQKWDPGRYALS

SEQ ID NO: 333383 - protein, 404 aa, unidentified
MELTAIYRCVAALDVHQSKLTVCILYENESGEIITELKEFGGFKRDRRAMADWVASFQPELVVMESTGIYWKSPYAALEKQGLTIWVVNARHVKQVPGRKTDFADAQWLAILARNGLLRGGFVPPAVFRELRLIARQMQKLTGILSGEKNRLHKILSDGGIRLGVVVSDIHGKSAKAMIKGLLAGESPEQVLKYASNRLKASEEELLDALAGDLSPSHQFVLTELMAHIDELEARIETFRQALLQGLAPYQAILRSLQTIPGLDETGAALLLVEIGDDMSAFGTPERLASWAGVCPGNNESAGKKKPGKTRKGNPYVRRILCEASNAASRTQCRLQDMFKGLLIRRGRKRAIFALAHKILKIVFLLIERGDYYRDATVDYEKLSVQRNAPRWIKTLKKYGYIAA

SEQ ID NO: 333384 - protein, 343 aa, unidentified
MAQQTIIGIDLAKHVFHVCMVTPTGTMKTNTTVARGKLLALIARQPPALIFMEACGGAHDWARRFGTMGHEVRLLAPQYVTPFRRGQKNDPNDALALTEAGQRPHIPTVPIKTVEQQDIQALHRVRERLMKHRTALVNQVRGLLLEYGIVIPQGIARFRKRLPRVIEEAENGLSLVLRDLLQSLLSELSALDTRITDVTCQLTRLSHEMEACQRLQEMEGIGPLSATALVAALGHGHDVQTGRQVAAWLGLVPRQHSSGGTTRLGGIPKGGNSYIRRLLMHGARSVISHVRDKPDAKSAWMRQLVTRIGVNKACVAVANKMARVAWALLHTGEHYRKPVALLA

SEQ ID NO: 333385 - protein, 312 aa, unidentified
MAFLHHPPTCCLGVDVAKDSLAACDGRSVATYANTRTAIRSMLRSTRPDLVVCEPTGGYELLLLEECLRAGIACHRADTLKLKSFIRSFGTLGKSDAIDAAHIAAYGSERWAKLPLWRAPDADERQLQALVRRRADLVAFKIAERNRSRAPGAKAIAASFKAVLAMLERQIKTVETAIAALVKAQARLHRRAAVCMSVDGVGFISAVCLLAEMPELGSLERRQAAALAGTAPHPDESGTAKGRRRQRGGRPKVRTTLFMPALRAAAGKGEFATFYKRLVDNRKPPIVAIAATMRKIIVTLNARLRDAQLQQS

SEQ ID NO: 333386 - protein, 368 aa, unidentified
MNKVITSFVGLDVHKDSIAMGLAPTGREPPRFVGTVVPHWSALCKALGRLGRRQELQIVYEAGPCGYTLARELRSHGYACEVIAPAKIARRPGDRIKTDRRDALLLARAARAGELVNVTIPDERDEALRDLSRSREDAVRARLKARQQLKALLLRHGHRYTGKSSWSAAHERYLAGVSFAQPAQNIAFAEYRSAVREAQDRVQRLTEALHGQLEHWRMRPLVEALMSLRGIDLIAAVTLVAEIGDFHRFARASELMGFLGLVPSEYSSGSKRRQGAITKTGNSHARRVLVEAAWNYRFPARVSRLLQRRQEGQPKAVRDIAWRAQLRLARRYRHLWARKLALNKICVAIARELSAFVWDIARQVKPIA

SEQ ID NO: 333387 - protein, 353 aa, unidentified
MTQTVYCGVDFHARVQTVAYCSSTDGEVHLCELDHRRDDVRAFYAGFSGEVVVGLEASGYSPWFERMLEELGQTVWLGHAAEIRRVANRRQKNDRRDAELILDLLVKGEFPRIHRPTADSLEILRMLRYRHRMVKIRTMIKNNLQALAIGSGLALKARLLTRTGRVRLLAAQMSPAMSRQREEWLSLLDNLDVRIAAVVRWLEQQATDDVRVQLLRTHPGLGLLTALGLVHTLEPVSRFSNQRKVVAYVGMEPMERSSAEKKRYIGISKAGSRLVRFLLGEAAQTAARNDHELKRFYLRLVSRRGKPKALVAVGRKLLIRSYIMLRDNIDYAEFLRRGVEARSARKTHKHLNA

SEQ ID NO: 333388 - protein, 412 aa, unidentified
MKDLLEISCGLDVHKEKIVACILTGPLGKPTRSEIREFTTLIPDMIALRDWIVSQNCHHVAMESTGIYWMPIYEILEDAFSGDITLLVVNARHMKNVPGKKTDMRDSEWISTLLRAGLLNGSFIPEKRIREFRDLNRYRKSVIRDITSQKNRIEKFLQSSGFRLSSFISDIFGASGRNIILHLMEHGQIDKTALDSCLKTKTRNRIDEILMSVNGTLSEHQKTFLKILMTHYDSLKKHLAEIETSLEEDMAPFALQVEQLNSIYGISTTASCAIIAEIGIDMEPFKTAEHICSWAGLCPGNNESAGKRKSTSVTKGNPYIKSMLCEIAWVIAGKRNTYLSAWYWRIKQKKGAKKAIVALARKLLVIIYTMLKQGTLFDESCFETRRKNCEQKQLSRYIRELEKHGYHVEAQS

SEQ ID NO: 333389 - protein, 417 aa, unidentified
MKTWNEITHYAGFDWAKGHHQIVIVDRQGQIVAEWEFDHSLEGWKQWRERTASYPDLAVAIETNQGAAVDQLLQSGSTVYPVNPRSAKAYRERKVSSSNKTDRLDAWSLADALRTDGHAWRALAPVDPLLQELRLLCRDELNLIGQRTALVNQLQAALGEYYPAALQAFDDWTMPASWKFLERFPTPQALAKIGPRKWENFLHCHKLYRPQTQARRREAFRQATEFCGSPAVTRAKSMLVLSLVKLLKVLEEQLEQYRVQIEQLFARHPDHDLFGSLPGSGPKLAPRLLSEIGDDRQLFPDAQSLQCYAGSAPVSYQSGQVHKVYMRRQCNKHLRCALHLWANLSRRTCQWAQVYYQQLRQRGKSHAQALRCLGHRWLKILWKMWQTRTVYDPELHTRNQTTHGSWVLQLIQAQPGE

SEQ ID NO: 333390 - protein, 387 aa, unidentified
MRQVEGERSTLDGVAVFVAVELSKSAWLLAAQASPSGKTSSHRLESGDIPGLLALLRRLQGRERQSCGGGGEVQVIVGYEAGYDGFWLQRHLAAEGITCWVMDPGSLQVNRRARRAKTDRLDAAMLLRALMAWCRGDRAACHMVQVPSVEREDARRTHRERQRLVAERVQHVNRIKGLLATQGIIGYQPLRRDRSARLDELRTKDGHALPPRLRREIERELQRLELVLEQLEAVEAERDAAVAAPAVDDADAAKVALLARLGGIGNELATVLVREGLYRSFTNRKEVAAYAGLTPMPFASGERHREQGISKAGNPLLRKAMIELAWLWLRYQPDSALARWFTDRVGSVRGRIRKIAAVALARKLLIALWRYVTAGLMPEGARLKATA

SEQ ID NO: 333391 - protein, 342 aa, unidentified
MKQYAGIDVSLECSSVCVVEANGKILREARVASEPEALIAWFGSSGFELERIGLEAGPLSQWLFAAMREAGLAVELLETRHVRKAFEAMPVKSDRNDARGIAQLMRLGWFRPVHCKSMSAQETRALLTARKLVQSKLHDVENSLRGILRGFGLKVGKTTELQFAGRIEELVVGHPQLQVIAKALLSVRAVLRNEFAAFQKQTRKLAQSDTRTRLLMSTPAVGPIVALTYASAIDDPARFTSSKQAGAHFGLTPKKHQSGETDYTGRISKIGDSSVRTALYEAAHIMLTKPLKGCTQLKSWAMRIAKRAGMSKAKVALARRLAVIMHRMLADGTPFNPAAAAA

SEQ ID NO: 333392 - protein, 341 aa, unidentified
MKQKYLIGVDISKKKGDSALITDGLSVLSEKVVQNTDVKWERYLMTVLKKNKIARENLLVCCENTGIYSNPLKRVCHKLGIALWVEHALKIKRASTDMRGKTDRQDALRIAEYACRYRDKAVIYQPEKPLVRALQHQVKIRETLIEKKVAMENQLREAKSHDPELYKALVKGYRTVLKTINAAIKKAEAEIEGLAAQDEEISTNEALLRSIPGIGAQTALRFIIRTDNFRNFSSAKHLACYAGVVPFANESGTIIKRQRISKMADKNLKQLLHMAAMAAIRSKGELQDYYKRKVAEGKNKMSVLNAVRNKLVHRIFAVILRQTPYQRENYFSIKNEISLAC

SEQ ID NO: 333393 - protein, 357 aa, unidentified
MVMIGTDSHKRTHTVVALDEVGRRLGIKTVVTNGEGHLALVEWSAQFADHDEHGVRFALEDCRHLTRRLESDLLAAGQRVLRVPTRLMAGARRSSREPGKSDPIDAEAVALAALRHPDLPVAELDGPAREVKLLSDHRHDLVVQRSRIAQQVRWHLHELDPDLMIPSRGLRRQKVVHELLVELDRFDGVVARLARRHLLRCQELTTQINELERELRDLVRQLAPSLLQIPGCGVLSAAVIVGETAGVHRFRDKDAYARFSGTAPVPVWSGSSAGKVRLNRGGNRTVNCALHMIAVTQARGVGPGRPYLDKQLARGKDRVAALRLLRRRLSDVVFTALRADLRATQTADDSRHLRMAA

SEQ ID NO: 333394 - protein, 344 aa, unidentified
MDHFAGLDVSVKETSVCIVDDTGKIVREVKVASEPEDLLQILSNPSYHFKRIGLEAGPLSQWLYSALAEAGLPAICVETRHMRAVLKAQINKTDRNDARGMAQMMRVGLYRPVHVKTLRSQKLRMLLTHRKLLQSKAIAIDNDLRGTLRNFGLKVGMVGTVKFEARIKELVENLPDLAELIEPLLVVRRVLREQFCIQHRRLLAIVRDDEVCRRLMTTPGVGPVVALTYRATVDVPARFRKSKSVGAVFGLTCAKHQSGESERSGRISRCGDEMMRVMLYEAAQAMLRSNKWSWLKAWAMQIARRRGKKKAIVALARRLAVIMHRIWVDGTEFRWAREQAAAAA

SEQ ID NO: 333395 - protein, 524 aa, unidentified
MRKRVGKGRRVVEAGARRVDPTVIEAAKRHGAERLGLVLVDPHKTELRMKVVNYLGELLHGPATYGQSAAGMRALCEDIQSAVSRMGLGGVVAGVELAGRNHRRVKRALQRRDWPVRMIHPLATSHLRRPASPGEKSDDMDLLAMERALRDGYGFAEAELPPVHLELLELSRARGELVAMASAERCRFLERLQELMPGYGGLFPDIWESPGPLRLLELSTCPSQLRLWSEADFRKALAGLGTAMRGDTIARVMAWAADAPDADAPAASHRRRILLDSLGRIRRLDAEAASYEPPLCWLLVRTRAVLLLGAQGVGVVSAATYAAELGPVENYLSPKHISGRAGLRPSRRQSGGSDRPDGPMPKSGNLRLRGALMTIALGLHLHNDHFRAWAAARPGWDTKQVWASLANRFARISHRILAEGMPYRHPSGQGCEAVLPKLLAFASGHGLKEEEAFDLAREAVGQMPPEALPMEIAAFEDKATMRRKLYRRRPSKELLAQIAELLKTAAGGAKMKGNENDVGISRVD

SEQ ID NO: 333396 - protein, 388 aa, unidentified
MPTVADRPEAPTTIQTNLAAIFTSLELSRSIWLITSLLPGGGEKMSKYSVRAGDVASLLARFSELKQKALARTGKSFPIVVVQEAGLDGFWIHRVLQSEGIESHVVDPASIATSRRRRRAKTDRIDGEALLRALLAYKRGEPRVCAMVKVPTPEEEDRRRLCRERKVLIAERVKHVNRIKGLLFSQGVSGYEPLRRYRRQRLDGLTTGDSRPLPIHLKTQINRELDRLEMLLDQIKQVEAERDALLAEQPATASTSAVRMLLELKGIGPEFAAVLWMEGLFRHFDNRRQLASYAGLAPTPWQSGSVDREQGVSKAGNARLRTTLIQLAWLWLRHQPQSALALWFNERVNRDGRMKKTTIVALARKLLVALWKYVTTGVVIEGAIMTAA

SEQ ID NO: 333397 - protein, 344 aa, unidentified
MTRYAALDVSQEMTAACVVDETGRVTAEGKIATCPEAIGTWLARHAPDLVRVGLETGPLAVWLWNELHDRGLPVICLDARHAHAALKMRPNKTDRNDAAGLAQIVRVGWFKQVRIKSRASYELRSLLTGREVLVRTRVKLENEVRGLLRTFGVIFGKATGGFARRADEIVTGELDASPILQLVVESLMQARAAVLERIKALDRQVLAAAKSSSTARLFMTAPGVGAITALSVASAFDDVARFRRSSSAGAYLGLTPRRHESGEVSRNGHISKHGNGLTRKHLYEAATTLLTRTSTSSALKAWGLRLAKSSGFKKARVAVARKLAVILHAMGKNNTEFRWSSQEA

SEQ ID NO: 333398 - protein, 409 aa, unidentified
MENHHHKLYVGIDVHRHSHRVAIVPATLLHHYKPDLKGAKFLDIKNNASDFQRLNTAVKEHIVCPDEVAIAVDHTGGHYSEPLTYYLQSMHYNVCHLETKGVKAVRERLLDEENKSDNIDAISTAYLLYLKDVHGLSFRISAVTPEFGCKASVLRCLILQRQQYNKLATQVTNRLHQFLLAVFPEAEANYFKKMLKIVPYYPTPQDILSSHDLDDIKNINHKDKQNIMSLAGQTVGVPSEFYRELIRDLSQQRNEAIAKREAITNLIEKEVTTHPYGLILLSFPYFGAIAAATVIGTVTNIDRWPNKKKLKKALGVYSTLKQSGSSTGKGRMGREGSRHARRVLFQVVLRCIRSRTRDNDSKDYYLRQVARGKPKLKAVVSTMGKMAEIIYYCLKNGECYQYQGKYRAA

SEQ ID NO: 333399 - protein, 341 aa, unidentified
MDKELYFGVDVSKKTLDLAYYDGETIDWKNAHIQVSNDDAGFKKIGSWVAKVGKDFDTFLFCMEYTGLYNQNFRLWLESKEYIYGMVEPRKMHRFEPDLDDDQRSLDRIKTDELDAFRIAIYCEQNHKKILRNPSKLPSPVYFKLKRLLAERKQNTKQSTLYKQQLHDICAYDTDLSVERKKLLLKSMKENQKAIDREIDSYINEDASISKNYDLLTSIPGIGRIIALETIVLTENFTAISNPRKYACYIGIAPFKKESGTSVRKRTTVSKKGFSEAKADLSIAVLSAIRNNPSIRDYWIRKRKGKCGGIVLNAVKFKLVLRMFAVIKRGTPYVETDAYKN

SEQ ID NO: 333400 - protein, 366 aa, unidentified
MKKGTTFVALDDSKRKLVVGILQPGAEEPEVREIPNEAKLLRRLFERLRREGPVAACYEAGVSGYDLDRQITGLGVACQVIAPALTPRRPGQRIKTDTRDAKKLVRLVRAGELTAIRVPAEAEEGVRDFVRCREDVRRDVGRWRHRVVKFLDRHGRRYVAGRNWTGRHWTWLRSQRFEIPARQRTLEVSLFTLEQALARQAELDREIEALAQSEPYREPVGWRRCFRGIDTLAAMILLVEIGDFHRFQRPRELMAYLGLGPSEHSSGERERRGALTKAGNTHARRAVVEAAWHYRHRPGLGRALARRSEGQPDACRGHAWRAQQRLHRRYRHLVGHGQRPPGAVAAVARELVGFLWAAMTHRPLVA

SEQ ID NO: 333401 - protein, 482 aa, unidentified
MKKRNIYPNQSQELMSLFEKAGNNAKVMCVPIDYAQNDHVALFCNGNGDVLRKPFSVKNTPGGVRYLIDQVKRSCQHRGIDKQNVFFGGEDVNWFAENFANALSSKGWLVANVNAHDAKKQRENLQASTDRLDLMGIATMLLNRRGNCCPAQSGVYRNLRTLVRHRKKLVKMKTEIRNRIQTVVGRLFPGFLNQKKSGVEPFSRISLYLMKERFSPAQIRRRKRSTLIKNFQKLYCKNSEIIAIKLQEYAAQVLTTPNEYIASLQISLACQVNLYSCIVDNILQLEKEMALLLCQTQGAFLTSIKGIGLVLASGVTSELGNPLQQKSAANLASYSGIIPRVKQSGGTQGQPITGRVSKRSNHILKDYVVQSAFHIGRYGPIDLQTDYKRREASGQHADFGMGRRFIRMAIRLMLTSQIYIPSYLRTQKIERHQIAGHYLSIWPFLKGKWEKFGALHDAFIKDRPLGQWRYIVQEVYGIKLQM

SEQ ID NO: 333402 - protein, 307 aa, unidentified
MTAVGIDVGKAALDVAIFGESKVHRFSNTVAGIRRLIRLLQDREDIRIVVEATGGYEEVVLAACTEAGLWIARVNPRQARHFARAIGQLAKTDNLDARMLAEMVQAFHARLRVHVPLEPWQAELRGWLRRRHQITEAIQRTRQQLVMTLPAIRPLMKKTLIALQREQTLVDAAMKQLLQAHATPAMRSSKGLGPMFQASVLALLPELGQLRRQQIAKLVGVAPLNRDSGQSQGKRRIYGGRTEVRVALYMATLSAVRWEPAMKAHYLQLRARGKVAKVALVACMRKLLTIVNARRRDELRAEAAMTA

SEQ ID NO: 333403 - protein, 347 aa, unidentified
MAETARRIIMGADTHKQFHTVAVISKTGERLASKSFDANTKGYRQALTWTRSFGEVMRAGVESCGTYGAGLCVYLKKSSIEVYDVYAADKQKRRRRGKDDTEDAFQAAEAALSLERCAVAKDASAMLESLSLLKMAYAQTVKHRTATVNALKAAVVSLPDALRSRLRHMGTPELVRTCCAFRTSADNDMKLVLRTMAKRIQYLDVERALLDKKIESYADALLPCTKSLLGIGHHGATTFLCAAGQNIERMKSESAFSMLCGTSPLPVSTSNNYHHRLNRGGNRKANSAVHTMAIVRIKGCEKTQRFVDKKMSEGKSKKDAIRILKRYLVREVYKALRADIAALGLAG

SEQ ID NO: 333404 - protein, 348 aa, unidentified
MERVIERCCGLDVHKKTVVACVRVPGRTSAREQQVRTFGTTTAELLALRDWLGGYGVTHVAMESTGVYWKPIFYVLEDAFTCVLANAAQIAQVPGRKTDVKDCAWIAQLLEHGLVRGSFVPPAPIRELRDLTRYRAALIGEHTRETNRLQKVLEDAGIKLASVASDVLGVSGRAMLDALTQGTHDPDVLADLARGALRRKLPALRQALTGRFRPHHAFLVSQVLAHLDYLDEVIEALSTHLDEVMAPFAEEVSRLDTIPGVNKRTAEILIAEIGVDMSVFPTAGHLASWAGLCPGNNESAGKHRSGKIRKGNRWLRGALIQAALAGGTRATKGAFAARYRRVMRKSRP

SEQ ID NO: 333405 - protein, 340 aa, unidentified
MGQVVRIGLDLAKSVFQVHGVDAAGEVVVRRKLRRSQLVPFFARQPACLVGVEACASSHHWARELIALGHAVKLMPAQYVKPYIKRSKNDAADAEAICEAVTRPTMRFVAIKSPEQQCAMMLHRVRLVLCRQRTQLSNALRAHLAEFGIVAPVGRLGLERLLEIVADPEDHRLPEGARTSLQMLVAQLAVVKTQILENDRRVIADARATELGRRLMAIPGVGPLLASALVATVADPGVFRSGRDLAAWIGLVPRQNSSGGKERLGSISKAGHRYLRQMLVVGSMAVIRHAARSPKRRPWLTQLLARRKAKVVAVALANKIARTAWAMMITGERYREPLAV

SEQ ID NO: 333406 - protein, 348 aa, unidentified
MEHVSRIGMDTSKHIFQLHGVNAAERSVLRKKLRRKDMVTFFERLTPTVIAIEACGASHHWARLLQSFGHEVKLIAPQLVKPYVKRGKNDTADAEALCEAMSRPTMRFVPVKTAEQQAALMLVGLRDRLIRNRTQLANAIRGYAAEFGLTAAKGIVHLAPLLDRIQADESLPGLARELFAIHAAEYAQLQAQIEEVEAKLMAWHKTDPCSRRLARIPGVGPIGAAMLSMKTPAPEMFRSGRQFAAWIGLTPKDHSTAGKVRLGVITRAGDEGLRSVLVAGATAVIRHLGNARSQGALASWLAQLLKRKPPKLVAVALANKLARIAWKLMVTGEAYAAKMAPAALASAA

SEQ ID NO: 333407 - protein, 389 aa, unidentified
MEAARTICIGFDVGKAAHRACAVSRASGEILFNKALENREGPIDETLALAGEGALVVVDQKRNIAALVLERARAAGMEVAYLPGLAMKRARDMFPGAAKTDEIDAEVIARTAIGMPWCLRPVAEDAGSGVEIRLLASQRRFLTKCSTQSKNRLRSVLLEVDPAFEAAVDLGAAWQVGVLSRFGGAAGIAAAGRKGYRTFAVKKSGAPEAAADGLWDAALASAKSGRPHTAAEDAAVRMLAERIEEDLARAASVRESMDALLAGDAVYRALLTVPGIGPKTASALVAGVDIGLFSSHDKLASFTGLAPSNRQSGTSLDSASSSKTGNKELKNLLVFSCNSLVGTDNEFGRYYDACRARGMRHNKALKAVARKRPKVIFAVMRDARPYVRA

SEQ ID NO: 333408 - protein, 316 aa, unidentified
MQKRKMKTAKEKEIGFMQMVSVGCGIDVHQHLIVASIRKSADEVETREFESYTSSLTSLREWCKSEGVTHVAMESTGVYWKPVFNVLEGDFEVILVNARHVKNVPGHKTDKKDSRWLSKLLLSGLLKGSFIPPRDIRELRDLVRYRKKVVGQIASEKNRIIKILEDANIKLSSVLSNVDGSVGTKVINDLIDGETSINKLMRHYHGKQKASREEFRKALEGHVTEHHRLMLKIHKDSISDKEAQLQCLDEAIGKATEAYTVEIELLQTIPGVGKDSAISIVSEVGVDMSKFPDETHLSSWAGMSPGNNETGGKKKT

SEQ ID NO: 333409 - protein, 311 aa, unidentified
MTSAGIFVGIDVAKAQLDIAIRPSGEYFTAPHDDPGVSGVVQRLGALQPTLVVLEATGGFELDGASALGAAGVPTAVVNPRQVRDFARSTGLLAKTDRLDAQVLAHFGEVLRPAARSLPDAQAQELSAVLLRRRQLVEMLVAEKNRLPMATRRIRPPLQRHIEWLQQQVADLDRDLGALIRSSPLWRAKDDLLRSVPGVGPVLATTLLASLPELGTLNRQQIAALVGVAPLNRDSGTWRGRRTVWGGRAHVRAVLYMSTLVAVRHNPRLRSFYVRLRDAGKVPKVALIACMRKLLTILNAILKHQTPWALP

SEQ ID NO: 333410 - protein, 408 aa, unidentified
MERYYLGVDWADEFHQVWISDPEGKKVTEKKVVENVEGLAEFGRFLDESRAKEIELWAAIEKPNGRIVDFLLDHGVVVYAVNPKALDRARDRFRMSQSKTDSFDAYVLAQFLRTDHGHLRALKPNSDPAQELKLLTRDQQRLVRQKTRLLNQLTTTLKEYYPRPLEVFSDLESNIALDFLKQYPTPHDLSKLTRRQWNRFAKREHHLGEERCKELWEKLNQPQLEVPEHVVRAKARLLEVVVVQLKTLRDAVESYNERVRSFFACMPAAELVKALPGAKTGTIVATLWAELGDAKDRWESFRHLQAEAGVVPVTKASGKSRVVQFRFSCNKVMRHAAYWLAFVSLNRTEWANHYYRDQRAKGHSHHQALRALGAKWLKIIFVMWRDHKPYDENYHLANIARQQMRQAA

SEQ ID NO: 333411 - protein, 349 aa, unidentified
MEQYVGLDVSQDLTHICVVDHDGQRIWQGECASTPEAIGEAIKEYAPRAVKIGFESGRLSTWHWHGLNDMGLPAICIDAYHAHGVLKLQMNKTDKNDAHGLAQIMRCGWYKPVKIKSFESHKARALFRTRSNLVVMRTDLVNQIRGTLKTFGIIIKGIAGVHFETRIAEIIEEDKELSAPLQVQLELLRKIKEKIDELDELVLDYAYACQSCRILMSIPGVGPMTAANFVLAVDDAERFEKSKSVGAYFGLTPRRRQSGEMDYNGRISKRGDRVIRHQLYEAANAILTRVKKPSSLQSWGLRIAKRSGLKKARIAVARKLAVIMHQMLQTGELFCLVVSRSKCNTYCIA

SEQ ID NO: 333412 - protein, 346 aa, unidentified
MHYIGMDCHINTLDFAVVNEAGRLIKANSVATSVNGFMEFVKTVPPPRAIYIEEGTLAAWALETCVRFREKLVITDAKKNHWIGSSGQKNDSIDALKLAQLARGGYIKEIHHPVGQRRRFRELMIAYHDTVRSTTRIKNKIKARFRQNGIQCTGVTVYSPTHREEWKGKLPQEATLLLILEGLWRQLEQSEQTEEELLAAARAQAKQYPEIKLFKDIPGIGFIHAATVSAILETPYRFADKRKIWMYAGLGIMTRSSGGKTYSEKLSTDYNRLLKYTLKQAAETAIQAKDNPFRRKYLDMTLSHGIVPHRAKLTIARDMLATMWAMWRKGEKYSPEIRETTVYKQG

SEQ ID NO: 333413 - protein, 394 aa, unidentified
MFYLGIDIGKRTHVASVMDDAGKVLLKGFSFPNSFEGGQSLLTRLRTISDNPSHFLTGMEATGHYWLALFSFLDEADYFIHVINPIQTDGWRKGTEIRKRKTDIIDSVLIADLIRYGSFEDTTLANEDMFSLRQLTRYRSYLVGTAGDFKRKIIAVLDQVFPEYDTIFSKVGVFGKASKAALLEYSTPDAFNEITAETLAETLRLASRNRVGLIKAEALKKVASNSFGIRFAQDAFTFQLRSMIEQLNFLETQIKQTEEEINQLMTSINSVIETIPGIGPVTGATILGEIGDIHKFSNPKKLVAYAGIDASVSQSGQFNATHNVMSKRGSPFLRKALFQAALVASRSDPVLKAFYEKKCSEGKHHLASIGAVSRKLCYIIHAILTKNEPYEIRQ

SEQ ID NO: 333414 - protein, 343 aa, unidentified
MDQITRIGMDTSKHIFQLHGVNAAEAPVLRKKLRRKEMMAFFEKLAPTAVAIEACGASHHWARRLQSLGHTVKLIPPQLVKPYVKRGKNDAADAEALCEAMSRPTMRFVPVKTVEQQAALMLVGVRDRLIRNRTQLANAIRGYAAEFGLTAAKGMCKIEPLLARIAADETLPELARELFALHGREYRQLQARLDEVDARLMTWHRTDECSRRLARIPGVGPIGASMLVMKTPAPQEFRSARHFAAWLGLTPKDHSTAGKVRPGVITRAGDEALRSVLVTGATAVIKQAQRGRVASPWLVDLLNRKPAKLAAVALANKIARVAWKLMVSGETYTTPQTVMVRAA

SEQ ID NO: 333415 - protein, 316 aa, unidentified
MTTSSVVVGVDVAKDRLDVAVRPSGETWSAANDEAGITALVARLRPLAPALLVCEATGGFERAAIAALAAAGLPVVVANPRQVRDFARATGQLAKTDQLDAAILALFAERVRPTPRPLPDAAAQLLDAVLTRRRQLLEMLVAEKNRLGFAPKPVHRGIQAHIRWLERQLDDVTKELAALIEASPVWRAKDDLLQSVPGVGPIVSYTLLGELPELGTLSHKQIAALVGVAPLARDSGTLRGKRLVWGGRASVRTALFMAALCGRRWNPTLKVFYERLKAAGKPTKVALIACARKLLTILNAMMRDQSRWTSNVQYSC

SEQ ID NO: 333416 - protein, 356 aa, unidentified
MSEKLNSKMAVIGIDIGKNSFHVVGQDRRGALVLRQKWSRGQVEARLANLPPCLIGMEACTGAHHLSRKLQALGHDARLMPAKYVRPYCKGDKNDYRDAEAIAEAVQRPTMKFVATKTADQLDLQALHRVRERLVSQRTGIINQIRAFLLERGIAVRQGLRLLRAELPDILAKRTDVLSPRILRIIEDLSGDWRRLDERIEGLSSEIEALARQDQGCARLMSVPGIGPIISSAMVAAIGTGDPFSKGRDFGAWLGLVPKQMSTGDRTILGNISRRGNRYLRTLFVQAAWVVLVKVGPKQWERYGLKSWIEAAKKRLHHNVLAIALANKLARIAWAVLHNGRAFEYVKTNATVSRSA

SEQ ID NO: 333417 - protein, 340 aa, unidentified
MEELYVGLDLHSRNTYTGIMTKDFKRVFGKRLTNDLPVIVGALEPFRNDIQGIVVESTYNWYWLVDGLMDAGYDCLHLANPSAIKQYEGLKHVDDKSDSFWLAHLLSLGILPEGYIYPKEERPVRDLLRKRSFLVKQRTSHIHSLKSMIERNTGERISTRKLTGPDRIDLEQLLKEEYLFLSANASRSNIKFLSHHIKIIEKAVRKKIKIKKGFEFLKTVPGIGDILALTIMLEVGDINRFPKVGDFSSYCRCVSSKWTSNGKSKGKGNKKNGNKYLAWAFVEAAHFGQRFSPTIKRYYQRKSAKRNEIVGRKAIANKLARACYYIMRDRVPFKEEASFC

SEQ ID NO: 333418 - protein, 343 aa, unidentified
MKLHVLGIDLGKTVFHLVGLDSTGKVVIRKRCSRTQLLAFTANLQVQLIGMEACSGAHFLGRALREQGHEVRLMPAQYVKPYVQTNKSDYLDAEAIAEAVQRPRMRFVPIKTEEQLDLQALHRVRERWVMRRTAVVNQIRSLLLERGLTLPKGRSHLDEQLPRILEDAELNLSDSFRVLLAQLKLELEQLAARVEEMDRVIQKTARENEACQRLTEIPGVGPVTATALIAAVGNASAFRKGRNLSAWMGIVPGEYSTGGKQKLLGISKRGNKYLRRLFVQGARSVLQQRHKQAPGLSSWLAQLLGRAHQNVVVVALANKLVRMAWAVLCKNERYRAPVLAVTT

SEQ ID NO: 333419 - protein, 313 aa, unidentified
MEAVLECCCGLDVHRDTVVACVLRGSREGKTESITKTFATLPNDLEELRKWLENMQCRHAAMESTGVYWQPVQQALEGAFDSTLVLLVVNARHMRNVPGHKTDMKDAEWIATLLRAGLLKGSFIPSRLVRDLRDFTRYRKTQVETIASQKNRIEKLLQSAGIKLSTFLSDVFGVSGRAILEVLAKDGRVEPQKVMGLLKKRLKVKHDEVSLALVGYLSNPQQRLLTMELTQLQSMEEHLLSIEKEIQLQLQQFKSQVDLLDGIPGIDIVGAATILGEIGADLSSFPSAQHLCSWAGLAPGNHESAGKKSPFEP

SEQ ID NO: 333420 - protein, 369 aa, unidentified
MANDILFVGLDVHKKTISVATVLEKPGESCRYYGSVPNTPDALRRLCKKLQADDASLYFCYEAGPCGYGVQRLLTRLGHRCDVVAPTLIPRKAGDRVKNDRRDAMSLAQNLRAGHLTEVWVPDEAHEAMRELVRLQALAKRDIRRARQQLLSFLLRHGVHYPARHWSGAHRRWLADLSFEHPAQHLVLEELVQRIERAEALGVRIEASMVELLPRWALAPVVEAVQALRGISILNAITLVAEIGSFSRFDNPRQLMAYLGLAPSEHSSGSTVRRGPITKTGNSLARTCLVEAAWTYRFPARVSRIILKRTEHLPEPIRAVGWKAQVRLCRRYRHLMATGKAAPKVVTAIARELVGFIWAIARMVEPVRT

SEQ ID NO: 333421 - protein, 356 aa, unidentified
MQTQVTKKIDFTGKSLFIGLDVHKKSWSVTIVVDGIEHRTFTQPPDPEALQKYLQRSFPGGNYHSAYEAGYCGYGIHRRLNELGIKNMVINAADIPTTQKDKLHKRDPVDSRKIARGLEKNSLHGIHVFDRDLEELRSLNRTRFYLMRDLRRSKNRIKSFLLYYDIPLPGEFDNNQWTLKFIAWLKQVKMQTAGGQEAFSHLITSYEHHRQQLLILSRIVRLRISQHDKELYNLLKSISGIGPLTSSALITEIGDINRFPHIDDLGSYVGLVPRVRESGETTHTGGITFRCNNFLRVLIVEASWQAIRMDPALMQYYQHHVVNNKGHKVIIKVARKLLNRIRYVMKNRKPYVTGVA

SEQ ID NO: 333422 - protein, 312 aa, unidentified
MTHNEGFVGLDVGKFEIFVFISKTGSRFSVPNTDSGHAKLQSQLGKPMGQIIALEPTGGYEWAVWQVLDTAGFDVRQVSAAHVRAFARATGALAKTDPIDARLIAQYIAFRPNSGRRLPAENIRTLNALSAKRRQLVELRKRLKCQIQQHHDPELVALDNELLDVLSRQIKVLEDGIQTRINIDPQLQRHAEILRSIPGVGPVLCAVLIGEMPELGTISDKQIAALAGVAPINNDSGRTEGKRSIKGGRYNVRYLLYQAALVASTHNQHLKAFAIRLKDKGKPHKVVLIAVARKLLVIANALVAKNQVWSAN

SEQ ID NO: 333423 - protein, 346 aa, unidentified
MIIVGCDFHPSWQQVAIFDSLTGEIVESKLVNGNGEAERLYRSLPVPSLIGMESCGNSQWFIELVEQLGHTVWIGDAAQIRASYVRKQKTDRRDAAHILKLLMEGRFPRLWAPDAEVRDLRQLLIHRHKLVEIRTGVKNGLQHLALNRGLQRKTKLWSEAGQKALRELPLEGWAACRREDLLRLRTVLDEQIGQLDEAVKHAADGNQQARLLMTQPGVGPITSLAFVLTIGDVARFKRGKQIASYLGLIPREHSSGGKQHLGAISKQGNRFTRTLLVEAAQSANRLDEGFRKQYQHRCHSKPKGVAKVAAARRLAVRLYWMLRSNMPYPEIVRIEGSSRLAMAGES

SEQ ID NO: 333424 - protein, 321 aa, unidentified
MNKYTEIYGVDISKDVFDVMNSQGAYMQYPNGSKGFERLSKKLPKGSLVVMEATGYYHYCLAQYLYEHGHCVSVVNPLSVKRFIQMKLSKVKTDKSDARAICEYACVNEVPLYTAKNKDQAECLQLLRLMDTYLKHSTAIKNKLHGERTLGIPSKTVYRSLSRSLKSLQKEICLLEARLLSLVKEHQQRQLTLLKSIPGMGNKTAMVLLVLTDGFTKFQNAGQLCCYAGITPTIRESGSSVRGRSRISKVGNRKLRNLLFLCSFSACKHNRACREIYERITSKGKSKKLALIAVSNKLLKQSFAIATSGLPYDEKHVSRLA

SEQ ID NO: 333425 - protein, 348 aa, unidentified
MNRHVVAFAYKAGKTTMPDTLYPTDGLGQLTIGIDVSKRILDIAGLEQRINFDSIPNTPAACRRLARRLIKLKPRVVAVEATGGYEQTLVQALWEHDLPVAVLQPSRVRAHAKASGQLAKTDRIDARMIADFARSKEIRLARKPSAEEERLRLLSSRREQIVEDRVRELGRLEAMRDSDMRREIKRHIARLQKLQSSLDERIAELIARVESLRTRNEIMRGILGIGPVVAHTLLCRLPELGVVNRQSIAALAGLAPYANESGRWKGKRTIFGGRAQVRRALYLAALTATRLRGPQRDRYQAMVERGKPAKVARIACARQILVMLNARMAEHFAHSKSDRLDQIATSGA

SEQ ID NO: 333426 - protein, 412 aa, unidentified
MDVLYTHCCGLDVHKREVVACLVVPGADGRATKTIRRCWTMTEDLEALADWLREAGCVQVAMESTGVYWQPVWNILEEVGGFELLLVNARHVKIVPGRKTDVNDAEWLADLVRHGLVRGSYVPDRAQRELRELTRYRTELLEERTAHVNRLQKTLETANIKLAAVATDVLGVSCRAILAALVDPEQTATAADLAELARGRLRTKLPDLQRALIGRLRPHHRFMLAELLVMIDTLDERIDAISTEITERERPFAAELARLDTIPGIGQRVAEIVIAEIGADLSHFSSPTQLASWAGLCPGNHESAGKRKSGKTRSGNAALRRALVEAARAASRSRTYLRAQYYRLKPRRGAQRAAVAVAHSIIRIIYVVLTRKTDYVDLGPDYFDRRDAAATERQLVHRLERLGNKVTIEKVA

SEQ ID NO: 333427 - protein, 343 aa, unidentified
MKLSRIGVDLAKNVYQLHGVDRHSKTVWKRRLRRGQWLQALLDKADPGCEIGMEACTSAHHWARELQSRGYTVRLIAPQFVKPYVKSNKNDANDAEAICEAMSRPNMRFVTVKSVEQQDIQATHRVRSEIKDQRNAKANQIRGLVAEYGLVAPTTLLALRRAIPCWLEDADNGLTDYFRSLLHGLWGDLVALDDRMTELDKQIKTLADSNEVTQRLQQLRGVGPLVATALVATVGTGEQFKKGRQMAAALGLTPRQCSSGDKQRLLGISKRGDVYLRTMLIHGARAVVSQAKHRDDRLSRWVTSIAKRSHPNVAAVALANKTVRMAWAMLRNEENYDPDFAIG

SEQ ID NO: 333428 - protein, 417 aa, unidentified
MTDLVPPTVFARYVAVDLHKDYVVVGGVNTRLEVVLSPRRIELEAWPRWAQANLHKTDALVVESTSNAWDFYDGVAPLVGQAVVANPRLVKLIASGRVKTDKVDTLSLAKLLATGFIPTVWVPPLEVREARGLLAHRRRLVRNRTMVTNRLQSVLQRHNLPAPAGEPFSAANRPWWDKLSVSPTEKLRVRQDLATLEHLAGQIAELDDEVVRLSTQAPWADQATYVMQLPGFSVLLTMTVLAAIGDVTRFESAKKLVGYAGLGASVHASGATHRTGGITKTGRRELRWALVEAAWSAVRYHPYWKAEFERLARRMADNKAIVAIARKLLVAIWHVLTEQVADRHADEKMVATKLMRWSWKLTDEQRGGLTSRQFIRLQLMRLQLGEDLTHLKYGNMPRRIASAEEVLAVRPELRDQG

SEQ ID NO: 333429 - protein, 343 aa, unidentified
MAEYVGIDVSLEEVWLCVMDEPGDIASEGKVVSDPDAIRDWLLAHAPRAIKIGIETGPTSTWLWHALKARDLPVICVDARHAKRVLSLQLNKNDRNDARGLARLMRSGWYKEVRVKSLDSHLVRATLTSRALLVATRRDVQNQIRGLLKIHGLVVGKAYGHVFAARVRELLASTPDLAPAIEPLLDVRDELGRHIDTLDRQTMDWARDDEACQRSMSVPGIGPITALAFHTAIEDPGYFQRSRSVGAFFGLTPRRYQSGEIDRSGRISKCGDSMVRTCLFEAAGVLLTRVQAWSSLKAWGVRLAKTIGFKKAKIAVARKLAIILHRMWRDDTNFRPGKEQAAT

SEQ ID NO: 333430 - protein, 323 aa, unidentified
MSRFVGVDVAKNTFDVATHLPNGKHKTKAKLANDSKGFKEFEAWLQKQVEPSALIVMEATSIYHLELAEFIYNKGYRVCVVNPATTHAYADSELRRIKTDKSDAKLIADFAREKNEKLQLWAPEPLKYRQLKALVRRLDDLQEMERMERNRLDVSDEKVKASINSVLHHIEKEIAETHKAIKNHIDDDPDMREMRDLIVTIDGIGEKTIERLLAELGDLRKYDDPRKLVAVAGLNPKLHDSGKLKGRSTISKIGSVSVRAGLYMPGLVALQHNEAIKAMKDRLKANGKAPKQIICAAMRKLLHFVYGVLKSGQPYDPKIALAR

SEQ ID NO: 333431 - protein, 406 aa, unidentified
MFDTEDVGVFLGLDVGKSAHPGHGLTPAGKKVLDKQLPNSEPKLRAVLDKLAAKFGTVLVIVDQPASIGALPLTVARDAGCKVAYLPGLSMRRIADLYPGEAKTDAKDAAVIADAARTMPHTLRSLELTDEITAELTVLVGFDQDLAAEATRTSNRIRGLLTQFHPSLERVLGPRLDHQAVTWLLERHGSPAALRKAGRRRLVEAIRPKAPRMAQRLIDYVFDALDEQTVVVPGTGTLDIVLPSLARSLAAVHEQRRALEAQINTLLEAHPLSPVLTSLPGVGVRTAAVLLTTVGDGTGFPTAAHLASYAGLAPTTKQSGISIHGEHAPRGGNRQLKRAMLLSAFACMNADPASRTYYDRQRARGKTHTQALLRLARQRISVLFAMLRDGTFYEPREPRTNTPATE

SEQ ID NO: 333432 - protein, 351 aa, unidentified
MYISHYIGLDVHKKSISYCVKTADGQILEEGKLRATHQVLREWAQKRSEPWHGAMEATLFSGWIYDALKPFAAELEMGNPSMMKAIGAAKKKSDQLDARKIADLVRCNLLPVCYVASAEMRDLRRMLRYRNLVVGQAVQMKNRMSGMLMEVGAEYRKQRLHGKQYFSELLDQLEEVPASVKDLLRLSRGALEMFETTQRQLLDRLQKEPLLVKRVKLLRSIPGVGEVTALTWALETCDPRRFPSIGDAVSYCGLVSALVSSADKAKRGPISKQRNAHLQTVLIEAAKLAPRWNKPLAELHERELKRGDRNRATLAVARKLVAYLLAVDKSGKRFEVRNPPAREMQEVKQVA

SEQ ID NO: 333433 - protein, 364 aa, unidentified
MDPPLKDGVIMRQHRISIFKKRRRSMKDIKILGVDIAKDVFQLCLIDEWGKVIYTRRVKRAQYVSTVASLKVGCVVMEACGGANHWYRTFMGMGIPTQLISPQHVKPYVKSNKNDRNDAQAIAEAASRASMRFVRGKTVEQQDVQALLKIRDRLVKSRTALINEIRGLLQEYGLTMARGAKRFYEELPLILASEAVGLTPRMKRVLNCLYTELLNRDEAIGDYEEELKAVAKANEDCQRVQSIPGVGYLTALSVYASVGDIHQFHRSRQLSAFIGLVPRQHSSGNKEVLLGISKRGNVMLRTLLIHGARALLRHVKNKTDKKSLWLKALIERRGMNRACVALANKNAPIIWALLTRQETYRCGA

SEQ ID NO: 333434 - protein, 391 aa, unidentified
MICVGIDVAKDKHDCFILSSEGEVLADVFTIPNNAEGFGILLQTIRRCTRPADKIKVGLEATGHYSYNILGFLLDCGLPTFVINPLHTNLYRKSLSLRKTKTDRIDARTIATMLMSDVDLKSYTDTSYHNEELKSLTRYRFDKVRERAKLKCSVARLVCILFPELEKLVPTIHMASVYALLSEFPGAHQISEAHLTHLKSVLSDASKGRYGREKAVEIRDAAKNSIGSRMHAKSLELKHTIRLIRELDAEIEEIESEINSIMGEIQSPITTIPGISTRMGAMILAEVGDFSNFDSADKILAYAGMSPSTYQSGQLTSSHSHMEKRGSRYLRYAIFNATRFVCNWDPAFAAYLAKKRAEGKHYNVAISHAAKKLVRLIYAMEKSQQPYRQAA

SEQ ID NO: 333435 - protein, 377 aa, unidentified
MSLVMGIDQHRAQITAEWLDTVTGEVSRARVRPADRAGVRRFLARFAGQQLEVALEATTGWRFLVEELRAVGAVVHLAEPAETAALRGNKRRAKSDRADARHHRELLLAGRLPESWIPPDHILDLRARVRLRHTLIEQHTEWQQRIQAVLYHHGCRQRRRLMEGDGRDWLAAQPLPETAREQITVAMAMIDALDVQLAPLTKELCAWARRQAGCKALIHAYYGIGELCAVTVMAELGDCRRFQNSRDAVRYSGLDVTVYQSDRHRAPGHLSRQGPPALRWALYEAAQVARRPGSPDRGYYEQAAERLGGNRACLALARKLLKRCYHTLRELGDDALTPPVEQPQPGPGSAAPRPASSGSPRSLEATTTNQRADVLAA

SEQ ID NO: 333436 - protein, 349 aa, unidentified
MLADQVDYVVGVDTHRDEHVLAVLVAPTGAIVAQRSVQANARGYAQALRFVQEHADGARIWAVEGVGHYGAGLARSLSRQGETVCEIGRGPRDERRLRGKDDSLDATRAARTALASETLSLPRAGQRREALRLLLLARRSAVDVRRVALVQLRSVIVTCPDGLREQLRGLPAARLIQRCSRLRRSSSRTPDQLATILVLRSLARRIEAATVEAAELEAEILGHVRALTPQLLDEAGVGPIVAAQLIVTWSHPGRVRSEAAFARLAGVAPIPASSGQTIRHRLSRGGDRQLNRALHTVILHRRQHDPATKDYIARRVAEGKTQRDAARLLKRYLARHLYRVLETQMPLMT

SEQ ID NO: 333437 - protein, 369 aa, unidentified
MKKNSRSVAGQASKDKLKQNEQLTVGIDLGDRSSCYSIQNADGEEIESGKMATTAEALSKHFRGEPRLRIVIEAGTHSNWVRTHLEKQGHEVIVANPREIPGITRSPNKSDPKDAGKLALYGRVDPRILHPIQHRSLQAQQDLAVLRSRHALVGARTKLINAARGLAKSLGHRLGKCGSEQFAQRAGQELSAELEPSLRPLLRALESLNQQIHELDGTLQRMARDKYPESARLDQVWGVGVQTALAYVLTLEEPERFAKSRMAGSFIGLQPRRSQSGGRDPQLGISKAGNGHLRWLLVECAQRILSRRAADSQLRQWGLKLCERGGKNAKKRAIVAVARKLSVRLHKLWVSGEAYDPWYGRGQQSAVAA

SEQ ID NO: 333438 - protein, 358 aa, unidentified
MSTYYIGADVHNNSTELAIEKRNKIIARYSVPTTIPAISNVLESLQGKKYLAIEEGPMAGWLYRNLNKKVDKFISSDPRRNKLISSDGDSDDRIDATKLAFLLRGNYLRAVYHSEDDQRAQLKHWVALYHDRVRDAVRNINKIRARCRMHGVQIPRLVLRDSSRRNQWLSKIKHPALAKQLNMLWIGYDATAKQTRVAKQQLIGLSKKYPIVRFWKELPGIGLIRATTLFAFMDTPWRFKQKNKLWKYCGVGLQRSASGTDKRGRPKPARLQLPRAVNRTLKNAVLGAAISAINQKDNVFKDYYERMVQDGIITSNARHAVARKLLTVMWGMWKTNSPFDEELLCVELNRTTSSIVSR

SEQ ID NO: 333439 - protein, 463 aa, unidentified
MKKQKQEKKKQTIIKMSKELAIVNIHAAGIDIGDTEHYVAVENGDGYEVRNYNAFTIDLKTIVQWLKSIGINTVAMESTGVYWLQLYLLLEEAGIEVYLVNAKHVKNVTGRKRDDSDAIWIQKLHRCGLLQKSFQPEYEQRILRNYVRQRKNLVTIASDSTRRMQKALELMNIKVHTVISDLLGKSGMMIVEAILKGERNARILASLCDPRIKASPEEIIKSLEGLWSEEYLFMLGQAYDEYKFYQKQIQDCDKKIQEQLLKQVAIVKEGDVTDVSQQNTSKRDHAISNPIYKKKAKKNQIHFSSVPYLTLLFGVNLCAMPGISEISALELLAEIGTDMSKWKSVKQFIAWLNLAPNTKITGGKMVSSKMMKKKNRAGQTLKMAASTLSRNKGPLGDYYRRMRGKLGGKGAVLATAHKLAKIIYIMIKEKKEYNPELLNEAQQTYKLIRIKQLEKQLAHLKAA

SEQ ID NO: 333440 - protein, 356 aa, unidentified
MNKSNKLDFTGQPIYVGLDVHKKSWSVSILSQQCEHKTFTQPPEVDKLVYYLRRNFPGAQYHSVYEAGFSGFWIHDQLRERGIDCIVVNPADVPTKDKERAKKRDRVDCRKLARSLRSEELEGIYVPCRWKLEDRTLIRTRLSMVRKQTRCKNQIKGMLFFYGIHLPEELIHSHWSRRFIRWIERIRMEKGSGNIALKAHLEELKHLRKIIAALNRAILALARAEEYRVPVKLLKTIPGISTLTAMTLLTELYEIRRFPSLDELSSYTGLVPDTHGSGEKEHTGGITERRHPQLRCVLVEASWVAVRKDPALLMAFLQYCKRMRKTKAIVKIARKLLNRIRYVLKNQMPYVPAVVQ

SEQ ID NO: 333441 - protein, 419 aa, unidentified
MSFKILKNNCCGLDVHKTWIYACIGITDSLKRTEYKEARFSSFTKGLNELCEWLSKHNCTDVCMESTGKYWIPVFNVLEKNNIWVTLSHPKYTKPQKGNKTDRKDAKWICDLYMCGMVKPSFIPPADIRELRDLVRYRFKLTCMITGEKNRAHNCLTVSNLKLDDVFSDIFGKSSRSITEQILQHPGETFDVAPFVDGRCKTPVEEIQAAVDGAISKEQAVKLRQCLNHIDELEMHKAEIEREIFRLSDKYESVLSLIRTVPGFDKTPMTAIQVLSEIGGDMSVFPTAKNLVSWAGCCPRNDQSNHKIKSTRISRAGSYFKPVLVQVANALIKSRKHPEFTTRYRRIKARRGHKKAIIAICRMILTAIWHILTDLKPYTPEGFLESRPVNKSKVLTTSQALNLMKQRGYIIKDDVVPVT

SEQ ID NO: 333442 - protein, 360 aa, unidentified
MHLLREFVILPEDQIIYLGGAQMYYMGIDHHRQYSHITLLDEKGEKLKYGRVGNLRSELDNFLLGIKEVKAVVEAGRSSYTMVDILDDMGIDVTIAHPKEVKAIAKAKIKTDKRDSYILAHLLRTDFIPGVYKRSRENRSYQRVLRQRAFYVGSTTRVKNRIHAFLSQQSEDVQEEISRVKNLFGTKGMKVIRGLSLPVNQKELLEALVKTFSHLEERRKETNGLVEKLYFEIPEARLVHTVPGFGVFLSVLTAVEIADIGRFENVGKFHCYAGVIPSTHSSGERTYHGKIVKEGNRWLRWAAVEAVWPGIRADFGLRCYYERLKRRKGANSAKVATARRLLTIIYRMLKEGRPYIPYKR

SEQ ID NO: 333443 - protein, 375 aa, unidentified
MEHHSEAFVALDTAKLRNAVAIADAGRNGEIRYLGEIDNTEAETRKLVAKLASKHARLTFCYEAGPTGYGLYRLIKSIGHDCIVVAPSLIPSKPGDRVKTNRRDAVNLVKLLRAGELTAVWVPDERHEAMRDLVRARDTAVKDYRIKRQNVSSLLLRLGRHYPGKKTWGRAHINWLTGLKLEHCEQRIAFEEMLLAVRQVRERIERLEQAMRDAVADWTLAPVIEAVQAMRGIDMVGAVAFLAELGDLSRFENPRQLMAYLGLTPSERSTGESVKRGGITKAGNTRARRLLIEAAWSYRFPPRVSKDMQTRIGAAPRTAREIAWKAQMRLCGRFRTLTRKGKRPTIVVTAIARELSAFIWAINREVVGSHATANQ

SEQ ID NO: 333444 - protein, 428 aa, unidentified
MNAILNNDKTPNDYAAFIAIDWADQQHVFSLQVAGQTKKETGILEQKPEVIGPWVAKLRERFGGRSVAIAVEQSRGALIHALLSYDFLVIYPLHPTTVAKFREAFKSSGAKSDPLDTDQILEILTKHLDRLKPLNPDTEETRLLGRLVEDRRNAVDLRTGHIQALLAALKEYFPQAIELVSGNLTSRLAGDLLKKWPSFEAFQQAKPSTIKRFYYGHNIRSPKVLEKVLNLAQTAQPLTTDPAIVESGSRLSQLHAQLIQTLNPLIEGYDRRIEKVFQAHPEAQLFRQLPGAGPALAPRLLSFFGTDRSRYGTAQNVHSFSGIAPVTKSSGRTRVVYFRRACPKFDRQTFHEFARLSLAKCQWARNYVDYYKAKGKKYHTIIRALAFKWIRILFRCWQDRTPYSDDTYLKALKKRGSIFATLHLEQKP

SEQ ID NO: 333445 - protein, 355 aa, unidentified
MDSKKYIGMDVHKESISIAVMNGTGKIGMECVMETKASMILQFIDGLRGEVHVTFEEGTSAAWLYDLLKPHVTKLVVCDPRKNASMREGNQSDKIDARRLAELLRLNHLSPVYHGEHGLRSLKELVRSYLTITKDLVRVMTRVKAIYRSWAIPCTGKQVYAPHHRAQWLGKIGEPGVRRRAEFYYQQLDALRTVRQEVRRELLAEAKKHQAWKRLCQIPSIGPIRAAVLLGILQTPHRFRTKRQLWSYSGVGIETHSSADHRSVDGRLQRMKKQSSIRGLNRNCNHDLKNLFKGAAIVASSKPGPFQEFYTTLLTKGIRPEMARLTLARKIATIVLIVWKRGACFDAQHLKPQTA

SEQ ID NO: 333446 - protein, 351 aa, unidentified
MSQKTNAVAVRTIGIDTGKNTFHLIGLDQQGTIVLREKLTRGRIGRRLANASPCLIGIEAGMATHYVARELLALGHDVRQIPPAYAKPFRQGHKNDFRDACAVAEAVLRPSTRCVPVKTDDQLDLQALHRVRSRLVGQRTAVINQIRSFLLERGIAVRQGPRFLRQQLPEILAKRIDVLSPRMIGMIEDLAGDWRRLDERVERVTEEIEQLAHGSESCRQLMTVPGIGPLIASAMVAAIANGAAFAKGRDFAAWLGIVPKQRSTGDRTILGHISKRGNRYLRTLFIQGARVILLRPANWARHSFGPWLTAAAKRLHHNVLATALANKLARIAWTVLAQRRNYETRVVTEAA

SEQ ID NO: 333447 - protein, 418 aa, unidentified
MVKNRIPVCHVAVYLRNAACLTSNTMNKPTGKINRIIGLDMHPDVFAAAALEKTTADLSKVLWVQDRVPTKGIERWAKKHLDAGDVLVLEASGNSFEVASRFHRLGYTCLVLESCQAAKIKDNFCNDDRHSAIKLARVYLSGLAKLVWQPDEETRQMREIFFSHRASVKDCTRLRNRIRTFLNEYCVRLPKGTRLTQSSGLNCALKAREWGTLQSELLRERFEQLWQTEARRKRLEKLMVELLLERPEWAKTWRLMGVRHIVAFALMAMIGDIKRFPNAKKLVGYFGLSPSKVQSGNNVKGREKGTGNTGRGDVRALLVQAAQNAMTQKSSPLHKWGWKLTMKKNKNVAVAAVARKLTTAIWHLLQGHFTPILEIGKHLETKLLKLATVLGKERIKALGFERRQDFVLHHFNIIQLST

SEQ ID NO: 333448 - protein, 415 aa, unidentified
MAERCAGLDVHRDEVVATVRVPGTGRRRWDQKTKTFRATLAGLAELAAWLAEAGVTLVGMEATGVYWKTVFQALEERFECWLLNAHHMRNVPGRKTDVKDSEWICQLVQHGLVRPSFVPPPEIRRLRDLTRLRRAQTNERGRSIQRLEKVLQDAGIKLSSVASHTYSKSARAMLEALLSGVSDPEQLAELAKARMRLKIPQLREAPQSRFTIEHHGVMVAQLLAHIDTLDAALESLSQRIELVLTPHKHIVELLCTIPGVQAHAAQVLIAECGLDMTVFPTVGHFASWAGACPGHHQSAGRRKSGRTRPGPSWLTAQLTECARAAVRTKGTYLAAHFAQLRERRGEPTALGAIRHDLLVAYYHVVRDQVPFRQLGPDWQRKRYSPEHRARRLQRQLEALGYTVTLEPTQPAEQPA

SEQ ID NO: 333449 - protein, 415 aa, unidentified
MKFEKDTSGIKRYIAFDIHKEYTLVGGQNAQQDWVMQPRRIGMEKLREWAAANLRKGDAVVIETTTNVWDVYDIVKPLVSYVVVAHAGGVRQIAEARVKTDKKDVERLIRLLIADIVPEVWVPPVEVRELRGMISYRNRLVKTSTMIRNRLQSLVHRHNLILPKGMLRDKAWWDAQQMSALEKIQIRQELAMLDEMEKHKAEVDAELGRQSLGEVWGKQAMRLLQLSGFGVIVSMTVLSAIGDVSRFESAKKLVGYSGLGAGVHDSGKEHIEKRITKSGRKELRWALVEAAWRAIRISSYWKEQYEKYLRRMRKPNQAIVVIARKLLVVVWHVLTKQETDERVSEEDLAYKMLVLSWDLDEDVRMGLTYKQFAKYALMKLGVEKDITRFVRKEVPRRLAPREEVLARMVELGIGQ

SEQ ID NO: 333450 - protein, 350 aa, unidentified
MKYFAGLDVSMEETSVCIVNQDGEIIREGRAATDPAALDDYLKATGLPFDRVGFESGPCSAWLYKGLSAAGLPVICMDARHTSAALKAQNMKTDRNDARGIAQIVRTGWYRPAHVKSEESQTRRVLLNTRKALLGNRLQLENQIRGNLKVFGLKIGQVTATQYEARVRELVEGESDLSGYIEPLLRVRSYILMQCRELDKKVRALVRDDEVCRRFMSIPGVGPLTALVYKSAIDDPQRFAKSANVGVHLGLTPRKYASGEIDYNGRITKCGDPLARSHLFEAAQVLMRRSAKKSALKTWGTRIARRGSTKKAYVAVARKLAVIMHRMWLDGTEFDFGAEPAIPAGVARVS

SEQ ID NO: 333451 - protein, 336 aa, unidentified
MDVHKKSWTAHFKTDLFDNKTVTMPAESESLINYVEKNFAGHAVSCCYEAGCCGYWIARSLQQRGWEVKVVNPADVPRRNKQDWQKTDRIDSRNLCKHLSDGNLKGIYVPGEEQEQLRALFRRRVHLARNLRSIKNHIKSQLLYFGIKLPAQYDNPNWSREMKTWIANIKWKYNSAAESMKSRLKQLEFMWYEELHISNELRAYCRKHYKKDYYLYKSVPGIGGITAAAIIAELGDIRRFNRLDELAAIVGLVPGIYQSSENKINLGMTQRSNHQLRSLLIEASWVAVRDDLGLQQYYRKHSHKEPNKAIIKVAHKLLSRIRAVIHSDIPYQKGLL

SEQ ID NO: 333452 - protein, 339 aa, unidentified
MSASYDGQQYVGIDLHRRRSVLVRMTETGETLETVRISNDPGYLKQVMDRAGEAPEVVLEACYGWYWAADTLAELGASVHLAHPLGVKGFAYRRVKNDERDAADLADLLRMARLPEAWIAPPLSRELRELVRHRAKLVGLRTNLRCQVHAVLAGAGVVVTSSDVFGPGGRDLLQRVALPAAMRAKVNSALRLIDAITFEIDTFAALVTARLHADPGYAAVQAIPGVGPTLGAVFVAEIADVHRFRRAEQLASWAGLTPKHRESDTKVRRGRITKQGSKLVRWAAIEAVQRVGPHTRIGAFRDQVAERRGRNQAKVAAARELVECVFYALRDHHVRRLAA

SEQ ID NO: 333453 - protein, 377 aa, unidentified
MKNVRFVGLDVHAETIAVAVAEAEGEVRSLGVIPNRAESVGRLIRKLGKPEQLRVCYEAGPTGYVLYWQLTQLGVKREVVAPTLVPVKAGDRVKTDRRDAAKLARSYRAGDLTAVWVPDATHEALRDLVRARWAAKRDQLRARHRLSKFLLRHGRRAPEGVNAWTDKHLQWIKSQVHFAQRAQEITLDDYLHEVDHVAERIARLERSIDAAIESLPVKMRAVIEALQSLRGIAQLSAVSIMAEVGEVSRFEHPRQLMGYSGAVSREHSSGERIRRGAISKTGNAHLRRIVIEAAWAYRHRPAVGKTLAARQRHSSAAVTELAWKAQQRLHQRYVRLMGRGKSKQQTITAVGRELLGFIWAIGTHVERDVKVPLRQAA

SEQ ID NO: 333454 - protein, 423 aa, unidentified
MTKLNPTPAGAVLVAIDMSKNRQEVLIERPEGGRRRRMTVMATKADYDGFAEQLAAIGRPIVVGFEATGNYHRTLAHRLLTAGFELRLISSVALARTREALHNGWDKNDSKDAQVILHMLRIGATQRYVDPLAAGINDLQELSKTHEVVSKMKTQTWHRILTHYLPLYFPEIARFAGNSRSDWFLAMIERFPTPASITSLDREEFSAEVGPLIGRKVSKARLINDVYETACSSAALPVPEDSIAISMFRMVIAQGRSLIYQRDEIERLAHAQLAEHVDYQLLRNIPGIGPINALTILAEAGDLRRFNHHRQFLKFCGLDLATCQSGTFRGRTKLSKYGNARLRRTFWMAAQVAARQRDNSFRDKLGRYTAGHADDADRRRKAMTALTAKMARVAHAVIKTGTEYRPFLERPDARWKDPSLQVP

SEQ ID NO: 333455 - protein, 366 aa, unidentified
MKKTSTVRVNGKMIFKGHKLTIGLDLGDRWSNYCVLDEAGEVLLEQKLATTPEAMKQTFERMPRSLMALETGTHSPWLSRLLKELGHEVLVAHAQKVELITKSNRKDDRHDARTLARLARIDPELLGPVRHRSAKAQIHLTVIRARAELVSARTALVNAARGLTKSYGERLPKCGTEQVSRELAAKLSAELREVLEPLLNEIESLNERIKEYDARMEKIARESYPQVALLKQVKGVGTQIALTYVLTLDDPHRFAKSREVGCFLGLKPGRRDSGESQPQMHISKEGDRYLRTMLVQGAHYILGPFGADSDLRRWGLRLAERGGKNAKKRAVVAVARKLAVLLHRLWVSGEVYEPLRNNRKAMRAVA

SEQ ID NO: 333456 - protein, 348 aa, unidentified
MNVTTYGLDIAKNVMQLHWVEPATGEIQRRKLSRVKLTDFFAQRQSGVIAIEACASAHHWGRTLTALGHRVELLPAGQVRAFVRGNKDDMADARAIWLAAQHGDIRRVPIKSQDQQAIQAIHRTRTHWVSVRTATINALRGLLYEFGAALPKGRHAGLSAVVAQVTELQAKLPAPMMALVQHQLAAIRQLDEHISLYEGQLRQLCRTLDSARRLNEVPGIGVIGASALAATLGDGAGWRNAREFASCLGLTPRHSGTGGKVVMGGLSKRGDPFLRTVLTNGARAVLCSPKAPPWALSLLQRRPFNVVVVALANKMARMAWAIIAKGRCYEAQWQSVPPAQAIRLELAH

SEQ ID NO: 333457 - protein, 339 aa, unidentified
MKFVGIDLHKQTITVCVVDQSRTVLVRRQLRCAQEQTIVDFFAQLGEFRAVVEATASYEWFVQLIEPLAQSVLLAHPKKLRVIAESTRKSDKLDARILAEFLALDMIPSSYRPTPRQRDHRRLVRQRDTIQRRITALKNRIRRILSDYNADRKDLFTQEGQAAWPQVALSSADRFAMKQLFASLAFCQGQLLEADRELRGFIGQAPVREQHLRELLLTIPGVGFVTAEVVLAEVADIDRFASQKQVVAYAGLAPGQRESAGKLRELHIEKTGSKHLRWVLVEAAWRLVRHSPRWKAIFDRLRKRLQAKKAIVAIARRLLGVITSILKSGEPFSATHASA

SEQ ID NO: 333458 - protein, 455 aa, unidentified
MRKPQVIPDEDHEVVYERVAAVDVAKASGVVCLRTPDPQRPGRFVNRIWEDVPATRARIAELGGELLRCRVQMVTLESTSDYWRIWYYVLEGLGLAVQLVSASQAKNLKGRPKTDRLDAMWLARLTQWGMLRPSFVPPAAIRRVRDFTRARTDLVRERTRVLQRLEKLLEDAMVKITSVVTDGLKAKSSVAMVAALVAGERDPRTIADLAKGSLRGKRDQLAEALDGMFDSHHGVIARMLLDQVAFLDQRITAMEDQAIAALAQVEESWGVDTSGETGPGCGTTAESPVLAAAHRLAEIPGISVWLAIVIIAEIGLNMTVFPTPAHLVSWLGLCRSAAQSGTRHGKGRQKKGNSYARGAAGQAALAARDTATFLGERYRRIARRRGGAVAQVAVARSIMIIVWHLLNDPAARYRDLGPDWHARRTNRDKKIRTHIQGLKALGVTVAITDDEQQAA

SEQ ID NO: 333459 - protein, 296 aa, unidentified
MLNTKYIGMDIHKETISIAVLSAGGKSVMECVIETKASTILQFIHGLRGDLHATFEEGTWAAWLYDLLKPHVTEVLVCDPRKNALLKEGSKSDKIDARKLAELLRLNHLKPVYHGEHGVRTLKELARSYLTITQDLTRVRNRLKALYRSWAIPCSGRQVYAPRHRSEWLGKISEAGVRRRAEHYYQQLDALRPLRQEVRRDLLTESQKHKAWKLLRQIPGIGAIRAALLIALMQTPHRFRTKRQLWTYSGLGLETHDSAQYCVVEGQLRRSKKPLMLRGLNQITTTTSKRSSKVRH

SEQ ID NO: 333460 - protein, 407 aa, unidentified
MSQQAPVPNRWIGLDGHKHYLVAGGVDAQLNHVLGPQKVQLSRLEAWTRKTLTPYDSVALEMSTNSFELYDELAPFVHSMILVHPPHVNLIARAQVKTDKKSAFTLARLHAVGLLPSVWVPPQPVRDHRALVSQRSNMVRLSTQAKNRLHAVLHRHHLPPPEQGGLFDPLNRDWWLSLDLSPIEHIRIQSDLDTLAFAQTQVARLEEAILLVALHDERVLFLIQLPGVGLITAVTLLAAIGDESRFPTPKHLVGYAGLGCRVHDSGLTHRTGRITKAGRRDIRAAMVEAAHTACRVHPHWKAELARLEPRLSHNKAIVVVARKLLVTVWHVLNERCADRFADPDMVARKLAQYAYTLGRDHRPNGQPVGQFVRQQLDRLDIGADLDAIQWGKRTIPMSPSDLAVVDD

SEQ ID NO: 333461 - protein, 344 aa, unidentified
MITIGIDPHKASHTAIALDPTGGILGEVRVSATGTTLERLLRWAARWPERIWAIEGAAGLGHLLAQQLVANGETVLDVPAALAARARLLAPGHGRKTDAIDAASVARVARQQRDLHQVGVEDHSAVLRLLSDRRDELTAERRRVVNRLHRLLRDLRPGGAPTELSTLTASRLLREIRPATAVERERKVMARALVADLRRIDRALAENRARCASAVAASGTTLTTIFGISDVLATKILGHVGDVGRFGSGDAFASYTGTAPIEVSSGEVTRHRLSRNGNRALNNALHLAARVQTMHPGPGRDHYARKLAEHKSSREALRSLKRQLAKVVYRRLVADQVHRPALAS

SEQ ID NO: 333462 - protein, 347 aa, unidentified
MVSKCLSTHSRVTLNEQGKNKMTHYIGIDISKAKLDTAWLKDPETLKVKTKVFKNNPKDFEQLLNWITSNISNELNDIHISLEATSVYHENIAHYLHEKGIKVSIVNPAFVRSYANSLGSRNKTDKKDSIILARYTHSAKPEQWQPPAVEVRQLNSLLTRLQALQEDLQREKNRQEKALATNTAPKVLESIETMILTLEEAIDNLNKDIDEHIGNYPDLKQNQKLLQTIKGVGTVISRHMLCLLKSKTFTSASQVAAFLGLVPRHTESGLFKGKSRLAKNGSSLVRSKLYMAAIVASKHNSIIKAHYERVQNNGKCKKQAICACMRKLVHICFGVIKHQKPFQTSVG

SEQ ID NO: 333463 - protein, 460 aa, unidentified
MGRKGKRTKGMEEAHPFTGMSQVNPKAAGVDIGAVEIVVCVSGDENTQIVRAYGNYTVDLQAIGRWLKEHDVRTVAMESTGVYWIPLFEELERQGFECLLISSRSLRRVAGRKSDIEDAQWIQTLHSYGLLESSFRPQAELIALRTLLRHRSQLIEHRSPHIQHMQKALLQMNVQLSQAVSDVTGITGRAIIWAILAGEREPQKLAALREPGCKKSEEEIGKALTGTWREEHLFVLKQSMEMYTFYTEQIQACDEEIERVYALIRPDWEAGEVKPLSQRKRNSHSKNKPQNAESIREHLKRISGVDLSEVDGFGVSLAQTVIMECGSDMSQFPKDKHFCSWLGLAPKHEISGGKVLKNKTLKTKNRAGQAFRMAAQSVKQADCVFGVMYRRMRARLGPAQATVATAHAIARVVYRMLKYKVEYETISVEEYEKKYEEQQVKYMKKKAAKLGYQLVQLVPA

SEQ ID NO: 333464 - protein, 346 aa, unidentified
MMIIGCDFHPSWQQVSWLDTETGETGEQKLVQAAGDAERFYRQVPAPALIGMEATGNCHGLVDLLAEIGHELWLGDAAQIRASYVRQQKTDRRDAAHILKLLVEGRFPRIWMPSSEVRDLRQLLLHRYKLEIIRARVKNELQHLALNKGVQKKHKLWSQTGQQWLRELPLKPWAGRRRDDLLRLMAMLDQQILPLDEAVKSEAQRDKMALLLQTQPGVGPITWLAYVLTMGAVSPFPRGKQVASYLGLIPREHSSGGRQKLGAITKQGNRMMRMLLVEAAQSAVRYDPKFRRQYQHLCHSKPKAVAKVAVARKLAIRLYWMLRSQKPYPAVVRIESSPRVALVGAS

SEQ ID NO: 333465 - protein, 351 aa, unidentified
MRNQQTVTPKLFIGIDIHKRSWKVHCASDISSGKTFSMNPDPLKLKAYIEQHFNGHEVSTAYEAGCCGYYAHRAFESYGWQSLVVNPADIHRKGKERFTKTDHIDAQVIARELKDGRLQSIHVPDMKREQLRSLFRRRNNLVKNYRKIKSLIKGQLLNQGIDVPCEFDNSHWSHNFRDWLDNLEFTYLTARMTLDSHMRYFRFVDQELRDVSTELRRYCKEHYKKDYMLLRSIPGIGGIVACGIICELGDLRRFKSIKHLSGYVGLVPGIHQSGDNLRNTGITRRAHRLIRSYFIEASWQAIRTDPIMQAYYRKHLGKNVKAVIVKVARKLLSRTLAVIKTEIPYEIGVVS

SEQ ID NO: 333466 - protein, 343 aa, unidentified
MEIYTIGIDIGKTVFNLVGLSAQGEVVVRKKFSRKQLLHFTANLRVGLIGMEACGGSHFLGRALREQGHEVRLIPAQYVKPFVKTNKNDYIDAEAIAEAVGRPRMRFVPIKTDEQLDMQSLHRVREGWVGRRTAVINQLRGLLIERGITVRRGRRYIEAALPGILEDADSKLSGALRVLLLQAYSEMRHLQSQIDEADAVIRRMAGEDEACQRLVEVPGVGPVIATAMISAVGNGAAFKKGRGFAAWLGLVPGQYSTGGKQKLLGISKRGDKYLRRLFVHGAHAVLQQRVKQSSGLSEWLGQLTSRVHRNVAVVALANKLARMSWAVLAKGERYRPPLLAETA

SEQ ID NO: 333467 - protein, 346 aa, unidentified
MMIIGCDFHPSWQQVAWLDSETGETSEQKLVHATGNGKAFYQQLAPPALIGMEATGNSQWFIELVQDLGHEIWIGDAAQIRASYVRKQKTDKRDAAHILKLVVEGRFPRLWTPDREQRDLRQLVLHRHKLVEIRSRVKNELQHLSLNKGMQKKGTLWSEAGQKLLRELPLKPWAACRREDLLGLLGMLNEQIGKLDRAVQIAAEEHPQAKLLMTQPGVGPNTALAYVLTMGDVTRFPRGKQVASYLGLIPREESSGGRQKLGAITKQGNRLVRSLLVEAAQIAVRFDPEFRKQYLHRCHQKPKAVAKVAAARKLAVRLYWMLRTQTAYPEIVRIESSPRVPLVGAS

SEQ ID NO: 333468 - protein, 404 aa, unidentified
MAVYLGIDWSTKSHALTFINQKGGIIAQETIRHSAQGFARLDEIRTSLDVSAAECLVGIESSHTLMMDWLWSHGYDQVYVIPPRMTASRQASYGQSGARNDSSDAYLIANLLRTDLHLLHPWRPHSATIQALRTQVSLRMQLVAERVREQNRLTELLNRYYPALLQAFSLNTNVGLAFLQHYPTPQAAAELTWSEFEKFACSQNYAPRHRVTAFAALQRVQPQALEEVVAISQQQAVILAQRMQETRRFIKETEKSICTLSLSHPDYYIYDSLPGAGDVLAPALLGKLGDDRERFPTPATLQAFAGTAPVTQQSGQWRRVRFRQACDKEFRTIVQNWAKASLLKSPWARAYFDQARQRGHSVSRAHRGLANRWLAILWTLWQSGQPYDQELHLQRVKARSRPRG

SEQ ID NO: 333469 - protein, 358 aa, unidentified
MQTSASSEKTTIGIDVSDKYSRVCVLDGSGAVMEEGRVATTGPAFRRRFSSAPPARVAIEAGAHSAWISRLLAEAGHEVFVANPRRLRLVYENDKKSDRVDAEWLARVARLDATLLAPIHHRDSESQAALALLRARDVLVRARTQLVNHVRGTVKAFGLRLPRCSTHSFVRQITPSLPADLSPLLAPVLEAIDTVSGKIRAYDRHVAALADTSYPETRRLRPVPGVGPVTALTYVLTLEDPQRFPSSRAVGSYLGLRPRQRDSGGDEPQLRITKAGDGAVRRLLVGCAHYILGPFGPDSDLRRWGLRLAERGGKSAKKRAVVAVARKLAVLLHRLWVTGETYEPLRRSETLANEGASA

SEQ ID NO: 333470 - protein, 322 aa, unidentified
MDDKSDRLIGVDIGKRFLDVAREGVRAIRRHSHDAVEIARLVDELEPEHDIVIFERSGGYERRLEGQLAAARMRWAVVHSRRVKAFRVAKGIKAKTDAIDCRLLRDFGRDQLNEGQLRFGRLENVTLAALVARRRQLNGLVHDERCRRETAALDLVQASIARTIATLERELATIEAEIDRHVAADAELTLKQETMCRRIGVGPTTARSLLAVLPQLGCATGKEIAALGGAAPRVHQSGTVKKKRGLDPGREAVKTILFYPAQTAMRFDPEMKAFAQRLKQRGKPGKVIMVAVMHKMLIKLNAAVRDALNSSRGTLSAAPAAA

SEQ ID NO: 333471 - protein, 366 aa, unidentified
MTMLAERVDHVIGVDTHRDAHTVAVVAAASAAVVATTDTAANPVAFKGLLRFARRHAGPRRVWAIESSGSYGAGLTVFLLEHQEQVVEVDRPARPARRNGAKSDELDAVRAAREALSREHLAQPRCRGDREAVRVLLITRRGAMRARTRAINHLKALVVTSREELRNQLRGVRTDELVFRCARLRTRPSQTVEHRATVIALRRCAQRVLALEAEANDLETELEQIVRRVVPHLLAETGVGPISAAQLYVSWSHPGRLRTEAAFAMLGGAAPIPASSGQTVRYRLNRGGDRQLNCALHTIILSRLTHDPATRAYAARRAAQGKTPREIKRGLKRYLARHLYRLLEADGPEPPTRPRPPRARTLGTCS

SEQ ID NO: 333472 - protein, 367 aa, unidentified
MKKVSTAVAQLSRIFSQPRLTIGLDLGDRNSWYCVVDETGQIQLEQRVRTSTKALQEVFGAMPRSRIALEIGTHSPWISRLLRQWGHEVIVANARKVRLIGESRKKDDRLDAQTLARLARIDPQLLYPVKHRSAQAQADLAVIRARAGLVRARTGLVNTARGLAKSYGERLRSCNVRNLDPEKAEGLSPELQRALQPLLSAIAEVSERICTYNERIETLAQQSYPQVALLKQIKGVGTLIALTFLLTLEDPHRFRKSRDVGGYLGLQPGRRKSGQSEPQMHISKEGDPYLRTLLVQGAQHILGPFGVDCDLRRWGLKLAERGGRNGKKRAIVATARKLAVLLHHLWVSGEVYEPLHNSSRTTLAAAA

SEQ ID NO: 333473 - protein, 332 aa, unidentified
MYLGIDVHKRYAQVAVMDEAGEIVEEVRVENANLDDLAQRYAGAQAAIEATSNYYHIHDTLSEHLDVTVAHPKELNQIADTDKKTDRVDAKELARMVRLNSVPESYVPTDEIREARALVRGRQSLVEHRTEYANKVHGLLSDHGITEDVKPLNKEGREFLRELSLPMPWESVLESYLEVIETLTDEIQNLEETIEERAGSLEETQLLMTIPGVSYDTALTIYAELGEIGRFDGDKEVVSYVGLNPVIRESGDSRIEGKLSKRGSGRARWLLVQAAHTAVHTCNDEYLSRFYERLASRKNSQKAIVATARKMLVSMYHMLDRGEVYDPPGVSA

SEQ ID NO: 333474 - protein, 424 aa, unidentified
MLAVGIDWAEAFHLVALGRPGEGVIEVRRVEHTPAAVAALLADIAALEPDPAEVRVVLETRHGVLVERLVDAGFVVLPVNPDLIARRRGPARKKDDAEDARLACLLALDRYTSLRPLLPHGELAAELRAIARDDERAARDQRRLLNRLRQDLLSTFPAALQLAGEELGAPTILKLLARWPTAAALGTATRHELVAFARGAHHGWPERLADQVAAALATDQFTPRDYLVRAKADTIRLAATQLLAIATQRRVWERRMGTLLLGAPRRGRANTPRQDELDQGQAFPGGEVYLSFPGLGDRLAARVAGEIGDHPQQFQSPNALACYAGKAPVTRRSGKSELVVACRLACNRYLAGAVQQWAFCSLRESGWARAFYDAQRARGKTHQAALRALGNRWLEVLWHCLRKGVRYDEATHVANRNRALGKAA

SEQ ID NO: 333475 - protein, 449 aa, unidentified
MRKPQEIEDEEYEQVVERVAAVDVAKAAGMVCTRVPHPSRPGRRRTRVWEVDATTNAILELGEHLAGEGIEKVTLESTSDYWRIWFYLLEAAGLDVQLVNAGDIKNAPGRPKTDKLDSVWQAKLTERGMLRPSFVPPAEIRRLRDYTRLRTDLTRERTRHWQRLEKLLEDALLKVSAVASTLDTLSVRDMLEALIAGERDPKVLAGLARGRMKAKRAALIEALTGRFDDHHAELARMLLDQIDHLTAQIGTLTSRVGELIAAIPAAQGVDADGATGPGAGTGPGAPVLPAIARLDEIPGISPLGAQIILAEIGLDMTRFPTAGHLVSWARLCPRTIQSGARNRSGKAGKGNPYLKGVLGEIAAAAARTDTFLGERYRRIVKRRGKLKALVAVARTILVIIWHLLADPAARYHDLGAGYYASRTDTGRKTRNHVRQLEALGFIVTLAPAA

SEQ ID NO: 333476 - protein, 374 aa, unidentified
MADYSEVFVGIDTSKLRNAVAIAEGGRNGEVRYLGEIETTEGATSKLVKKLAAQHRRLTFCYEAGPTGYGLHRLIKTLGHECVVVAPSLIPKKPGDRVKTNRRDALNLAKLLRAGELTAVWVPDARHEAMRDLVRTREAALDDLKSKRQQVLSLLLRLGRHFMGKRTWTRAHMNWLVSQKLAHREQRIAFEEMLLAVRQADERVIRLERAIAAAVPDWSLAKVVTALMAVRGLDLISATIFLAEIGDLSRFASPRQLMAYLGLVPGEESTGDRVWRGGITKAGNHRARRILVECSWSYRHPPRVGKKKLAKVEAAPAAVQEIAWKAQARLTARYRALARRGKRPTLVVTAIARELSGFIWAVSRAIGAPTTPAM

SEQ ID NO: 333477 - protein, 400 aa, unidentified
MTSAVADDTTEQIVFGGVDSHADTIHVAVISDNGGHLADAEFATAAAGYAAALAFLSAHGHVRAIGVEGTASYGAGFTRAARSAGLDIVEVNRPDRAERRRIGKSDPIDAYAAARAALSGRASSSPKDDTVAGIRALHNAARSAVKARTAALNQITHILVTAPETIRAKFGQLKGTDRIDALARLRPAGDAVHTAVLTALKSLARRVRELTAEHQALDSEVTVHNPGLRAVYGVGPDTAAQLLVTAGGNPERLRTEASFAALCGAAPVPASSGRTNRHRLSRGGDRAANAALYRIALVRMSGDPRTRDYVARQTAAGRTKKEIIRLLKRAIAREMFRCPTTTATIPNIADLRPLRQSKNITLTAAARHFGVWPATISTLERGIRRDDDLANTYRDWLTAA

SEQ ID NO: 333478 - protein, 334 aa, unidentified
MQNITLIGIDLGKHSFHIHCQDKSGKALLRKKFTRTKLMQFLATCPPSVVVMEACAGAHFMARRISDFGHETKLISPQFVRPFVKSNKNDFVDAEAICEAASRPSMRFVQPRTETQQAMRALHRVRESLIRDKVKTTNQIHGFLLEFGISLPIGDAVIKRLSLVLAEHEIPEYLSRLLVRLHTHYFYLVEQIAELESELSQSINADDTAQRIMTIPGVGPITASLLSSQLGDGKQFSCSRDFAASTGLVPRQYSTGGKSTLLGISKRGDKNLRRLLVQCARSFIMRLERKHGKLAEWVREQLNKKHSNVVTCALANKLARIAWAITTQKKEYQA

SEQ ID NO: 333479 - protein, 391 aa, unidentified
MVCVGIDVAKDKHDCCILDSDGTIRADCITIPNNMDGFKQLLQTIRDCTKRSDKIKVGLEATGHYSYNILGFLLDNDLAVYVMNPLHTNLYRKSLSLRKTKTDRVDARTIATMLLSDVDLKSYTDTAYHNEELKSLTRYRFDKVRERAKLKQSVSRLVTILFPELEKLVPSLHIASVYALLSEYPGAKQISEIHLTKLTNLLATASKGRYGKDKAIQIRDAARTSIGSVMPAKSLELKHTIKLIRELTSEIDEIEVSIQKIMDELNPPILSIPGVGIQSAAMILAEIGDFSNFESPDKILAYAGCSPSTYQSGKLTNCYAHMEKRGSRYLRYALYNATKYVCYWNPVFAEYLAKKRAEGKHYNVALSHSMKKLVRLIYALQKSGKTYLAAA

SEQ ID NO: 333480 - protein, 472 aa, unidentified
MARTARRQGARQHHKRRSSRARSAPLAQMNFNAAGIDVGATEHWVAVPEDRDEEPVRRFGAFTADLYALADWLQQCQIETVVLESTGVYWIALFEVLEERGFDVKLVDAHYARQVPGRKTDVKDCQWLQELHTYGLLRGAFRPEDQICVLRSYLRQRSMLVAMASRAVQHMQKALEQMNLKLTEVVSDINGKTGMEIIHAILAGERDPQRLASHRDRRCQHDQATIAKALEGHWRAEHLFALQQALEQYEFLQQQLQACEQQIDACLQTFVTHVEVEPPQPTPARKRRARQRQAPSFDVHKYLNAMTGVDLTQIDGIDALTALKVISEIGLDMTRWPTGKHFASWLGLCPGNKVSGGKRYRMRSKPTANRAASALRLAAQGLVNSHSALGAYYRRMRARLGAPKAITATAHKLARLVYSMLRYGTAYVDAGQQAYEQKYRDRVLTNLQRKAKAFGYQLVHVENIDGGVASTL

SEQ ID NO: 333481 - protein, 400 aa, unidentified
MKTVLSVDVAKNKSMIMLMNNDGEILIDTKEIKHNLGEFEKVKEEIEEINPENLTVFMESTGTYHLPVERYFKENGFNTLVINSLTTKNNFDTIRKTKTDKKDCYRLAKLFFVNEVEYHEISKKDLYANLKAMTRQYFYLTQVNIRCKNRYKRLINICFPEFEGFFARNRIYEDTALNFIKAFPHAYIVREKRIDALYNNLRKVDARHDYYYKRLARQLKDTAMNSFPGVDKDHADVKNLSDMASILQENNKLIDEIRKNMIELAKQSPYFEIVNSFYGIGEVLAAELLGELGDITRFDNHKQLVAFCGLDPAIVQSGKSINVHGAISKRGDKYARWILFNISQMVVKLGHQYPSHPVYNYYLIKKAEGKHYYESLTACSTKTLRMLYFMCKNNKRFLEE

SEQ ID NO: 333482 - protein, 351 aa, unidentified
MKEYIAFDSHKHYTLMEREDRQTARTVQLRVAHQPGAIRACLRNCESGTDVAVEATGNWYWIVSEIEQAGLKPQLVHPRKAKLMMGLINKTDKLDVHGLNRLQRNGTLPTVWIPPAELRDQRELTRTRLVLVAQRTRLKNRLQSSLAKYGLAVRDCSDAFGTVARSQWPELLAQLPEQTQWVSQQLLKQLDLLEEQIGQCEKRLNPLLKITPQIERLKSLPGVGLILGASIALEIGEASRFASAEHLASYAGTTPRVHSSGDKLRFGRLRSDINRYLRWAFVEAANVVALHHQQRPERHVSYLYWRLKQRKGHAKAIGAVARHLAEATFHILSRQEDYVDPALRKGRSKPV

SEQ ID NO: 333483 - protein, 354 aa, unidentified
MYIGVDTHKQTHVLVAIDEAGRAGGSRTVANTPEGWATALQWARGQQQQQTRWGVENSGSLGKGFAQFLLAQGEADVREVVPHRTAQYRRRGRTQDKTDTADALAMARLLRAEGELLPRVQADDRSTELRLLSDHRDNLVVDRTRLINQLHAQMLQLDPGYAARSGPLTRAAGVRYCRDLCLPEADAIVQTRLLVVRQIAARLLALDGDIAAATAALEVRVRALETPLLEVRGVGAVVAARLLGELGCSPRVHSAAALAALAGIAPLTVASGGHHAHRVNPGGNRKLNRAIHIVALTQRRCEPLAQAYYEKKRAEGKTARAAMRCLKRRLVDVLFRQLQRVPQALPPRMTAIAA

SEQ ID NO: 333484 - protein, 481 aa, unidentified
MRVVYTRCAGLDVHKKSVNVCIRDGKGKKLVVKTAVFGTFTGDLERLRDLLRKHKVRRLVMESTGVYWMPVWNVLERGEWQFDLVLVNPQHVHALPGRKTDQQDCERLAELGQYDLLRGSLIPPREIRELRELTRRRTHLTQDRNRIMNRIARLLETANYKLGSVVSDLGGKTGWLILNALAEGETSPHQLAGLAQGRLRNRRSELADSLRAYASDHFRWLLRQMLDDLATLDRKLNEVSERLRERMQPHADAIARLCTIPGVQETTAWTLVAELGIDMSRFPDAEHAASWAGLCPGNQESAGKRQSGRTRKGDRYLRRGLVQSAWTVAHKKDCFLTALLLRVASRRGMKKAIIAVAHRMLIIAWHILRDGSVYREQGGDYYDRRNPIATARRLTRRLQRLGFEVTLAKVDEAATPPPKPIRNGITRWQGSRPIQRKVAETGPPATPELCRQCALWGIPCIHARNAKFKAHRTPNCELSAT

SEQ ID NO: 333485 - protein, 347 aa, unidentified
MKHCGLDVHTKRTTAVWMDDDTGEVSRACSMPNDELVAYLQSLPELKQVVMEAGSTSAFLKRQFDTCQIPAIVVDAHKARRLLEAINALTKSDKVDAKGLALLSVRGWIEQISIWVADTPTQRLRVLTRSRERWSKVSNITRNGIRATIRAEGLLCSATDLTGPTAKAWLDDIETRLDPLTRQILQQDRRMLDQIMENIAVIDVLLAEIAADDVRCQQLDTIAGCGLVTAAAVVAEVGDIARFADAKALRRYSGLTPKTEQSGERTVTGKLVCHCNKHLRRALIIIAQCFPKSAHVTGTRMRSHYYQCVFRHGPNPAKVDLARRLCDVIFAMLRDGTDFDPGRLAAA

SEQ ID NO: 333486 - protein, 341 aa, unidentified
MDYRIGCDAHKHYSQFAVMDEGGNLLAQNRVDHRPGAIQAFLESLPKGTPVALESVGNWYWIADEIEAAGCLPLLTHAAKAKVMMGNINKTDKLDAKGLAKLLHLGSLPTVWLPPSEIRDERELHRTRMALSKLRTVLKNRIHATLAKYGITSTEHSDIFVGAGRAWLKTTLSQLPPETGRCVAQELEALDGLQIQIAQLEKRIQERIALNPSIQLLKTLPGVGNILAIVIEREIGSVDRFATAGQLASYAGVVPTVHASGGKTRFGHMRKPSNQYLKWAFIACPGRRPGKAPMSSSATGTTLLGRQSMSAGCTTRSAGERAMLSLLELSLVIWPKPATGC

SEQ ID NO: 333487 - protein, 322 aa, unidentified
MSVTVLGIDIAKQKLDAALLVDGKTKHKACKNSAEGFETLMVWLEKQGIQKVHACLEATGNYGEDLAIYLHEAGHIVSIVNSARIKGFGQSELIRTKTDKIDAALIGRFCLAMKPGPWIPPTPAIRSLRALVRRVDSLIDMRSQEKNRISTAHESVIFLIKEHIAYLNQEIEKIRQQIADLIGQDPNLKREHDLLDSIPGIGKATIPHILAELDDLEKFDHVRQLVAFIGLAPKETLSGSSIKGKPRLCKIGHARLRKALYMPALVSIQCNPVMIAFYNRLKDKGKNGKVIVCAIMRKLVHVIFGVLKSGKKYDPNFKPVAA

SEQ ID NO: 333488 - protein, 441 aa, unidentified
MTGKVVQRFIVEHTVEGLAGLVRRLRKAGVGEVAIERPDGKVVDTLLEAGLTVVVISPNQLKNLRGRYGSAGNKDDRFDSFVLADTLRTDRARLRPLLPDSPATVTLRQACRARKDLVGHRVAVCNQLRAHLKIAFPGAVGLFRELDSPISLAFLARFDRQDRADWLSPKRLAAWLAGQGYCGRKDPAELHARLAAAPRGATGDDGTAKAHITRALLAVLASLVQQIKALEAQIAEQLALHADAHIFTSLPRSGTGRAARLLAEIGDCRARFPTPEALICLAGVAPSTRKSGKNQIRRLPLGRRQAAPRRRLRLHRRFPPRQPLGSQALQRRHRPRQRPPHAVRILARAWLYVIWHCWQHHTAYDPARHKALQCILTEEKPAAARHRATHGATWGTGRSAAGFRPAGPPVPGRRRPVCWMIVAGAIGGRSGRSGGHHGCSR

SEQ ID NO: 333489 - protein, 427 aa, unidentified
MPYNIAGIDVHKRMLHVVVSDVQVDGEYDFTRRVFGSLPEALRSLAAWLVEQQVQEVVMESTAQYWKPVWGTLERYWKQICQTREGALATSGTLHLAQAQSNRGRRGRKKDFRDAERLVKRLVAHELVLSFVPDVEQRLWRTVVRTKYQLTRNRVQLQNRLEALLEETHIKLSSLVSDLLGASARRMLHAIADGETNRETLAALADRGLRATQEQLQDALGVCQELNPVYRRLIRMVLDEVASIDKRIEQLNQEMANLLRPHEDQVKRLAEVPGLGVDSAQQVIAEVGATAATFPSEKHLSSWVGACPGDEESAEVNYSRRSPQGNRHMRRILNQAANAAVKHKGSIFEILYRRYVPRLGHNQTIGIIAHKLCRLVWKILHRGIRYEERGPEVSKASKQKRTRKMIQALRRLGYRIEPSPSQSAITA

SEQ ID NO: 333490 - protein, 360 aa, unidentified
MFAQRTSVGLDVHARSVVGCAIDEATGEVVHKRFGYELAQVIDWVKSLPGPQSVTYEAGPTGFGLARLLEASGIACVVAAPSKLQRPSGDRVKTDARDAEHLARLLRLGEITGVRVPSVEQEAARDLVRAREDTRGELMSARQRLSKLLLRNGIVYDGANTWSLAHDAWLRRHRFELPGTAAAFEAAYEAVKQAEARKDRLEARIEEAVNGSEYTATVRRLACLRGISNLTGYALAVEIGDWHRFTGRTIGAYLGLVPSEYSSGASRTLGPITKTGNSHARRLLVEAAWHHKKLYRPGAVMQARWDAAPPLAVVRGQDGNHRLHRKWQQYVARKKRPVVANIAIARELTGWCWSLAVMND

SEQ ID NO: 333491 - protein, 343 aa, unidentified
MAKTPIAVLGIDLGKNSCSLAGLDAAGAVIMRRRMTREGTIKFVATLPACVVAMEACCGAHFLGRTFACQGHTVRLMSPEYVAPYVKAQKTDNRDAEAIAEAATRPTMRLVTLKSEAQLDLQVLHRARERLVAGRTRLTNQLRAMLLERGVILPKRRAPLIKRLDELIAGELPISQRARQLLLDLRDEWMDQDRRIKAYDDELMALTREDGAARRLATIPGIGVINATALLAAVGDASAFAKGRDLAAWLGLTPRQHSTGGKTKLLGISKRGNKYLRTQLIHGARAAMAHVAKKATPVGTWVRQLLTRAHPNVVVVALAAKLARIAWAVLRHGSNYDHRAATV

SEQ ID NO: 333492 - protein, 340 aa, unidentified
MNRAHAFVGLDVHKDTIAVAVADGQAGGEVRFWGNIENTPERLRALTDKLTSRYQTIEFTYEAGPCGYEIYRGLTDRGLGCRVVAPSLIPRRPGDRVKNDHRDAMTLARLARAGGLTAEWVPDPVHEAMRDLVRARHAANRDVRHARQRVQSFLLRHGLSYPKKAWTARHRTWLADRGFPHAAQQVAFQSYLNGLDQACARREQLESQIRELVPGWSLAGLVAVLQALRGVALVVAVTVAAEVGDMARFENPKQLMSFLGLSLGEHSSGRTTRPRGITKAGNPTVRSLLFEAAWSYRHPPKVGSYMAPPRAPGFATGGQGHRLEGAVAALEAVPAVARQG

SEQ ID NO: 333493 - protein, 418 aa, unidentified
MPRSTKGRAAARGLDARLILQHASCLLEMLHSKQLRSIKMLIDSNHGIYRDLLHRHVSAMDVGAVKAPTIRRSQVMQTITTIGLDIAKSVFQVHGVDNDGKVVIRRQLKRRYVLAFFEKLQPCLVGIEACASSHHWSRELQALGHTVRLMPPAYVKPYVKRQKNDAADAEAICEAVTRTNMRFVPIKTPEQQSGLMLHRTRHLFIRQQTSVINAIRAHLAEFGVTAAVGRKGIEELLRVIADPSDKRVPDVVRTCLAGLGSQLLSLKKQILDFDRMIMAWHRSNQTSKRLNCIPGVGPLLATALVASVADPKTFRSGRNFSAWIGLVPKQHSSGGRDRLGSISKQGDRYLRSLFVAGALAVIRYAKIHGTKYRPWVAALLTRRPTKVAAIALANKLARMAWAMMARGERYNYPASLRV

SEQ ID NO: 333494 - protein, 446 aa, unidentified
MQIVYQRCCGMDVHKDSVTACVLLIDEYGEWRSEKRKFGTMTRDLREMATWLANLRVEAIAMEATGVYWKPVWNILEAENKFRLLLVNAHHIKQVPGRKTDQKDSEWIADLLQHGLLKPSFVPPQTIRRLRDLTRMRVKIRQMLATFANRIQKVLEDANIKLGSVASDVLGVSGRHMLHAVVEGQQDPEQLAALAQGRLREKRAELRLALEGHITDHHRFQLKFLLEFVQFGEKQLGQLEAEIRRLIIQLEPGLVSSEGAVTAAPGAGEEAMATAVKSPLQTVVEFWDTIPGIDELTASTLVAEMGANMDQFPSAGHAAKWAGICPGNKESAGKRLSGKTPKGSVWLRRALCQAAWAASRTKNTYLAAQYHHLIVRKGKKRTIVAVAHTMLVMAYYMAKRQCSYQELGGDYFDRRNADTMQHRLVKKLKNLGYEVTLTPITASSTA

SEQ ID NO: 333495 - protein, 353 aa, unidentified
MDRITRVGVDLAKNVMQIHAVDSAECVVVRKAIPRERFVSWFANLEPCLIAMEACGAAHYWARKLHALGHEVRLIPPQFVAPYRKGGARVKNDALDAEAICEAASRPHMRFVPVKSPAQQSVLVLHRMRTGFVEERTALANRLRGLLAEFGVFLPQGTRPLHEHLIERVEDGSNELTGPARLALLRGWEQWQVLDEQIAWFDRQIAEHANRDPQAQRCMDVCGVGRLTASAAVATVVDARQFKNGRQMAAWLGIVPKQKSSGGKQRLGSITRQGNDYLRTLLFQGARSAVLTAHRRDDRLSRWIVQLQARVGYYKTLVAVANKHARILWAVLAKGEQFDPSYAPVRTGGATGA

SEQ ID NO: 333496 - protein, 364 aa, unidentified
MTTSTTAVIGGVDTHKHTHYAAAIDTNGRLLGHREFPANDRGYVALLAWMRSQGEVEAIGVESTGSFGATLTRALTKTGIRVLEVNRPNRPARHADGKSDRLDAEQIARSVLAKTATATPKAKTGVVEVIRTLRVTRASAVRARTQAFNSLFGVMIAAPSPLRDELVVLTKRTLVNRCLRLRPEVDNLLALAGDPDRLLLAGVKTALRDLARRWSALDDEIKSLNHQLTALVTHAAPELLACFGVGVELAGQFLMTAGDNAERIHSEAAFAKLCGVAPQPASSGRTTGRHRLSRSGDRAANSALYIVTIVRLRHHAPTRAYVQRRTAEGLSKREIIRCLKRFIAREIYAALPRSNQPAGLARAA

SEQ ID NO: 333497 - protein, 351 aa, unidentified
MFIIGVDYHPSFQQIAFLDQGTGECGERRLNHSDGEAEKFYRDLQQRGVSVRVGMEATGYSRWFERLLAELGIEVWIGNAAEIKTRRVRKQKTDRLDAQLLLKLLLENNFPRIWVPSPENRDLRQLLWHRHRLVQMRTRIMNQLQALAMNEGQRRKKKLWNEQGRAQLEKLPLATWASRRRKDLLELLDRMNPTIEELTRAIEQEAKKWPAALRLMTHPGVGPLTALAFVLIIGTWERFPRGKQIGSYIGLVPSEDSSADHQRLGHISKQGNALLRFLLVEAAQAATRCNPDWRRRYIHLAMRRQKNIARVAMGRRMAVRLYWMWRNGCEYSPSLEFGSYAGQLVTGHGAK

SEQ ID NO: 333498 - protein, 410 aa, unidentified
MDVFLERCAGLDVHQASVVCCVLIGAPGRKAQKLLRSFGTTTRELEALRAWLAEHGVTHVGMESTGVYWKPVYAVLEGHVDLTVGNAHHIKNVPGRKTDVKDAEWIAQLVRHGLVAKSFVPPPAIRDLREMVRYRRTLIETRTAMRNRVLKLLEGANIKLSGVASDVFGVSGMAMLEALAAGTNNASEMAGLARGRMRRKHAALEAALEGRMREHQCFLLGMQLRTLGTIDQDLEALDARIGAQLEPFQAQHRLLMQIPGVDWVTAASIIAEIGTDMDVFATARRLAAWAGVAPGNYEGAGKQKGAGTRRGNVFLKSALFAAASAAVRTKGSYYRDKYNRLRARRGPVRAIMAVAHKLLIAAFHMLSTGEVFRDLGESYLDQVARKRSTTKLVQRLSNLGYDVMLVPKAA

SEQ ID NO: 333499 - protein, 407 aa, unidentified
MRLFVGDDWAEDHHDVELMDAAGRVLVRKRLPEGVAGMARLHELTGQHLGEDAEDAEVVIGIETDRGPWVAALVAAGYVVYAVNPKQASRYRERHGVSGAKSDRGDSHMLADMVRTDSHQLRAVAGDSPDAAAVKVVARTHKTLIWERTRQVQRLRYQLREYFPAALAAFEDLDAPDALELLTRAPDPARAQRLTRAQVSAALKRARRRDIPAKATAIMAALRSAQLGQPEAVTAAYAVTARSLIAVITVLNEQVTALQRQVEADFGRHPDAEIYLSQPGLGPVLGARILGEFGDDPHRYASGKARKNYAATSPLTRASGKKKVVTARFIRNDRLTDALMAQAFTALSTSPGARTLYDAERARGADHNPALRKVANRLVGILHGCLKTRTLYDEATAWPHHENRLAA

SEQ ID NO: 333500 - protein, 314 aa, unidentified
MTQATFIGIDVSKAKLDVAILPTGEVLEVPNDPDGHARLTKRLKAEGEIERLVLEATGGYERACAHALFAAGLPVVVVNPRQTRDFARATGQLAKTDRIDARSLAGFAKAVKPELRELGTRAQQELSELVGRRRQLVTLIGSERQRLQQATSDVVKADLQRSLAFLVQSLEELERALLAAVKSDSHWRERLALLASAPGVGLITALTLIAELPELGSLSAKEIAALVGVAPMNRDSGKVRGRRRTIGGRARVRKVLYMAALTATRHNPALKAFYQRLRAAGKLAKVALIAVMRKLLVTLNAMLKNNQTWQPLPS

SEQ ID NO: 333501 - protein, 462 aa, unidentified
MAKKAKRIKIDKRLQLKIVNPDAAGIDVSSTEMQVCVPLDRDADYNRTFGAFTEDLDKIGDWLISCSITTVAMESTGIYWVPLYMNLVERGIEVYLVNAKSVKNFSDEDKTDEIDAESLMLLHSYGLLKASFQVNNFAREIRNLSRHRDNLIRKSAKEIQHIQKSMELMNIKLCNVISDITGKSGQSIINAIISGERDAQNLAALADERCKNSKDIIAKSLVGNWNEDLLFTLKQNYYLYQFIQKQITECEEKIGTLAIKYSIVLPPQSKEIIRCKKKVGKKVKVAFDVEEYGYKVFGVNLMQVPGISEGSLLKLIGELGHDFTEKFETYKKFCRWENLAPNNKISGGKIISSKLPKRKNPVGQIFREIAVSISGSKSPFGDYYRRIRSRKGPMAAIVATANKISKIVYMMVKNKTEYNENLIRADEPALLMRKMRNMQKSMAKLQAQIELYQKKSVLQIAS

SEQ ID NO: 333502 - protein, 276 aa, unidentified
MLALTTIGLDIAKSVFQVHGVDARGSVVVRRQLKRRYVLAFFKNLPSCLVGIEACATSHHWSRELQALGHRVRLIPPAYVKPYVKRQKNDAADAEAICEAVQRPSMRFVPTKTPEQQSCLMLHRTRHLFIRQQTAVINTIRAHLAELGIVAPVGRNGVEDLLYAVADQRDERIPEVARQCLEALGALLGKLRAQILEFDRQINAWHRSNETSRRLDELPGVGPALATALVASVADPKAFRSGRDFSAWIGLVPKQNSSGGKERLGATKAVASAGPT

SEQ ID NO: 333503 - protein, 344 aa, unidentified
MTYYAALDVSLRSVAICIIDEEGTVCLERAVPSEVADIVTCLRGFDHGIDVVGFEAGTLSQVLAHGLGSDGFEVVCLEARQVNAALSAMRNKTDRNDARGIAQILRTGWYSRVHVKSRDSHYTRALLSSRKAVLRKCIDLENEIRGLFKIFGIKLPASLGHGPFDARVRPLIEEDVRLAEALLPLLDARLVLYRTYLVLDRRVKLAARNDAVCRQLMTVPGVGPVTAMTFKAAVDDPYRFRRSRTVGAHFGLTPRRYQSGEHDNPGRISKAGDGDVRTVLYAAANALMSRTQRWSSLKAWGMRLQRTRGRRRALVAVARKLAVIMHRMWIDGSKFQWGKEAAAQ

SEQ ID NO: 333504 - protein, 430 aa, unidentified
MKSNTQNAKIEAITEKTLVLGIDVGSEMHYARAFDHRGIEYSKKPFKFSNTEVGFVTFKEWILDLKDRHEKDKVVPGMEPTGHYWFNLGKFLQDNEMKPVLVNPHHVKKTKELDDNNPTKNDRKDPKVIAGLVREGRYMIPYLPDGVYADLRTASNLRFQLQAELTRIQNRISRWFNIYFPEYKTVYGKPDAKSGMLILKEAPLPEDILTLGIDGVNQIWRDAKMRAVGKARAKTLIEAAGHSVGSKEGAVSARMEIRMLLEDYESRNIRLQEVMTLIEELVNQIPMAEKLLEIKGVGIKTVSGFLAEVGDISRFNTPKELQKLAGLALVEKSSGKHKGKTTISRRGRKRLRYLLFEVAMSLVAKNPEFRELHNYYTTRRLNPLKKMQSLMAVAAKLIRVFYAILTKGVDYDPKKMVSDIKRPAVYLQAA

SEQ ID NO: 333505 - protein, 410 aa, unidentified
MSKLFVGIDVSLKGNSVRCLDANGDTVRKFSVPNTVDGASVLVDNLVELAAQHSMQQVVLGLEATSNYGYHLTAFCQNSEKLAPFSPQIHVLNPRTVNNFKKSYNDLPKNDDIDAWVIADKLRFGRLPEEVFMDERFLALQRLTRTRFHLAQTIAREKTYFLNNLFLKFSSLRQEKIFSDPFGATAMAVVEEFYSPDEIAAMPLEELVSFLQEKSKNRLVDAEGVAKALQKAARSSYRLSKSLADPVNACLATSISVIRALQSELKRLDKLIAQHLEAFPQTLTSIKGVGPVYAAGILAEIGDISRFKNQKALAKYAGLVWNEHQSGQWKAQDTSRVRSGNKYLRYYLVEAANLVRVHDQEYREFYQAKYNEARTHKHKRALVLTARKLVRLVFALLRSNQLYTPRKRGD

SEQ ID NO: 333506 - protein, 356 aa, unidentified
MIYVAIDYHKKYSQVEAMNREGKVLGRARLVNDELSLRKWFSSLGGGCEVVLEACRNWQVMYEILESMEEVERIHLANPFKVRAIAEAKIKTDTIDTHTLAHLLRCGLIAAVHVPSKETRRAKEVLRQRMFLVRVRTQLKNRIHALLDRYRVSLPSFSDLFGRNGLSYLRKLKLPYPGDFLLAQDLSLLEALTLCIREAEGEVRGLLSGDERFEMAQSLPGLGVILAGVSVLEIDRVERFSRPEKLVAYAGLVPSTYASGGKIYNGHLIKQSNKWLRWAMVEASWTAQRSSPYFQAYYRRHLSKGHHTAIVALARRMLEILWHLLTDKRCYEERPIRTFYSPPPSQNVSHLGCCQG

SEQ ID NO: 333507 - protein, 453 aa, unidentified
MARKRKQGNKTNSAALPVMRPDAAGIDIGATEIFVAVPADRAAENVRSFPTFTQDLYALADWLKQCGIKTVAMESTGVYWIPLFQILESRDFEVCLVNARHVKNVPGRRTDVCDCQWLQFLHSVGLLKASYRPDQEVCAVRSLLRHRESLVQMAATHVNHMQKALDQMNLQLHHVISDIVGQTGLAIVDAILAGEHDPQILAKLRGERIKATEEVIAKSLVGDYRAEHLFTLKQSLAAYRSYQKLVEECDQEIRTQLQEFQPPSSPAAPTVAPSAPASKKSSADGILKSELRRVFGIDLTKIPGIRTGIAQILFGEIGPDFTKFRSASAFASWMGLCPDNDISGGKVLWVGTRKVNCRAATALRMAAQSLHHSKSALGDFYRRMRAKLGAPKAITAAAHKLARIIFHLISTRQEFDDSKFAADQLRFQKRQEIKLRAKAKSMGFELIPVQQAG

SEQ ID NO: 333508 - protein, 465 aa, unidentified
MQNSNQRKSRPGSPRPIEGLPIVRHKVAGIDLGSERHWVCAPMIEGSGREVADFGATTPELIRMAQWLKARKVESVAMESTGVYWIAPHEVLEAEGLEVLLVDTRQLARVPGRNKKSDPLDCEWTQRLHSCGLLMGSFRPKEAVCMLRTLVRDKGNLVAEACDWLRRMQKSLDQMNVRVHRAVSDIDGATGMAILRAIVAGERDARKLAKLRDRRCHKSEEEIAEQLSGHWREDHLFSLRQGLKMYDGIQERITDYEKEILRKLGEMEREEYRKQAVPPLNNPQKAKLIRKRGEEPMRQALYRMSGVDLTGIDAIGVETVQLVLSEYGPDLSRFATEKQFVSHVTLAPHKPTSGGKPVKKQKKRGGASSRVAAGPRMAALSLRHSETALGAYYRHIARRKAGDVAVFATARKLATLIYRLLRWGQPYVDEGAAAYEKRHQQARIKSLTAAAKDLGYQLTPTPNLL

SEQ ID NO: 333509 - protein, 412 aa, unidentified
MNSWENGIIKSNPIVRINLLTVPKSVYSFNNDSEGFQSAKEWAVQIAAEHNKSQIVLGLEPTGHYWFCLAAWMISNGISVVQVNPYAVKQTKEVEDNSQMKDDRKDPKLIANLVKDGNFGMPYLPEKLYAELRRLSMFRDQLNEDRIRTINRMHREMKIYFPEYKDALGKVDGAFSLELLRQAPFPDDLISLGEDGIRKIWHDARLRGRGYSRAGEILQYAKVSVGIKDGAIAGKAAVKWFVQKILELDAELAVIENQINQKCQEIPHAGNILEISGIGENILSGILAEMGDISRFDDVKEIQKLSGLGLVACNSGKHKGETRISHRGRKRLRYWLFQAAKSAVAHAEEFKELHIYYTTRADNPLKKMQSLIVIACKLLRIIYTILKKGIVYDPKKMLMDIRRVEKKEAIVA

SEQ ID NO: 333510 - protein, 317 aa, unidentified
MTESVKVNVGIDVSKDFLDVHVGDVALRRVPNRSSGLSVLKRILSRYTISLVLLESTGGYENLAVTYLQSLGYDVCVINPRQARDFARSMGRLAKTDRIDAQILCRLADVIDASPERTRFIRPLTDERRQRLVSMVRRRRQLCDLMISERNRRAKTDSYGSESINTVLDFLTAEVARIDRDISAHVGACFSDISSLLQSFTGIGPVTASTLLGELPELGKLNRRQITALVGVAPFNRDSGYMRGRRRISGGRSGVRNVLFMAVLSAVRFNPVLKAFFVRLVAAGKPKKVALVACMRRMVCILNAMLRDGSRFEVAPG

SEQ ID NO: 333511 - protein, 262 aa, unidentified
MDSYVGLDVSLREVSVCVVDEAGSIQSERTVAADPDDIAALLEAHAPTVRRVGLESGPTSVWLWRELAERGLPVICIDARHAKAALSMQINKSDRNDAAGIARIMQTGWYRQVQIKSPHSHAIRGLLNSRALLVKVQRDLENQVRGLLKSVGLIIGRAKDGVFGTRTRQLLAAHADLAAIALPLLEAREAIHQQLTRLERRVRQLAKEHKQTSAFMTVPGVGPMTALAFLATVDDPTRFRRARAVGAYVGLTPRRYASGEVD

SEQ ID NO: 333512 - protein, 336 aa, unidentified
MNDATWFLGIDVAKRKLDIALLVTDKIKSKVFDNNTSGHAALTRWLIERGAIQSHTHICLEATGPYSEALAIALVDAGWCVSVVNPARIKGFAQGELARNKTDRADASMLARFCAAMRPGFWTPPSSEWRELRGWVDRLQALKDMHQQERNRLEAHLASGQAALVTAVQTHLDWLTKHIEQLERDIDDHIDRHPELKRDAELLHSIPGIGNTTIAKVLAYAGDVRRFASAKALAAFVGVTPRQRLSGTSVKGRSMMSRTGHADLRRALYMPGLVARRHNPLLKVFGDRLSAAGLAPKAVVGAVMRKLAHLIYGVIKSGQPFDPKFSTARLDFQDGI

SEQ ID NO: 333513 - protein, 357 aa, unidentified
MNKTYRLQEYVVRGKEIFVGLEDSKRTWKLAVRSEKMTIHQVSMEAKYAVLIGYLRNKFPECMIHLIYEAGFKGFNLYDQLTEDGIDCVVIPPHVVTEPKVSRIKTDKRDARRLAKVLEDHDFQDSCYVPDKERREDRQVSRTLIALQKDIVRTRNRIRKLLQFHGIEVGFPDRWGRDEFRALKKLEVSEPLRISLDIFLAQLEELWTHQLSLRAALRKLCHKERYRKAFTIARSLPGIGWFTAIRFVLELGEDLSRFTSGKKIASFVGLTCSEDSTGETEHKGRITGMGSGFIRSTLVENSWMSIAKDPVLLAKFTRVWHASGSRKKAIVAVARMLIVRYRACLMSGTPYVIGVAA

SEQ ID NO: 333514 - protein, 347 aa, unidentified
MDQQCHYVGLDVSLETTSICVIDDAGAIIWRGKCSSDPDTITAIVRQHAPGAARVGLETGQLSNWLTLSLRRRGVPVVCMDARHAKAALSLQINKTDANDAFGLAQVVRTGWYREVAVKSMDAHTLRMLLVARSRLVSQRQATANTIRGLLKTFGLVVAKGSKGLFPVRVREQIVGNPALIAIIEPLLAVWYAIRDQVVMLDRQMLARARNDQVARRLMTIPAVGVVIALAYTAVIDDPARFRRSVSVGAYLGLTPRRYQSGEVDTTGHISKCGDSLLRGYLYEAAAVLLYRDGRASVLKSWGLGLAKRIGMRRAKVAVARKLAVIMHRIWSDQSEYRWMAIPSTTA

SEQ ID NO: 333515 - protein, 374 aa, unidentified
MKHYSTLYVGMDVHRDSFTLAHYALDMKQPTGIVKTDNDYRRIVAYVHRLREKYGQETRIVCGYEAGCLGYTLYHQLTKMNLECVILAPTTLPSPRGGKRVKTDGRDAANIAQCLAYGTYSPVHVPSAEDEQVKEFIRMRNDHCQMLKKLKQQILSFCLRHGYQYSGTRSNWTQAHMKWLDALQPEGLLGDTLEEYLTSFRYHQNKLERLDRRIEEISREETYREPVGKLCCLIGVKSLTALSVISEVGDMHRFATAEKFAAYLGLVPGEHSSGNSVRRGGITKAGNVHVRTLLTEAAQSYTRGKVGYKSSALKKRQSGQSETVIAYADRANERLRRRYYQMTLQNGKRHNVAKTAIARELACFMWGLLTEHVA

SEQ ID NO: 333516 - protein, 315 aa, unidentified
MSYNAYKFHIGIDVSKSFLDVAISNNESLMKFSNNDNGLKDLANILPPRKNSLIVLEATGGYEKFAANYLRRKKFNVAVVNAKRVRDFARASGKLAKTDGIDARIIMLFGKAFNPIAQPLISETEDHLQQNISRRNQLVRMITMEKQYSEHSSAAMKKLADKHIHFLEKQLTLVENSLKELFNQDCILKDKLDRLDEIKGVGEITAMNVLIHLPELGKLSHKEVSALAGVAPFNKDSGQNTGKREIWGGRAPVRAALYMAILTARKFNPALKRFYDRLIAKGKPKKVAMVACMRKLIIIMNAMLRDGTQWEAMYA

SEQ ID NO: 333517 - protein, 347 aa, unidentified
MIIIGCDFHSRFQQIALLDTETGKVEERRLAHENGEARDFYAGLREPALVGIESMGYTQWFEELLAELGHELVVGDAAKIRKMEVRKQKHDRRDAEHLLNLLVKGDFPRLWLPSAAERDARVWLEHRHQLVQMRTRTLNGLQAVALNHGLCLRQKLWTKHGQAELKKLPLREGRARRRADLLALRAQLDRWIAELDERLAQEVAQRPDAQRLLTHPGVGPLTALGTVLILGPVERFPDAKHVTSYVGLIPQEESSGGRQHFGRLTKQGNGLLRFLLVEAAQTASRLDPGLRRAYRRLTFRRGRASAKVAVARKLAIRLYIMLRDQIDYEEFCRRGSHAGMLGEVALA

SEQ ID NO: 333518 - protein, 371 aa, unidentified
MAESSRTIYVGLDVHKDSIAVAYAPEDRGAEVVSLGPIGTRQCDIDKLIRKLQSKGATLVFVYEAGPCGYWLYRYLTRQGLSCHVVAPSLIPRKPGDRVKTDRRDAITLARLMRSGDLSAIYVPQVEDEAIRDLSRGREDAMRDLKATKYRLKAFLLRQDIRYEGRANWNAAHLRWLSEVVCPTRAQQIVFQEYVRAVTEQHERLQRLERELHEEVKGWRLYPVVEAIQALRGVELTGAVILIAELGDLTRFDSPRQLMSYLGLTPSEYSSGERRRQGGITKAGNTHARRALVEGAWAYRYPAKVSRHLQLRLEKLPAEVQAIAWKAQVRLCKRYRQLSARGKHANQVVVAIAREMAAFAWAIARTVPLVP

SEQ ID NO: 333519 - protein, 341 aa, unidentified
MEQATTIGLDIAKHVFQVHGADAAGHVLFRKRITRVKLLSFLAAQTRCVVAMEACAGAHYWAREIAKLGHQVRLIAPAYVKPFIKRQKNDAADAEAICEAAQRPSMRFVPVKTEEQQANGIVFRARDLLVRQRTQCVNALRGHLMEYGYVFPKGITHVEALVALVEDLQSSLPDSVRVILKLLVDTFTALEAQISALDAEINQRSKSDPTARRLMTIPGVGPITSTAITALVPAAEGFPAGRDFAAWLGLTPLQKSTGGKQKLGAVSKRGERTIRRLLIIGASAVVQQASRRGAPKGSWLAQMLARKPKMLVTVALANKMARIIWALLVKGGTYRTPTAAA

SEQ ID NO: 333520 - protein, 353 aa, unidentified
MMIIGCDFHPSFQQIAYVEQETGEYEERRLSHRGEAEAFYRSLAGRSVRIGMEATGNDRWFHKLMSELGHELLVGDASAIHASAPREQRTDKRDARHILRLLIENRFPAIWQPSVGNEEQRQLLLHRCRLVRMRTRIKNQLDSIAKSEGLTGSRVWKAKRRQQIEALPLTGWYAERRKDLLGLLDEMDKLIEPLDKAVQAAAEQNSEAQLLMTHPGVGPVVSLAYVLVLGDWRRFPRGKHVGSYLGLIPSEASSGKHQQRMGHITKQGNTLLRWLLVEAATKAQSKDPSWHRQYVRLSMNKHHGVAKVAIAHKLAVRLYWMLRSGQNYTKIVERGSHAGQSELAGGCGLRPIN

SEQ ID NO: 333521 - protein, 428 aa, unidentified
MNFEVKHLICAGLDVHKKTVVAAVCITDPVTLEAAYKVKSFSTSNSQIAAMRDWLLSYNYQDVCMESTGKYWIPVFNILEPHMHVILTHPKYAKAIKGKKTDKRDAKWIANLFRFDIVKASFIPPADIRALRELSRYRLKLSYMRSAEKNRYQNRMTISRIRIDCVLTDPFGKTASSIMNYLLSDVPFDEKECAKLIHGGVKVSNEEIFDSIRGFEILSEQHFKMSHAKQHIELLSSYIDEIETELFRLSRPYDEVIKRISRIGGFTERSALFVISEIGADMSVFESDKHLCSWAGLTPANNESANKKKSTRCSKAGQYLKPLLIQCTLAAVKSKKNPYYAIKYHRLAKRRGRKKAIIAIARMMLTSIYHMILNNEKWKPDDYEAIIHPSKPVKVALTLNNVIQFLGEQGADPETLKLLQQQCAASSG

SEQ ID NO: 333522 - protein, 317 aa, unidentified
MEQEKPSTKISGIDVAKSKLDVALHGSDATIQVTNDQAGFDRLGSWLEAHGVERVGLEATGGYERSVVAWLRAQGLGVVIHQPLEVRLFARLKRRRAKNDRIDAALIAAATAQVDQIRAAADPRLAELAERLTAYEQASDELAAARTCLEQVTLPDLKAWRLAQIRQLQTWKLERLRDVISHIKAEPDLKARYALLMSLPGVSVVVAAVLVIRMPELGALGRGQAASLIGVAPFDWDTGQLRGQRHIAGGRSRPRRFLYLAALAASRHDPALRAFAQRLKALGKKPKVAIVAVMRKLIEAANLVLARGTPWTPSPAA

SEQ ID NO: 333523 - protein, 332 aa, unidentified
MDNFYFIGVDVSKKKLDFCVLFEGKVLREEQVSNHQQAVARLIGELKNDLEMDNEQFLICTEHTGQYTFPLVCACKSVECKLWLENPSQIKYSSGMQRGKNDKVDAKRIAIYASRFGDKVKYYDRPTEEIERLKQLERERALYVTDLAKYKGQMYDQKDFMPAALYRKKTKRMKGLIQELQAAIDAITAEMEKIIGSTEVLARQMELLMSIDGVGKVVALNVIIETEAFSRFDNPRKFCCHAGVAPFSYTSGSSQHSKNKVSHRANKNIKKLLHMAAVSVTHRKEGELKAYYMRKVEEGKNKMSVINALRAKIVARMFAVIKRNEVYTPIYS

SEQ ID NO: 333524 - protein, 408 aa, unidentified
MQVLYPRCAGLDVHKDTVVACVRCVSEPEHHETRSFATTTRELLALGEWIASHGCSHVALEATGVYWRPVWHVLEGQVELVLANAHHIKNVPGRKTDVNDAMWIADLLAHGLIRSSFVPPQPIQELRDLTRTRKQVVREISQHSLRIQKVLEDANIKLGSVLSEVLGVSGRAMLGAIIEGERDPHKLADLAHGTARRKHDALVEALHGHIRPHHCTLLKLHLNLIIALEHTVAEVDAAVGKCLDPIHQRARLLTTMPGVRDTVAEVIVAEIGIDMTRFPTPGHLLSWATMCPRNDESAGKRRSTRLLKGNNWLKTALVTAAWAAVRTKTSYLRAQFLRLKARRGAKKAIIAVAASMLTAAYFILRDGVPYRDLGPNHFDRQRRGKTVRRLLRRLHDLGYNLPPQHQPV

SEQ ID NO: 333525 - protein, 346 aa, unidentified
MRYYTGRHKFSCGVDLHARTMFLCVLDERGYPLLEKNIKTDPELFLKAIGPYREDLVVAVECMFTWYWLADLCSRENIPFVLGHALYMKAIHGGKAKNDRIDANKIAALLRGGLFPVAYVYPPKMRSTRDLLRRRMFLSRKRAALITHVKCTFAQYNLPEPEQKISRVANRHGIAELIPDPGASRNVQLDLDVLDFYDQTLTKLEQELTVIAKDHDPDAYFRIRTVPGIGKILSLVILYEIHDISRFPSVQDFASYCRLVKPAKESGGKRIGFGGAKIGNVHLKWAFSEAAVLFLRKNEAAKLYRARLAKRHGKAKSLTILAHKIARAVYYILKRRTVFQPETFFV

SEQ ID NO: 333526 - protein, 370 aa, unidentified
MSVRRILAKTIDTDLEYEAIGIDLAKNCVSTALLTTDGEVVCIDRLDYSELEKSAQALSPTTFAMEPCTEMNYLVQKLEAWGHRCLVIGGKNVQNYVENHYSGQKTDLNDAQALAFLAQDKQLRTIKAKDIEQQKYASLTTLREQYIKQYRQTIVSLKGICQAWGLNISKGISGKAQLKDLIENHAAFPEELRESLVDMVTHAQTTQKVLNKITKTLEVLAKNDKVCQLIQTIPGLGTICSCRLRAMIGDIKRFKNPKDFPAYYGLVPRSIVTGHNEKKGKITHRGDKTMRSLMVQGAGCVIRLATCGKLKSKQLTKWILKKQKEKMPWGKLVCAVAAKLLRIVRAILISSKPYNPKIAGVAKCSLSKGS

SEQ ID NO: 333527 - protein, 381 aa, unidentified
MNATSLAVPVQPVAGVIVGVDLAKNVFQLCVADAAWHPHESQRLSRAQFERWFANRAVSRVVMEACGSAHHWARWLAGLGIEVTLLPARYVRAYVKRNKTDAADAAALLEAARCADLHPVRIKSVEQQALQALHRTRSLWQADRTRRINTLRGYCREFGIAIALGSRLGLEQIARVLAEPRSGIPELLRPTMVLLIEEVRLLEARIGALERELAALVRHSPACNTLLSVPGIGLLTSTAMVAATSGDVTHFQDARHFASWFGLTPKEHSSGQRRQLGRISKQGDRYLRMLLTHGARSVLRAAAAARNAGKPVSGLRAWALAVQDRSNHNKACCALANKLARIAYACLRDHAAYDEETPNSRLTRKKTERMSFELPAGALAA

SEQ ID NO: 333528 - protein, 324 aa, unidentified
MIDGILGIDVCKNTLDVSISSCTKVRTKSFTNSPDGWRHLLDWLIAQKIQRVHACLESTGRYSLGIACALYEADHVVSIINPAQIRDFVRTKLGRNKTDGVDASHIREYCELFKPSPWAPPSEAHRRLGELQTIRSGIIAGLTEWKNRKNSGIVDAEAQALADATISHFTSQLGAVDKAIALTIDNDCDLQSKRDLLLSISGVGETLAGVVLAELPGPDVLRSSAEVVAYAGLNPRQHQSGTSIDRATRISKIGNAVLRAALYMPALSAMRYNSAIVALVSRLKSRGRLKPKQIVVAAMRKLLVLCFGVLKTGRPFDAAIAMGG

SEQ ID NO: 333529 - protein, 366 aa, unidentified
MTETVYCGVDFHARMQTIAYCDSANGEIQLAQLDHRKDDVRGFYSQFTGQVIVGLESGGGYSSWFETMLEELGHTVWIGHATEIRRRANWRQKNDRRDAELVLEIMLRGDFPRIHCHSRESVEVLRMLRYRSRLIKMRTMICNNLQAIAMSCGLSERSRMLSRAGQERLKSARMTPVIKQQSEDLLTLLVPINERIGRVDRWLKQQASTDDRVKLLVTHPGVGVLTALGVVHTLEPFNRFSKQRSVVAYVGLEPMERSSAERKRYIGISKAGSRLLRFLLGEAAHVAVRFDPELKQFHERIGKRRGRAKATVAVARKLLIRCWIMLRENIDYAEFRRRGVEARLARLGHRPSMPEVVIERPASSDR

SEQ ID NO: 333530 - protein, 322 aa, unidentified
MELFHLGIDVAKTKLDCALRSPEGKIRHKVITNDAAGFAQLQAFLSRQHALTLHVCMEATGVYWEPVAEFLAALPQVTVSVINPAQIKAFAASRMVRTKTDKVDAALIALFCHERSPEPWQPPSEAERTLRALVLRLDSVQSMRTQESNRLLVAQSAVQQGITQHIEWLDAEIERLARAIRDLLDQDDDLNDKRRLLDSIPGLGERTIAILLAFYARVSRFDNARQATAFAGLDPRQHQSGSSVCAKPRMSKVGHSFLRKSLYMPAMVALYRTDWGKLFRQRLSAAGKPPKLIIGAMMRKLIHVAFGVLRSGKPFDPAAHGV

SEQ ID NO: 333531 - protein, 339 aa, unidentified
MNNLPVFVGLDYHQDSIQVCVLSQKGDVLLNRSARNDCQELARLVEPLGRVERVGIEACCGAADLGEELVERLGWNVSLGHPLYIARLKSSPDKSDYSDGRLLADLTRVGYLPQVWLAPEKIRELRQLVNHRQRLVSHATSLKLQVGAVLREQRVKIDKDRGGRWSGAWIASVRDNDRLSEQGRWIVNDLLEEITHCRKKIAATEQRLREVTAGDRVIARLMQQEGIGEVTAWMLRAYIGRFDRFKTAKQLARYCGLSPCNASSGRKTADAGLIDGCNKMLRATILQAAHRLIRTSDRWSSLASSMKKRGKPPCVVAAAVGNRWLRCLHHVMKGTSAMQ

SEQ ID NO: 333532 - protein, 318 aa, unidentified
MNTNTLQNINVGVDTGKSQLDIYVRPLDIYFTVPNTDKGISDAIKIIKKHKPQRVVIEATGRLEMPFILACDKAKLPYVVANPLRIKRFAEAIGQRAKNDRLDAALIAHYAERVQPELTKLKSENIRLMSDLVTRRNQLLTMQTMERNRLQILPKNIASTISPILTALKNQIEKVEAKITKLIDSCPEYQSKNTILQSMPGVGKVLAASLISNVPELGLITNKQASSLIGVAPITRESGRFKGKRMIQGGRAQVRTVMYMAMMSAIQCNPVFKATYERLLAAGKPEKVAIVACMRKMVVTLNSMLRDGAIWDKDSVKN

SEQ ID NO: 333533 - protein, 458 aa, unidentified
MESYLGIDASKGYSDFVLLDKNKQPLEEAFQLDDTRSGHNRLKGLLEQFIAVHGISLLYCGIESTGGFENNWYAAFIEMSKSMPVKIARLNPAGVKKNIEAGLNRNITDALSARYIAEYLISHPGKATYQGQDTRYASFRDVQTCLSLQKKQSTQLINELKMLLYSSFPEMVRFCKDSVPTWILEMLILYPVPACFVKLKPERLARIRHVTLKRAENIIEKAKTSIASRPDTTRGFIIKSLASQILQKQEAIKEFKEFLAANCSGPEVDLLQTIKGVGAYSAASIMVEIEDIKRFPSAKHLAAYFGLHPELKQSGDKKVSRLSKKGRPAIRATLYMCAQTAVVHDSHLKKIYHNHRSKGKTHRAAIGVIMHKLLRIVWGMLSSNKPYDAEVDQKNQTKNIKGQINTYTEEVDKKRRFQEHDKAAPISSRQNKKRKAHLESQVGNAEQMRDHLNAPEQN

SEQ ID NO: 333534 - protein, 357 aa, unidentified
MPAQSKAAKPSTQIAVIGIDIGKNVFHLIGLDKCGAIVLKAKCSRGQLENRLANLPPCLIGMEACVGSHHLSRRLIALGHDARLMPAQYVKPFLKGHKNDYRDAEASAEAVQRPTMRFVAAKTEEQLDLQALHRVRARLVAERTATINQIRAFLLERGIAMAQGIHRLRKALPDILAKATDALSPRMTRIIEALAADWRRLDERVDEVSTEIEMLARKEAPCQRLMTVPGIGPLISSATVATIGVGDLFSKGRDFSAWLGIVPKQLSTGGRTILGKISKRGNKYLRMLFVQAARVVLLKRVSWERYGLKSWIEAAAKRLHHNKLAIALANKLARIAWAVLHHGRNFEVSREHTPQPV

SEQ ID NO: 333535 - protein, 391 aa, unidentified
MSMYFIGIDISKYKHDCCIISAADQKVVSKVTIKNNKAGFDELLTIINSLSNPEDIRIGFESTAHYALNLELFLENSLLTFMEVNPVLISEYKKSKTLRRTKTDSVDCESIARWLMTVEYKPHSKGFYHAYSLKSLTRLRDKLIRQRSFYLIKITNVLDHTFPEFKPFFNERLSKTALYLLENYGSAEKMARMNSASYEKLRSLSRGKFSPQQFLRLKELAANTVGVNNSIFDVELNSLLSLYKSLVKEINTIEKEINKLIEEVHPHYMSVPGIGPLSAAVIYSEYGDISNFTNPGQMLAFAGIEPGINESGTESHGGKMVKRGSSQLRYTLINCCLPLIRFDMTFATYYAKKRGEGKPHRVAITHVAKKLIRVIYALERQDIDFNAQKLR

SEQ ID NO: 333536 - protein, 366 aa, unidentified
MWMEAPVIGHRTSVGLDVHARSVVGCALDGDTGEVVERRLTPDYQDVLEWLRSLPGRVAVTYEAGPTGFGLARFLIAAGIVCLVAAPSKLQRPSGDRVKTDARDAAHLARLLHLGQIVDVTVPSAEQEAARDLVRAREDCRGDLMSSRHRVSKLLLRQGIIYSGGRTWTGKHETWLRGQRFDAAPLQLAYDTAVDTMLATVDRRNRLDDAIAELAADSAYTPVVTRLGCLRGVSTLTAFGLAAEIGDWERLTGRSIGAYLGLVPTEYSSGTSRSQGPITKTGNGHARRLLIEAAWHHRQPYRPGVDLRRRWDAASPAARARGQQANRRLHTRWCRFDARKKRPVVANTAIARELAGWCWSLAVLDT

SEQ ID NO: 333537 - protein, 350 aa, unidentified
MIIIGVDFHPGFQQIALVDSESGEFQEKRLAHREEAESFYRGLSSAGQKVRVGMEASGYARWFERLLSELQIELWIGDATEIGRKRARKQKTDREDAEHILQLMLKDDFPKIWVASWENRDLRQLLWHRHRLVQMRTRIMNQLQAVALNEGLSCKKRLWRGSGREQLEGFQLGPWASRRRHDLLELLDRLNPTIAELSQAIEQEAEKCPEAQRLMSHPGVGALTALAFVLILGQADRFECGKQVASYLGLVPLEKSSGKRRRLGHITKQGNSVLRFLLVEAAQATTRKNAEWRSKYFHLALRRGRNIAKVAMARRLAIRLYWMWREGRSYQQTKSFGSHAGQPGNPYGVQ

SEQ ID NO: 333538 - protein, 371 aa, unidentified
MGELITFVGLDVHKDTIAVALADRGGREEEREYGKIANTPAALRTLALKLGSKGRVLRFCYEAGPCGYGIHRLLSSASHDCVVVAPSLIPRKPGERIKTDRRDAIKLAKLHRAGELSSVWVPDPAHESIRDLVRARQAAMRALRQARQQLSGFLLRQGHHYNRPAWTLMHRRWLAGLRFEQAIHYIVLEDSIAAIEAATARRDRLDAQIEAALADWSLAPVVRALQALRGLALVAAATLVAELGDITRFDNPRPLMAYLGLVPSEHSSGGRRRQGGITKAGNGAARRMLIEAAWSYRFPARISREQLLRQETLAKPIRDIAWKAQERLCRRYRKLTRAGKLPTVVTAAIARELVGFVWAIAKQVSVTTATR

SEQ ID NO: 333539 - protein, 323 aa, unidentified
MKHILGIDVSKDKLDLALRLPDGKARHKVVTNDPEGFAALRAFLTKQGTAELHACMEATGIYWEASAEYLADAGFTVSVVNPAQIKAFGHSRLQRTKTDKVDAGLIADFCAAQAPSPWQPPGPALRELRSLVARRQALDTMRTQEKNRLGVAREAVRTGIAEHLDYLDQAIAEIDRMIREKIDNDPDLKQQRELLDSIPGLGDKTIPVLLAYYGGELRFTTAREAAAFAGLDPRQHESGSSVRGKTRLSKVGHSALRKALYMPAMVTITKTLWGRVFRDRLKAAGKSPMVIIGAMMRKLVHVAFGVLKSKKPFDPALHGVLGA

SEQ ID NO: 333540 - protein, 359 aa, unidentified
MPILAELVDAVVGVDTHRDTHEVEIAHPNGAVIATCQISNATSGYAEVLAWILDHAPGPRLVVSIEGTRSYGIGLARAVSAAGVAVIECEQPTRNTRRGRGKSDPIDAHLAVLSALRLDADRLPTPRADGDREALRILLGARHELTTTNTAQTNRLRALLLTGDDHDRDRARGKLSDTALTTLARRRLPRDADRAQAIRHAEIRRLALALREATHALAANRAQLQAIIDELAPGLTDRRGIGPVSAAQAVVSFSHPGRCRNEAAFAALAGTSPLPASSGNTVRHRLNRGGDRALNRAIHTIAMTRARCCPTTRAYITRRRAEGKTDREIRRCLKRYIARELYRTLTAATKINNPEAVAA

SEQ ID NO: 333541 - protein, 343 aa, unidentified
MEHFAGLDVSVKETSLCILDDAGRIVREARIASEPEALLAVLRNPAYCFKRIGLEAGPLSQWLFSALAEAGLPVICVETRHMRAVLKAQINKTDRNDARGIAQMMRAGLYRPVHVKTLRSQKLRMLLTHRKLLQSKAIAIENDLRATLRNFGLKVGVVGTVKFEARIKELVEGAPDLAVLVEPLLIVRQVLREQLSILHRRLLAIVRDDDVCRRLMTVPGVGPVVALTYRATVDVPARFRNSKAVGAVFGLTPSKYQSGENDRTGGISRCGDEMMRAMLYEAAQILLVRSTKWSWLKAWAMKIARHRGLKKAIVALARRLAVIMHRIWVDGTEFRWTREAAAA

SEQ ID NO: 333542 - protein, 334 aa, unidentified
MELFVGLDVSKSTHDARILSAGKEAHQKISNTKDGFEELWNTLQKRDFSTLYVCLEATGLYWEALAEFLHEKGAIVFVVNARRIKGFAMSEDKRTKTDKVDAGVIARFCRSQFAGLNPWTPPPAEVRKLQALSRQLESLKEDRARQQVRLKSAILCPEVVDSIKHHIDLLDAEIASIERAIKKLVKANQRMQEQHRLATSITGVGFVTAAVVLSECRGFTDFVDRRQVAAFAGLDVSEFVSGSSINRKARLSKRGNSRLRKALYMAALSAIRFNPVIQQLYDRLVLNGKAKMQAIGACMRKLLELMFVVVTSGCPFDPDFAGKQSQRKEAPAAA

SEQ ID NO: 333543 - protein, 434 aa, unidentified
MGRLVGRAIGLDVHRDFCEVAICEAGRVRSAGRIETSPDMLERFAHSLGSEDRVALEVTGGAWEIARILEPHVRRVVVVSPDDTGIRQARAKTDRLDARTLARLLGAGELDAVWMPDERCRVLRRRLARREQLVRSRSRAKNEIHAVLMRRLRGKPPVSDLFGVKGRRWLSELELPVEEAETVQSALRHVEFLDAEIAAVERLIAREALRSADARRLMTVPGVNVICAQTFLAAIGDVRRFRTAAALVGYLGLDPRVRQSGSEPARGGRISKRGSASARWVLVEAAWSVVQQPGPLHAFYERLRARRGHGKAIVAVARKLATLFWYLLSRGEDYAHQQPSLTAKKLRLVEITAGAPTLKGKQTGVWATRERMRQAERALAQQAEASYTRMVSDWQAARPQKTKPAGPRQVGASVTPGRAPRPSKGNVARQTTSP

SEQ ID NO: 333544 - protein, 383 aa, unidentified
MKKTKGTPEKNDATKGAVLHMALELSQNKWKLGFSDGKKMRFISIAARVLERLHEEIEKAKLKFNLQGDIRIISCYEAGRDGFWLHRHLLICGIGNVVVDSSSIEVNRRKRRTKTDRIDARKLLQMLMRYHGGERKLWSVVNVPSVEAEDGRQLNRDLEALNKERTMHRSRIRGLLIQQGLEVRNPSGKRFLEELASLCTWDGKALSEDLRKRVVREYERLKIVEEQMKILRKERERKVQSEATPSLKKVAQLRTLYGIGNTSSWDFVMEMFGWREFRNRKEVGAFPGLTPTPYDSGGSRREQGISKTGRGRIRALSIQISWGWLRFQPQSKLTKWFWDRFGHGGKRMRKIGIVAVARKLLIDLWRYLEYGVIPEGAKLRPAA

SEQ ID NO: 333545 - protein, 343 aa, unidentified
MDHFGGLDVSVKETSVCIVDDAGRIVREVKVASEPDALLAVVTNPSYRLKRLGLEAGPLSQWLFSVLAEAGLPVICVETRHMRAVLKAQINKTDRNDARGIAQMMRAGLYRPVHVKTLRSQKLRMLLTHRKLLQSKAIAIENDLRATLRNFGLKVGVVGTVKFEARIKELVENLPDLAALVEPLLIVRRVLREQIAILHRRLLAIVRDDEVCRRLMTIPGVGPVVALTYRVTVDVPARFRNSKAVGAVFGLTPSRYQSGESDRVGGISRCGDEMMRAMLYEAAQIVLVRSVKWSWLKAWAMKIARHRGLKKAIVALARRLAVIMHRIWVDGSEFRWTRTAAAA

SEQ ID NO: 333546 - protein, 345 aa, unidentified
MIIGCDFHPSWQQIAWLDSETGETGERKLVHAAGDAKAFYQQLAAPALIGVEATGNSQWFIELVQDLGYEIWIGDAAQIRASYVRKQKTDKRDAAHILKLVVEGRFPRLWTPDGEQRDLRQLVLHRHKLVEIRSRVKNELQHLALNKGMQRKAKLWSQAGQKLLRELPLKPWAACRREDLLGLLTMLNQQIGTLDQAVQQAADQHPQAKLLMTQPGVGPNTALAYVLTMGDVSRFPRGKQVASYLGLIPREESSGGRQKLGAISKQGNRLLRSLLVEAAQIAVRYDPGLRKQYLHRCHQKPKGVAKVAAARKLAVRLYWMLRTGKPYPEIVRIESSSRVPLVGAS

SEQ ID NO: 333547 - protein, 526 aa, unidentified
MPYHVRTSRRAHRKSNSPKRQTLQKPNGLISPRVKQVGGERFAIVCVDPAKHRSEWMMADYFGNLLIEPQTLSHQGSCFKVAVELIHQAQQQHNIQDTIVVVERTGNYHLPPKRAFASAGFETRVVHPFATKQFRMPADPGNKTDETDLYAQHRAAVAGFGLCEYELESPYRELQLRARHRRNLVERAAAIACQIREHLHLAMPGFATLFDHLFLHKTAMAIARRCESPAKVIELGRAGLSQHLRNNNIRHQVRTIDKVLAWAAQTAGDNIQDGPMHHAIWTDLHELYQHFQRKISILEQELPGDLAQTPYVRLLAIPGINVVSAADLAAEMGPITRYVNANAITGRAGLYPSRHQSDQTDHDSGPIIRQANRRLRCVLMRIADNLACHCAYYRGQADVDHSRGVDKRASRVKIAKKFSRLALACVAGDEPMRHPCFRTPDSILEKLRLFHYVHQTPMDRLLADLKATVEQLPYNTCGHEAEVVAKVLREHTSRRRGGVAIGELLPAILARLNIKTTKENEIRDRS

SEQ ID NO: 333548 - protein, 333 aa, unidentified
MLPPNCGTATPYILRNTVGLDISKLTFDATAIVGNAEYSAKFDNDSKGLNQFSDRLKSLGCQNLHICMEATGNYYEEVADYFAQYYSVYVVNPLKISKYAESRFKRTKTGKQDAKLIAQYCRSAQESELVKRQKPTDEQYRLLRMTAAYAQIKSECAAMKNRHYAAKDEEAAKAYAEIIKAMNEQLEVLKEKIKEQTEKPNCKEGVKRLETIPAIGRMTAAVLFHHLTSSKFETSNKFAAFAGLSPQQKESGTSVRGKGKLTKFGNRKLRAVLFMPAMVAYRIRAFPDFIKRLEEKKKPKKVIIAALMRKLAVIAYHVHKKGGDYDPSRYKSA

SEQ ID NO: 333549 - protein, 411 aa, unidentified
MDALIERVAGLDVHQGSVVACVILSAAGRRPIKEVRSFGTMRQDLAALREWLLEKGVTHVGMEGTGVYWQPVHAALEGDFTVIVGNASHMRNVPGRKTDVKDAEWIADLVRHGLVRASFVPPPAIRVLRELVRHRKALVGTLAAERNRTLKLLESAGIKLAGVMSSVFGVSGMLMLRALAEGSAAPAAMADLAKRRLRSKIDRLALALDGSLAEHQRLLLRMHIRRLEEIGRDLAEVEAAIGAAMRPFAAQQALLVTIPGVDALTAAAIVAEIGVDMTVFGTAQRLAAWAGLCPANHESAGKQKRRGTRKGNPYLKATLVTAAVCGARTKGTYLRDKFHRLRARMGTKKAAVAIAHKILVAAFHMLQRAVAFADLGADYLDRADKHRTVKRLVRRLDALGYNVMLRPKPAN

SEQ ID NO: 333550 - protein, 356 aa, unidentified
MPVAPTYPNGSYGVVIAIDRHKASWTAVVVGSGLTPVAALRVEVNRAGYRQLLRFAAKWPQARWAIEGAAGLGAPLTERLRAEGIAVIDVPAKLARRVRLLSTGHGRKNDQADALSVGIAAWSAPALRTVEVDEAIAALRALTEHRDDLVRTRTQLVNRLHAMLVKLVPSGLPRGLTAESAAETLRRIRPRDPLGRTLRRLAVELVGELRRIDRRIAEATQALSDAVAASGTTLTRLLGVGDVVAAKLLARTGPISRFPSAAAFASFCGVAPIEVSSGEVVRHRLSRAGDRQLNYALQVMAMTQIRHDSPGRAYYQRKRAAGKSHKEALRCLKRCLADVVYRAMIKAAIPSLPPAA

SEQ ID NO: 333551 - protein, 415 aa, unidentified
MEAIIECAAGLDVHQATVVACVVATGVGRKLRKEIRTFGTMTRDLDCLRAWLSEHAVTHVGMESTGVYWMPVYAALEGSFTLIVGNAHHIRNVPGRKTDAKDAEWLAELVRHGLIRPSFVPSPELRELRDLLRHRRSLAGAIAAGRNRTLKLLESAGIKLSTVATDAFGVSGMAMLHALADGVDTPEAMAALAKGRLRRKLEALARALEGRMTDHHRFMLRLHLVHLQHLESTVAELDARITEKINPYHAQVRLLAGIPGVDQLIAAHIIAEIGVDMSVFGTAGRLSAWAGVCPGNYESAGKRQGGATRKGNVSLKTALITAAIGASRTRGTYLKDKFYRLRARCGAMKAAMAIAHKILVAVFHILAARVPFRELGDGYLDSRSKHRVTKALVRRLDVLGYRVTLKQKSIVVAAS

SEQ ID NO: 333552 - protein, 337 aa, unidentified
MSEISILAIDLAKNSFQVCAVRGDGTIVSNRAVSRPRLYELLAKQEGCIVAMEACATSHHWGRVAVSCGHNVRLIPAQYVKPFVKRQKNDHADAAAIAEAASRPTMSFVAVKSAEKQGRAVAFRTHQCFVRQRTQLINSLRGHLAEFGLVAAKGPASLKVLENALADPITDIPEQVRQMGAIYIEQIAQLTEIIERLAKELETASKADEELRRLCTVLGVGPVTAGAVAAFAPDMSTFESGRNFASWLGLVPRQRSTGGKARLGAVSKMGQCDIRKLLIVGAMSVIRWVVRRGGSKNKWLASLVARKPRMVAAVALANKMARQIWAMATKGEDYRMA

SEQ ID NO: 333553 - protein, 346 aa, unidentified
MMIIGCDFHPSWQQVSWLDPETGDTGERKLVQAAGDAERFYRQLPVPSLIGMEATGNCHWLVDLLAEIGHELWVGDAAQIRASCVRQQKTDQRDAEHILKLLVEGRFPRIWMPSSEVRDLRQLLLHRHKLVTIRTRVKNELQHLCLNQGVQRKHKLWSKAGQQVLRELPLKPWAARRREDLLGLLAMLDQQMEPLDRAVKEEAQRDKMALLLQTQPGVGAATALAYVLTMGDVSRFARGKRVASYLGLIPREHSSGGRQKLGAITKQGNRMLRTLLVEAAQMAVRCDPGLRKEYLHRCHQKPKAVAKVAAARKLAVRLHWMLRTQKPYPEVVRIESSPTEALVSEN

SEQ ID NO: 333554 - protein, 401 aa, unidentified
MKEFTPERHPIETASALEIVRAAENVNVHMAYVGLDVHKETIAVAVAEPGRGEPLYRGEIANKPKSVGKLLAKLSADYDGGLLLFCYEAGPCGYVLYRQILASGHDCQVVAPSRIPKAPGERIKNDRRDALKLARLLRGGDLTAVWVPDQEQERMRDLSRARADMKGQERKARQQLNAFLLRHGYHWPRGKSRWTPAHENWLAGLKMEHPWQQVVLEEYIGAERAAGERVAQLNDHLMRALPEWSLAPVVDSLIALRGIDKLAAIVLLAELGDISRFDSPRQLMAFLGLVPSEHSTGTRRRQGGITLTGNAHARRMLVESAWSYRFPARQTKHLKGKARNASPVAKQIAWKAQTRLCGRYRTLTRAGKNTKLVCVAIARELAGFIWDIVRQEMPRLGPQQG

SEQ ID NO: 333555 - protein, 341 aa, unidentified
MILGVDLGKNSCSVVGVDAAGAVVVRRTMRRQALIDYVAKLPVCMVAMEACCGAHHLGRLFAAQGHEIRLMSPEYVRPYIKAQKNDDRDAEGIAEAASRPTMRFIELKGQEELDIQTLHRVRSRLVAERTGLINQLRAILLERGVIFPAGRRKLEHGVDGMLADGDEMLSPRIGRLVVELRAEWKELDAKIGTLNGEFVKLARNDAAMRRLTSIPGIGVLNATALVAAVGNGSSFAKARDLGAWLGLVPRQHSTGGKTRLLGISKRGNTYLRTLLIHGARAALPSLSQSDTPLGRWLKAMIERGVHRNAVVVALANKLARIAWSVLRKETGFERCYPAAAA

SEQ ID NO: 333556 - protein, 370 aa, unidentified
MSVRRILAKTIDTDLEYEAIGIDLAKNCVSAALLTTDGEVVCIDRLDYSELEKSAQALSPTTFAMEPCTEMNYLVQKLEAWGHRCLVIGGKNVQNYVENHFSGQKTDLNDAQALAFLAQDTQLRTIKAKDVEQQKYASLTTLREQYIKQYRQTIVSLKGICQAWGLNISKGISGKARLKDLIENHAAFPEELKESLVDMVTHAQTAQKALNKITKTLEELAKSDKVCQLIQTIPGLGSICSCRLRATVGDIKRFKSPKDFPAYYGLVPRSIATGHNERKGKITHRGDRTMRSLMVQAAGSLVNMATKGKLKSKQLTKWILKKQKEKMPWGKLVCAVAAKLLRIVRAVLISNKPYNSKIAGVAKCSLPKGS

SEQ ID NO: 333557 - protein, 345 aa, unidentified
MKHYAGLDVSVKETSVCVIDEAGKICREVKVPSHPEDLAAALNDPAWRLERIGLEAGPLSQWLFSGLLEAGLPAVCIETRHTKAFLKAQVNKSDRNDARGIAQMMRVNLFRPVHVKTLTSQKRRALLTARKILQDKAVAIENDIRGLLRNFGLKVGVVGVAKFDERIRELVEGMAELVEIMEPLLAARQKLREMFTALHRKLLSIVRDDGVCRRLMTIPGVGPVISLAFCATIDVPARFRNSKAVGPSLGLTPVLNQSGESLRVGRVSLCGDDMMRALLYEAAQVMMTRVQKWSWLKAWAMNVAKRRGLKKAVVALARRLAVIMHRIWVDGTVFRWTKEAAPATA

SEQ ID NO: 333558 - protein, 319 aa, unidentified
MKPSTSSIKAMTRVLGLDVAKATVVLFDPVSGRTLTIANEPQALLEALRPFADYVLMVCEATGGHERAALEAATALGLPAHRADAAKVKNYIRSHGGLAKTDPIDARWLCRYGQERGASLLLWAAQDPDREAFASLVRHRQDLITARTETKNRLGAPGPEPLKGFLQVQLAFLEGQITALDQVLQTLLKASPSLASAEARLRAIPGIGPVAARTLLALLPELGSLNRRQAASLAGLAPHPRDSGQTSGRRRIGRSGRSGLRPVLFMAALSAARAHPQLKTFAERLLQAGKPKRLVFTAVARKLLVIANSVCKAPAPRLT

SEQ ID NO: 333559 - protein, 378 aa, unidentified
MKAARFTADEIERVSYLTSKGYLPVAVDVASRVFQVCYYDLGAKHIRNYQLSRVKFFEFIDDTQMPRKLIGIEACGSCNYLCRYIEEHNHKCHILPAQKVKAFLHLDKTDRIDALGILKALITPSMQHIPARTQENQYLLNLITVREQLNKQFVQTVNAAHAILYESGVVAGTVSVASATKVTEALKALCNTETEKEHSEDDCSYSHLNCISESLLSNIESLQTKIKKINTHLLSYASNNEICSNLQTVPGIGKLSAVALYAAIGDPERFSSSRAFAAFIGVAPVTTGTGGKTTVLGIRKSGIQSIKKMLYMCAMVYLSQAMKNGTESSWLKLRLNQNRSKKIIICAIMNRLARIAYAIAKSGQPFDENKCNMIKKLR

SEQ ID NO: 333560 - protein, 361 aa, unidentified
MKYIGCDFHPSFQVIAQLDKETGELVRHRLEHGEGQGEVQRFYQALPGSWVVGVEATGSTYWFERLLKELGHEMWMGDAGKIRVQDGRKQKHDKRDARLILRLLLEERFPRIWIPSVAERDLRQLLLHRWHLVRMRARIKNQLQHIALNQGVQKRSKLWSKAGLEQLRKLELEPWGRQRRDELLEMLEQITARIEPLDLAVEHAAADQPRASRLQTHPGVGSVIALATVLTLGEVGRFPDSRSWVSYLGLNPSENSSGQKRWLGAISKQGNPFLRHLLVEGATSAARGDKDLGRVYARLKARKHHGVAKVAVARKLAVRLYWMERTEKSYPEVVRMQGSLSHPVTRVRVETLNRPPASHQR

SEQ ID NO: 333561 - protein, 337 aa, unidentified
MNYAGIDLHKESITVCVMNQERKIVIEKKLICSEEERILKFFISLGEYEAVVEATSSYEWLVKLLEPSAHRVILAHPKKLRVIAESVKKSDKLDARVLAEFLALGMIPEAHRPLPRQRDHRVLVRHRAKIQGRITSVKCRIRNMLARYNADRKNLFTPAGRKYLREYGLSKEDRYSIDLMEKELEFFEEQFKAINARLKEFAKKAPIREKEARALLKTIPGVGEVTINVVVAEAGDMSRFRSAKKLVDYAGLAPGYRSSAGKSKELGITKEGSGLMRWALTEAAWSAVRHSSRWRRVFERLAKRRGRKKAIVAVARHLLCVMHSMLQAGQKYNLAAA

SEQ ID NO: 333562 - protein, 369 aa, unidentified
MVEYSEAFIGIDAAKSRNAIAIAEAGREGEIRYLGEVEATPQSMRKVVTRLAAKYQRLHFCYEAGPTGYGLYRQLTALGHDCIVVAPSLIPRKPGVRVKTNRRDAIALARLLRAGELTPVWVPDEAHEALRDLVRARDAAVEDLRRKRQSVTSLMLRHGRIFPGKTTWGARHARWLQEQRFEHPAHQIVLQELVLAIQHAQERLERIEAAIAEFVPGWSLAPAVEALQALRGVNLISAVTFLVEVGDLRRFETPRQLMGYLGLVPGERSTGDTVRKEGITKAGNSRARRTLVESAWTYRYPPRIGKVKLYHLQRVTPAIRDIAWKAQSRLCARFRALAARGKKSTVAVTAVARELAAFMWAIARAVPAT

SEQ ID NO: 333563 - protein, 310 aa, unidentified
MPKTYIGCDLSRDRIDVFDPRIGHATSHPNSPAGLKALFEACRPEAILVVEATSGCDQALLRACTTAARPFVRLNPLHAWHFAQSLNLPKTDRTDARMLARLGAERRPAPHRPPDPARGDLAELADRRDQLKRMETQEKNRLGKTAAPLIRADIRASLKALSARIKRFEAEIAAFLARSPDLARDAELLRSVPGMGPVTSANLLARLPELGQLDRRAIASLAGLAPKARESGKFRGKRRIGQGRASVRRLLYMAAMSLWRRPGAMGGLTGRLLAAGKPPKVALIALARKIATIANAVLRDQKPFRTAPQP

SEQ ID NO: 333564 - protein, 407 aa, unidentified
METVHSVCCGLDVHQASVTACLRRVAEGTISNEKRQFSTTVQGLLELSGWLVDSGCPIAAMESTGVYWKPVFHILSAVVEIWVVNARDVKQRRGKKTDPKDAQWIAELLAHGLLEPSFVPPPHISALRDLVRMRTALVQTRTQVKNRVLGVLEDTNVKLASVISDPFGVSGRKMMDALARGNRDPKALSQMAKGVLRRKIPQLEVALEGTFTDHHALLVGLNLDLIDHTNAQIAQLDERINELMEPLQKEAERVDSIPGMHHTAARTILSEIGTEMSRFGSASRLASWAGICPGDNESAGKRKSGKIRKGNRYLKRVLAECAWAAGKTDTFLGRTFRRLQVRIGGKKAAVAVGHKILVIVFHLLNEGTMYDDGRYSRPNPKQEKRQLQRALSTLQQLGYQVQLSAIV

SEQ ID NO: 333565 - protein, 428 aa, unidentified
MADLENATPACNLVAIDVGRYSNAVLIEVASGKRHRFKMANTAADFERLLQFLGSLPGGCRVGLEPTGDYHRPLAHRLLSKGFEVVSINSVALARYREAIFNSWDKNDPKDAAVILEMLRRGDVQRYVDPMVVGSHDLQELAKTYYQVSRARTKVQHSLINHGLPLYFPEMHRYWATTRNEWFVRFLLKFPTPAHVRSLACADFVAAAWDVVGRKVNKRAKLEEIWEMAGATAALPHAPHSLAVETFRITLRRYQELNDLRTELELRAERALATDTDFAHLKTLPGIGSVIAMTILAEAGNLRRFGHHRQFLKYCGFDLAKNQSGTQRGKEQLSKRGNARLRLAFWLAAVAAVHMKENSFREKYERYTRNAPGDPDLRRKALTAVAAKMARVAYGMIKKNQPYRQFFEQSLPSGSIPLSVAVGALVTP

SEQ ID NO: 333566 - protein, 414 aa, unidentified
MLKIVYPICCGMDVHKSFIVACIASTNEQGVTTYKSKRFSTFTGNLRRCAAWLATNNCKDVCMESTGKYWIPIYNILESTCNIVLAHPKYVKAIRGKKTDKRDAKWIADIFKHDLVAGSFIPPADIRQLRDLFRYRWKLTSFTTGEKNRAQNCLTVSNFKLDDVFSDVFGKAASAITSCILENPAEKITDVSGFRTKGMKATNEQVLAAVDGEMCKEQAEKLRIIRSHMDSLELCKLNLESLILATAEKYLPQLNLVMTAPGIQSFAAIGIISEIGVDMSVFPTSKHLCSWAGLTPQNNESAGKKKTTRISRAGAYIKPLLVQCALNATRAKKFPEVRNRYLALKKRRGHKKAIIAIARMLLTAIYNMLKKNEPYNPELYRKDDRPPAHREVSVEEAIFILQRQGYLVTAPPPT

SEQ ID NO: 333567 - protein, 429 aa, unidentified
MNYTQNKKIMQVKVSTLVVGVDIAKNKHAARAFNFRGIEYDKAIFFENNEAGFKKLLHWVKKVSEKENKDNVIVGMEPTGHYWLPLEEYLRRKTDFLRVVVNPAHVKKSKSLDDNSPTKTDRKDAKVIAKLVIDGRYSIPHMPEKEYADLRVAMTHRERLVKDIVNLSNKIQQLIDKYFPEYQTVFKKWSGKASVAILKELFLPELILEKTAEEIVEIFKKGANRAVGIKRARKLKKAALNSIGIKEGGEFTQYELRNLLEQYELLNNQKELLEEKVEKLFNSMEEAKYMESVKGVGIITVAGFIAEVGNINDYDHPRQIQKLAGLNLKEHSSGKHLGQTRITKRGRPRLRALLYRVMLPILAKNEEFKQLHEYYTTRRKNPLKPKQSMIALACKLIRIFFALGQKHVNYDGQKLMNDIERNLDLQEVA

SEQ ID NO: 333568 - protein, 323 aa, unidentified
MMGLPNSLCIGIDVSKMSLDIAANQQIAPFTVSNDIDGFDAIITEMKRHSIALVLMEATGGLEAAVACYLQTEGFDVAVINPRQARDFARSMGYLAKTDRIDAVMLAQMTEVINRHPERARFIRNLPDAKREVLAAMVVRRRQLITMLTAERNRLYPSHPQSRKSISTIIDALKDELDRINKSMEVHISTHFKTLAGILGGVKGIGAATVATLLAEVPELGHLSRREISALIGLAPFNRDSGNLRGRRTIFGGRANVRSALYMATVVATAHNPVIKQFYGRLVDSGKVKKVALVACMRKLLTILNAMLRKEEEWDPKYHSVNS

SEQ ID NO: 333569 - protein, 337 aa, unidentified
MPHYVGLDASKATTSICILSSEGEIVREGVVETDPKAIIAFLRGEGRRYKRIGIEPMSFTPWLFDGLAKAGLPVIPIEAQYAHRLLKGARLNKTDRNDARGIAEIMRAGVYKAVHIKTRESQQARLLLKARRLLCQKRDDIDNLIRGALLQQGLKIAPGHTYSFAVRADRLAPATGLVREIIDALLTARRQIDGQVRRLKKLVDELVAADAVCARLMTAPGVGALVALTYRSAIDVPQRFRRARDVGVHLGMTPPTYRSGRVNRQGHISHCGDEAARAALFLAAKCVLRKSTKDSGLKQWGLQVSARRGYLRGVVAVARRLAVILHGMWLTESDFAF

SEQ ID NO: 333570 - protein, 337 aa, unidentified
MSYLGVDLHTNSFTVCYRSSKGKERIATFETRRIGQFRKTLRKRDELAVEATGNTAWFVEQISDRVSRVVVVNPHQFKVIRKSVKKTDKHDAKTLAFFLSKDMLPEARMKSKENAQLHSLAGTRDKLVKQRTALINKIHNILNGHGMKYKKETLSTDKHLKKVLSFDWDAIVRVELEVLAEQIRSLTKSIKKLDEQMSEHGKNLKGHKNLASIKGIGERSATVLLSVIDNVNDFADEDKLAAYFGMVPRVSDSNETVRHGRITKNGSKIGRTTLVQCTLVAKRYSPYLHKYYERIKRHRGSGKAIIATARKLLGIIYQTLKNDWIFEDFPNFVIANT

SEQ ID NO: 333571 - protein, 407 aa, unidentified
MNHESRIVYAGVDTHQDVHVVAVIDGIGALLGTKSFATTPLGLKGLERWIAKHGPVAKVGVEGTGTYGLGLQRVLQAAGHQVVEVNRPNRQLRRAKGKSDTIDALSAARAVLAGHATATPKSHDGIVESIRVLLVAHTSCKQALQKVDGRLRALTITAPDVIRIELSHQSAWARAAKAARLRPGDDPADIGTATRTALRLLGRQHHSLTQDMKVIEAQLEDLTTRANPGLRQVHGVGPIVAATLLVTAGDNPDRLTSDAAFAALCGVSPVPASSGKTTAMRLNRGGDRQANSALHRIVLVRLSHKHPPTMDYVARRTAEGMPKRSIIRCLKRFVGREIHGHLVHPQPAIQTDDLRARRRAIHQPMRLVAIAVGAHLMDISRLERGTNHDPDLAQRYRDWLSQEELAS

SEQ ID NO: 333572 - protein, 342 aa, unidentified
MKEFIRIGVDLGKRYIQIHALESKDGRAVKRKLPRSKFLEFFADVAPCLIGMEACGSAHYWARQLRAMGHDVRLMPPAYVKAYVKRGKNDAVDAAACCEGVSRPDMRFVPVKSEEQQATLTLHRTRELLVRQRTMCVNALRGHLTEFGLVAAKGIGRAGELIDMAGNDAERPEIAKWVVKIFAEQLAAIQALIAALEKQIAGVHAQSPMSQLLAGIPGVGKIIASAIVASVPDPQVFKSARDFAAWLGLVPRQNSTGGKTKLGPITKKGDRYLRKLLVLGATSALRVAGRRKGALRDWLAALLEKKKSARLASVALANKLARIIWAMMTSGETFRKDMFEPA

SEQ ID NO: 333573 - protein, 356 aa, unidentified
MLHKNGVGPVVAVVGIDIGKNNFHVVAHDKSGAIVLRQKWSRSQVESRLANMPPCLVGMEACVGAHHLARRLVSLGHNARLMPAKYVRPYAKGQKNDFNDAEAITEAVQRPTMKFVAVKTGDQLDLQALHRVRERLVSQRTAIINQIRAFLLERGVAVRQGLRILRAELPTILGTRTDALSPRILRLIEDLAGDWRRLDTRIEQLSAQIVAIAKEDVHCRRTMSVPGIGPIISSAMVAAIGNGDVFSNGRDFAAWLGLVPKQISTGDRTILGKISKLGNRYLRVLFVQAAWVVLVKPLSWERYGLKPWITAAKKRLHHNVLAIALANKLARIAWAVLAKGRGFEVTRTTDAASQPV

SEQ ID NO: 333574 - protein, 375 aa, unidentified
MKDHSEAFVGFDTSKLRNAVAIADGVRGGEVLFLGEFENSAAATAKLVKKLAAKYQRLTFCYEAGPTGYGLYRQIKNLGPECIVVAPSLIPKKPGDRVKTNRRDALSLAKLLRAGELTAVWVPDRGHEAMRDLTRARETAMRDLRSKRQQVSAFLLRQGLHYSERKKTWTKTHMNWLASQKLEYAEQRLVFEEMMLAVRQAQERLERLEQAILVAVPDWSLAEVVTALMAMRGIDLISAATFLAEIGDLSRFQHPSELMGYLGLVPSEHSTGDKIKRGPITKAGNRRARRMLVECAWSYQHPPRVSQEKQEKVAAAPRAVREIAWKAQCRLHGRYRALVRRGKLKTVAVTAVARELAGFIWAVNRAITTARAVAK

SEQ ID NO: 333575 - protein, 322 aa, unidentified
MDCKHILGIDVSKAKLDIALRLPNGKFRSKVIPNTPKGLETLSDWLKRHGADTVHACMEATGVYWEAVAEFLSETGHAVSVINPAQISAFGSAALSRVKTDRTDARLIAQFCAERNPPLWEAPPPELSELRALVTRRDALERMRTQEMNRLHTARDQVRAGIERHVAYLEQEISGIDSEIQHKIDDDPKLKKQRELLDSVPGLGVKTVPLLLSFFGGPPRFSNTRQAAAYAGLDPRQHQSGSSIRKKPRISKMGHSLLRKALYMPAMVAVNRTEWGKAFKARLAAAGKAPKVIICAMMRKLVHVAVGILNSEKMFNPSLHGA

SEQ ID NO: 333576 - protein, 423 aa, unidentified
MTETPEQLNDQPGLFIGIDWADQKHDCHVIDRDGKGFHQEISHSPEDINIWIGEMLKLADGKPIAIMLEQSRGPLVYSLMFRENVLLYPVNPKQLVRYRESYPGGGKDDPTDARYLARMLRERIATLTCWQPDDENTRLLANLSQQRRKLVDGQTKLRQQLIAQLKSYFSVVLELFGKESQLPLLLSVLGRWTDPRKLRRADRRLIRRVLSDHSIRNQEQQDEIIDRIRSAQLLCSDEALITPSAMAAKLLASQIQQSRKAIQEFDTKIAEVMKKHPDAHLFTSLRGAGPALAPRLLCAFGSQKDRWEDADSLAAFSGIAPVTRKSGKQCQVHRRFACPKYLRQTFHEFADSARKYCPWTKARYRLLRDRGMKHNAALRKIARSWIRILFRVWQTGIPFDCDRYIAQLQQRCPEITPYLEQEK

SEQ ID NO: 333577 - protein, 408 aa, unidentified
MFAGIDWASAEHAAAVHDDAGRALASFMVAHSEEGLDKLVGRLRAFGEPGELTVAIERPDGRLVDRLLEAGHPLVAVSPNAIKAWREGEVVSGAKSDPGDAAVIAEYLRLRFHLLKPLRPFSDHTRALRAAVRARGDLVAQRTAAHNQLEATLDAFWPGAKEVFSDVTCKIALAFLQRYPTPASAERLGDKQMAAFCKKHGYTGRRSPAELVERLRRAPVGIAAGAETAARKVAVLGYVAVIASLNAAIKDLDKEVATRLGEHPDGEIFTSLPRSGSISAAQMLAEWGDCRQAYAGPEAVAALAGMSPVTKKSGKHKAVHFRWACNKRFRTAVHIFADNSRHGSDWAAGIYARARARGADHPHAVRILARAWIRVIYRCWIDGVPYDPAKHRAAVALTTNSDVTSQAA

SEQ ID NO: 333578 - protein, 315 aa, unidentified
MEAMIERCAGLDVHQETVVACVLFGPLNKKPKTSIETFSTTTTGLLALSDWLTTLQVSDVVMESTGVYWKPIWNILEDSFHLVLANARHVKNVPGRKTDVKDAEWLAKLLRCGLIESNFVPPEDIRDLRDLTRYRKKLIHHRTSEQNRIHKILQDANIKLTSVLSDIFGVSGRRILEAILNGEKIETDGLRKMVDWRTKASITDIASAINGRIRRHHRDMLRYHWEHMSYLEKAIEELEKQIDQLLSPYRKEVELLDGIPGVNKAAAATFIAEMGVDMSVFKSAKHLASWAGVSPGNYESAGKKKRVKPHKVTKL

SEQ ID NO: 333579 - protein, 480 aa, unidentified
MSQQKKHCKPLGEEKTAAGTGKRGRKRKGMCLEDRPILEANAAGIDIGAREVFVAVPPDRDEHPVRVFSTFTEDLEKLAQWLVSCGITTVAMESTGVYWIPLYDVVDKYGVKACLVDARGMKNVPGRRTDWHECQWLQFLHSVGLLRAAFRPEGDVCAVRSMMRYRTELVEMTSQHIQHMHKALTQMNVQIHHVISDLTGVTGLAIVDAIIAGQRDPVVLAKLRDPRIKASEETIRKSLVGNWRAEHLFTLEQSRKSYQHYQGQISACDEAIEKLLVAFVPRVDPTERPLPPDRKRKQRGRKKKNANPNTFDLRTESYKLFGVDLTQIPGLMAMVLMLFSEVGRDMSRWKTAGHFVSWLALCPDNDISGGRVLWRGMRRVHNRAGDLFRMAAYSLHHDATPLGDYLRRMKSKLGPAGATTATAHKIAIIFYTMVKKQVEYDATLWADRDAEREKRFEAKLKRQAQQLGYKLVPIEERPAA

SEQ ID NO: 333580 - protein, 375 aa, unidentified
MQSIVYVGMDVHKESYTLCCYRIDDDKLRYEQTIKPEIKNILKYLERVRIFYKEDIKIVCGYEAGCLGYTLYHQLANYGIECIILAPTTMAIIEKKYIKTDKRDAGNIAKCLAFHTYSKVHVPTAEDEAIKEYIRMRDDQKKFLKATKQHILSMILRQGYRYDDGEKWTIKHVAWLNSIDMGGVLQETLNEYLITYNNLTDKVKRLDRRIVELSKEERYVEDVNKLRCLLGLEYYTALAVIVETGDFGRFSTAQHYASYLGLVPGEHSSGETQMRLGITKAGNRHLRLLLVESAHGFTRGAVGHKSKRLIAKQNGNKPEVIAYADKANERLRRKFYRMTLKNGIKRHVAVTAIARELACFIWGLMTGKIDSNVVA

SEQ ID NO: 333581 - protein, 420 aa, unidentified
MIYAGVDIAKVDHVIGAVDERGSEACGPMGFKNSAAGFERCEAWLEGVAASPADVLVGMEATGHYWMALYAFLTSRGYAVAVIDPLQVRAVRRFKGLGGVKNDRVDAGLIAEAMRIGQYDPTRLATDDVQSLRTLTRYHQSLKSELAEVKVQCTCLLDAYFPEFSGVFSDMFGAAGRAVLSRSPLPSEVRRRRVDSLQRDISSAARGSRRVDGKAAEIKELAGRSVGIALGERAASLQVRSLVRQMDFLDAECAKIEAEVRGLLDRVEPLVLTIPGVSYTTGAQIVAEIGDVSRFRNAAALASYAGLNSSVCQSGMFDSGGGPITKHGSPYLRRALWLAASWARLHDPSLREFYERKRAEGKCHRVAVTAVARKLCHIVFAVMRDQVPYDPSRPGRDPSKHSVSGSQGAAKSKTKSKTEN

SEQ ID NO: 333582 - protein, 328 aa, unidentified
MFYLGMDVAKAKLDCTLLLNNASSKGKTKVVHNSKAGVADLLAWVAKHKVSPEELHVVMDATGVYHEQAALALVDAGVVVSIINPAQVKDFGRGLAVRTKTDGVDSLVLARYGALMQPAAWMPPTPEARMLQALLARRDAITQDLHRERNRQEKAEATDTPALIRKSLEDSIVFLAKQLEQIQKDVDDHISNHPSLKSDMKLLQSIPGVGPQVGGNMLSVLSNHHFGSAEQVAAYLGLVPVEKLSGSSVRGRAKLSKAGPARIRAVLYMAAVAAKRCNPHVKAVYERMLARGKCKMSALGAAMRKLVHLCFGVLKTQQPYQRDYAKNA

SEQ ID NO: 333583 - protein, 425 aa, unidentified
MNYKQNEKINQVKESTLVVGIDIGNTKQYARAFDWRGIELGKVFTFSNSREGFEAFKAWMQHLQDKYRKSDVIVGIEPTGHYWFDLGAYLEDEGILLVMVNPYAVKQTKELDDNSQSKNDRKDPKVIAKLVTEGRYSAPYTPDGVYADLRIMVANRKRLIREMTQIKNRFARWFAIYFPEYTDVFGDYEAQSSMLLLKKVCTPEAIVELGAEKINQIWRDAKLRAVGMKRATTLCETAKRSIGLKKGSSAARYEMKLLLEDYEYKKAQLDAVMEEIEKLCRKIPESEQMLAIKGIGVITVAGFLAEVGDVRRFESPRQIQKLAGLSLRENSSGKHKGQTTISKRGRSKLRAVLFNAAIPLIAKNPEFKSLHEYYTTRANNPLKKKQSVIAISCKLIRVFYAILAKGVTYDAQKLISDIHRQPQVA

SEQ ID NO: 333584 - protein, 346 aa, unidentified
MVLIGCDFHPSWQQVSWLDMETGETGEQKLVHAGGEAKQFYEQLAAPVLIGMETTGNSQWFIELVEDLGHEIWIGDAAQIRASYVRKQKTDKRDAAHILKLMVEGRFPRLWTPDREQRDLRQLVLHRHKLVMIRSRVKNELQHLSLNKGMQRKRRLWSQAGQKLLRELPLKKWAACRREDLLGLLTMLDEQIGKLDGAVEHAAEENPQSKLLMTQPGVGPNTALAFVVTLGDVGRFPRGKQVASYLGLIPREESSGGRQKLGAITKQGNRMLRALLVEAAQVAVVHDPGLRKQYRHRCHQKPKAVAKVAVARKLAVRLYWMLRTNVAYPEIVRIESSSGLALVGAS

SEQ ID NO: 333585 - protein, 441 aa, unidentified
MAKGRIVKYQKTENRAVNFLGKRCHFMKKVYDNCCGIDVHKKLMVACFIHGKEQEVREFGATTRELLELADWLAKGECQMIAMESTASYWKPLYNILESSGLNAMVVNARHMKAVPGRKTDVKDSEWIADLLQHGLLQPSYIPDRDQRELRELVSYRKSLIQDRTRELNRLQKMLEGANIKISGTITDIKGKSARSIIDTILSGTAIDSSKYDEMYNRKVIAHNLKASKEQIIDDLNGFMSPLQRKMMKELLKHVDELDVHIEHLNDDIDSHMKPEEKQAVDAIQQVTGLGTISAQAVISVIGTDMSRFPTDAHISSWAGLCPGDNESAKKRRTGKTRKGNYLLRTTLIVCAHSAAKVKNSYFRAQFQRINAHRGSKKAYVAVAHSMLIAVYHILKDGVAFQDLGADYYNQFNKERKINVYLKKLKALGWEMPKAMEAQPA

SEQ ID NO: 333586 - protein, 410 aa, unidentified
MNPLYVGIDVSSKSNVAYLMKPDGSKHSNFSIPNTRDGSRQLVKRILSAITSESLTDVVIGLEATSVYGDNLVCFLREDGSLAPYNKKIHVLNPKQVNKFKLSYNDLPKNDYVDSFVIADCLRFGRINKEVYLDDYRYAALKNLTRARFFAVQNLTREKQRFLNQLFKKYSTMAQEKVFSDTFSTTALAVYESFESAEALANMDLHQLTEFIIEKGKKRFPDPDSVAKAIQKAARSSYRLPKTVNDSVNQVLSISISSMRAMESQIKAFDKAIAEQMALIPNTLTSVNGIGPVYSAGIIAEIGDINRFPNQASLAKYAGLVWSQHQSGDFEAQNTRLIHSGNRYLKYYLCEAALSLVRCDTEYRSFYHRKYNEVNQYQHKRALALTARKLVRLVFRLLKDNCLYRAPESK

SEQ ID NO: 333587 - protein, 427 aa, unidentified
MPYKIAGIDVHKRMLAVVVADIAGEGEYKFERHKVGTSPDQLRLLAQWLVEQEAEEVVMESTAQYWKPVWQALERYWKAASQKREGAGPKSGTLHLAQAKSNRGPRGRKNDFADAERLVKRLVAQELVLSFVPDTEQRLWRTVTRKKQQLTCDKVRLQNQLECVLEEAHIKLSSLVSDLLGVSARRMLQALADGETNPETLAALADRRLRATPSQLCDALGACQQLNQVYRRLIKMALDELKLLEQQQEQLDKMISELLALHQDAVRRVAEIPGLGVDSAHQVIAEVGPTAAVFPSAKNLGSWVGVCPGEQQSADQSQSSRSPKGNCSMRRILNQAAHAAVKVKGSIFEVVFRRLKARLEYQEAIWAIAHRICRLIWKILHENVRYEERGPEVSAKSKQTRTAKMIRQLRALGYLVEPTNLPAGNPV

SEQ ID NO: 333588 - protein, 314 aa, unidentified
METYIGIDVSKATLDVAASNRKEIKHFSNDEKGVIQIVGYLNKEKPVLTVMESTGGLERLLAASLTEYAIPVVVVNPKQVRDFARAKGILAKTDIIDARVLAEFASDIHPEVRKLTDNQTQEIKAMLVRRQQLIAMITMEKNRLYSADLIVIPSIQENIKWLKQQIDNLDHDIENKIQDSPIWREKEDLLKSVPGVGQILSITLLGALPELGSLTRKQIAALAGVAPFNRDSGKYRGKRTIKGGRTRVRASLYMATLSATRFNPIIREYYIHLLSMGKMKKVALTACMRKLLVILNAVLREHRPWSCELIQHSC

SEQ ID NO: 333589 - protein, 302 aa, unidentified
MPADEQCAIDNKPQAVRRLIKAEIKRNRNKQLGQMLVVCEATGGYERHVLDAAVEMGLSVHRAHGTRVRHFGGYCGLLAKTDPIDARLLAQYGLKTENIRLYSPPPPETSALRALHARRTEIQQMLIAETGRLDHAQHKNVLKSLKDHIASLKAALAAIEADIAQLVEGSEMLRKKVALMQTVIGIGPISAMVVLAYLPDIGQLTKGQAARLAGLAPINNDSGKKRGARHVEAGRTAIRRALYMAAGVAMRANPILKAFSDRLRGKGYPFKYVVTAVMRKLIVILNAVLRDGQSWKGAQMAA

SEQ ID NO: 333590 - protein, 352 aa, unidentified
MEVTTIGIDLAKNVFAVCGADSSGRVVMRRQLRRAQVLSFMRGLPRCVVGMEASGGAQYWARQFTALGHEVRLMSPALVMPYRKGNKTDRNDADAILEAVTRPSMRFVMVKSVAQQDLLALHRVRAQLVKSRTALCNQLRGLLRERGVAVRMGVAALKRSLPAALADESSELSGEMRELLSEMSQWLRTLEQRIASCEARITRKFKHDERCVRLAEVPGVGPLTATALVAAVGNAQRFKNGRELSAYLGLVPRQHSSGGKTVLLGITKRGDRYLRTLLIHGARSALRQCKLEGDARSRWVARISAARGPNVAAVAMANKNARILWALLSRGDRYRSSRTHARSFAPQLSTPG

SEQ ID NO: 333591 - protein, 377 aa, unidentified
MRKIRFVGFDVHAESIAVAVAESEGEVRSLGVIPNREESIRQLVKKLGPVEQLRVCYEAGPTGYVVYWQLTALGVKCEVVAPTLVPVKSGDRVKTDRRDAEKLARSYRSGDLTPVWVPDAAHEALRDLVRAREAAQRDRMRARNRLSKFLLRHGWRPPIVMGSWTKRHMAWIKREVHFEQPAQEITLLDYIQEVDHGTSRMERLERAIDEVVKSAPAEMQAVIGALQALRGIAQVSAVTILSEVGVISRFSAPRQLMGYSGLVAREHSSGERNWRGGITKTGNAHLRRVVIEAAWAYRHRPLVGGALRKRQEKLSSEVNEIAWKAQHRLYTRYRRLAARGKNRQQVITAIGRELLGFIWAIGVQVGAEQVKAKMCAA

SEQ ID NO: 333592 - protein, 413 aa, unidentified
MTEHNFAWFAGVDWGSEGHQACLVDAQGRIVGERRFLHGGTGLADLCDWLLSIGGAADTVAVGIEVPHGPVVDTLVDRGFVLHAINPKQLDRLRDRISVAGAKDDRRDAYVLGDGVRTDRRLFRRLHVTDPRLVELRAWSRLAEELTEERVRLGNRVHHELWRYYPQMLKISTEDVAAPWVLDLWNLAPTPAKARRLRAAPVEKLLKQHRIRRIDADTVLRILQEPAIKVAGGVAAAASVHLRSLFTRLGVVNRELRQAEAKLDALCAAIGETDADSGEGLQRQDVMILRSMPGIGRINLATLLCEGSGPLSRRDYPALRTLCGAAPVTKSSGKSHIVIMRYAAHVRLRNVVYHWARVATQHDPKCRARYAALRGRGHSHGRALRGVADRLLALACVLLQRQTPFDPNFAQAK

SEQ ID NO: 333593 - protein, 394 aa, unidentified
MRFVGVDIGGKAHVVAMVDEAGRTLLKPMAITEDAAGYTRLREVLGDGGDTLVVLEATGHYWQNLFAVLTAAGFAVAVVNPLRTQRFAEEDLRRSKTDAIDALGLAHFGRQKRPEPTRLPDRATEELRELVHLRDRLVQDIGDRVRQLHRLVDLGFPEFTRHVAELDSPLATAILGQYPTAAAFQGVAVEQLAGLRYGTHHRVGEEVAQALLAAAAGSVGQHHGEPYRRQICYACEDLDLWRGRLRSVDDDIKRLLGAHDVGQLLTTIPGIGPQTAARLVARVGDPAAFQSAGALAAFVGVVPGLRQSGQRQGQRAGLHPLGHARLRAQLWMPTLNAIRFNPWLRAYYQRRLARGKVRKVAIVAAMRKLLIAVYAVAKSRRPFVPHVISQETPA

SEQ ID NO: 333594 - protein, 418 aa, unidentified
MKVVYPICCGVDVHKTFFVATIITTKVITPHYSKKRFSTFNNSILQFKQWLIGNNCFDMCMESTGKYYVPVLNLLEDVIRVTIANPKWVRAVKVNKDDVKDSKWIGDLFRLGLVPGSYIPDKPIRILREYTRYRSKLVSCQSSEKNRFQNALTVCNVALDAVVSDMFGKSATSITDYLISCDSFDPDYCSSLLHTSLKKKADIVIESIEGYQMTKEQKERMVMVRSHLKFVHQSIATLDEKLDKMVVPYENAITLLCTIPGVDRTSAITIISEIGTDMSQFASSKRLCCWAGLTPGNNESAGKKKSVRITRAGVYLKPALVQVAHAAVKLNKSSYYKTKYECISKRRGKKRATIAIARMILTAIYHMFVTGEVFNPSDLYKIDMPQEMQEKQKEKAVKQAIKLLTSLGIMQVPDTTVA

SEQ ID NO: 333595 - protein, 361 aa, unidentified
MKIMVGIDLHSNNALCGLMDESGQRLAHKKLPCDLAAILQLLAPYKDRIATIAVESTFNWYWLVDGLQDHGYHVVLANPAGMQPYSGMKYTDDVSDAYFLAELLRLHLLPTGHIHDRKTRPVRDLLRRRLLLVRQRTMLILSFKSLNERTLGQRVSLARVKAMKVEEAQARFTAPADQLLSGTEITLMGHLTAAITKLEQHILGVAGKWPAYQRLQELPGIGKILGLTIALETGDVQRFADAGNFASYCRCVKSLRTSNGKKKGENNRKCGNKYLAWAFVEAAHFACRYDDPCRRFYDRKKQQTNPVIATKSLACKLAKAAWHVMAEDVPYDALRVFGPGKKNNFGETGREPAKGSGPPSQ

SEQ ID NO: 333596 - protein, 375 aa, unidentified
MKNKVRFLGLDVHAETISVAVAEPDGSVRSLGTIANRADSIRKLVKNLGPVEQLKACYEAGPTGYVLYWQLAELGVQCAVIAPTLMPVKAGDRVKTDRRDAERLARSFRSADLTAVWVPDAASEALRDLVRAREAAKQDQLRARHRLSKFLLRSGQRPAAGLKAWTQLYMAWVRQLRFEQVAQESTRLDYLHEVEHMAERIVRLEKAIAEAVKLASPAIQEVVKDLQALRGIAQISAVTIAAGLGNITRFESARQLMGYSGAVPREDFSGKRTQRGSITKTGNAHLRRIVVESAWSYRLRPGVGPALRKRQEGVPEELKEIAWKAQHRLHKRYSRLAAAGKDQRKIITAVGRELLGFIWAIGVKAEATAKQPMAA

SEQ ID NO: 333597 - protein, 400 aa, unidentified
MLSIGIDVSKGKSTVCGMKPGGEIVYTPFEVQHTREGMSELVSLLRSSGEEVRAVLESTGSYHCPVVAALLENGIFVSVVNSLRMKRFCSQSIRKVKTDRIDAMQIALYGLAYWQELQPTKLPEDTYRELQLLARQYYQMTSLLIKAKVDFNAICDQVLPGMQELMNDHAGRHKLSDFVLRYHHTTHILEMGETRFRKDYCKWAEKKGYRNCERMAVLIFATAQNGIPVLPNAPSTQIVITEAIRVLHTVEASRDAILTQMQALAKTLPEYSLVREMPCIGDTLAPRLIAEIGDVRRFHSKRALIAYAGIDAPPYQSGKFCANNRHISKRGNRYLRKTGYEVMQSYVMHKPANDPIFTFIEKKRGEGKCGKLAMVAGLNKFLRIYYGKVTELYRSLPAIE

SEQ ID NO: 333598 - protein, 380 aa, unidentified
MNAVGIDVSKGKSTVAVLRPYGEVVVSPFDVAHTGSDLRALADLIKKLPGETKVVMEATGNYFESIARYLHEQNIFVSVVNPVLISDFGGNTLRKPKTDKKDSVKIASYALTYWLDLKEYTPQEDLRKSLKLMNRQYQQSIKLKTMMNNNLISLLDLTFPGINKLFTSPSRESDGHEKWVDFVLEFSHCDMISKLTIKAFAKKYKKWSDKNSYHFTESSCEKIYAFAKDCVSSVSSDKAIVFSVVQAAKMLISATENCHAIQSEMNRVASKLPEYDTVMNMYGVGKAVGPQLMAEIGDPRRFHSRKAITAYFGYDSENNDSGQKTTRSNPMTKKGSGALRRTLFIIMQVLLQTKPQDNPVYDFLIKRYPRMNFEPIFLNE

SEQ ID NO: 333599 - protein, 342 aa, unidentified
MQVTTIGLDIAKNVFQVHGIDAAEKVVVRRQLRRNQVLEFFKALPPCLIGMEACATAHYWARELTKLGHQVRLMPAKDVKAYVKRNKNDAADAEAICEAVRRPTMRFVQVKSAEQQSQLMLHRTRDLLMRQRTQVINALRAHLGELGITAAQGKAGLTELLAIIAGSANERLPAEAHASLIVLAAELQAMRTLIASIEKRIIAHHRLDEASKRLRSIPGIGLVGATAIAATITDPKAFRSGRDLAAWIGLVPRQDSTGGKQKLGPISKQGDRYLRRILVVGAHAVLKLARQKPEKYPWLTQLLARKPFKVVAVALANKMARIAWALLVKGGPYRARALVAAA

SEQ ID NO: 333600 - protein, 411 aa, unidentified
MHNRQNYLYVGVDLHKEHHTAVIINCWQEKLGEIQFDNKPSAFSKFLLEVETYVSAGITVVFGLEDVGGYGRALAKYLVDHEQVVKEVNPALSFLERKSHVTTQKSDSWDAECVARILINKLNQLPDAKPNDLFWSIQQLVSTRNALVKAQSALKNQLHIQLNHHYPSYKKFFSELDGKTALAFWQQYPSPFCLEGANIKQLTAFLLDVSNNTCSVKKASDILKLVKEDGQTMKEYQETRDFLVRSIVRDIEFKKKEMKYIERELKRLVNLLDYQLETMPGIELVTASALIAEIGDVRRFPNANKLARFAGIAPVYFGSGGKGKTHKSKQGNRALHALFYNLAVQQVQVAKGSKLPRNPVFHAYYQKKLKEGKTKGQALVCIMRRLVNIVYGMMKYKTAYELPVVEEKEVV

SEQ ID NO: 333601 - protein, 320 aa, unidentified
MQEDAVVVGIDVAKARLDVVVRGAPVALRAVDNDSAGHAGLVAALTAVRPVLVVLEATGGYEAAVVCALQSAGMRVAVVNPRQARDFAKSMGRLAKTDRVDAQSLAELAGVLVQRADVDRFVRPLVSAEQQALAALGDRRQQLVSMLLAERQRRALALPLVRASHDAIIAAVQAQLDDVEHQMAAHVREHFAGIDALLRSARGIGPVSSAALIAELPELGRLDRRAIAALVGVAPMARDSGTQRGRRRIQGGRFALRRILYMATLTATRHNPVIARFYQRLCAAGKPPKVAVIAAMRKLLTILNALVRTRRPWSDVPHRA

SEQ ID NO: 333602 - protein, 354 aa, unidentified
MKKIFIGIDFSKEKFDATLIQAEGLKECAPSVHEVFDNKTSGYRRLVKWVKAHAEGFAANAWLFCGENTGGYSIGLSNYLYASGYDMWLECAYKIKHSAGIQRVKNDKADSRAIAEYAMRNHDKMILHKPQSASLACLREVFLYRHSLVRQKVALTVRRDEKRLTQEKSDARAFMSFTSKHLITEVNKAIAKCDQKIKEIIASDDELREIFDIITSMPGIGVQNATCLMVYTDNFQKFDLDSRKIACYYGIAPFGRQSGTSVNSRPQVSPFANRRIKSLLSQAALAAIKFDINVHSYYQRLIERGKHPLLVQNNIKNKMLHILVAMVRDKVKYNPDNVYRTSKEVSLAPQMLNI

SEQ ID NO: 333603 - protein, 331 aa, unidentified
MFPVGIDVSKNTLDLCMLYDGIKGRIKTRNIQNNRHSVENILRWLRLQHCGPEDVHVVMEATGVYHERLATELHDAGFRVSLANPHRSREFARGMGIMTKTDKVDAYMLACYAFLKKPHRWEPPAPEIKYLGALLRRRDVLLGDALREENRLEKYLSTDTPADIISSCRRMAQLLREEVSNIERQIKAHINASPALSRDYTLLTSIKSVGPQLGMHMLVVLRSHNFVSAEQAAAFLGVVPIEKRSGTSVRSRPRMSKIGPPQLRAKLYMSALCGKIYNKRMRNIYDEMCLRGKPKMVAIGALLRKLVHWCYGVLKTGTVFNDESLKQVLST

SEQ ID NO: 333604 - protein, 426 aa, unidentified
MRVMYDRVAAIDVHKDMVKVAIRVPGAKRGTRKTDVLEFRTFYGVLQAMARELRRRDVTHVVMEASGVYTDPVYYALRELDFTEVMVINPAHAKALKGRKTDAKDAIRLLDLYECGLLSGSYMPSEDLREVRDLARYRMKTVQARTSEIQRLQKTLETAGIKLSSVLSDVTGASATAMIEALISGERRGSVMAGLAQTRLRTAGKMADLSMALAGRFTDHHALMCRLHRDRITIFDDAVKDLDAKIAPLVARYAREAELLKTLPGFGDVVVAGWLGAIGPAPHQHFATASRLASWAAICPGNYMSAKKSKGGRTGDGGAYIKPLLIQAAWGAVRVPGRLQARFHRLVRKFGGPRNKGARKRAITAIAHTLLKIAYGVLKTGKPYADLGADFYTRRESPDARQDYLIRQLQKLNPGSIITITPAEAA

SEQ ID NO: 333605 - protein, 352 aa, unidentified
MITIGVDPHKHVHVALALDEAGREMDRWRGPNSPAGWREVSSWASQLSGDTQWGIEGAWGYGRGLAQHLVHEGEAVFEVNPRWTALGRRRARRPGKSDNLDARAVALVVRQEAPALPKVLSEDDTAVLDLLSNERDQALSEATRIRNQIHALLVHLDPEYDRRLPALKSKAGLAALIKYSCHSHEPLQIERAAVVRRLAERLQLALAQAEDLARRIRELARPRFECVTELCGVNLLTAGTLAGILGPGRRFRTDAQLAAYAGVAPLEASSARLIRHRLNRGGNRRLNAILYRITLTQARHSAQARTYLDRRVAEGKSRRESMRALKRFVIRAIWRLWVQCNSEPALALSTAA

SEQ ID NO: 333606 - protein, 428 aa, unidentified
MKYNTQNAKIASITEKTLIVGIDVGSETYFARAFDWRNYEFTKKPFEFSNNEAGFLSFKAWVEDLLEKNGKSVVIPGMEPTGHYWFALGKFLQDNGMRPVHVNPQHVKKSKELDDNNPNKNDRKDPKTIASLVNEGRFSYPYIPTGVYAEIRSLSNMRFQAQEELTRAKNRIARWFSIYFPEYKDVYRDFKAVSGRIVLQAAPLPEDIRKLGVEGVNRIWRGAKLRGAGMKRAKTLVSAAEHSIGSKEAPEAARIELRNLLNDMDVYASRVEELLGMIEEKLKEIPYIDKLMAIKGVGLLTVSGFIAEAGDIRRFEDPKQLQKLAGYAIVANESGKHKGESRISYRGRKRLRYVLYEAALSLIGKNAEFKEIHEYYRTRKENPLKKMQSVVAVACKVIRIFYVILTKGVDYDPEKMMGDIRRPQIQAA

SEQ ID NO: 333607 - protein, 437 aa, unidentified
MRTKKSKASKRMNLQSLSILHPDAAGIDVGAKQHLVAVPADRDQRPVRTFQAFTPELHELAQWLKHCGIRTVALESTGIYWIALYEVLEQHGFEVRVVNARHVKHVPGRSKTDVLDCQWIQKLHSFGLLNGSFRPDQQIRKLRTYQRLQDSLVVNSAQAIHHMQKALFEMNVQLSNVISDVTGETGLRILEAIIAGERDPEQLAALCSSRIKASRQTVAKSLHGNWDPALLHCLKTALDMYRFTQRQIQECDLCIQRQLTELDSRAPIPGSATSLKAQLHRVCGVDLTKIPGIKEQAAQIIISEVGLDMSKWNTEKQFSSFLGLSPDNRISGGKVLRRSTRKVYNRAADTLRLCAQSLTHSKSALGAKYRRLRARLGAPKAIVAMAHHLARLVYRMLRYGEHYVEKGIEHYERKFRLHRIKWLRKEARALNLQLVAA

SEQ ID NO: 333608 - protein, 399 aa, unidentified
MLAVGIDISKSKSVAAILNQDGSMHTSPFEFHHTQPELDAFIKYILNNNQSATILMENTGHYHYPVLKAFREAGLPVCMVNAYQIKKFGDMDLRKAKTDKKDAVRIARYALEKSYSLVPYTSMEQKYEDLRFLARQYNQRMLTLKTNKVFLLNLLDETMPGITNILPLTTRAPGTSLSVLFINRFKSYDRIKKMGKSRFLDAFEKIARKSRNRQTKTYGLAIYEAALRNITTRGENEYTLAAQDQCLELVCESQKAADSIILKMQTLAETLPEYAVLRSMAGVGDRLGPLILAEIGDIRRFHSGKALNAYAGNDAPPYQSGTFESHNRHISKRGNAALRKYCFEVMQALKLTRPQDDPVYLFLLKKEQEGKPYNVAKMAGVNKFLRIYYARAMETLKQQ

SEQ ID NO: 333609 - protein, 315 aa, unidentified
MSEFTVFVGVDVSKDSLDIMQYPSGPLRGTFPNSEAGFQQLLAKLPSPGDCHVVVEHTGGYQSDLVAFLVTAQHLVSAVNPSTVRHYAKAIGIIAKTDRLDAAIIARYAHDVRPRPVQKVSAKLVELDLLVGRRRQLCEFKITESNRLSQARSSSVRQSIEAVLTLLTDQLKSIDRELVEFIKSEDEWKGKSDLLQSVPGVGPNTATTLIAEVPELGKLNRQQIAALIGVAPFNRDSGSHRGKRAIQGGRSQVRKVLYMAALVASRKNPVLKAFADRLRQAGKPPKVILTACMRKLLIILNTMVQTNSHWKPQIV

SEQ ID NO: 333610 - protein, 340 aa, unidentified
MKESKQFFIGMDVSKLWFDVSLMIVINYQKQAILTQRFNNTIQGLQQLHQWLQQHQVCFNENSMIVIENTGVYHRLIWQYCSTHNLPLHIGNAAAIKWSLGITRGKNDKIDSQRLCMYAARQADELKATPALDPVFMQLKDLMTSRTRLVKQLHSIKTYLKELHSGPETSLLTIIEQSHKQAIEGIKKSIHKIEEHIADTIANNAGIKRNYELLLTVPGIGRFTAVYLICCTNNFAAKHTGKQLASYAGVVPFDHTSGTSIKGKNRVHKMANKDLKKMLHLCALTAIKYYPEFTEYFNRKKAEGKNGMSVLNAIRNKLILRAVAVVNKQTSYVDYTKQVA

SEQ ID NO: 333611 - protein, 370 aa, unidentified
MAQSTPLYIGLDVHKDSIAVAHALGQSADPPIFVGAIGPRQADLAKLIRRLQAYTSALVFAYEAGPCGYTLYRDLTAQGFACHVVAPSLIPKKPGDKVKTDRRDAVELARLLRSGDLTGVYVPSVEDEAIRDLVRARDAARLTLKNAKLRLQAFLLRLGRHYVGRADWNEAHRRYLAKVVCPTAAQQIVFQESVRAVDEQVDRLQRLEAELRERVPAWRLYPVVQALQALRGVQWLVAITVVAELGDLTRFDSPRQLAAFVGLIPSEYSSGAARRQGGITKAGNGRARRALVEGAWAYRYPAKVSEHIQRRIDGLPKPIQDLGWKAQVRLCKRFRRLTARGKHANVVVTAIARELIAFMWAIAKVVPVTA

SEQ ID NO: 333612 - protein, 482 aa, unidentified
MKKRNIYQNQSQELLHLFEGAGSSEKVMCVPMDYAKKDHLVMFCNGHGDILRKPFSVKNTPEGIAYIADQVTRSCRRRGIKKKHVFFGGEDANSFAENFVNTLRCKGWLVASVNAHDAKKQRGNVQASTDRIDLMGIATMLLNCRANCCPAQSGIYRNLRTLVRHRRKLVQMLTEVKNRVHGIVDCLFPGFLNENKSGIVPFTQSSLYLMENRFSPKQVHRRKRKKLIEILKRFGTSKAEETAFKLQQYAVQVLHTPVEYVYTLQLSLVQHVKHIRCLQEGVTQLEKEIAVNLTQTQGAFLTSLRGIGIVLAAGVTAEIGDPNEQKSLNNLVSYSGIFPRVKQTGGVDGKTYTGHVAKRCNRILKDYVVKSAHHLGLHGPEDLMADYKRRDASGQHANFGIGRRYLRMAMSLMRTSQIYLPPRLRKADATLEERAGYYLMSWPFLRDKWKKAGALEAAFAKDRPLGLWRQIVQELYDIKLKL

SEQ ID NO: 333613 - protein, 413 aa, unidentified
MEAYRVAGIDVHKKMLAVVITDAAEPGEYRFERRQFGAGAADLRVLGEWLAAQQVQEAVMESTAQYWKPVWHALERQCRLHLAQAHSNRAPKGRKRDFADAERLVRRHIAGELILSFVPGEQQRLWRTMTRTKQQLTRDRVRLQNQLEAFLEESRIKLSSHVSDLLGLSSRRMIEALAEGETDAVRIAQKAARGLRATPEELADALHEAATLGPLQRQILKLFLERLALIEAQIDTLEKSVGQALREHQDAVARLAEVPGLGADSAQQIIAEVGPQAATFPSPGQLASWVGCCPGREESAEISRSDRSPKGNRQMRRLLCQAANAAVKAKGCVFEALYRRLVPRLGHLKAIWAVAHRLCRITWKILHQGITYKEYGYRPNPQAVRQRTNRLVRDLRRLGFQVQLTSVNEGVSA

SEQ ID NO: 333614 - protein, 443 aa, unidentified
MARKNQKRFEIIHRDCAGIDVGSREHFAAVDPERCDNPVRKFSTFTDDLIALADWLTSVGINVVAMEATGVYWIPLFEVLDARGFDVYLVNSRATRQTSGRKSDVLDCQWIWQLMTHGLLSGAFRPSDAICSMRSLVRQRSNKVRDQAKTLNRIQKALSQMNIQLANVISNIAGVTGMKILRAIIEGERDPHKLAAFRDRRIKSDQQTIARSLHGNWRLEHLHALAQEVECYDFFEQQIAACDKAISEALERLPALNNAPQPSAKVLRSPHRSSSEQAALHQALWRMMGVDLTAIPTIGIDTALVLASEVGPDLARFPTSEDFCSWLGVAPPTRISGGRQLPGRPPKVLNRAAQALKQAASNARNDKSFIGASHRARLARMDTSCAIKATAHQLARLIYSMLTKGQPYVEQGMDAYEAKSKERQLRALLRKAHQLGMELVHAA

SEQ ID NO: 333615 - protein, 343 aa, unidentified
MKSQKVNSLKELGRCQAIGVDVSKSNLEVAGYVGIEQVYAGSVENTSVGIGKFIATLSKYSFAGTILCEATSHYHLVLAVMACEAGFDIRVVNPLLSSKHSKSAIRKTKTDRVDARILASMVFTEPNLPPPLRLSRHHCEVRHTLGLIQTLEKHLQGLSRSLGSYRERVDQLGLKGAKSFHGMFDAVKELQKSHERLLSDLASMMMEDTPERLEIIERVQKVPGVTRKNAALFTFILDPGVRSAKSWIAYAGLDVAIKESGTWRGCGKVTKRGPAWLRKRLFQAAWGAAMNYQQVRLYYDVLKAKGRKHREAMVIIAKKLLSIMYTLVVRQECFDPAKAFQVK

SEQ ID NO: 333616 - protein, 356 aa, unidentified
MSREIKYIGMDVHQEAIVIAVRNSSGKLVMESIVETKASSLLQFIHGLRGELHVTWEEGTWAAWLYDLLQPKVQQVLVCNPRRNALLKEGNKSDKIDAQRLANLLRTGMLRPVYHGEHGLRTLRELARSYQTISQDLIRVMNRIKAVYRGWGIACGGTQVYAARYREEWLGKIEHAGVRRRAELLYQQLDGLQELRRTLRPELLAESRKHKAAKLLRQIPCIGPIRAARLLALMQTPHRFRSKRQLWTYSGLGIETRDSAQYCFVHGQLQRAKKPQQIRGLNRNHNHEMKEIFKGAATRASCGVGPFCDFYVALLDKGMKPEMARLTLARKIAAIALTLWKKEERFDVEQLKAQAA

SEQ ID NO: 333617 - protein, 396 aa, unidentified
MRYVGIDVGSETHVVAAVDEQREVVLAPRSVKESREGYDELLAAIGEPKDVLVVMEATGHYWCNLSLELLARGYSVARVNPARTRFAAASDLERTKTDAVDALGIARFAAEKRLQASALPDEKMRQLRELVRWRQRVRDELWDKVRELHRQVDLVFPEFTTYVKGLGSELATALLKKYPTAQAWREVPLRKLAKLCYDDVHRVGPELGQKLKGAAERSVGRHAGEVYEDQVRTLCGDIARLRQRLRDLESKMKDAVDQHELGPLLRSIRGLGDLTVAALLGEVGDPALYRDAGALLAYVGSVPGLRQSGKRQGMRAGISRIGNARLRAALWMPVLSAVRSNPWLKAFYEGLVARGKPRKVALVAAMNKLLRAIYAVARNRRPFVMPAQFQTATVPS

SEQ ID NO: 333618 - protein, 353 aa, unidentified
MMVFVAVDVGKRRCVTCVMDQDGSILDTGSYPNTAFDASHYARQTVEKYGECKAVVESTGNMCMKTYEAFESNGVEVKLANPVKTRAIAEARVKTDKLDSKILAHLLRADLIAECYVPSKDVRLARALLSHRVNITREQTRIKNRIHSLLDKYDLECEYDDIFGAHGMRWLHTLQLNGHDHEILQSLLRQLEFLQDEEEKANSTIAKDALHSQYVPIIMSMTGFDYYGASVLAAYIADISRFPSPSHMVSWVGLCPSVYQTGESLYMGRMKGGSRKVKWIMIQAANTAIRSDHRMKAYYERKLRRHHHNVAVTHVANKMLRIIWHMLRENRLYNERKERLYESKLKRMTHTAQ

SEQ ID NO: 333619 - protein, 386 aa, unidentified
MTHSTNFLLHSVDYDQTLVLAIELSNKSWVLAAQVPGFPQTKAKRTIKPDKNALLAAIDGYRTRAADAGHSVKRTIVTYEAGWCGFWLARLLKAHDIEVHVVQPSSVPVDRRMRRAKSDGIDAELLLRTLLAWLRGEPRVCSMVPVPDEADEDARRCVRERSELVCERVGLVNRIGAVLATLGASDYNPLLQSRRRRLADLRTGLGDPIPPNALAKIERLLTRLELVLAQITELELDRDAVVETDAPDQAGKMIQQLTRLRGIGVQSATVLVREAFVRHFANGKALGSYAGLSPTPYSSGGIDREQGIGKAGNRRLRTVMVELAWLWQRYQPGSAQVLWFRERVGATGRRVRKVMVVALARKLLIALWRFVIDGVMPEGVIMKPSI

SEQ ID NO: 333620 - protein, 382 aa, unidentified
MHVVHPRSCGLDVHKRIIVACLILLAADGTLTKETRTFKTMTADLLALCDWLTANGVTHVAMESTGSYWKPVWNVLEGKFELVLVNAQQIKALPGHKTDVQDCEWIAELLRHGLLRGSFVPDREQRELRELTRYRTSLIEERSAEVNRLQKTLEGANIKLASVATDVMGKSGREILEALVAGAMDAQAMSDLARGKLRQKLPLLMEALRGQMGPHQRFMLAQQLGHIDDLDETIDRLDAEIEERLSPFQELITRLDVIPGVGKRIAQVIIAEVGADLSRFATAGHVASWAGMCPGNNESAGKRHSGKTRKGNRALRVALVEAAQAAGRTRNTYLSAQYHRLAARRGKNKAAVAVGHTILVIVYHLIGQQGELLSRPGIPLLR

SEQ ID NO: 333621 - protein, 363 aa, unidentified
MMVIGVDTHKSSHAMAAVAADTGLLTSEREIAASDDGHRAALSWARELDPERVWAIEDCRHVSRRLEQALITAGERVIRVPPKMMGQSRRSERESGKSDQIDARAVARAVLREGVERFPAAFLDERALAIRLLADHRSDLIAERTRQINRLRWHLVDLCPELEADIPARRLDNAPALDRIARRLRRQERTARTRVALELVASIRAISRQTNGLQRELRSLIMIYRPALLAEQGLGVLTAATLIGRTAGAERFPTDAHFARQAGVAPVPVSSGRTDRHRLDRGGDRQLNRALHVIAITRARIDPETRAYLQRKRSEGKTNREALRCLKRHLARHVHRLLLVPPTNPDQRTRVHLNAAISVPCLT

SEQ ID NO: 333622 - protein, 370 aa, unidentified
MIRLARAMQYLINTELSSHEETRFDFHRSTGAIKLGIDVHQDFYVVVEQVEGGNPKPPQRFDKQAFLHWASKLKQRGAEVHAVYEACGFGFSLQRNLTALGIKCHVVCPQKLDERNKRVKTDGLDAKALCLKLDRFVQGNRDALALVRVPTEEEERSRAIHRQREQLVGARKRLEAQGRSLMVNHGVDPVQNWWKPRTFATLPVPHWMRELLLNSQPILLALQEKIAVLTLQLQNAAAPNQPRGLGKMTSVVIDREIGDWHRFNNRRQIASYTGLCPGEYSSGNTRLQSCVTKHGNPRLRAALVELAWRLVRFQPNYKPIVKWRQILAKGALATGAARKKAIVAVARQLAVDLWRIKTGRLRAQELGLIN

SEQ ID NO: 333623 - protein, 344 aa, unidentified
MAKISMIGLDLAKNVFQVHGIDAEGKVVLRRQLRRGQMEKFFAQLPATVVGMEACGGAHHWARVFQKLGHEVRIMPPSYVKPYVKRNKNDGRDAEGVCEAMGRPTMRFVPVKSPDNQAIQVMHRTRRLLVRQRTMSANALRSALAEFGIVAAKGPKGLRSLMHVLDDPASTIPEKARMPLQVLARQWERQNTDICKLEGQIVRAAKTDEVARRLMAIPGLGPLGATAILAAVPNARMFKTGRDFAAWLGLTPRQLGTGGKQRSGHISKQGDRTLRSLLTIGATSHLRCQRACGCKDPWLRDLLARRPFKVAAVAYAAKMARIIWAMLVTGESYRARSASKLAAA

SEQ ID NO: 333624 - protein, 311 aa, unidentified
MNAQDCFIGLDVSKDTLEVAVRPTEERNTFANQEDGLSLMIDFIKPFSPRLIVLEATGGLEKAAVCACAVEGLPVVVVNPRQVRDFAKAKGILAKTDKIDAGVIAQFAEAIRPELRPLKAEEAQKLDALLSRRRQILQMLTAEKNRLQSAPVWTRKDIQKHIAWLQKELDQFNQDLDRMVKESPIWRAKDEILQSVKGVGPVLSVTLISQLPELGALKGKKIAALVGVAPLNRDSGKYRGRRTIWGGRAEVRSVLLMATRIAIRFNPVIRAFFERLKKAGKIRKVAETACMRKLLTILNAMMKNNTRWQPE

SEQ ID NO: 333625 - protein, 346 aa, unidentified
MKIAIAVLGIDLGKNVCSVVGLDTSGAVVLRRRVRRDTLIDLTAKLPACIVGMEACCGAHHLGRLLAAQGHGVRLMSPEYVRPYVKAQKNDDRDAEGIAEAATRPTMRFVELKTVDQLDMQTLHRSRERLVGERTALINQLRAILLERGIVAPQGKRKLEQYLVALMDEHDGEGLSARMRMLVTDTRAQWRELDRRIVSFDAEFARWAKENEDARRLATIPGVGVTISTALIAAVGKAETFEHARDLAAWLGLVPRQSTTGGKPRLMGISKRGNKYLRTLLIHGARAALPHLAEKETTLGRWAKNLLSRVHQNVAVVALANKLARICWAILRSGQKFTTKGAPLAV

SEQ ID NO: 333626 - protein, 415 aa, unidentified
MHTFEELTHFAGFDWAKEHHDAVIVDRQGATVQSMTFAHTAEGWAQWREMIKAYPALGVAIETNQGAAVEQLLQSQVTVYPMQPKAAERYRDRHVPSGSKTDQTDAWCFADALRVDGQHWRPLAPEDALTEELRLLCRDEVELITQRTALVNQLQQALYEYYPAALEAFGDWTAPYAWEFVLAFPTAQQLVKAGKRKWEKFLHTHKLWRPETAPKRLEIFVRADQFCGSETVTRAKSRLAVSTAQVLRTLEKQLEEYRRAIEKLFAQHPDHDLFGSLPGAGAKLAPRLLSEIGSDREQYPDGQGLQCVAGTAPVSFESGKIRRAKIRWHCNRHLRHAVHLWADCSRKFCAWAGTYYQAQRDNGKSHACALRCLGQRWLKILWKMWQSRQPYDETIHALNQQKHGSWLLQLKPKTS

SEQ ID NO: 333627 - protein, 358 aa, unidentified
MEKLYLGVDLHKRSCWVTVLDADGHRLESRRIGTEKWELLEFFGQVRKPAALAVEATLNWYYFLNVVEPLGLELHLVHPLKTRAIASARIKHDRLDSRVLAELLRTGFLAEAWIAPRRVREERQLLRYRVHTVQWATRAKNSIHGVLNRNGIRSPFATPFGVKGRSFLEEVELARTDRWEVDGQLERLDLLGEQLAALDREIRKKAKASPVARALEQVPGIGPFIASLVIAEVGDIRRFPTAKHLVSYTGLAPSLYASGEHRWGGPITKQGSSVLRWALVQAAHRAALNPRFYGFYQRQRERHGSSRAAVALARKLAVIVFYRWRHALHVAERLPQVERVRERTSGGAWSEHRPSTCD

SEQ ID NO: 333628 - protein, 348 aa, unidentified
MKIIGCDFHPSWQQVAWLDAETGETGESKLVNGDGEAERFYRSLAEPALVGVEACGNSQWFIELLQQLGHEVWVGDATQIRASYVRQQKTDKRDAAHILRLLLEDRFPKLWMPSAEQRDVRQLLIHRHKLVEIRTRVKNGLQHLAMNRGMQKKSRLWSAAGQQALRELPLPGWAGRRRQDLLGLLKSLDQQIGELDQAAEETAQRDKMAHLLMTQPGVGPITALAFVVTLGDVSRFRRGKQVASYLGLIPRERSSGGRQRLGAISKQGNRFVRMLLVEAAHSANRVDESFRKTYQQRCHRMAKGVAKVAAARKLAVRLYWMLRTNTAYPEIVRIENSPRVPLVVRHGG

SEQ ID NO: 333629 - protein, 356 aa, unidentified
MNSTKYIGMDVHKEATTIAVMNAAGKLVMESIAETKAATIVQFLEGLRGELYVTFEEGTWAAWLYDLLKPYVTKVVVCNPRKNALLKTGNKSDRIDARKLAELLRAGLLSPVYHGETGLRTLKELSRSYLAISKDLTRTMNRIKALYRSWSIPCGGVSVYAPRHRAEWLSKITEPGVRRRAELFYQQLDGLQKLRQQARCDLLAESRKHGAANLLQRIPYIGPIRSALLIALMQTPHRFRTKRQLWAYSGLALETHSSGEYHYVQGQLQRSKRPIALRGLNQNHNHDLKSIFKGAATKAGSAKGPFHDFYTGLVAKGMKPTMARLTLARKIATITLLVWKKGVCFDAQQLKRQVSV

SEQ ID NO: 333630 - protein, 344 aa, unidentified
MSKVSTIGLDIAKSVFQVHGVDVAGAVVIRKRVSRAKVLEYFGELPPCLVGIEACPSAHHWGRELQALGHMVRLIPPSYVKAYLKRSKNDANDAAAICEAVTRPSMRFVPIKTKEQQTALMLHRTRQLLVRQRTMLSNALRGHLAELGIVSAKGRNGTAELLRIIADDGDSRIPAAVRDILDVLARQYGAIGIEIASIDKSIMALHRACEASRRLAEIPGIGPIGATALVAEIGDWKTFSSGRSLAAWIGLVPKQHTSGGKDRLGSITKQGNRYLRWLLVAGAMAVIRYARKHGTRKRPWLARLMERRPTKVAAVALANKIARMAWAIMVHGERYKEPKLLPAA

SEQ ID NO: 333631 - protein, 387 aa, unidentified
MIFVGIDIAKKKHFAAAMNSDGQIIFEPFPFDNNIQGFSLLTSKINIFDKKDVIIGMESTAHYAENLIFFLFNLGYKIAIINPIQTSNIRKTNIRKTKTDKIDTYLIIKTLMFNDVRNLTSYDVKTLELKTLCRARRKLVQSCSSVKIMLNTYIDQIFPELHSVFKSGIHTKSCYQLLKEFTTPKAISKAHLTRLTGLLSKASKGHYGKDEAKRLKEVAKTSVGIDNNALVLRVIHAIQQIELITLQITEIEKSIEKSMEEINSVIKTIPGIGSLNGAMIISEIGDINRFETPCKLLAYAGLDPSVIQSGNFTARSTRMSKRGSPTLRYALINAAFNVSLNDETFKKYYELKISQGKSHFNALGHTAHKLVRVIFKLLKENQEFKAS

SEQ ID NO: 333632 - protein, 407 aa, unidentified
MRYYIGVDWADEEDVVWVANDAGDKVLSRSIPHTVAARGEWGRWLRERQAEGIEIWAAIERPHGRIVDFLLDHAVVVYPINPKSLDRARDRFRVGGAKSDPFDAQVLALFLRSDHAQLRPLYPSSEAAQELKGLTRDHRRQVKLQTRLLNQLTVTLKEYYPRALELCEDLTASWARNFLATYPTPAAAAALTKANWQAFARAHRLGATRAAALWEILQQPQLPLPAHVVRIKARLLQALLRELTPTLATVAEYRQAIDDFFAGMPGADIARSLPVGKSGTTVPSVWAELGDNLDRWTSFRDLQGYGGSVPETVRSGKHLVIHFRFACNTTLRAAIHQLAFLSLPHSTWARAYYDSYRERGHTHHEALRALGAKWLKIIFVLWKRQVPYSETHHLANIGRQHLRQKAA

SEQ ID NO: 333633 - protein, 339 aa, unidentified
MNITTIGIDLAKTSFSLVGSDKHGKIVLRKTVNRGKLLSVIAQCPPCLIGLEACSGAHYWAREFEKLGHQVRIIAVKFIEPYRKGGKNDNNDAEAICEAVRRPNIWFVPVKSADQQAELCVHRVRQGVVRERTAWINRVRGLLAEFGVVMPKGRYSVQSAIPAILGDDENGLPELARQMIHDLWLSIQHANDQILGYDRTLARLAREDETAKRLLTIPGVGEQIATGVVASVPDPRLFKNSRQFAAWLGLVPRQYTTGGKIRLGRITKRGDKYLRMCLVHGARAVVAKLGDKQDHVSCWVRDLIERRGYLRAVVALAARNARLIWTLMMKRENYRAIDV

SEQ ID NO: 333634 - protein, 365 aa, unidentified
MEQSTRFVGIDVHGKELVVCRLELSTGELEEGRFPHDGRGLGRLARWAVKGAAGGVQACYEAGQWGFELARKLTELGLPTAVVAPSLIPQRPGKKVKTDRLDAQKLAQYLAGGMLAEVAPPTAAEEAAREVVRSREDARKALHAAQQQLVKLLVRWGYQWPGPGKRWTQQYWAWVKGIRLGERWAQLVLEECCLRVEQRQAELARADRLVEELAASERWREPVGRLRCYHGIDTLTAVGLTTELYGVARFGSAPQAMSFVGLVPGERSSGERQRRGEITKAGNKLVRRLLVEAARHAAGRPRVSAALARRRRGQAADVIVRADRALTRLHQRYWHLVHRGKLPHVAVVAVARELMGFVWAELRAA

SEQ ID NO: 333635 - protein, 366 aa, unidentified
MQKLSTMGVKGNRILQGHQLTIGLDLGDRWSFYCVLNEVGKVLLEQKLPTTPEAMKRTFEKLSRSRIVLETGTHSPWVSRLLTELRHEVIVAHAQKVQLITKSSRKDDRHDARTLARLARIDPELLGPVRHRSAKAQIHLTVIRARAELVSARTALVNAARGLVKSFGQRLPKCGAYQLNEKLAEGLSAELRDVLVPLLREVESLSGRIKEYDERMEKIAKEVYPEVSLLKQVKGVGTQIALTYVLTIEDPYRFPKSREVGCFLGLRPGRRNSGESEPQKKISKEGDRYLRTMLVQGAHYILGPFGEDSDLRRWGLKLAERGGKNAKKRAVVAVARKLAVLLHRLWVGSEVYEPLRNTNRAMGAAA

SEQ ID NO: 333636 - protein, 410 aa, unidentified
MRQYCGIDWATAHHDVAVINDDGKVVARGRVSNDAAGFAALLTLLAEAGDTAENPIPIGIETDRGLFVAALRETGRVIYPINPLAASRYRARYSVSGAKSDATDAVLLANIVRTDPDAHRPLPADTELAQAIRVLARAQQDAVWARQQVGNQIRDLLKDFYPAALVAFAGLTEGGLARADARTVLTAAPTPAQAAKLTPARLRRLLIKAGRKRYLDRDVERLREIFTDTYLHQPPVVENAMGIHLIALLGQFDAACAAADALAEASIAHFERHPDAEIITSFPGLGMLAGARVLAEIGDDRARFADARGLKAFAGSAPITRASGKKTVVLHRHIKNRRLNAVGPIWALASLRASPGARRHFDARRAAGDWNHQAQRHLFNKFLGQLHHCLHTGQLYDEHVAFPPPLQLAA

SEQ ID NO: 333637 - protein, 384 aa, unidentified
MNKHSMIFIGLDTHKEFHEVAYCEEQRGASPVHYGRISSSKVSVKKLLRQFESKYPGSTLHVVYEAGPCGYWIYRLITSLGHCCYVVAPSLIPKKPGERIKTDRRDALKLVRSLKSEDLTPIYVPEPEDEAVRDLSRAREAAMKDLKEAKYQLKALLLRSNIRYEGTANWSKKHLRWLTELILPHPAQQIVLQEQLQTIEERIRRLERLDNELTHHVHQWRYYPVVKAIQAMRGVRLLVAVGVVAELGDLHRFDHPRKLMAYLGLVPSEQSSGGKRHLGAITKAGNGRARRLLIEGAHSYRYPANVSTELQLRQEGLSKDIVDIAWKAQLRLCKRYQRMSKKGKHYNLIITAIAREMAAYIWAIAKEVVLTPVNPKLRLSRVPA

SEQ ID NO: 333638 - protein, 321 aa, unidentified
MHDFHLGIDVAKLKLDCTLRLTTGKFRHKVIQNNQQGFQELSAWLNKQGAAIAHVCMEATGIYWEAVAHYFAQQKFPVSVVNPAQIKAFGASRLVRTKTDKVDARLISEFAFERNPGLWTAPSLAEQALRAMVLRLDALQVMRTQELNRLEVARDAVRQGLVNHIEWLDKEIKSLSRSINDHMNGDPDLKDKQKLLDSVPGLGERTIAVLLSYYADSERFSSVKKAVAFAGLDPEQHESGSSVCRKAKMSKVGHTFIRKALYMPAMVTLHRTTWGKVFQQRLAAAGKPAKLIIGAMMRKLIHVAFGVLKSGKPFDASLHFA

SEQ ID NO: 333639 - protein, 327 aa, unidentified
MVQPVTVGLDIAKNVFHAYGVDAQGEKVFSRKLRRAQIEAFFAKLEPCLIGIEACATAHHWARILKRLGHQVRLIPPAYVKPYVKTQKNDEADAEAICEAVTRPNMRFAEIKTVEQQSVLVLHRTRAVLIKHRTRMANTIRAHLAEFGITESIGREGLSRLIDMITAGEDERITEVTRRAMMPLVEQYRLLQDQILDLDRQVLAWHRSSDVSKRLATIPGIGPLTASALVASVGDASHFKNGRSFAAFIGLVPRQSSTGGKERLGRISKRGDHYLRWLLVVGGGLRLSDTLSVTARGALGCSNYCSVARARLPPLPWPIRWHGSLGC

SEQ ID NO: 333640 - protein, 312 aa, unidentified
MNRIICGVDVSKDWLDAHIAPAGTVGRFRNDAAGIGDLAGFCRTGGVELVVMEASGGYERQPFLLLWQADQPSAIVNARSVRRFAEAMGFLEKTDRIDAAMIAGFAAAKPVRPMPPPAAAQMRLRALVGRLAQITGDITVNKQRRSSTADPEALASLDAVIAFLKVQQRRLEGDIASLIDDDPLWARLAESFRSLKGVAGRTVARLMAELPEIGIVSNKAIAKLAGLAPIANDSGRRTAPRPVRGGRAGPRSVLFLVARLVARYDPHLAAFHQRLQAAGKEKMVIRIALARKLLVILNAKARDARTAAANAT

SEQ ID NO: 333641 - protein, 341 aa, unidentified
MQSTTIAVDLAKSVFEIAISHRPGVVAERKRLSRRRFTSFLTSHDPADVVMEACGTAHFWGRKAQEAGHRVRLLPPGYVRPYVRGNKTDRADTKGILEADRNDGIVPVPVKSVEQQPLTALHRMRSTWVSTRTSRINTLRGVLRELGFLIPLGANRVVPEVWLLLGDADFEVPDIMRPVLAEAAREITSLDQRIKAVEKQLQGIAESSPDIQRLLTIPGIGLLTATALVATLGNVNRFRSARHLSSFLGLTPREKSSGYTRLLGRITKRGDPYLRTLLIHGGRSVLHHAKRLEKPDRLRAWALERERMIGHNKAAIALANKLTRIVWAVWKNETEYQPVPR

SEQ ID NO: 333642 - protein, 339 aa, unidentified
MQVTTIGLDLAKNVFQVHGIDEHGEVAFNRALRRGQVLAFFERLEPCLIGIEACGTSHHWARELIKLGHNVKLIAPAYVKPYVKRGKSDAVDAAAICEAVTRPTMRFVEVKPPEQQAILAVHRTRDLIVRQRTQTINMLRAQLAEFGIVLPRGVYHALQFAKDCMNGEQPGLPKDAEEVVFDLCDQLLFLHSKILHLSRHMTQIAKREKRVALLRTIPGVGPITASAIVATVGSGKQFNNGREFAAWLGLTPLNKSSGGKERLGHISKMGDQYIRRLLVLGMTSRIRSIRSEPEKFDPWFADILSRKPSRVAAIAMANKTARMIWAVLIRNEPYKVRTV

SEQ ID NO: 333643 - protein, 342 aa, unidentified
MSSKQTIGIDTAKRVFFLHGEDARGKVILREKLSRERLVPFLANQPVSLIAIEAGCGAHHWARAFARLGHEVRLIHPKFVRPFVKTNKNDWNDAAAICEAAQRPTMRFVAAKSLEQQDLLVVHRIRARLVAQRTGLCNQIRGLLAEYGIVLPQAISRLRRALPEVLEDAGNELTVRGRELIASLREELCELEERIKPYEQAIERASIDSGTCRRLRTIPGIGPIGATAVVATMGDPKAFKNGRHFAAFLGLVPRQHSSGGKSQLGRISRRGDVYVRRILIQGAHAILKRIDQRDGPRTEWLRALVARRGKQVAAVALANKNARIAWRLLSQETFYAEDLAAA

SEQ ID NO: 333644 - protein, 338 aa, unidentified
MQITTIGLDLAKNVFQVHAVAADGSIICNRSLRRSQLLSFFERTPRCLVGMEACATSHHWARELTALGHDVRLIPPTYVKPYVKRGKSDAVDAEAICEAVTRPSMRFVQPKSREQQAVLCLHRARELIVRQRTQIINAIRSLLAEFGVTIRQGVPQIMSFAKSVTGDDANLPDLAQEVVSNLCHQLLSLEHRVRWYQRRIERHSRSDERARRLLKIPGIGPVTASAIVATVGDASQFRNGRELAAWVGLTPLNRSSGGKELLGRITKMGDRYLRKLLIVGATSRLKSVKSGTDRQDAWVNMLMERKPFRLVSVAMANKTARIVWAVLAKKEEYRHQPA

SEQ ID NO: 333645 - protein, 466 aa, unidentified
MAYKRKNVKSKERKRMPRSLKAIQPNAAGIDLGSREHWVAGPPLEDETPNVECFGTTTPELLRLADWLKEQGVETVAMESTGVYWIPLFEILDSRGFEVVLANARQIRNVPGRKTDIEDCQWVQLLHACGLLRGSFRPSDDICQLRALIRERNTMVEQRADWVRRMQKCLDQMNVCVHQAVSDITGVTGMAIIRAIMDGERDPHALARLRDRRCRKSEAQIAENLTGNWRAEHLFNLRQALKMYDQLCAVIADYDSEILSYITTLQPADTSDESAPPPASKSKAKNLVKRGQEPMRQGLYRLCGFDMTTIDGIGVDTATVIVSELGLDFTVFPNENHFVSYLRLAPNLSISAGKKVPKKSKASTCTRVATALRMSALTLRNSKTALGGYYRRVAWRKGASVAVFATARKLAQLIYRLIRYGQAYVDTGVEAYEARFNQRRLKSYTKALNAMGYNVEPLKTKEAILA

SEQ ID NO: 333646 - protein, 313 aa, unidentified
MKREEVFIGIDVSKKLLDVCVLPVEFAFKAENHQKGIDRLIERLGDYKGALVVLEATGGLQIKVCGALCEAGFSVAVVNPRQVRDFAKAMGILAKTDRIDAAVLARFAQKVRPEPRPLKDKQTLYLSELMTRRRQLIGMMTMEKNRMGAVGKAMKHRIAANLDWLNRQLSELDDEMDDFIKGSPMWRAKEDLLKSVPGVGKVLARTLLSSLSELGSLNRKKVAALVGVAPLNRDSGTFRGRRGCWGGRAAVRNALYMATLSALRFNPVIKAHYQKLRERGKVFKVAMVACMRKLLVLLNAMVRDNKPWSPISA

SEQ ID NO: 333647 - protein, 316 aa, unidentified
MGTVMNQTSSSVYIGIDVSGSTLDVAIHDTTEHFSVDNETTAIDQLVQRLIALNPTLIVMEATGKLELAVLKALCQAGLPAVAVNPRQVRNFAKATGKHAKTDRIDAFVIAHFGAVIQPVVRPLNDVQTEQLQALLLRRAQLIDMLVAEKARLERAHAAAKESLNDHIKWLKQQLTVADNDIDSFMRSSPAWRQKEDLLRSVPGIGPGAAATLIAFMPQLGSLNRREIAALTGVAPFNCDSGKHHGKRRIQGGRAIVRRALYMACIPALRFNPVIRAFYDRLRKAGKPFKVAITACIRKLIVTLNAMVHNSTPWRP

SEQ ID NO: 333648 - protein, 336 aa, unidentified
MDTICAAVGIDVSKKKLDIALLVNGKTKTKVLGNCAEGHRALVDWLNKSKVPLSAMHVCMEATGVYSEPVALALHQAGLVVSVVNPACIKGFGHSENIRNKNDAIDAGLIARYCAAMKPSPWTPPPLEQRQLRAWSVRIQALKDIRQQEQNRLEALSISGLDEVAQHVRQHIAWLSAEIEKLEGDINDHIDRHPGLKHDADLLTTIPGVGMTTVAKILGHLGDIRRFDSAKAFAAFLGVTPKQRSSGSSVKGRTTISRTGNTSLRAALFMPSLVARRRNPILHQFAERLAATGMARKAVIGAVMHKLAHLIYGVIRNDKPFDPNYLSKGLVIQDGI

SEQ ID NO: 333649 - protein, 328 aa, unidentified
MGAVSVGIDVSKRELVIAVAPTGQQWTASTTPAAIATVVARVRALTPQIVVVEATGGYERALVAALAVAELPVAVVNPRQVRAFAQAIGRTAKTDEVDAGLLAGFGRRLEPAPRPLADPVTQTLAALVARRRQLLEMIGMERGRLEHAPPTGPLTRELRHHIRWLERRVEKTDDEIGTSIAAHPTWRVQDELLRSVPGVGPTTARTLLGELPELGRLDRRAIAALVGVAPFNCDSGQHRGQRHIWGGRASVRSAIYMAALTAARYNPVLHAFYHRLRAAGKPAKVALVATMRKLLTILNAIIKHQSPWTTQVASTPASLSRPARAATV

SEQ ID NO: 333650 - protein, 480 aa, unidentified
MNPIFRRCCGIDVHKDSVMVCVLAPVGQPRMGVKKRKFRTFTRDLKQMRAWLKNCKVTEVAMESTGQYWRPLWNLLEGHFAKLILVNPQHIKGLNGYKTDPKDAQWIADLLEGGKVKGSWVPPRPIRELRDLTRHRVNLMADLNRAKNRIEQLCQTGNIKVSSVATDLFGVSGRQMLKDLVEGEKDAGWMADCAKGRLQGKKRELTLALEGTFSVEQRWLLRKELRQVEWLEEQIEALEQEIERRVVDFEEPIRRLVTIPGIDRKTAWTIVAEVGIDMSVYGDAQHLASWAGLCPGNRESGGKRMSGRTRKSHRYVKRAMCQAAWAASHTKQTYLSAFYRRMCIRKGAPKAVMALAHHMLVVIYQILSRGEEYVEMGHDYYDRRNQPKTVLGLVKRLQNLGYEVVIHRAATPSAPEPTPLECDNDAAPETLEEVAEASRPAAQPKRRRGRPCKCEERGIICQHGTRGEVNPLPQQELAAD

SEQ ID NO: 333651 - protein, 378 aa, unidentified
MRVRASAAQAGQLVAWAADWPERTWAVEGAGGLGHLLAQQLVAAGERVLDVQPKLGARVRLLTAGDTNKNDPNDARSVAVAALRSAARREVSADDHAAVLKVWSKRHRDLGRTRTQIACRLHAVLCELTPGGFSKEITAAQATRVLAAVQPAGAVGTARCELAAEFLVDLRRIDAQMRDTRKRLNAAVKASGTTVTEIFGVGPVIAAIAIGCVVDASRFASRDHFASYNGTAPIEVSSGNRKIHRLSRRGNRRLNHAIHMAAVTQIRHRHSDGRAYYDRKLAEGKTSKEALRSLKRRVSDAIFARLQADVRRAAAAPAIEGPGGQPGNDSVASAAGLHPGHRLFGQATPGPGSTLRPATARKYTVTPKGTPENTQKTP

SEQ ID NO: 333652 - protein, 443 aa, unidentified
MAELVNGKAPEPDFAAFVGIDWADQKHYWKLVVAGTQASETGELKQTPEELSIWAAALQHRFSGQPVAVALEQSSGALVYQLSQYPHLWLYPVHPATAAHYRQAFYPSGSKSDPADAGLLLELVVHHRDRLRRLAPDTPETRLLRMLVEQRRQVVDEKTRWNNRLKAALKMYFPQVLDWVDVDTIMGCDLLERWPTLQQLQRAHPGTLRKFFREHNCRSESLITERIAAICQAMPAVQDAALLEGEAAIAATCIAQIRTLLASIAKLDHQIEPLSSQHPEASLFAELPGAGAALKPRLMVAFGTQRDRYANAGELQAYSGIAPITESSGHSRWVHVRWACPTFLRQTFHEFATCSISRSEWARVFYDTKIAAGKSHHAAVRALAYKWIRVLFRCWKDGRPYDERTYLQTLAERNSPLNWGAGASTKPVWKTVGGFKKLSTENS

SEQ ID NO: 333653 - protein, 347 aa, unidentified
MKRYYLGVDWDWGDEMHAVWVSDKAGKKVAEMEVKQTLEGMSGFGRWLYERKGEGIELWAAIERPEGRIVDFLLDHEVVVYPINPKALDRVRDRFRMSQSKSDPFDAWVLAEFLRTDHAHLMALLPNSEKAQELKMMTRDHHRLGRHQTRLLNQLTATLKEYYPRPLEVFGNLSSQVALDFLPGYPTPRALCELKQKRWRNFARLHRLREARTGELWEELKSPQLPIPEHVVRAKAWLVRVLVEQLGVAVRAVEEYREEVERFFASMPAAELTKKLPGGKSGTTLPALWAELGDAQGRWESFKHLQAQAGTVPVTKRSGKSQIVCYRFACNKHMRYAVYWLAFVALR

SEQ ID NO: 333654 - protein, 317 aa, unidentified
MAKRVEKITLGIDVAKDTGVVHVWETTQTRDVPNQSEAIVAYLKSLQGPVRIAIESTSNYHRRWVELALARGFEVYLINPRQLAHYREVVNQRNKTDPADAWLLARFLAHEAEQLRPCQPQDAHAQALWALLKRRAKVVEARKQLQLSFREIQLSAQALFTQFARLLARIDQRIQHAIQTLGWNDDYQRCLTIPGIGPLNAAALVAAYHRGVFASSDAFVAFIGIDVRMRESGGYKGKRKLTKRGEAEIRRLLYCATQPAASYPPFKAYYQQQIDKGLSKIAAKVILARKLARIAFALMRNQTLFIKTQEKTLAYVP

SEQ ID NO: 333655 - protein, 356 aa, unidentified
MKYLGIDVHVTTSVWCLVDASGAVLERGKTATTTPELTALVQRLGEDDELLAGQEVGKLSYFVHDTLTAAGVKLLSFNAHHLRMISSSRKKNDRRDSYWIARALQSGMMPHPVYIPTGDVRLVRSLLSQRQALLVERRRWLARARSYLQAAGYKTRVVRTVPRLIESAISQPDGLDEHLAQSLDLCARMENTAALELNRAEQRLWALNKQNDAIQRLKTIPAVGDLVAAMLYAWIGDVTRFPSASDLASYAGLVPSSWQSADSCHTGRITKEGTPQLRSILVQAGHVLLFRCQSAEAAPLKSIAMRVHTNRARRKIAVVAAARHILRLAYYILRDGSQYDPQLLHSATKEVQQPAA

SEQ ID NO: 333656 - protein, 365 aa, unidentified
MSNVTLFGGVDYHQDQLQVCLLDPSAKQIINRSIVNDVDAVAELLRRSGQVQAVAIEACCGAASFGEQLAAKGPWRVELAHAGYVAKLKQSPDKSDYSDGRLLADLTRVGYLPRVWLAPPAVRDLRQLVHHRQRLVDQRRALKLRVGGLLREQRVKLQGPRWGKRWVAQAQDHDALSPAARWLMNDLLEEIEHVTAKLGKTEQRLREACDADAAITKLIQRLRSIEGVGEVTAWMLAAWVGRFDRFKTGKQLSRYCGLSPRNASSGKRVADAGLIDAANPQLRAVLIQAGHRLIRTDQRWGKLAQRLLAQGKPRCVVVAAVANRWVRSMHHRMIDAPRTIDAPPEDRCTPGRIDLNHQRIDEPQP

SEQ ID NO: 333657 - protein, 447 aa, unidentified
MKSNTQNAKIEAITEKTLVLGIDVGSETHYARAFDYRGVEYSKKPFKFSNTEAGFVTFKAWVLDIKEKHGKDKVIPGMEPTGHYWFNLGKFLQDNEMKPVLVNPHHVKKSKELDDNHPTKNDRKDPKVIAGLVREGRYMIPYLPDGVYADLRTASNIRFQLQAELTRIQNRINRWFNIYFPEYKTVYGKPDAKSGILILKEAPLPEDILTLGIDGVNQIWRDAKLRAVGKARAKTLIEAAEHSVGSKEGAVSARMEIRMLLEDYESRNIRLQEVMGLIEGLVNQIPMAEKLLEIKGVGIKTVSGFLAEVGDIRRFNDPKELQKLAGLALVENSSGKHKGKTTISRRGRKRLRYLLFEVAMSLVAKNPEFRELHNYYTTRRLNPLKKMQSLMAIAAKLLRVFYAILTKGVGYDPKKMVNDIRRPAAYAQAAQEKQVTIVEAVIWAATE

SEQ ID NO: 333658 - protein, 335 aa, unidentified
MKWNYYVGIDVSKNYLDYAFLKGSVVIVNGRTDNNEQGIISLINQLKKEEDFSLEQCLFCMEHTGIYNNPFIHFLQDNNINICLESARHIKLSGGLQRGKNDQVDALRIAQYAHRNRDSIKLWQPKRSVLIELGSLSTLRRRLLGVLQELKTPLKAEKDFILKSIYNKQIKLCSTSIKAIEKDINKVEKEISQLIKKDETLNHLFNIITSIDGIGEVTAVEIILTTNEFKGINEAKKFACYSGVAPFEYSSGKSIRGKTKVSPMANKTMKSLLHMAALSSITMKGEMRIYFDRKVAEGKNKMLIINAIRNKLIHRIFACVNQNRKYEKIYTNALA

SEQ ID NO: 333659 - protein, 372 aa, unidentified
MNYNTVYVGMDVHKESFTLCSCKYEDEKASHYQRTPASYKNVLRYLAFLRTIYGEDTRFVCGYEAGCLGYSLYHQLENFNVECVILAPTTMLEQRSKRRIKTDKRDAEIIARSLAQHNYSPVHIPTETDNQTKEFIRMRDDHKAELKKIKQQILSFCLRQGYQYDGSGNWTAKHVKWLRSLKPAGLYKEILDEYLLTYTILTDKLNRLDQRIEELASKEEYKESVSKLTCFLGIKTHTALSVIVEVGDFQRFVSARKFAGYLGLVPGQHSSGDDRNGLGITKAGNTHVRRLLVESAQSYTRGKIGYKSRVLRSRQSGNSPQVINYADRANERLRRRYYKMVLKDGKKYNIAKTAVARELACFIWGMMTDNIY

SEQ ID NO: 333660 - protein, 358 aa, unidentified
MKTESTKIDFSGQNVYTGIDVHLKSWKVTIMVNDREHKTYSQDPSAELLWNHLRKNFPGAKYYSAYEAGFCGFSAHRELEGFGIHNIVVNPADIPTTDKEKQQKEDKRDSRKIAKSLKNGELTGIYVPGKEMEELRGLIRYRKTLVKEISRHKNRIKSFLHFNGIKIPFELEGPSKHWSGRFTQWLKEVEPSTIHGKMVIEDTLDTAETLRKKLLKVNRHLRQINKEGIYAAKLRLLQSIPGIGLISSITLLTETEDILRFKNLDQLCSFVGLVPSTNSSGEKEKVGRITRRSNRFLRDIIIEAAWMASRLDPSLAYSYGQLCKRMEPNEAIIRIAKKLLNRIRYVMKNETEYVHSVI

SEQ ID NO: 333661 - protein, 343 aa, unidentified
MNQYIGLDVSLKDTAISIREDGKRIWRGKCPSDPKLLAETIRKHAPHARRVVFETGPLSTWFYHALTNEGFPAICIEARHAQKVLNETLNKTDANDADGLAQLAEAGFYKAVRVKSFDAMTTRALVAARDKLVHISTQLGNQIRGVMKTFGLIVPEGKGRIFDGNVRELLAGNDNLARIILPLLDAWRDIRKRAAILDRQLLAAARQSQSTMLLTTIPGIGAITAISYVAAIEHPQNFRTSRSIGAWLGLTTRRYQSGEVDYDGHISRRGDNHLRALLYEAATVMLTRTGARTESRLKDWGLKLRERLGFKRAAVAVARKLAVIMHTMLKTGEIFNPSASAIV

SEQ ID NO: 333662 - protein, 427 aa, unidentified
MNNLTGGEYTAFIGIDWADTKHDICLQAADSNHREFDCIPHQVDDIEQWALALRQRFGGPIAIALELSKGPIVYALQKYDFLVLFPVNPSTLAKYREAFTPSRAKDDPTDAELALDLLLRHPDRFQPLAPQSVELRALATLVEQRRGLVNDRVRITNRLRNTLKQYYPQVLEWFDRINTPLFCDFITRWPTLEQVKRARKSTLERFFRQHSMRRPQVLENRYQAIKAATPLTRDAAVVTPHRLHTLVLAEQLSVTLQAIHRYDQEIAQLAPQHPDYELFSALPGAGPSLAPRLLVAFGEQRERFTSAAEMQKYSGVAPVTERSGRKHWVHWRWQCPTFLRQTFVEWAAQTVNKSFWAGAYYRQQKAKGCSHQAAVRALAFKWIRILYRCWQAGTNALRRTDVPGSVASAWFSAAQPVGCSGGKCLTE

SEQ ID NO: 333663 - protein, 335 aa, unidentified
MMLKTTMVGIDVAKATVEVAFDLSGIRQTFTNDEAGWEVLIGELDSWVVELIVMEATGGLERKLAVALQAAGFSVAVVNPRQARHFAIAMGNVAKTDRIDALALAELAYALAIRPDRDRFIRPLSSAGEQELLALIARRRQLVTMAAAEHQRRTTSHGVACESVEAVIATLQQQIEGIGQQVDAMVKGQYGELSRQLTSVPGIGPVVTAMLIAQVPGLGKLSRRRISALVGVAPMNRDSGGSRRRRTISGGRADLRRGLFMAALAAIRCNPVIRVFYERLVAARKPKKVAIVACMRKLLTIANAMVRTKTMWDETVPLTFRKSPPPMGFKVVIPA

SEQ ID NO: 333664 - protein, 344 aa, unidentified
MNQITRIGMDTSKHIFQLHGVDAAEQPLLRRKLKRSELVAFFAKLPPTVIGIEACGAAHYWARVLTGLGHQVKIMAPQLVKPYVKRNKNDGRDAEGLCEAMSRPTMRFVPTKTPDQQAALMLVGTRERLVARRTQISNAIRGYAAEFGLTAAKGLDKIEPLLASIAADETLPALARELFAMQGGEYAQLQAELKKIEARLKAWHRANADSRRLAEIPGIAVIGATALVMKAPHPHLFASGRDFAAWIGLTPKDHSTAGKTRLGKITRAGDEMLRSILVAGATAVIQQVIRGRGRPWPWLLALLARKSPKLAAVALANKMARIAWKLLVTGESYRAAHLPSAKAA

SEQ ID NO: 333665 - protein, 317 aa, unidentified
MYCIGIDVSKQELVTYDGERRRTFPNTADLEELAAFLKKKDGEVTVVFEPTSTYSRPLELLCRTRKVRCWCLNPRVIPHLREVSQGRLKTDRTDAELLWQYGQDHGPGQLLEEDNLGRALKASLSCYAQAQKARIACQELLEALSHDPTTPTGLIEDLREETKRLKAREKRELAHAQALIEKDERARKGFASLFEIPGIGGLTATVLVALFRRYPGTNRKEIAALVGMDPAEHRSGSSVHGRARIEKPGDGFVRKTLYEATLAAVRYNPAVRALYERLKAKGKPEKAARIAAARKLLFAHAVYHSGQPYQTLEPSGG

SEQ ID NO: 333666 - protein, 423 aa, unidentified
MGKTIPICCGVDVHKKFLVATILTGDYLIPQCKQKHFGTSFRNLLAFKQWLLDNNCKDVCMESTGKYWVPVWNVLEGIVNVVIANPKWVSAVKGNKDDKKDSKWIGNLFRMGLVPSSYIPGKDIRILREFTRYRSKLVSMRASEKNRYQNAFTVCNLTLDAVVSDMFGKSAMAIENYLLDTDVVDPEFCVSLLQKKLKKKSAEIIEAVEGFNMTQEQKERVRIIQGHFADIDKRISQIDEIIGRLTAEYEGTISLLCTIPGIDRRLAITIISEIGTDMSEFGSSRRLCSWAGLVPGNNQSAGKKKSVRITRAGVYLKPALVEAAHAAVKATEKSPYFRIKYEKIMKRRGKKRAIIAIARMILTSIYAMVSTGEVFNPSDLLKYDMPEELLKKRTLAEAKDAVKLLVSLGLVAEGSISLEALAS

SEQ ID NO: 333667 - protein, 438 aa, unidentified
MSNKVIFNLDELFISVGIDVGADFSWMSIALPNQQFVGKPYKILHNSIDSLTTAVSKIKEAEELYSLESRIFLESTGIYHYPLFCYLRDKGFNCSVINPIITKNSTNINIRKVHNDRFDSKKAALVGLKPDLKVSLMPSDLALNCRNLCREYYDLMDNRSAYVNKLQGELRIAFPQYLGIFSKVTINTSLTLLETYTSPSAFLKADKQEIIDIIKSTARFGLTYAQNKYNAIIQAATDANQFGYIIDSNIKRIRLYISFIRKYDEEINSILESLHELVDANEDADFVKQIHLIETFKGAGFLSAVSIMGEIGDFSAFSKPKQLFAYFGLDPAVKQSGKFEGTKVQMSKRGSAIARRVIHTLTLQSISISRNREAKNPVLREYYLKKCDSKPKLVAMGAVSHKVCNMIFAILRDNKPFKIIAPQEHIKQYNSAKCDIAA

SEQ ID NO: 333668 - protein, 351 aa, unidentified
MSHKTAATVVHTIGIDTGKNTLHLIGLDDQGAIVLREKIARGRIAARLANVPRCLIGIEAGMATHYVARELGALGHDVKQVPPAYSKPFRQGHKNDFRDAHAIAEAVQRPSTRCVPVKTDDQLDLQALHRVRSRLVGQRTAVINQIRGFLLEHGIAVRQGLRFLRQQLPDILAKRSDVLSPRMIRIMEDLSGDWRRLDERIEHITKEIEVLAATDVNCGQLMTVPGIGPIVASATVAAIGNGAAFARGRDFAAWLGLVPKQMSTGDRTILGRITKRGNRYLRMLFVQGARAILLRPKSWVKHSFGPWLTTAARRLHRNILTIALANKLARIALSVLIQGRSYETRIVPAAA

SEQ ID NO: 333669 - protein, 357 aa, unidentified
MEYIAFDAHKRYTLASVERLSGGQLCEQRVAHERGSIRQFLSQWGSGSPVAVETVGNWYWIVDEIEEAGMVPQLVHARKAKLMLSMVNKTDKLDARALNRLQRCGTLPTVWIPSRELRDQRELPRTRMVFSQSRTRLKNRIHATLAKYALSVEGVSDLFGKKGRELLQRLLEQLPPHTRFATESLLEQLDTVEKHIQRFEGRIREVFAPTPELALVMSLPGVGFILGIVILLEIGKVERFASAEYLASYCGTTPRVHASGGKIHYGQVRQDVNRYLKWAFMEAANIVCLNHRRYPQRHVHRLYERLAHRKGHQKAIGAVARHLAEATYWILKKGEPYREPPTRKKGFVHGRISASAS

SEQ ID NO: 333670 - protein, 343 aa, unidentified
MQITTIGLDLAKSVFQVHGIDATGQVVVRKSLRRSQMLPFFAKLPSCLVGMEACGTSHHWARELIKLGHEVRLMPPAYVKPYVKRGKTDAADAEAVCEAVTRPTMRFVPVKSSEQQAALSIHRARDLLVKQRTQLVNMIRGLLAEFGVDIPKGLERALLMARQIVDGKAPDVPIEAAKIVGTLSQQALDTHVRLREIDRNLAIWLRGNDVARRLMTIPGIGPIGATALAASVTDPHQFRSGRQFAAWLGLTPLQKSSGGKERLGRITKMGDKYLRKLLVVGMTALVRRARQNPEGDPRLADLLARKPTRVATVAMANKTARIIWAIMTRGETYHAGHRPALAA

SEQ ID NO: 333671 - protein, 338 aa, unidentified
MNDLIRIGMDTSKSVFVLHGVDAAEQPVLRKKLRRRQVVEFFATLSPTRVGIEACGAAHYWGRELTALGHEVCLLAPQDVKPYVRRNKNDAADAEAICEAMSRPRMRFVPVKTAEQQAALMLAGVRDQLVRRRTQLSNSIRGYAAEFGLVAAKGHDKIEPLLARIAADETLPALARELFAGLEQDYALVTRQLCKIDARLMAWHRQNELSWRLAEIPTVGPIGASLLAMKVPNPRAFRSGRDFAAWIGLTPKDHSTAGKQRLGVITRAGDEQLRRVLVVGATAVLQQVRRGRGHPSPWVSALIKRKSPKLAAVALANKTARIVWKLMVSGQHYHRASA

SEQ ID NO: 333672 - protein, 365 aa, unidentified
MNKCHSNTELSSHEETRCQFNGGTGAIKLGIDVHQDFYVVVEQVGGSNPKPPQRFGKAAFLHWAAKLKQRGAEVHAVYEACGFGFTLQRQLSALWIHCHVVCPQKLDEQNRRVKTDGLDAKALCLKLDRFVQGNRDALALVRVPSEKEEQLRAVHRQREQLVKARKQLEAQGRSLMVNHGIEPVKNWWKRCNFAALSVPQWMKELLSNSQPILIGLQEKIAALTLQLQNAATPNQQPRGLGAMSSVIIDREIGDWRRFSNRRQIASYTGLCPGEYSSGNTRLQSCVTKHGNPRLRAALVELAWRLVRFQPNYKPIVKWRATLAKGALATGAARKKAIVAVARQLAVDLWRIKTGRLRAAELGLIN

SEQ ID NO: 333673 - protein, 304 aa, unidentified
MEYIAFDAHKHYTLASVVRPDGQLVREERIEHARGSLREFLERCERGSPVAVETIGNWYWIVDEIEAAGCVPKLVHARKAKLMMGEINKTDRLDVRGLNRLQQNGTLPTVWIPPGALRDQRDLPRTRVVLVRQRTQLKNRIHATLAKYALHDAEVSDIFGVRGRALLRQRLALLPPHTAYASQQLLEQVESLDRQVRAFEDRIQAAFKPTPAIQLLLTMPGVGLTLAVVIALEVGEVTRFATAEKLAAYAGTTPRVHASGGKTRFGPSRPDVNRYLKWCPSPKRRPTRSGAFEIHRQDAEPGWR

SEQ ID NO: 333674 - protein, 344 aa, unidentified
MLYVGLDLSRKRLDFDARLTSGELFERGAVPPDADGLAGLVRRLRDTEVLAVIESMNGARFVHDRLELAGWDVRIADALKAKGLAPLACKTDKIDAWVLAELGRLSLIPEIWLPDPAVRAERERARFRLHLVRHRTALKNRVHAILIAHGIPSPSSDLFGAGGRRLLERLALPEPWQSTTAASLALIDTLDEQIDACERELRRLGADHPYVPLLITCPGIAWILAFTIASEIGDIARFRTPAKLIGYTGLTPKVEQSGESDRRGPLRKNGPNHLRWALVEAAHTASRHPLYQPTVERNRARHGRKRGSKLAALTIARKLTEAIWHMLTNDQPFAPAGARTSLAA

SEQ ID NO: 333675 - protein, 360 aa, unidentified
MIRQRTSVGLDVHARSVFGCGFDRETGEVFERRLTPDHREVGGWIRSLPAPVSVVYEAGPTGFGLARSLTAAGIDCVVAAPSKLVRPSGDRVKTDARDARHLARLLHLGEVVAVTVPSPSQEAARDLVRARDDCRGDLMAARNRLSHLLLRHGKVYYGGPAWTGKHELWLRAQRFDDRGLQWVYDAVFDAVLAATDRRDRLDAAIAEMAADSEFSPVITRLGCLRGVSTLTAFGLAVKIGDWHRLSGRSIGAYLGLVPTEYSTGTTRCQGGITRTGNSHARRLLIEAAWQHRKPYRPGPALRRRWDVASPAARVRGQAANRRLHNRWVHFDQRNKRPVVANAAIARELAGWCWSLAVIDD

SEQ ID NO: 333676 - protein, 475 aa, unidentified
MNLKGTKKKNQVSNANIFEQQELLKKIEVVRENLTASTWHELETKGKFDKNAKLSFICDDMLILGCDVGSETHYLRAIDTRGRELSKSAFSFSNNVDGFSKAKEWAVKIAAEYDKKQIVLGLEPTGHYWFCLATWMISNGISVVQVNPYAVKQTKELEDNSQLKDDTKDPKLIANLVKDGNFGMPYLPEQLYADLRRLSMFRDQLNEDRIRSINRLHRELKIYFPEYKEALGKTEGTFSLELLKQAPFPDDLAALKEDGIRQIWHNAKLRGRGYSRTGEILEYAKASVGIREGKETGKLVVQWFVQKILELDEELALIETQINQKCLEIPHTDKVLEICGIGENTLSGMMAEMGDISRFDDVKETQKLSGLGLVASSSGKHKGETRISHRGRKRLRYWLFQAAKSAVAHAEEFKKLHVYYTTREQNPLKKMQSLIAIACKLLRIIFTILKKGIKYDPQKMLKDIRRKSRQESLAA

SEQ ID NO: 333677 - protein, 392 aa, unidentified
MYIIGIDIGKNHHKASIVSPKGKQIGHSLCFATTHKGADSLMNFIFKNIGDSPCVFGMEATGHYWYPIYSFLKAKGYTIYVINPIQSDSLRKMYIRQTKNDSIDSFLIAEVIRFGQFSTTSMADENILAMRQLCRYRDSVISSRTEIKLRISTIMEQIFPEYEKQFSSLWLSTSMGILEKYLTPENIQNAPLDGLYGIIKDKSHNRLTMDKALSIKEAAADTFGIKIAQEAFSFQLKQLIDRMHFLDQQIEALDCQILGYYEKFDCYLHTIPGIGMIGAATILAEIGDTKRFKSSSALVAFAGIDPTVRQSGEFNSIHNHMSKRGSPYLRHAIFLAATTCSFHNSPLNAYYKKERDQGKHHLTATGAVARKLTTVIYAVLRDGKPYEPKKFC

SEQ ID NO: 333678 - protein, 457 aa, unidentified
MSQRKRDRKSRELPRVHPAAAAIDIGATMHVAAVGPDRDQEPVRTFRTFTDDLHRLADWFAECGVKTVVMESTGVYWIPVFEILEQRGFEVMVVNARDAKHVPGRKTDVSDAEWLQRLHEYGLLRPSFRPQAEIAGLRAYLRQRERLQDYAAGHIQHMQKALMQMNLQLHHVVSDITGVTGMAIVRAIVAGERDPTVLASHRDRRCHASVETVCQALIGNYREEHVFALTQALELYEVYQTKVMACDKQIEAILTRLRQAAPRPVHKLPPARRRGDQKNAPTFDARAALHAILGVDLTQINGLGPYLALKLVGECGTNLAAWPTAKHFTSWLGLAPHNKISGGKVLSSKTRRTDNRAASLLRLAAGTLGRTDTALGAFYRRLSARIGKAKAITATARKIATLFYNTLRHGMAYTDPGAGYYEDRYRERVLRNLRRRAKSLGFVLVEPDPHAGQVVVS

SEQ ID NO: 333679 - protein, 338 aa, unidentified
MLCYAGIDLHATNSVLVVIDEEDRMLYQRRLRNDLALILSALERYQTTVQGVVVESTYNWYWLVDGLMDAGYRVHLAHAPALPQYSGLKHADDQHDARWLAHLLRLGLLPTGYIYPKAERAVRDLLRKRSQLVRHKTMVVLSLQSLLTRLTGSRLSLPRLRQLTPAAVHGLVSFPEQAQSVRSSLTLLQCLEQEIRRIEETVRETGRTQPGYALLQTIPGIGPILAGTILLETGDIRRFATVGHFASYCRCVGSEYVSNGKRKGAGNTKNGNKYLSWAFIEAAHFAIRYEAVIRNYYQRKQARTHPLVALKAVAHKLARACYHMLGKQDPFDLQRAFG

SEQ ID NO: 333680 - protein, 436 aa, unidentified
MAKKAKKVKTAKGAELRIVNPDAAGIDIADGIMQVCVPADRSKDNNRAFGAYTSDLHAISAWLRECGIKTVAMESTGVYWIPLFCRLQEDGLDVVLTNARDVKNITERKTDESDAEWLMLLHQYGLLKASFQPHNDAKRMRTLTRHRDTLSREASSIVLRMQKAMQQMNIKLTLVLSDITGKSGIRIIEAILAGERDPKRLADLADIQCKTPKEEIAKALEGNWEEDLMFVLRQNYDTFKHYCTQLGECDAELEKLMENYRAEVAKVEDTSYSPAKKRRDYKKTRHTVGFDVERKAYEMWGVNVFEIPGISHLTALELMSELGHDFTRKFPSSKQFCCWCNISPNTKISGGKRISSHVPHRRNNVGLIFRSIASSLANAKNQLGNFYRRIRSRAGGKAAVIATAHKVAEIFFAMVANQTTYNPERVGIDEKVLLGK

SEQ ID NO: 333681 - protein, 355 aa, unidentified
MIIIGVDFHPEFQQTASVNTETGEFQEKRLAHPEEAAEFYRALAITGQSVRVGMEASGHARWLERLLAELQFELWIGDAARIQSKRGRKQKTDRQDAQHILQLMLKDDFPKIWVPSWENRDMRQLLWHRQRMVQTRTRIMNQLQAVALNEGVRCKKRLWRAGGRQQLESFRLAPWASRRRRDLLELLDRLNPTIAELSQAIEQEAAKCPEARRLMTHPGVGALTALAFVLIIGNAERFPCGKQVASYLGLVPLEKSSGNRRRLGHITKQGSSMMRFLLVEAAQVTVRSLPEWRSQYFRLMMRRGRKTAKVAMARRLATRLYWMWREGRDYQQQRSSVRTQDSPDQAMVCNRTPSN

SEQ ID NO: 333682 - protein, 337 aa, unidentified
MNYCGIDLASRESAVVILDGSGRELRRVAVETEQSGFRRALQGLGRLRVIIEASPLAEMAANYVEALGHEPVIIDARAAKHLMNAKKKTDPRDAHTLAEIGRCGWYIEVHRKSPEARELRSLLKARQALKKTSTAQLNSIRGLLRAQGIRLGKVSEGQFADAVMTLVNREIPSLTDAFTAMLQVWALARAEAARLERLIRQRSRADQVTRRFEQVYGVGPLTSVLYRATVDDPYRFRHAKEVADYLGLAPRVSQSGDTAYRGRITKEGDHLLRWHLVECAHVLLTKGRDCALKRWGLQLERRKGSAKAKVAVARKLAVLLWRLWKEEKDFAPFPQAA

SEQ ID NO: 333683 - protein, 420 aa, unidentified
MEIIGLPTPVFCGVDWAEDHHDIALVDAGGQQLAKMRISDGAAGFAQLMALLAEHGDGEEAPIPVAIETSRGLLVACLRATGRPVFAINPLAVARYRDRHSVARKKSDAVDAAALANILRTDMAAHRPLPADSELVQAIAVLARAQQDAVWARGQAHNKLRSQLREFYPAILAAFAQHKQGLCSREARSVLAAAPTPTSAAKLTRRRLQSLLKQAGRIRGIQTEAERLHEVFKREYLHQLPQVEAALGHQTSALLRQLNTACDNADRLEEAVTEAFEEHPDAPVIRSFPGLAALTGARVLAEIGDDRTRFATAGSLKAYAGSAPVTRASGKSCKVMSRKVKNQRLAAVGYVWAFNSLTRSPGARAHYDRRRAAGDRHVAAQRNLFNRFMGMLFHCLQNGHPYDEAVAFPLVSAGLRATAA

SEQ ID NO: 333684 - protein, 456 aa, unidentified
MARAKREPQEILDEEHEQVLQRVCAIDVAKGFGQVCVRVPRADGRRASKVFPVDAVTGEVLKLGETLLQQGIEMVTLESTSDYWRIFYYLLEACGLPIQLVNARDVKNVPGRPKSDTLDCVWLAKLTERGMLRPSFVPPAAQRVLRDYTRTRTDLTRDRTRHWQRLEKLLEDALIKVTTVASKITTVSVRNMIDALVRGERNPERLADLARGTMRGKRRDLVRALDGRFDTHHAELATILLAQIDSLTTEIDKLTTRIEQLIIDVPAPEPPGPDHQQAPPGTAPTPTPLPALQPPALQRLADIPGISREAAQVILAEIGPDMTRFPTAQHLVAWARLSPQLRQSGTKRHNGKISKGNPYLKAVLGNAAAAASRTSTFLGERYRRIVKRRGKGKALIAVARSILVIVWHLLANPATSYHDLGADFYTTRIDKERRQRHLIQQLEALGLQVTLTPAAA

SEQ ID NO: 333685 - protein, 348 aa, unidentified
MQSTLNLPVIGLDLAKSVFQLHIVDVESGEIQRRQIKRAKLTEFFAKCNRSLVAMEACGSSHYWARTIRALGHEVKLLPAQHVKAFLLRDKTDAMDAQAIWVAAQQPHILPVPVKSERQQACLALHGMRRQMMKMRIMQTNALRGILAEFGIAMPVGHNQLLKTIQGELARAQQQDLLPADLVVSVQEQLKRIDGLQNDIDHIAQRLCAMIQEDRQMQAIQQIPGVGELTASALVAAVGDFCTFKSARQFASWVGLVPRHVGTGGKTQQLGISKRGDTYLRTLLIAGARAVIARSGKSDWIERLLQRRHYNVVVVALANKMARTAWAVLARGMAFDRTRWNPLEIAAT

SEQ ID NO: 333686 - protein, 394 aa, unidentified
MKLISIDIEKNKHFFCVMDQQTGEIISQPVSFSNDKEGFDFLVQKIKSYPKDSILIGMEDTGHYHFALLKYLLDLQYTVALINPKTTDFNRKMQGGITKNDKLDTINICDVLDTPERKKQYRITKVNSFDLYEQKQLTRHHHNLKEEENVYKNRLQKCIDIVFPEFNKLFNSKYGTVYMNILKTFGSAENIANTDIRTIRKCFEIEGRGNRISLTPERLKECARSSIGISSSAEVIQIKHLTAQIELIEEQLTEIDKKIEEFSIQNNSPILSIPGISHFSSTSILAELGDISNYSKPSQIIRFAGVAPLHYESSQFNAQHTAITKKGSKYLRKTLYQIILPVIRHNPVFNKYYQLKISQVKGHLCAQGHCVRKLLRIIHHLLKTNQQFDPQLLR

SEQ ID NO: 333687 - protein, 357 aa, unidentified
MRKVTCFVGLDYHQHSVQVCVINRQGKQLLNRSCPNDWQSIAQMVGPLGRIQGAAIEACCGAADLGEELATHAQWPLDLAHPAYVAKQKRSPDKSDFSDSQLLADLTRVGYLPKVYLPPSYERDLRQLVNHRQALADSRRAVKLRIGAILRQSRVKFPEKISRWSKAWIAWAATAPEHSQHTRWIVQDLLEELAHLEHKVALADARLREATANDPLVERLMDEPGIGEVTAWVLRAYVGSFKRFATGKQLSRYCGLSPCNASTGEKQADAGLIDGCNKLLRATLIQASHRLIRTQVRWGRLHDSLRNRGKPACVAVAAVANRWMRGLYHRIMEWTTNTSMTKKPKKMLSKEASKELP

SEQ ID NO: 333688 - protein, 341 aa, unidentified
MQVTTIGLDIAKNVLQVHGVDARGKVVLQKRLTRARMLVFFANLPRCLVGLEAGGGAHHWARELQALGHDARLMPPQYVKAYVKSNKHDAADAEACCEAVQRPSMRFVPVKTKDQQATCMLHRVRDQLIGQRTATINALRGHLTELGIVAAQRQAGVRQLLALIGEVEDDRIPPLARAMLATLAAHLSDLADKIAGLDQRLVALARTDPICRSLAAVPGVGPVIATAFAATVPDARAFRSGRHLAAWLGLVPRQHASGGKDRHLGLSKRGDGYLRRQLIPSSPGGARALVWRTPGREGRLWSWINGLLARRPFNVAVAAVANKLARILWAMLAHGEAYRAA

SEQ ID NO: 333689 - protein, 296 aa, unidentified
MERYIGLDAHGTSCTFGVIGPSGRKLRQDVIETSGAALVSYVRGIPGRKHLCLEEGTQSAWLYEILSPHVVEIAVASITESRGQKSDMLDAFRRAEELRTGTVKKPVFKAPRQFSRLRELSRVHSMLVRDVVRVQGRLKAMYRCRGVSTPGKRVYSSSGREAYLRKLPVSCRWATATLHETYDRLLDIKKAAEQELLAEAAKHSIAKILATAPGIGPIRVAQLLPIVVTPHRCRTRSQFWAYCGLGIVMRSSSDWVQTTTGGWVRAQVQQTRGLNRNHNSRLKDIFKGTATTVTTP

SEQ ID NO: 333690 - protein, 369 aa, unidentified
MYDPTRIRSVGLDVHKETIAIAVADGTLPAKVLATIPNDFTTLLKSLRRLGPPETIVCCYEAGPTGYGLYRRLKAAGYTCHVVAPSMVPVKSGCRIKTDRRDAAKLAHYLRSGDLTFIHVPDEATEAIRDLERTRDDAKIAERVTRHQLSKFLLRHGRIHPKKTAWNPAHMAWIAEQVFEQPAQRQVLADYREAVELGGARVARLTAQMVTASEAWEKAPLVKALQALRGVDMVTAVTVVAEVGDFRRFATAGELMAFVGLVPSEHTTGETRRQGRITRTGNTHVRRVVVEAAWHYRRQPRMSKAIRSRNDFVSAGVRAIAWKAQKRLHERLKRLLGRNKPACQAVVAVARELVGFLWAISREEVLLAE

SEQ ID NO: 333691 - protein, 368 aa, unidentified
MLYLAIDQHSKQLTVNLRNEAGQIVMRRQVSTRGEVPRQFLEDVRQRSLAEGGYVTIVEVCGFNDWLLELLPRCGCRETVLVQANRRSKRKTDRRDANKLGELLWVNRHRLSAGQPISHLRRVRILSRQEREDRRVTQMRRNIGRELTRTINSIKTILRRENLEQHCPTKGIQTQAAERWLKKLTLAPLDRMELDQLLARRQLLRDQKQQIEEEIARRAAAHPDVPLAQTLPGAAAYAALALAARVGPIERFPRPRSLANYWGLTPACRNSGQTTDRLGSITKEGSSLARFILGQLVLHALRRDPVMRAWYQRIKRRRGSKIARVAVMRRLTTILWHMLKKREPYRLGGPPRKKLKRHQPAQVETNTA

SEQ ID NO: 333692 - protein, 369 aa, unidentified
MTSSFKEDLSAVAVVGIDIGKDVFHLVGFGADGGLVLRRKIKRLALRSTFEKLPSCVVGMEACLSAHFVSRTLRGMGFEPRIIPAFYVKPFNKGQKNDYNDAEAIAEASLRPNLRTVTEKTQDQLDLQALHRVRARLVSRRTATINQIRAFLVEQGIADRKGLRALKNSFEAILEERRDEISSRMRGILIGLYGDWLWLDERIGVISNEIEEISRTEKNCANVMTIPGIGPIISTALVGAIGKGETFDKGRDLAVWVGLIPRQFSTGGRTTLGRISKRGSRYLRTLLIQAAKIILMRPHNWPKLSFGAWLIDGCIATSWRWPWPTSSQGSLGRFCVAAGSSTLQEIRLPKLFEVGQPNRGSRRRTAWGG

SEQ ID NO: 333693 - protein, 355 aa, unidentified
MKYYTSTTQYNCGIDLHARQMYVCVMDRQGKKLVHTNVKNNDFGFFLKLVEPYKHDLTVCCECMFGWYWLADACQAAGLTFVLAHALYVKAIHGGKNKNDRIDSEKLTHLLRSNLIPPSYVYPSEKRPLRALLRQRLFYVWRRAELLARIYSHQLAHNRTPAKQTRRVRDSWEEQLLAAEDNPLRQLALKNDLAMIKHFDHQISQLEEELQRQTKKVASREYALLLTVPGIGESLGLTILHEVGDIERFPTVKDFLSYCRLVKGTVASAGKIKGLRGAKLGNPYLRWAFGEAAVIAKRDHFLIRPLAQRLEQQMGGNKFKANTVVAIKMARAVYFMLKNKTVFDPERLVAALAKK

SEQ ID NO: 333694 - protein, 351 aa, unidentified
MLIVGCDYHPSFQQIAWVETDSGEVGERALLHSTGEAERFYRKLKDEGVKVRVGIEATGHARWFERLLAELGFELWIGDAAEIKAKRVRKQKNDREDARLLRTLMIENRFPRVWLPDVSNRDLRQLLWHRHRLVQMRTRVMNQLQAVALNEGVRRKRGLWSHAGRAQLESFQLMPWATRRRKDLLELLDNLTPRIAALTAEVEKQAEQHREAQRLMTHPGVGPLTALAFVLIIGSPERFRCGKQIGSYLGLIPCEESSARRQRLGHISKQGNTLLRFLLIEAAQAATRSNPTWRREFVHLTMRRGRQIAVVALARKLAVRLYWMWRNGWDYEKSLQFGSHVGQPGTGYGVH

SEQ ID NO: 333695 - protein, 352 aa, unidentified
MRILAIDLGKSKSVACDFEAATSQAKFYGLRTVPGELRELLVRCRPDRVVIEVCNQAGWVGDEVLAAAIDLQVVNTNGSAWRWQNVKRKTDRDDALKLAQLSAMNQLKLVHLPARPVRQWRSLIGYRQTLVDRRTAIKNRIRSILDAQAISMPAGKSGWTHKSVQALREMALPIEHCPPGDFWRAELDEELKQLDGVEAGLKRVTAELDKRGEQDERVRRLRTIPGVGRRLSEMVVAAIDDPHRFASGKQVASYAGLVPKQYQSGMMERHGRITGHGNANLRRLLVEVSWIGLRLNPRMRAVYERVRQGGKTRKKIAIVAVARRLLIWCWAMLRDKQDWEQFPEGSQSVRAA

SEQ ID NO: 333696 - protein, 396 aa, unidentified
MTTIGIDIGGRTHVAARCRDGQARADREILRVGQSRAGFAVLDAWLERQAEPVALVTMESSGHYWMPLASHLCRRDVPVAVVNPLAAKYFARSRLARTKSDPADARSLAEMAMRDTPPARDPLAGLELRQAARFAMTLVTEQARVCQRLIRLVELGFPELGELFDDPTCRTAREVLRIAPTARAATRRRTTTLANANAGPGHRRLGQAKAERLQAAAADSIAVPELDAEVAFEVGLLLDQYDLLERQITDADRRVAGLLDGETARRLQTIPGVGPSIAATLLAEIGDIERFDDFDQLLAYAGVHPAERSSGRKGANPETAWHMSKAGNSHLRAAAYRMAVVGVQHNPVIAAHYARKRAAGKSKMNALGHCMRKALAIVWGVWRNGTDFDPDWGVGA

SEQ ID NO: 333697 - protein, 354 aa, unidentified
MPMLAETVELVIGVDTHTDTHTAAVVVAATGARVQTLTVAADPHGYDELLATAERHGGLRAFAVEGAGGYGAGLTRHLTEAGEVVVELDRPQRPARRGGRRSDPLDAERAARDALSRAQLARPKTGAERAALQSLLTARRSAVEAASTAQRQLRAQVITAPEAVRARFRGHRSTRAQISIAAGLRPANSTGDVEVLTTLRVLRDLARRIRALEAEAAEYEKTIRRVVASWRPDLLELTGVGPINAATVLTAWSHPGRCRDEAAFAMLAGAAPIPASSGRTVRYRLNRSGDRQLNRALHSIVLSRQRYDQATRDYTQRRHTEGKTDREIRRCLKRYTARQLFRQLEASTQGLDEP

SEQ ID NO: 333698 - protein, 373 aa, unidentified
MSFQSNTILVALELSNSVWLVSTRLAGAQKSRMHRISAGDTTALLALFDRLRASQRPSEDPAPIACCFEAGRDGFWIQRLLTGHGIATYVVEPTSILVNRRAKRAKTDRLDAEGLLRVLAAYLAGDSQICSMVQVPTPEEEDSKRIHREREHLVQDRTRLENRILALLATQGIRSRPSLRNWERDLAALRTGDGRKLPPRLAAEINRLRRRLGLVLDLIRELDAERDEVLAAASEHPVASKITALRSIYGVGDNFAAVLAREVFYRPFGNRKQLASYVGLAPMPHQSGDMDRDRRIGRAGNARARKSLVQLAWLWLRYQPDSELSSWFRARVGKLQGRTRRIAIVAMARKLLIALWRFTETGEIPAGSTLRAA

SEQ ID NO: 333699 - protein, 341 aa, unidentified
MSVIIGIDPHKRLHAACAIDEHETELARLEVRTSSRQVTEMLAWATTFECRSWAIESAGGLGYLLAQQLVARGETVVDVPATLSSRVRLLGSGRSTKNDANDARAVAVAALRAPQLAQVRVEDHVTILRLLAKNQLDTSRAKSRACCRLHALVAELVPGGIRKEIVVKQAEQILVGIVPTSATQRQRLDLAYDTLSEIVMLDDRAKRNRVRITEEVIASGSSITEIFGVGPTLAAMIIGYTGDVNRFPTAGHYAAYNGTAPVEFSSSGRTVHRLSRRGNRTLNHALHIVAVTQIRHAHSEGRAYYDRKLAEGKTPREARRALKRQISDRVFKQLRLDAGNK

SEQ ID NO: 333700 - protein, 344 aa, unidentified
MQPRITIGLDIAKHVFQVHAVDTAGTIIIRRKLRRSELLSFFEDLEPSLVGIEACATAHHWARSITALGHQVKLMPPAYVKPYVKRQKNDAADAAAICEAVSRPSMRFVPVKEVDQQGDLVLHRTRELLIRQRTMLINALRAHLAEFGIIMRQGRAGVWALVASVEEGKAERLPELARTALMSLIAQLRDAHARANEIEREIVTWHRNDERSRRLETIPGVGPITASAVIATVTDPSMFASGRELAAWIGLVPQQSSSGGKERLGRISKKGDPYIRKLLVVGAHSVLRIARSKKHGPSNLITWGAELADRKPYKLAAVALANKIARIVWALMARNEVYRRQLPI

SEQ ID NO: 333701 - protein, 347 aa, unidentified
MKKIIIGIDISKEKIDASAIDVRNSQLGVLKLDYQAFENRPMGFRRMLVWARHLIKGITLEEVMFCCETTGGYDRSLCDYLYAKGLDIWRESSLQIKKSSGLRKGKDDKADSLTIAEYAMRHMDKAVYYISPSETVRELKALLLYRRKLEQEKTSKKVRVAELKATAAKSKSVSFILRDAQKSIRALEKSIKECEKQILALYDSDEELKRSYDHLTSIKGISIVNATAMIAYTNNFKNITTSRKLASYYGIAPFREMSGTSVNKKAEVKCYSSSMLRAYLTQAAQWTIKEHGIYREYYLRMSAKGKCYGVILNNVKNKLLHLSVSLIANDMDYEENHEFLRAQRMAQ

SEQ ID NO: 333702 - protein, 408 aa, unidentified
MVIFVGVDWAESHNDALVMDGQGTVLGRGRFGVGVAGLAQLHALIADHAEGPEQVMIGIEIDRGLLVDSLVGAGYRVYGVNPLAASRYRDRHRTSGAKSDAGDAKLLADVVRTDHHNHRPVAGDSDQASAIRVLARAHQGLVWTRQRQVSGLRSTLRDYFPAALSAFGTDLASSDALAILGLAPTPRRARTLSRAKIAAALGRAGRQRNLEHRAAEIHEALRAEHPETSDAVADAFGAASAARVAVLVSLNAQITELEVALAERFDRHPDAEILRSLAGLGSVLGARVLGEFGDDPSRYADARGRKAYAGTAPITKASGRSLVVLARVARNRRLADACERWASCSLTASPGARRHYDALRARGKTHSQATRQLANRWVGILHACLERREAYREEVAWPAAEQVTRFAA

SEQ ID NO: 333703 - protein, 391 aa, unidentified
MIFVGIDVAKDKHDCFILNSEGTVLADVFTIANNRIGFETLLSRIQSCSQGESKIKVGLEATGHYSYNLLGFLLDSGLATYVINPLHTNLYRKSLSLRRTKTDRIDARTIAMMLMSDVDLKSYSNTAYHNEELKSLTRYRFDKVKERAKLKSSVARLVNILFPELEKLVSSLHIAVVYALLSNYPGASYIANANTEELAETLCTASKGRYTKSKTAEIQVAAGVSIGSKMPAKSMELKHTIALIRELDKEISEVESTIDKITSQMDSPIFTIPGIGRHMGAMILAEVGDFSNFASADKLLAYAGLSPSTYQSGQLQNCYAHMEKRGSRYLRYALFNAAKYVCLWCPTFSAYLEKKRSEGKHYNVAISHAAKKLVRLIFAMQRSGKAFLADY

SEQ ID NO: 333704 - protein, 333 aa, unidentified
MLPSNCGTATPYILRNTVGLDISKLTFDASAMVGNAEYSAKFDNDSKGLDQFSDRLKSLGCQNLHICMEATGNYYEEVADYFAQYYSVYVVNPLKISKYAESRFKRTKTDKQDAKLIAQYCRSAKESELVKRQKPTDEQYRLLRMTAAYAQIKSECAAMKNRHHAAKDEEAAKAYAQIIKAMNEQLEVLKEKIKEQTEKPNCKEGVKRLETIPAIGRMTAAVLFHHLTSSKFETSNKFAAFAGLSPQQKESGTSVRGKGKLTKFGNRKLRAVLFMPAMVAYRIRAFPGFIARLEEKKKPKKVIIAALMRKLAVIAYHVHKKGGDYDPSRYKSA

SEQ ID NO: 333705 - protein, 405 aa, unidentified
MYMNAIGIDVSKRKSMVAILRPGGEVVAKPFEVSHLSRDLQSLIHRIKSLEGESRIVMECTGHYYETIAHELVSAGLFVSAVNPQLIRHYQDEDNSLRKVKSDKADSLKIARYTLDRWAKLKQYGLMDELRNQLKTMNRQFGFYMKHKTAMKNNLIGLLDQTYPGVNTYFDSPAREDGRQKWVDFADCYWHADCVRKMSPNAFVDHYQKWCHRKKYNFSKAKAEEIYGTAKELVPVLPKDSFTKRIIKQAIEQLNTASQTVEQLRSLMNETAAQLPEYTVVMAMKGVGPSLGPQLIAEIGDVARFTHKNAITAFAGVDPGVNESGDYSQKSVHASKHGSPTLRKTLFQVMDVLIKTKPQDDPVYLFMDKKRAQGKPYYVYMTAGANKFLRIYYGRVKEYLASLPQ

SEQ ID NO: 333706 - protein, 320 aa, unidentified
MRNAVGLDISKLTFDATAIVGNAEYSAKFDNNSKGLNQFSDWLKSLGCENLHICMEATGNYYEDVADYFAEYYSVYVVNPLKISKYAESRFKRTKTDKQDAKLIAEYCRSAQESELVKRQKPTDEQYRLSRMTSAYTQIKSECAAMKNRYQVAKDEEAAKAYAEIIKAMNEQIEFLKAKIKEQTEKPKCKQGVRRLETIPGIGRMTAAVLFQYLTSSAFETSNKFAAFAGLSPQQKESGTSVRGKGKLTKFGNRKLRAVLFMPAMVAYRIRAFPDFIKRLEAKNKPKKVIIAALMRKLAVLAYHVHKKGEDYDPSRYKSA

SEQ ID NO: 333707 - protein, 454 aa, unidentified
MPKRTTGDRPELNPVNVGAAAIDIGSKIHMAAVDPGCTDTPVRAFGTFTQDLQELADWFKACGVISVAMESTGVYWIPAYEILEQRGFEVILVNARYAKNVPGRKTDVSDAAWLRQLHSYGLLRGSFRPDAEIATLRAYLRQRERLVEYAAAHIQHMQKALMEMNLQLHHVVSDITGATGMRIIRAIVAGERNPDVLATYRDVRCHASIETIRAALVGNDRAEHVFALTQSLELYDLYQAKMLDCDRRLESLIGALNNKGGKPVGRLSKPRVKTKQVNTPSFDVRTALYGVLGVDLTEIHGLGPSLALKLVGECGTDLRAWPTAKHFTSWLCLAPGNKISGGKVLSSRTRRSSSRAAALLRLAATTVGRSDTALGAFYRRLALRAGKSKAVTATARKIAVLFYNMLRHGMAYRDPGADHYEEQYRTRVVANLTRRAKSLGFVLQVDPGGQLAVS

SEQ ID NO: 333708 - protein, 337 aa, unidentified
MGLYCGIDLHSNNHVLTVIDDTDRRVYERRLPNDLAITKAALEPYRAELVAVAVESTFNWYWLVDGLMEAGYTVRLVNTAAVRQYEGVKHTDDEHDAFWLAHLLRLGILPTGYIYPKGERGLRDLARQRMRLVKHRSALITSVQIQVWRSTAVRLKADTIKGLGKQPWPDLADADLALSVKAGRAAINTLSVQIERLEKILLKRLRLSPQFRMLKTVTGIGPILAMTIALEVGDIARFAGVGEFASYCRCVDSQRLSNGKKKGEANRKCGNRYLAWAFIEAAYFATRNLPAAKRFYERKRRQRHAMLAMKALAHKLARACFYVLRDQVPFAPERLFA

SEQ ID NO: 333709 - protein, 382 aa, unidentified
MNRIIKIGMDVHSTNYTLCAMEPVLDGEDRIFTNIQVTPDYENVIQFIDNLKERLGSSDSYSIECGYEAGCLGYSLYHQLTKAGVKCTILAPTTMLTQQGKRVKTDKRDAVMIAQCLSYGGYHAVHVPTDQDASVKEYLRMRDDHKLALKKIKQQINAFCLRHGYIYDGHKWSIRHLDWLKKLDLSELYRETLNEYMTSYEEQTAKIERFDKRIEELAADSDYHENVRKLSCLLGIQTYTALSLIVETGDFKRFRKGNTYAAFLGLAPGESSSGEKISRTGITKAGNNHLRTLLIEAATGICKGQVGHKSKALCARQAGNPAEVIAYADRGNIRMRSKYKRMIRREKKRNVAVAAIARELACYVWGIMTNHIKPREEGKKAA

SEQ ID NO: 333710 - protein, 338 aa, unidentified
MAIVSVGIDLAKNIFAVHGVDESGKPVLVRPNVPRAKLLELIASLPPCLIGMEACSGAHHWAREFQQFGHTVRLMAPKFVIPYRLTGKRGKNDAADAAAICEAVTRPNMRFVPVKSIEQQGQLLVHRARQGFVEQRTATLNRIRGLLSELGIVLPLKAAVVRREAMTRLEDLPGWANTVIGDLLSEVARLDERVAQYDRHIRAMARQSTEAQRLMQLPGIGETTATALLSTIGNGRDFKCGRQLCAWLGLVPGQYSSGGKQRLGRITKAGDPYLRSLLVLGARAVLAAAKNKSDPISRWATALAQRRGYWKAVVAIAAKNARMCWAVLSRGEDFRLPA

SEQ ID NO: 333711 - protein, 385 aa, unidentified
MIIGMDPHKRSATIEVIDDRAKVVATGRYGTDKAGYAEMLRAGQRFGDRVWAVEGCNGAGRHIAHRLVADGETVLDVPARLSAQVRVFATGNGRKTDPVDAHSVALAALRAPNLVQIEVTPDRVALGLLADRRDELGRARTQAINRIHRLLLDLVPGGAKRFLSAAQARALIAATRPRDIAGKTRRRLAAELITELESIDRKIKACKKEIQALVEAQDSTLLELHGIGPSGAARLLADVGSIYRFASRDHFASWNGTAPLDASSGQQQRHRLSRAGNRRINRALHIMAVVQLRSPTEGRAYYDARKAAGKTSMEAMRCLKRRLSNVVYRQMLHDQRRTQAAGPGGHSGTTLQSSVTDLTPDIGSSDKPLPGPATPQPRTPAAAAS

SEQ ID NO: 333712 - protein, 353 aa, unidentified
MNTYYVGLDVHKASICIAVLNAAGKSVMESVVETSAATILDFIKGLRGQVEVTFEEGTHAAWLYDVLKQTKATVIVCDPRKNRLLQDGNKSDKVDARKLAQLLRAGLLSPVYHGEHGTRDLKELVRSYEYLVEDSTRVMNRLKALYRSRAIACAGTDVYKVQQREVWLAKLPEAGARSRAGLLFSELDHLSGLRREARQAMVVECRRHPASQLLLRVPTLGIVRIAQLISAVVTPHRFRSKRQFWSYCGLAVVTKSSADYTVSGAGVRRTKKAATTRGLTRSHNRTLKYVFKSAALMALRCEPFKTWYAELLARGLRPELARVTMARKLAAITLAVWKAGENFDGGKVSERVA

SEQ ID NO: 333713 - protein, 357 aa, unidentified
MPAHTKSAKSKTQIAVIGIDIGKNVFHLIGLDRRGAIVLKCKLSRGQLENRLANTPACLIGMEACVGSHHLSRRLIALGHDARLMPAKYVKPFLKGHKNDYRDAEANAEAVQRPTMRFVATKTVEQLDLQALHRMRARLVRERTATVNEVRAFLLERGIAVAKGIQRLRKALPEILAKHAGLLLPRMIRIIEALAADWRRLDHRIEEISNEIEDLAQKDAPCKRLMTIPGIGPLISSATVATIGGGDMFSKGRDFGAWLGIVPKQLSTGGRTILGRISKRGNTYLRTLFVQAARVVLIKRQSWERYGLKPWIEAAARRLHSNKLAIALANKLARIAWSVLRHGRNFEVRHADEPQHA

SEQ ID NO: 333714 - protein, 450 aa, unidentified
MSNGNGVSRGDRNRNARLDRLRALVPVTNAIVGIDLADKKQMVVVCDHDSKVLARRTYRCRAWDLGTALDWAHERAAAKGFAGMTVSCEPTGHRWRVLAQLAADRSMPFVCVQPAVSSWSRRAEDLTHDKTDEKDAVLIARLTAQLRCYEPEPVDETWGRLRHLGARREQLITEISGQIQQMRDLLECVWPAALECAQQPFRSRTWIAALTVIVDRDGGQFDRTRRLGLARFERAVLREISKRGGQKPCRRIARSVFAALSDLAGVIAHRAGALERVQLLLEDWRTAHHSLADTEQRMTGVLDELGLTGLVTSITGISAVGAAAILAQTGDPRRFTTARALVKHAGLAPREKLSGTFTGRTKLTGQGRPGLRLAAWRAVWGAQRANPVYGARYRHLTTREHNRLKPTQAQTVIAAAILRHLHAVITTGQAWNPSIATHGTRSAIRTTAAA

SEQ ID NO: 333715 - protein, 463 aa, unidentified
MPLTVVNPHAAGIDVGSRTHFVAIGQEQKDVKSFGVYAEDLSSLVKWLIDSQVTTVAMESTGAYWQNLFVELINSGIEVVLTNGKFTKNINRKKTDVLDCQWIQKMHSLGLLPSSFLPDHTTERLRTLCRHRTNMIQQRADSIHKMAKFLKYLNFRLDVVVRDIAGQTGLKIIEDICNGNLDPKALAAHRHHNCRRSEEEIAKALVSNKREDYLFGLKQEFARHQFYTSMVIDCDKEISQFLEQTIQQKGDVVDDIPDGKYFKRQNKNAITGIDLNIASYQYFNGVDLLAIPGVSHSTILSLMSEIGPDGFNQFPTAQHFASWLKLAPNNKISGGRVLSNRIPQGSNRLKIALRNAANAVGNLKDSDLTKFFKKIAFKKGRQTAINATARKIAVILWNMTTKRQPYMPKNNYLFLDQKRRIVSRMRKQIADLGINPDDLGFSRANRDKIAAQMPSDYQSFSLR

SEQ ID NO: 333716 - protein, 307 aa, unidentified
MTSWVGIDISKASLSIAIHPQRISFTVTNDCDGHKLALTQLAALQVERVVMEATGGYERGIKKALQRQGYWVACINPRRARNFAKALGKLAKTDPIDAAVLAHMAQVIQDPACLLMTEDQELLRDLVQRREQLVQQRDDERRRIAQARSHAVQESLRLCIEHLRQQIKSLDKGIAQAAQNVDQERTQRLQEIVGVGLITASSLMAYLPELGQLDRRQIAALVGLAPYNCESGQQCGTRRIKGGRAAIRRVLYMATWSVVRYQAEFAARYQALRERGKCAKVALIACMRVLLVRINAMLRDNTAWRNS

SEQ ID NO: 333717 - protein, 323 aa, unidentified
MTNVRNYVGVDVSKKTLDVSIPQENGTYLHKKISNDAVGFKSIIKYLSIDFCVVMEATSSYYMPFAYYLHANQIAVSIVNPLTVNHFCKMRMSRAKTDKKDASMLAQFGKSETPKLWKPKSDHLLELQQLQAVLDNFTNQKKSFANQLEAFNSSGKMSKSVKKIIEDQINYLKEKIKETESVMVTITEKHHLELYKNLQTIPGIGKRTAMLLIVITDGFTKFEQAKQLVSYVGLCPRLYESGTSIKGRTRICKMGMSRIRQLLYLCSMRAMRTNKQCRELFERLKQNGKNGKLAIVALANKIVRQAFAVGTGNIAYDANFYSK

SEQ ID NO: 333718 - protein, 360 aa, unidentified
MTTDETAPPRRITGGVDTHKDLHVAAVVDERDQLIGSQSFATTRQGYRQMLAWMRSFGQLERVGVEATGTYGAGLLRHLQAASVTVLEVTAPDKPDRRRRGKNDDLDAEAAAHAAFAGKRTVTPKSRDGMIEALRVLKACRKTAVAARRVALQMIHNTIVCAPDELRDTLRKMTRMQLVRTLAAWRPDLTDYRNTLSAYRIVLKSLARRYLELHDEIADLDDMIGAIVDELAPDLVARAAIGHGSAAQLLLTAGDNQEHLGSEASFAALCGVSPIPASSGKMTRHRLNRGGDRAANSALHIIAIGRLRTDERTKTYVAKRIADGHSKLEAIRCLKRYIAREVFTLLRGRQRQINQAQFAP

SEQ ID NO: 333719 - protein, 416 aa, unidentified
MKSARNTLPEKPPNALTCGIDWARDDHAVSIVDARGRETHRCTIEHSAAGLRELVTVLARTGVCEVAIERPDGPVIDTLLGAGITVVVISPNQVKNLRGRYGSAGNKDDRFDAFVLADTLRTDRTRLVPLTPDHPATVALRRVCRARKDLVAHRVALANQLRAHLRNVFPGAVGLFADLDSPISLMFLTRFDCQDRADWLTPKRLATWLSGVSYSGRTDPAVLHARLTAAPRGAVGDDGSAHAHITRALLAALRTLVEQIKVLTEQIGEQLAGHADAHIFTSLPRSGTVRAARLLAEIGDCRARFPTPESLACLAGVAPSTRQSGKVRSVGFRWAADKQLRDAVTDFAGDSRHANLWAADLYNRAVARGHDHPHAVRILARAWLFVIWHCWQDNLAYEPDKHGALQRLIAHQQPAA

SEQ ID NO: 333720 - protein, 361 aa, unidentified
MSIVYYGGLDVHQASIVAFLFSPETGEYFEDEVPNDRKHLERAAKRWRKRGELRLCYEASSAGFVVKRWLDELGIPCEVVAPAFIPKGPGDRIKTDRRDARRLAILYQSGMLRPVRVPDEREEMVRSVVRHREDLTRDMTRTKNRILKFLGLLGLRYTEGRNWTEKHRKWLRSLNLEPLQAMVVESHLRVLEQLEAERREVDQKIAEIAETPFYREKVQRLMCLRGIALHTAMVLITEIGDAHRFRGAPELMSYLGLVPQEYSSGERRRSGKITKVGNSHARWVLSEAAWNQARPLGRSDRLAKQRRNQPPEVVAISQKAERRLYHKFWKVAVRKDRNTAAIAVAREMAGFVWALLTLDAA

SEQ ID NO: 333721 - protein, 322 aa, unidentified
MNEATPYIGVDVSKSTLDYFIPGERKTRRCENTPGGAASLARAALKRGFGVCCEPTGGYERKLLEACWGGGVPVATADAWRVRHFAKGRGVLEKTDAIDARVIAAFAAQNEMRPIPRPTCAQRELRELTRAIETLDRQIQISRGQLEHDGACGLVRKTVKAVLRCLQAERARLDGRRLAVVRGDDRMHSLFVRYQQVKGIGPATALAMIAEMPELGTVSDKGAAKLIGTAPIPNESGKKTGARAIQRGRFGARSALYMAALVATRHNPILKGFYRRLVDGNGKPRKVAIVAVMRKLVCLLNRIASDESFEPSPAASKPRPVK

SEQ ID NO: 333722 - protein, 406 aa, unidentified
MVFVGIDWSEQQHEVELQAGSGKVLKRLRVSADIAGLSRLQEAITDAAEEPSQVVIGIESNHGLLVNALVASGYRVYPINPLTSARAREGEAPSRSKSDPGDAHVLANLVRTKRQDLRPLAGDSEQAQALQVRARSHLRAIRVQQRLRSQLRSTLAKFFVGALPLLGDESEDLRDALAVLSLAVSPEQGRGLSQNKIRSSLARHGRQRNLEVKASEIQAQLRAPQLELNTPKVVSAYADEVSHLVRSLLLARSEVAQLEAQLAADFREHPDAEILLSQPGLGLVLSARVLGESGDDPTRYVNAKARKNYAGNAPVTKRSGKWKMVSRRLARNRLLADAGFLWANSALSASPGARRYYDQLRARGKTHNQASRALANRLVGILHGCLRRRCLYDEAVAWIQPLKEAA

SEQ ID NO: 333723 - protein, 408 aa, unidentified
MTVVGIDVSKGKSMVAAMKPGGELVAAPYEVRHSDIELSHLALDVLCMEPDTRVVMEATGRYHEPVAALLHSEGIFVSVLNPLLIKQSGAGSLRKVKSDPKDALKIAKYGLDNWSTLREYTPMEAIRQQLKLCARQCDLYNKNIVMLTNNLISLSDKTFPGVNELFSSPEKENGHLKWVDFYRTFWHCDCINRMSPDAFEERYKKWCKRKGYHFSADAAHALYAASCGLYTTLPRDNNAKLLVTVATDQLIALRENQSKLETEMLNLCKQLPEYETVMAMYGVGKSTGPHLMAELGDIRRFPHRSSIVAFAGVDPGVVGSGKMQLSSVATSKRGSPQLRKALFQVVSAYVKRKPENEAVYQFYAKKRDEGKPYYVCTTAAANKFLRIYYARVKECLNAAESATQAEEG

SEQ ID NO: 333724 - protein, 416 aa, unidentified
MDKEPTVFVGVDWASVEHQVCLMGPDGAVQRAFAHDADSLGAMMDWLAAAAPRAQDVAVAIEVPHGPVVEALMDRGFAVYAINPKQLDRFRDRFSPAGAKDDRRDALVLASSLRTDRHCFRKLEPLEPVVVELREWSRMADELKDERNRLTNRVRQQLWRYYPQALDLSEDPGADWFLDIWALAPTPKDAGRLTEKKLTRILSSNRIRRISAAEVRSILCRPALTVAPGTTEAAQAHIMALSERIRLVNRQLKDVTRHLDALVNQLAASPDPEPGQPVEQRDAAILRSLPGVGRIVLATLLAEAHQAIQARDYHAIRTLTGVAPVTRRSGKSCRVEMRQACSHRLRTAVYHWARVATQHDPRSKARYAALRSRGCSHGRALRGVADRLLAVACAMLENRTIYDPLRASQTNQKAAC

SEQ ID NO: 333725 - protein, 463 aa, unidentified
MLLKLELCVGIDPARRANHTAFIAANPFTGPKCPKRAFSFPHTLKGFLSLRDYILKVTGKKSLKDVIINTEPTSGVWRDIARFFFDQGASVFYTRPDVVSALRKTHSRFAKTDRIDSRTLAGMPWSFPERLIPFVPMEKRIRKLREFSNQRFCIVKEITRWKNRFLARIEPAWKPLLISIDKDEVFSQSIRAFWLRFSHPGDVIRLGPKRFHKWCEKHFHGGLSKEVEGKILVASDKANELWQALGKDEEERDSLSFCISQDLTLIDPLEKQLKLVEDRISKARKDVPECDILEEMPGVGDVVSVTLASFLMPITRFSNARKLSAYTGFVSRVKSSGKREIEGLRITKCGNRRLKRDLALAADTAMHKDPQLAAFAVRLFEKGKHYNKVRVAVGRKIAVRAGSLLKRIAAGEKNVHFEYRDLEGRPIPKQEAKELADTIWLLHDRRKKEKKRKSADSKKIVAA

SEQ ID NO: 333726 - protein, 388 aa, unidentified
MSLNIAPGFQSATAVAPDHATAFVSLELSRSKWVITALLPCSNKMSKYSVDGENGTALLDCLARLRAKAEPRVGTAVKIVVIQEAGLDGFWIHRLLEANGIESHVVEPASIAVPRRHRRAKTDAIDGEMLVRTLMAYKRGEPRVCSMVVAPTPEEEDRRRISRERRTLIKERIEHVNRIKGLLASQGIFEYEPTRKDFRDRIDSLRTGDGWPLLPHLKAEIIRELDRINLVLRQVAVIEAERDALVKSDSTDTQAPAALLIKLKGIGPEFAAVLWREGLFRRFANRRQLAAYAGLAPSPGQSGSVNRDQGISKSGNPRLRTIMVELAWLWLRYQPASALSCWFRERVGSERGRIRRITIVALARKLLVALWRYRTLGELPNGAELKTV

SEQ ID NO: 333727 - protein, 461 aa, unidentified
MFSRLSAFRLNNREGYVSVGKTKKNLPLVHERAAGIDIGSRFHVVAVPSDLSTEPVQTFGSFTGDLCRLSAWLRSVGVTTIAMESTGIYWVPVFNVLQASGFEVLLVNARHVKNVPGRKTDINDAQWIRDLHQFGLLRGSFQPSNDLASLRAHLRHRERLLAYGAAHIQHMQKALMLMNLQLHHVVSDITGATGMRIIRAIVAGNCDARRLAEMRDIRCKESVETIEAALVGDYRPEHVLALRHSLELFEVYQTMVSECDIEIEAALKLLQNVAAPSADLPPRRSKTKQMNEPAFDVRGLLFGMVGTDLTQLHGFGPSTALQLIGECGTDMTRWPTVKHFTSWLTLCPGAKISGGKLLGSKSRRSNNRAAKLLRLSAVNIGKTDTALGAFYRRLAVRTGKAKAVTATARKLAVLFYNTLRYGMVYNDKGASFYENNYKERVIKNLRRRAKNLGYELCPTGT

SEQ ID NO: 333728 - protein, 473 aa, unidentified
MGKGSGNGTTRGDRRRNARRERLRALLPRDGAVIGIDLAEDKQALAVIDHDVRVLARKTVKVKAFRLGEALDWAVGQARAKGFAQVTVACEPTGPRWLQVQRLCAERGLPLVCIQPLISHIAREQQDYTPHKTDESDCVMIARLAVELHCYIPEELDEAWAHLRHLGRRRAQLITAATASAQRIRDFLSVAWPTVTETCVQPLESKTWLAAVQLVTGRCGADPGKLAAMGPEAFTALVRSAVGSWGGKKAWGTICGRVFAALTDTEGVVAWSRRGLLRRCADELGDLQRTRAQLRAVEADMVMVLGELGLSRLGDIPGLTAVGAAAILAETGDPRRYDSSSSLVKHAGLAPSDNASGAFYGEAHISRRGRPGLRLTVWRAVWPMLRFNPVMAAKYQAMTSAADAAALAAGTQDGARTRPATAAAAAARARRAKARVACAASLLRWIYTIVVHDTGWDPAAASGAAARHQAEAA

SEQ ID NO: 333729 - protein, 326 aa, unidentified
MFYLGVDVAKKNLDCMLLNSETGKLKSKSNIPNTAAGFVELLDWLNEKKASNPHVVMEPTGMYHEAAALALADAGLVVSLVNPAQLRAFAQGLGVKNKTDKQDSAVLARFGMAQNPAPWQPPSPSARHLKALLARRDAVADDLQRERNRKEANDFSSVPEAVSASIAESIAFLQAELKRLEKMIAKHINDDPDLRNKKELLETIPGVGPRVSTHMTTLFAGRTFESAEQLAAYLGLVPVVWESGSSVRGRPHMSKAGPAYLRKVLYMPAVVATRCNPHIKALNERLLAKGKTAMAAIGAAMRKLAHLCFGVIHSGKPYDPKFACRA

SEQ ID NO: 333730 - protein, 377 aa, unidentified
MSNISFVGLDVHAETIAVAIAEPGGAVRSVGIIPNRLESIRKLLGKLGPVQHLKVCYEAGPTGYVLYWQLTALGVACEVVAPTLVPVKAGDRVKTDRRDAEKLARCYRSGELTAVWVPDAAHEALRDLVRAREAAKKDQLRARHRLGKFLLRHGRRPAQAGKAWTKKYLEWIHTHVRFDQPALEATLAYYLQEVHHAAGRILQLEKAIDEAIAQADPEIRSVIEALQALRGVAQMTAATLVCELGRLSRFPSPRQLMGYSGLVSREHSSGNRIQRGAITKTGNAHLRRVLVEAAWAYQHRPNVTGFLLRRQKSLALSDEVKQMAWKAQYRLHKRYLAFARRGKNKNQIVTALGRELLGFIWAIAVHTEAQRKLTKAA

SEQ ID NO: 333731 - protein, 358 aa, unidentified
MRIIGCDLHARQQTIAMLDTDTGELEEKTLEHEGDTVREFYSALRGPILVGIEATGSMQWFLELMEELGIECRVGHPAKIRKAETRKQKHDRRDARLLLTLLAENRFPTIWMPSTEQRDLRTLLRHRHQWVRMRSRVQHTLQSMALNHGFRRGHALWSQANQHALRALPLAPHASERRAALLTLYPRLQGSIEELDKEVCEEVQQHPQARRLLTHPGVGPITALATEVFLGDPKRFIDGKALASYIGMIPSEHSSGRRQRLGAMSKQGNTLLRYLWCEAAMHAVERDPELKRFYRRKLVQKGLGKARVAAARKLGIRLWIMMRDQIDYEEFCRRGKARQESGRVRAGMPAINSGPAQQ

SEQ ID NO: 333732 - protein, 391 aa, unidentified
MILVGIDVAKDKHDCYIMTSDGEVLFKSFTISNSMEGFDQLYEKILSVTNNLDKVKIGLEATGHYSHNILGYLLDKGLTPFVINPLHTNLYRKSLSLRKTKTDKIDSRTIASMLMSDVSLKPYSDTLYHNEELKSLTRYRFDKVQQRARLKTSISRLVTILFPELEKLVPTLHMKSIYSLLYEFPSAKAISKAHLTRLTNLLYASSKGHYGKEKAVSIREAAINSISSYMSVKSLELKHTIKLLEELTLEIDEIEKEIKSIIDKLNSPILTIPGIGYSLGAQIIAEIGDFKNFDSPDKILAFAGMSPSTYQSGKLYSSNAKMEKRGSKYLRSAFFTATVCVCRIEPPFALYLTKKRAEGKHYYVAISHVVKKLVRLIFHLEKTGEPYVALT

SEQ ID NO: 333733 - protein, 313 aa, unidentified
MPTCCVGLDIAKDHVDVHARPGDESWRALQTEDGIAQLVTRVMALTPTLVVVESTGGYETAVVSALAIAQIPVAVVNPRQVRDFAKAIGQLAKTDAIDARLLALFAERVRPEVRPLPDEAQQELVALVTRRRQLLDMLTAERNRLAMARRSVRGSVQQHIRWLERRIHDADADLTTTIHRSPLWRAKDDLLRSVPGIGRVTSSMLIALLPELGVLSRREIASLAGVAPLNRDSGHHRGRRMVWGGRASVRGPLYMATLVATRCNPVIRAFYQRLRTAGKPPLVALVAAMRKLLTILNAMVKHQQSWQPIHAEN

SEQ ID NO: 333734 - protein, 291 aa, unidentified
MIISVLGIDLGKNICSIVGLDKAGAVVVRRRMRREGVIAFASKQPTFVVAMEACCGAHHMGRILAAQGHTVRLMSPEYVRPYVKAQKNDDRDAEAIAEAATRPTMRFVELKSEEQLDMQTLHRVRDRLICDRTSLMNQMRSLLLERGHIVPQGRAQLREHLARLLDFEESPLTSSIRELLIDMRQRWEALNKRIADLDAEFVEAARADERTQRLLSIPGIGALNATALVAAVGDARTFNRGRDLTAWLGLVPRQATTGGKPRLLGITKRGSRYLRKNLIQGARAALPELSV

SEQ ID NO: 333735 - protein, 403 aa, unidentified
MTTIGIDIGGRTHVVARCRDGQARADREILRVSQDRAGFVALDAWLERQAEPVTLVTMESSGHYWMPLASHLRGREIQVAVVNPLAARYFAKSRLARTKSDPADARSLAEMAMRDSLPIRDPLAGAELRQAARFAMALVTEQAKVCQRLIRLVDLGFPELGELFDDPTCRTAREILRIAPTARAASRRRTTTLANANAGPGHRRLGTAKAERLQTAAAESIAVPELDAEVAFEVGLLLDQYDLLERQIESADRRVAALLDSELARRLQTIPGVGPSIAATLLAEIGDIERFTDFDQLLAYAGVHPAERSSGRKGSNPETSWHMSKAGNSHLRAAAYRMAVGGVQHNPLIAAHYARKRAAGKSKMNALGHCMRKALSIVWGVWRNGQDFDPNLGDRVLTRTYGI

SEQ ID NO: 333736 - protein, 386 aa, unidentified
MQTLNDLSRSLIALEPASTLIAVIEMSLSSWLVAGIVPGIERQPLKKLAVDESALLRLLHRWREEAEKAGCRIERIVVAFEAGRDGFWLARWLKARSIEAHVIHAASVAVSREHRRAKTDRLDAELLKRAFLGWLRGERNHCKVVAIPTLKDEDAKRPSRERESLVGEQSRIVNRMKAALIRLGIRGFNPKLKRAAGRLDDLRTPEGEPIPPNTLAELRRDMERRRLISNQIRQIEEARLKHFEQAPNDGPHAMVRLLARVIGVGIETADMLVHEVLSRNIHDRRAIARYAGLTGSPDESGRKRREKGLARSGNGRVRRGMVQLAWRFLTYQKESALAQWYRARTENARGARKPMIVALARKLLIALWRFVWQGVVPDGVVLRPAQ

SEQ ID NO: 333737 - protein, 342 aa, unidentified
MEQVAVIGIDLAKSVFQVHGVDVQGKVQLRQRLSRAKLLEFLRKLPACLIGMETCASANHWARELIALGHEVRLMPPQYVKPYVKRSKNDASDAEAICEAVTRPTMRFVGVKSPEQQSVLVLHRTRLILTRQRTQIGNAVRAHLAEFGIVAPIGRQGLERLFAVIADPSDSRVPATARACLTMLADQYGMVLAHLLETDRAIRTDSRATELGRRLQEIPGVGPLVASALVATVSDPHVFKSGRSLSAWLGLVPRQSSSGGKERLGGITKAGDTYLRRMLFVGAMAVIRHAERHGTKRPWLAKLLTRRHPRLAAIALANKIGRIVWALMTRGERYREPSPAIA

SEQ ID NO: 333738 - protein, 425 aa, unidentified
MQISRIGEKIKLNQVMDVSVDVHKDVLNLFFSVEGKEYADECRNRTEVIEKKLKACHEVALAHGRKNLRLICEPTGEYQNKLFRTARRLGHLTCYVNAESVAKFRVIESNDTGKTDTKDPRVIRTLGELNKTLRHRVLNEEYMALRKLGRFYDENEVKITSLRCRISRLLIELFCDYSFEKDFLYSTSGKALVKHFACNPYRIIEAGFDSFLRAMKEDAPRIRRKSLERLWRDAENSVLNDLPKRYVEVLEAHFLELMEDHSVQVERKERIVKEMTAILDKLREEDPNIPPPTPGVISEKNLARLLGETGPVGDFENWNRLLRYGGLNIRQRASGKFKGKDRITKRGAPLLRKVLSQIVLPLVRKKCLYGEYYYRKKEIEKMPGTKAMTVMMRNFLKKFYGWYKTGGAFDEKRFFKCETEYRIAA

SEQ ID NO: 333739 - protein, 415 aa, unidentified
MDSGCNSQMGGMQMNSVGIDISKGRSTVAVMRPFGEVVISPFEVRHTDSELSKLARQLKSLDGETRVVMEATGNYHAPVAKLLHDAGLYVSVVNAKLVHGYGNNELRRVKTDRKDAVKLANYGLDRWLTLPRYVPEENTRLLLKNCYRQYRQYSKVQTVLKNNLISLLDTVFPNVNRLFSSPVRGDGSEKWVDFVAEFWHCRCVTEKSEKAFTNKYQRWCKTHGYNFSEAKAHTIHAKASGHIGIMPKSETTKLLVEQAVVQLRTTSTTLTALKREMLTLAAQLPEYPAVMGMFGVGPTLGPQLIAEIGDVRRFYSKKALVAYAGLDAPPNDSGDVTGKHKSMSKIGASSLRRTLFLVMSVYLQNAPLDEPIYQFMDRKRAEGKPYRVYMMASANKFLRIYYATVKAYLESLEQV

SEQ ID NO: 333740 - protein, 456 aa, unidentified
MDGSYAGVDWASEKHDVLVADAAGEKLLAATFAHDEKGLRSLCRQLVRLKVRLVAVERPDGLLVERLLDAGLRVLVLHPNQVKAARDRFRVSGGKSDRFDAFVLCELARTDHHRFRVLEPDSDATKAIRALTRGREDLVGARTALVNQLRAELDRFWPGPLGLFSDLHSQISLAFLERYPSPADARGLGEARLQAFLARERYSGRQQPAALLAKLRAAPAGRVGELELATRRQLVRGLVAMIKQLNGQISELERQIATAIRQHPDGQIFTSLFKGSVLTAAELLSEIGDCRARYAARDTLASDAGQAAVAIESGKRKAACFRWGCNKRLRDAFHTLADSSRHHNPWAQDLYAQALARGHDHPRALRTLGRAWCRIVWRCWQDGVPYDPARHRALQRHITVTIPTPSGPVPDLATTRRMAGAAVTRRAARRAERAALDRKPTSANRPARPVHHATGG

SEQ ID NO: 333741 - protein, 422 aa, unidentified
MRILEPLQIFILEESVMLNAVGIDVSKGRSTVAVLQPGGVIVHKPFDVPHKSRNLHDLVQYLDSLEGDTRVVMESTGRYHEPIRNVLSKAGLFVCTVNPHLIKNYGNNTIRKVKTDSADAKKIARYALDNWAELREYTSMDTTRTQLKTLNSQFSFFMKQKTAAKTNLIALLDTTYPGVNKLFDSPVRADGSEKWVDFAYSFWHVDCVRNAGIKAFTDRYKRFCKHHGYEFQEAKANAIYKDSRELIATLPKEAVYKELIQESIRQLNLLSENVEHIRKTMNELASTLPEYNTVMHMYGVGPTFGPQLMAEIGDISKFQHREALTAYAGVDPGKNDSGQEVHNSSHASKCGPSRLRHTLFQIMTTMLQNGVKEDDAVSSFLFKKKAENKPYLVYMTAGANKFLRVYYGKVKECLRDQEQAEQ

SEQ ID NO: 333742 - protein, 444 aa, unidentified
MAGRSQVVSVGVERRNARLTSLRRLVPLDAAIVGIDLADDKQAVVISDHDARVLDRRMIRGNVWQAIAALPWAEKVARDAGFTRIVLACEPTGNRWKPLLQHARDTGLELVCVNPMLVARGREGEDYTRERSDYRDGAVIGRLTGERRCFVPYQPEGAWARLRHLGIHRDQQLERASAARQGLRDLLTCYWPTALAAAREPMTSLTLRALMSVSADPEEIARLPLEVLTTRAKPILANWGGRRLNHSILHRLHHSAREPGGVRAERAAASERATLTAHAWLDATTRQRDAETRMTSILDELDLTTLVRTLPGLSLTGAATILAETGDPSRFTHARAWVKHAGLCPRANESGNYQGHTRTSGRGRGRPRLRTAAWRVIWGLLPHNHVYAARYTHLRTRARNPLNDGQARTALAAALLRQLFVMIRTRAAWNPVIATGRDELLDAA

SEQ ID NO: 333743 - protein, 335 aa, unidentified
MQIKHFIGIDVSKDTLDLSVVVEGNNLQHYCIKNSTREIKSTVNRIMKTFGAIVDDTVFCMEHTGLYNRPIVNWLHNNQGKMWLESGVHIRRTLGLVRGKNDKIDSSRIAMFAYTNRHQIKLWTPPRVVIEGIAALLSQRARLVKAKKQLTTANKEQKKFLDKNIMHSLNKYTNRTTTVIDKQVEAIENEIIGLISADEKLNQMYQIITSINGIGLVTASYILITTNEFINISDPKKFACYTGVVPFEHSSGTSVRGRNRVSHIANKSMKALLHLSAISTLNTPGEIQDYYNRKIAEGKNKMSIINAIRNKLILRIFACIKQNRVYEKNYCYKLA

SEQ ID NO: 333744 - protein, 425 aa, unidentified
MNYKQNEKINQVKESTLVVGIDIGSTTQYARAFDWRGIELGKVFTFSNSREGFEAFKAWMQHLQDKYRKSDVIVGIEPTGHYWFDLGAYLEDEGILLVMVNPYAVKQTKELDDNSQSKNDRKDPKVIAKLVTEGRYSAPYTPDGVYADLRIMVANRKRLIREMTQIKNRFARWFAIYFPEYTDVFGDYEAQSSMLLLKKVCTPEAIVELGAEKINQIWRDAKLRAVGMKRATTLCETAKRSIGLKKGSSAARYEMKLLLEDYEYKKAQLDAVMEEIEKLCRKIPESEQMLAIKGIGVITVAGFLAEVGDVRRFESPRHIQKLAGLSLRENSSGKHKGQTTISKRGRSKLRAVLFNAAIPLIAKNPEFKSLHEYYTTRANNPLKKKQSVIAISCKLIRVFYAILAKGVTYDAQKLISDIHRQPQVA

SEQ ID NO: 333745 - protein, 456 aa, unidentified
MAKLSKRNNKTKRDWDEGLAALNRNAAGIDVGNAEHYVAVPAGRDSEPVQTFGSFTADLHRMAQWLKACCVETIVMQATGVYWVALFQILESHGFEVNVVNARHTKTLPGRKTDVLECQWLQKLHTFGLLNNSFRPTEEIQILRTYLRQRENLVAAGSTCIQHMQKTLTQMNVQLANVISDISGVTGMAILRAIVAGERDAEKLSTLKHNRVRASREEIARSLEGNWREELLFVLEQSLELYDLYVRKIAVCDQRIERHLKTMTSKLEPEQKSDPGALPSAKHEPRFSLKDHLCRITGVDLTRVAGLQVQTVQTIISEVGVDMSRWNTEKQFASWLGLCPDNRVSGGKILKSGTRQVVNRAATALRLAAWSLIRSQSALGANFRRLRSKLGAPKAITAMAHKLARLIYRMMKFGGEYVDKGMAAYESRYRQQQMKWLAKQAASLNLQLVPSTEVTG

SEQ ID NO: 333746 - protein, 333 aa, unidentified
MLYAAIDIHKHAFQAAVLDPDSGQVVEERFSADRESLARWAEPWRGRVGAVAIEATTGWRWVWRELVANGFDVRLAEPVQTRALLGRRRSAKTDRLDARWLARLLAKEMLPESWIPPAEIQVLRDRTRLRKALAEDRRRWGQRLHACLLHEGWPCSKSNLLRPPGLRWAASLKLSAHARLQVDSLLAVMAALEAQLDVVDSELRRFARNDARGQALQTIYGVGPILACHLLAEIGEASRFQRADQITRLAGLDPVVDESGESRRRGKLAKAGSPHLRWALNEAAVHAHRPTAPDLALYRATRERRNMAVARLTVARKIGKRAYHALRELELAA

SEQ ID NO: 333747 - protein, 332 aa, unidentified
MDNFYFIGVDVSKKKLDFCVLFEGKVLREEQVSNHQQAVARLIGELKNDLEMDNEQFLICAEHTGQYTFPLVCACKSVECKLWLENPSQIKYSSGMQRGKNDKVDAKRIAIYASRFGDKVKYYDRPSEEIERLKQLERERALYVTDLAKYKGQMYDQKDFMPAALYRKKTKRMKGLIQELQAAIDAITAEMEKIIGSTEVLARQMELLMSIDGVGKVVALNVIIETEAFSRFDDPRKFCCHAGVAPFSYTSGSSQHSKNKVSHRANKNIKKLLHMAAVSVTHRKEGELKAYYMRKVEEGKNKMSVINALRAKIVARMFAVIKRNEVYTPIYS

SEQ ID NO: 333748 - protein, 450 aa, unidentified
MTHHVQEIDAEDHEEIVERVAAIDVAKASGKVCTRVPHPSIAGRRLTKVWDVAATTNAIMGLAEDLAGAGIERIVVESTSDYWRPFVYLLQARGLTTWLINARNVKQVPGRPKTDKLDAVWLAKLNERGMLRPSFVPPEPIRQLRDYTRLRVDLTEERSRYKQRMEKLLEDALIKLSTVATDIFGVSGRAMIEALVAGERDPIVLSVLARGSLRVKHAALVEALTGRFDDHHAELARMLLDQVDALTTKIDALTSRIEELIAAIPAAQAPPTGTSSGSGAPDPDAAPLDAVARLDEISGIGVRAAQTIIAEVGLDMAQFPTAGHLVSWAKLSPRTVQSGPKRRGGKTGKGNPYLKGILGEAATAAAKTDTFLGDRYRRLVKRRGKLKALVAVARSILVIVWHLLADPTARFHDLGSDFYATAVNKDRRTRNLVHQLEVLGHKVILTPAAA

SEQ ID NO: 333749 - protein, 354 aa, unidentified
MSKVKQLCFEGETIYIGLDVHKTNWKVNSRMGDINLASFSQDPDAKLLSKHFKSNYPGAKLKVAYEAGFCGFGIQRSLAEQDIDCMVVNAADVPSSDKERKRKDDKRDARKLSRELADGSLTAIYVPDIEMEQSRSLVRQRHRLVQDQTRCKNRIKHLCMFSGIKLNIDKENWSGRYVKELEKASCGTAALRMALDLGLEEYKQLRALLKQATVSIRKMSWQQPFAGVQQYLQSLDGIGLVNGMVVQTEIQQINRFKTLDSLCDYAGFVPDINSSDERMTIKGITQRCNEFLREAIIESSWALIRKDPAMLMKYNEYRRRMNKNKAIIRIGKHLLARIRYVWGNQKKYERGIVG

SEQ ID NO: 333750 - protein, 413 aa, unidentified
MSEEAFAWFVGVDWGSEKHQVCIVDPQGTIVGERSLPHSGAGLAELGDWLLSITGAANTVAVAIEVPHGPVVDSLIDRGFAAYTINPKQLDRLRDRFSIAGAKDDRRDGYTLADGVRTDRRLFRRLHVADPRLVELRAWSRLTQELTEERVRLSNRVHHELWRYMPQLAKLTDDLAAPWFLELWTLAPTPAKARQLRKSTIEQLLKEHRIRRVDAETVFSTLREPAIKVADGVAEAASVHMRSLIARLRLVNRELREAERQLDKICTMIGETDAASGDCLQRQDIMILKSMPGIGRINLATLLSEGSGPLSRRDYPALRTLCGAAPVTKRSGKSCIVIMRYAAHVRLRQTAYHWARNATQHDPISKARYIALRRRGHSHGRALRSVADRLLGLACVLLQKQTPFDPQYGHPAA

SEQ ID NO: 333751 - protein, 432 aa, unidentified
MIPAILERCAGIDVGKSMVAVCLITGEAAAEPHVEYGNYGTFTADLERMKEWLLAAGCTHVLMESTGSYWKPLFNVLEDRLKVYVANAEDVKGRKGHKTDKQDSWWLAHLFRHGMVRTSFIPPPAIRELRDLTRRRRKVLGMATSEKNRIAKVLEDANVKLGSVLSNLFGVSGQLMLEALLEGKATPEQMAQFAQRRAREKIPQIAASLEGHRMSEHHRLLIRMSLDVLRCLESQVMALDQEILRSIERHGYVRQLELIESVPGLQREAGVVVLAETGGDMSVFPTEQHLSSWAGVCPGNKRSAGKDFRGHTTRGNRWLRSTLTQCAWAVAHSKEGPLREKFWKLAVGGTKKAVLATAHAQLRVVYRVLSTGQPYSQSPAAPPDEAHRQRMIRHHVRCLGRLGISAGPMLAQVHRPHHTKTRLEVSHQHRKQ

SEQ ID NO: 333752 - protein, 343 aa, unidentified
MKNKNVIVKQIIGIDIGKESFYACYKVQYDDKSTAIKGTKSFENNPSGLKEFYQWGDTRNKTPEIVPIYVMEATGVYYEELAYFLYHKKQTVSVQLAQKIKYFAKSCNLKTKTDKVDAKMIAEFGIEKNLAGTDLWTPPSEDFKMIRDLAREHTSLKQSQTAAKSQLHALNYAHGTYKEVIELKQQQIAFYEKQIKAVEKEIEMLVKMDSKLHSKIKKIATTKGLRFITIIKVLAETNGFLLFKNIRQLVSYAGLDIVEKESGKYKGRTKISKKGNARIRSALYMPAMAASQHNKTLKIFYERVNEGKTIKRQGLIAVMRKLLILIYTLWKKDEEYIENYQMG

SEQ ID NO: 333753 - protein, 413 aa, unidentified
MSLNVGEALCFVGIDWAAATHAVCVLDTHGRRVAGFTVEHTAAGLAGLIRRLARLGRAEDMPVAIERPDGRLVDALLQAGHPVVPVSPNAIKTWRESETGSGAKSDAADAYAIADYLRCRHHRLSLAVPYSAETKALRTVVRTRDDLVDMRVAATNQLAALLETHWPGAKAIFADVESPIALEFLTRYPTARHAQHLGAKRLAAFCAKHGYSGRRSGEQLLVRLRAAPTGTTDDVLCEAVRDAVTALVTVLKAVGAALKDLGRSVTATLGEHPDGPVFTSLPRSGQINAAQMLAEWGDCRQAYDGPDAVAALCGVTPVTKESGKHRAVHFRWACNKRFRVAITTFADNSRHENPWAARVYTEARARGHDHPHAVRVLARAWIRVIWRCWIDKIPYDPARHGNATRHAEQLNAA

SEQ ID NO: 333754 - protein, 412 aa, unidentified
METQYILAGIDVHKKMLAVVVANAGEIELQFECRRFGTTVSELRHLSAWLQERAVQEVVMESTAQYWRPVWLALEGQCRLHLAQARSNRGPRGRKTDFRDAQRAVSRLISGDLILSYVPEAEQRCWRTLTRTKYQLTRDRVRLQSQLESLLEECQVKLSSVVSDLLGASGQRILRAMAQGETDPVRLAELGDKRLRASDAELRDALSGEPQGIHRQLLSLYLARLDLIESQMASLDKMIAEAMKAHQDAIVRLAELPGLGIDSAQQIIAEIGPQADAFPSAAQLASWVGVCPGRQESAGVSSSDRSAKGNRSMRRLLNQLAHAAVRKEDCQLQIVFRRLSARLGYAKAVWAIAHRLCRLIWKVLHEGISYVEYGPAPTPITLKRRRQRLVTQLKNLGYEVQLTPRLPDSSGA

SEQ ID NO: 333755 - protein, 415 aa, unidentified
MPMTVYCGIDWAEEHHDVAIVNDSGGLVARLKIGDDAAGYRQLIDLLADAGDNPQQPIPVAIETSRGLLVACLRATGRQIYAINPVAVARYRDRYTVSRTKSDHVDAVVLANILRTDMAVHRPLPNDSELVQAIAVLARAQQDAVWDRTQAHNKLRSLLREYYPTFLLAFRDARGGITRPEARAVLAAAPTPTQAATLTPDDLADALRRAGRQRGVTAEADRLHQALATATLHQPPLVEQAMGRQALALLRALDTACLNAEELATAAEQSFDQHPDAEIITSFAGLGRLIGARVLAEIGDDRSRFADTRALKSYAGSAPITRASGKSLIVMHRRVKNQRLAHASHLWAFSALTASPGAHAHYQRRRTAGDGHTAALRHLSNRLLGCLHHCLQTRQLYQETTAFTPPQPQQLPTAA

SEQ ID NO: 333756 - protein, 341 aa, unidentified
MGDYIGIDLHKTKSFVTRMTAQGHILEQVNLLQTTGALPQYMTALPADVHVAVEATGNWMWLYEQIEDRQLDLVLAHPLKVRAIASARIKTDKIDATTLAHLLRTDLLPTAYIPPRAIRDQRELLRYRASLVRLRTQVKNKIAAILTKTGVRTPTKTAFGVKSRRFLAIVPVRACYRLALDGYLRQLEHLTTEIRGADQVIAEQVTADPQAQLLCTIPGIGAYSALLIRSEIGDIHRFPDSRHLCSYAGLVPSVHASADTTRLGRLTKQGSSWLRWILVEVSVHAINGAPQFRSLYYRVAKKHGHNVGRVAVARALLKTIYAMLTTQQPFRPIRKGSPVSA

SEQ ID NO: 333757 - protein, 351 aa, unidentified
MPMVVLGIDAHKRTHTVVAVDEVGRQLGVKVTQSTCTAAHLDLVVWADRFGPERRWAVEDCRHLSRRLEADLLAAGEQIVRVPPKLMARARDSARTYGKSDPIDALAVARAALREPGLPTARLAGPERELRLLVDHRENLVAERTRAVNRLRWHLHELDPGWDPRPRSLSRRTHLAAVAARLAGAEGMVARIAIDLTARITALTTDINALEREISARVRELAPSLLAMTGAAELTAAKIVAETAGVDRFKSKDAYARHNGTAPLPAWSGNPNRHRLARTGNRRLNCAIHRIAITQKRCHPQAQAYLKNRAAAGDTKTEALRALKRRISDAVYRNLKADTENNPAVLLGQAA

SEQ ID NO: 333758 - protein, 346 aa, unidentified
MKITTIGIDLAKEMFQIHGVDAHGKAALRKQLRRSEMAKFFGNLEPCLIGMEACGSSHHWARKLGEFGHTVKLMAPQFVKPYVKTNKNDMADAEAICEAVGRPNMRFVPMKTIEQQAILSVHRARQGFVKMRTAQANQIRGLLSEFGIVMPQGIRSAAKRIPDILEDAENGLPGTMRYLLKRLTENLGEMDRQVEELEFQIKLWHKENELSRKLEAIPGVGPITASAIVATVGNALEFQDGRQLAAWLGLVPRQHSSGGKQNLLGISKRGDTYLRTLLIHGARAVIRFAENKAEPEGWLRTLMARRNKNVAAVALANKNARIIWALLAKGTTFRLDHTSAACAGAA

SEQ ID NO: 333759 - protein, 402 aa, unidentified
MTDAPNRYIGLDIHKEYFVAVGVNEKLEATFGPQRVSNYLLDDWILRCLTPEDAVVLEMSTNTYQFYDALLPHVHSVMAVHSPNVAMVTNVRVKTDNKAALALAQLHAAGLLTGVWIPPYPVRDLRSLIARREKMVRLSTMAKNRLHSMLHRHHLVTPEKPFAPEQRTWWESLPLSANEQFLVRSDLDTLDFAQKQVGQIEECLKQESAEDGRIPLLIQLPGVAMLTAITILAAIGDITRFPTAKKLVGYAGLGTRVHHSGMTHSNGRITKAGRKDLRCAMVNAANHAVEHHVHWKKELERLTPHLGRSKAIVAIARKLLVAVWHVLSKQVADRFADPRDVASSFIRYAYRIGVRNLPNQQPALSFTRDQLDRLGVGRDLKEIPWGSIRFKLPPSILLLEKE

SEQ ID NO: 333760 - protein, 428 aa, unidentified
MNSTEIIRRKKYCQITEEICGSEQYMIVGIDVAKDKHHAFIGTANGKVLSRKLIFENNRKGFSRLIDQAQFLQTQNGLSKVVFALEPTGNYHKPLGSYLAGNGFNVVLVSGKSVKNNREVLDGRWDKHDTKDAANVADLASRGRCQYYDRPSEKIIERRDLLSLRRRLKKEEHSLRMRIRNGLLAQYFPELDRFYNACESESLAIVRWCLNPESIAAMEFDRFFEVVTRNRRGITQKLRLQKIYQAAGESVGCRVKQTAEFEAALLVEKLNQVRNQVHETEDYMKEVCQTFPEYDYLLTIPGFGPYVSARVLASVADPFRFDSRKQIIKMAGYDLCANRSGKTSNKAVPVISKNGNGELRYALYQAAKVASSRVDIFRAYFAGMLRSREREKGIIAKMRVKLAVKMLVIAWTLMKKRESFDPAHLNIE

SEQ ID NO: 333761 - protein, 491 aa, unidentified
MWNCGNLKSINDSLSRLDGLPPPYGPDPSGTICQRLPLPADLTGNIHSGCYGPRLTPRDHLSPRLYRVRSMQGGYLLKANTQKKGEPIMFCLGIDVSKKSCRYLILNEEGQKITSFSLDNTYEAFQNLLERLKTLSIPKEKLLIGLEASGGFWENLYSHLKENGFSVVLLNPYHTNKFREALAKKAKTDDIDALVIAQLLRTGEYVQSQVAEELIQSLREITKLRYELIKERKNYQRQVFSLLSVIFPEYEKTALKNPFSIASTAILQRFSTAKDLAQARPKQIEKIVRSIQGNNFNIKEIETLIQIAKTSIYSGRAKEARTTSLQILLGHIRNLSDSIEKLEKEIQQLLSPQEPQNPFPGENLFTIPGVGNKTIAAVLSYLGTDGSNFSTSTEAIGYVGYFPKIYQSGQTYRDNSICKRGPKLLRWAIYMAAVASLKHNPEMRTLYHKKLSQGKTEKQALICVGKKLLQIMLAMLKSGEPYNPAKVFVSC

SEQ ID NO: 333762 - protein, 328 aa, unidentified
MQSAVLGIDVSKDRLDVCLLVSEDRHSEQFDNTTSGCKSLRQWINGHRISHVHACLEATGTYGDRVALDLHQAGHQVSVVNPVRIKGFALSRDLARTKTDKIDAGVIAAFCRALNPVAWTPPPPERLALRAMVRRLQTLKTVKQQERNRLSSGELCPIVRDSINQHIAFIEQQLDALQRAILAHIRQHPCLRADFDLLKSIKGIGDQTACVLLAEILDIHQFNTAKQLVAYAGLHPALNASGKRQRSHTPISKKGNARLRAGLYMAGICAKKHNPPVRALRERLEARGKAKKEVTVAAMAKLLRIVYGVLTSRRPFDPNFVQFQAQTP

SEQ ID NO: 333763 - protein, 421 aa, unidentified
MTRRIAGIDIHKNVLMVVVATVLEKEIDGGMEQQIEYEGRRFGSGAREREHLVAWLRERQAEEVVMESTAQYWKPVWMDLELHFPKLHLAQAHSNKAPKGRKNDFADARRLTRRMAAGELILSFVPDGEQRTWRTMTRGKQQLVRDRVRLQNQTEALLEEMRIKLSGVVSDLFGVSGRRILEALAGGETNPEKLADLGDDRLKCGREALVDALTGHSETMHLQILKLSIERLKLLDRQIEALDRMAAGALKKHADAVTRLAGVPGFGVDSAQQVIAEVGSDAKSFSGAGELASWVGTIPGSDVSAEQNHSSRSPKGNKFLRRIFTQAAQAAVKTKGCHFQNVFRRLVPKLGYKGAIWAIANRLCRLAWKILHEDVSYIEQAAETTPQAKKRRAQRLTQALRRLGYQVALTPIAPTAEVAQG

SEQ ID NO: 333764 - protein, 348 aa, unidentified
MKILAIDLGKFNCVSCLLDTESNETEFDTFKTYRREFKEILRRTHPHLVVMETCSITGWVHDLCVEQDYSVLVADPSQEAWRWKNVKRKTDKDDALKLAKLTALEQINPVYVPTPETRQYRHLVKYRKVMVWRINRIQNAIRALFDQQGVKMPSGHRAWTVQGIDELSQHRRVLAECDEQNLWRGELDLELTMLDQLWEHLATIERKLDILAKQEERIQLLQTIPGVGRKTAEVIVTCLDDPKRFKNSRQVSAYAGLIPQQHQSGQTNRLGKITKRGPRLLRTALVEVAWLMLRYNDWAAATYARISGGQKTRKKTAIVAVARKLLVRCWAMLLHNQPWNPELAQPTT

SEQ ID NO: 333765 - protein, 408 aa, unidentified
MRIVGLDIHRVFAEAVMLDDGRAVRLGRIGMTREHLAAFARKLRRDDHVVVEATGNATAVAEVIRPHVGRVAIANPRQVRLIAEARIKTDAIDATVLARLYASGFLPEVWVPDQNTLALRRQVTRRNQIVRQRARLKTIIQSILHAHLVPPCPHADLLGPKGRAWLLGQALPADEQDAVARHLREHDRLSEDLRVVEREIARDALADEDTKRLMTVPGIDMVVATGLLAAIGPVERFAGPDKLVAYLGLNPSVHQSGDGRPRHGRITKQGRTHARTMLVEAAWQAVRGPGPLRAFYQRIARRRGNHIAAVAVARKLAVIIWHLLKRGEDYAWVRPALHAKKLRDLELRSGQPARRGQRGMAYKYNLSRIRLEERRRAEQAETAYKRLTEAWIPRGKRAPTGAAKEERP

SEQ ID NO: 333766 - protein, 381 aa, unidentified
MSLQSAPARPIIYLGMDVHKDSITIAVLPAGAKTPTHLERLPNDLAKLKKWLDRQAREGELRACYEASGAGYVLHRALRGWGYACEVIAPSLVPKRPGVQRKHDKRDATDLARFYRAGELTVVRIPSEAEERVRDVVRCRETFQREILKSRHYILKFLARRGFVFRQGTNWCGPHLQWLQHLTTDGSPLALHDRLVFREYHALLMYKLQRRDELDRQIEALAVLPALAPMVNRLQCFRGISLHSAMVLATEIVDWRRFERPAQLACYLGLISREDSSGDRTRLGSITKAGNSHCRHVLVQAAWSYRHRPQTSVDLKRRQQGQPPAVITHAWKAQHRLHQRFGYLVERKRPQIAVVAVARELVGFLWAVMQDLATADAQAAA

SEQ ID NO: 333767 - protein, 572 aa, unidentified
MSRPSLLLRDAALGYASRGIPVLPLHYPLPHRSDLQALAGGRPLGPAAGSGCSCRDPGCSQVGKHPLGVLVPHGVKDATCNRARVLAWWTQHPQANIGLATGNRFDVLDVDGPEGAHAIQAFAAEHGLESSGPLVRTGGGGWHYCEGEQGRCAKRRSRPGLTLGITGVLPSDRSVDQLPRTPPGAPSVDGVTSEEPGLGPRRSTVRRLAVGALPANRRAGKDDMASLPAVVRQVTVGVDSHKDVHVAAAVDQVGRVLGTTWIPTTTQGSAQLLRWATRLGQVQRFGIEGTGSFAAGLSRWLQQQGYQVVEVNRPNRQTRRRRGKSDPVDAEAAARAVLAGEATTTPKAANGTVEMLRVLRVARRSAIKARGQAANQLHSLLVTAPDPLRHQLGALPLARLVQVAAAVRPGPLTDPLAATKFTLRELARRYQFLTAELDRLDAQLAALAPKAAPRLLTRRGVGAQVAGALLVVAGDNPGRLRSEAAFSMLCGSSPLEASSGKTVRHRLNRGGDREANNALWTIAMTRLSCDERTQRYLARRTAEGKSKREIIRCLKRYIAREIYQDITAAVGS

SEQ ID NO: 333768 - protein, 354 aa, unidentified
MLKRKSKPKAKATIAPQPTLAGLSGAVGIDVSKSKFNACYLADSQSRGQDGEFTSDAAGHAKFLAWLDRVGAGRALHLCMEETGCYGQALAAFLHEAGHHVSIVNAALIKNYGRSLNVRTKNDLVDARLIAQYTLERVPKRWIPLATEHQALRNAARRRDQINEFIVKEKNHLEASPNPEMSKMINRQIKHLQACKAEIEKLMAGLVAKDPQLARNAQLLMTIPGIGNITAVNLLAELPPLDGFTSARQLCAYAGLTPRENTSGSSLRGKPRLCKQGRGVLRRIMFMPALSLMGSKSGPLRVFADRLLNKDKKPACVVGALMRKLTALVFAILRSGQPFNPKYAHSFATAGPQN

SEQ ID NO: 333769 - protein, 385 aa, unidentified
MPDVSSNASAATTRTFVALDVHKNLITAGLLPREGGQPELVQLENSEKAIRRLIDRVGDRGGLAVCYEAGPCGYEPYRLLASMGVACDIVAPSLTPVRPGDRVKTDRRDARKLVRLYRAGELTFVSPPTPGQEGLRDLVRCRDDLRRARTAARHRVGKQLLRYGRVYREGKKAWTLRHQAWLRRQRLDETLAQSAFEHMLCHLDAIDAQIAAVDRQLDEIARSAPWCDPVRWLCCFRGIATLTALGLLAEIGDFRRFGSPRELMSFLGLTASEYSSGERRQRGSTTKTGNRHARRLLVEAAWHYQHPPRLSARIRAHDGLVPAEALARAWQAQIRLHQRHRHLTGSGKLPNVATVAVARELCGFLWAAMTRQPLEQQPKEVIRAA

SEQ ID NO: 333770 - protein, 349 aa, unidentified
MTNFVGVDLHRNNFTYCIRVNGEERKIGKCEITELKGFAAMLGPNTAMAVEATGNTFMFCSSLRAYVGRLVVVNPSQFKVISMSTKKTDKHDAKVLAEFLEKDMLPEVRMKDDLQAKISSLTQTREKLVQLRTVLKNKVNNLLAANFIVLKREELSTEKGLVKALSYRIDPITDTEMLVVVEQIRSLNKSIEKLDKAIEDHGSKMDGFSNLKSIKGIGTKGAAILLATIGNIHDFRSSKHLAAHIGIVPRVSNSNDTVCHGRITKNGSKTARTALVQCALIAKRYSPYLNAFHESVKSRRGGAKANIALARKFLDIVYKTLKNNWMFEDFSQFKLVKNCYCPKFCETHL

SEQ ID NO: 333771 - protein, 413 aa, unidentified
MDVLYERCAGLDVHKKTVVACRIVPKSGGGWQHERRTFDTMTSDLLLLADWLRAARVTHVALESTGVYWRPVFNILESDFVVIVVNAQHIKQVPGRKTDIKDAEWIADLLQHGLLKASFIPEAPQRALRDVVRYRTALIQERSREINRVQKVLEDTNLKLGSVVSDVMGVSAREMLVSIIDGLDDPAALAQLAKGRMRSKIADLERALTGNVQDHHRLMLRLHLEHIDDLNAKVEQLNQEVERCVVPFDQADEIMRLDTIPGVGPLVAQGILAELGIDMTRFPTSAHAVSWAGLAPGKNESAGRNRSAKTTKGNRHLKALLVQAAHTVARSKDNYLGAQFRRLAARRGTRRAAVAVARSILVIAYHLLRDGTQYIELGADYFDKRNQEQVERRLVKRLQQLGHKVTLEPLSAA

SEQ ID NO: 333772 - protein, 323 aa, unidentified
MLPPQQQVMLMRGTKDKEHAMAEALKIAFVGIDIGKNSFHVVGLDGRGAIVLRQKWSRGQVEARFANIPPCLIGMEACVGAHHLSRRLQRLGHDARLMPARYVRPYSKGQKNDFRDAEAIAEAVQRPTMKFVATKTADQLDLQGLHRVRERLVSQRTGIINQIRAFLLERGVAVRQGLRFLRAELPDILAAPSDALSLRMVRIIEDLAGDWRRLDERVERLSKEIEAIARRDAGCERLISVPGIGPIISSAVVAAIGAGDVFSKGRDFAAWLGLVPRQISTGDRTILGKISKRGNRYLRVRAGRVGGADQAEELGASRAQVLD

SEQ ID NO: 333773 - protein, 342 aa, unidentified
MKDTMIGVDLAKNVFQLHGASMTGDVKYRKKLSRGQFFRFMSEQPPALVVMEACGSAHYWARELVKLGHAVKLIAPQYVRPFVKRQKNDAADAEAIVIAARQPEMRFVEPKTADQQARAVLFRARERIVHQRTELVNALRAVLYEYGQVIPQGIGHVKRIEVIVEDVEIDLPELVREECRDLLAQISEKTARIEEKTKKLADLSRQSETARRLQTMPGVGPLIAVAVEAFAPAMENFRCGRDFAAWLGLVPRQFSSGGKERLGRVSKAGQADIRRLLIIGAMARVSWASRKPPAQGSWLSRMLAKKPRMLVAIALANKMARRIWAMLTKQEDYRDPALAVAA

SEQ ID NO: 333774 - protein, 334 aa, unidentified
MQNVALIGIDLGKHSFHIHCQDKSGNALLRKKFTRTKLMQFLATCPSSVVVMEACAGAHFMARRISDIGHEAKLISPQFVRPFVKSNKNDFIDAEAICEAASRPSMRFAQPRTETQQAMRALHRVRESFIRDKVKTTNQIHGFLLEFGISLPTGDAAIKRLSLVLAEHEVPEYLSRLLMKLHAHYLYLIEQITELESELNQSIKADATAQRIMTIPGVGPMTASLLSSQLGDGKQFSCSRDFAASTGLVPRQYSTGGKSTLLGISKRGNKNLRRLLVQCARSFMMRLEHQQGRLAEWVRKQFDNKHSNIVACALANKLARIAWAITALQKEYQA

SEQ ID NO: 333775 - protein, 344 aa, unidentified
MQSMYYIGLDVHKRTISYCVKDGSGTIHDEGTIPATRFDLDRWMKTLPQPWTAAMEATVFTGWIYDHLQPHAAALKVAHPLMLRAIAAAKKKNDRIDANKICDCLRCDFLPECYMASTAIRERRRTLRYRNLLVRQMVQMKNKISMLLMEAGVSYNKQRLHKAGYFRELLATNPAIDEGLCSLLRLCRETVVRLGKTESALVRSLERDSLLIDRVERLMSIPAVGPITALTWALEIGDPQRFPSIKKAISYCGLCGAEKSSANTVQRTPLSKQRNKHLQTTLIEAAKMAPRNSPELAMLYAKEKQKGNANRATLAVARKLVAYLMAVDRGQRNFQVVQTNCIAA

SEQ ID NO: 333776 - protein, 363 aa, unidentified
MTTIGAERPDTEVAVILGVDTHLDFHVAVAVDHLGRRLGESNVPTTVKGYEELLRWAEDFGPVRCAGLEGTSSYGAGLTRHLRAMGIEVLEVERPKHRRRSSRSNLEKSDPSDAYSAARAVLAGEVSGVPKSGDGRVEMIRTLRAARRSAMKARTQAANQLQGLRLTAPEQLRHRLRGLSTRELVSVAARFRLGDGPTDVPTATRFALRSVARRYEALSGEIAELDAHLDRLVAQLAPELVCLPGIGTENAATLLIVAGDNPQRLRSEASFASLCGVAPIEASSGKVVRHRLNRGGNRDANRALYMICLARMRRDHRTQQYVARRTAEGKSKREIIRCLKRYVAREAYRVLISCVACSSPTGP

SEQ ID NO: 333777 - protein, 318 aa, unidentified
MSHGYDKFVGIDVSKDALDVHGLPDGSPSRFDNTAAGRAKLLSLLPPAGACLSVVEATGGYERDLVAEAVTAGHHIAVVNPRQVRDFAKALGLLAKTDRIDASVIARFAETTRPVPKGYDERQEQLRELIVRRRQLLDHRTAEKNRSEMAHSSLVRKSVLKLIETLNKDIQRIEKAILQLVESNDDWRERFEKLKGVPGVGGQTAATLMAELPELGQLNRQQVAALVGVAPFNRDSGQFRGRRAIWGGRQSVRNALYMAALSAKKHNPVIREFAARLMAKGKPPKLVLTACMRKLLIILNAMLQSGDSWSPRVATLTP

SEQ ID NO: 333778 - protein, 409 aa, unidentified
MTAPPVAVQPQFFAGLDWASKTHMVCVVDQSGEIRARFEIPNMGKSFTGLVKRLTKLSVAGVAIERCDGLLVEALLEASVPVFVITPRQVKGLRSRYSGSGSKSDAGDAYLLADVLRTDRHRLTPLTQDGEATQVLRALSRTRKQLVESRVGLVNQLHAELERCFPGAIGLFARLDSDVAITFLRRYPTQHAAARLTRARFAAFLRRISYCGRTPVDELFARISDAPTAGLTATEAEGHAVCVLALIRAIQTTRGEERELEAEIIERLDAHTDAHIFTSLPKAGHGVRAALLLAEIGDVRGRFPDEESLAALAGVAPVTRASGKAHSVGFRWAADKKLRNALIDFADDSRHASPWAAKIYRDAITRGKRHPHAVRILARAWVRVIWRCWQDHTPYNPQLHGGAMQLIAA

SEQ ID NO: 333779 - protein, 302 aa, unidentified
MDRATNSTAPADRLFCAVELSKNSWLLGIQFPDRQKASVYPLKGGDSEGLMAKLVAACDRWTKVSGKKPSIILCYEAGYDAFWLARFLRARGIECLVVDSASMQVNRRSRRAKTDRIDLGKLLRALIAWCGGERHVWSVVRIPSVDEEDLRRSHRERSRLITERTAHINRIKGLLFAQGIRGINVKARYRTLRVDKLVTGEGRPLPPRLAQEITREIDRLGLVQQQIAAIEQERDESPTTCKETEKKRAQLLLLKGIGPTGSAVMAREVYYRQFSNRRQVAGFLGLATSPYDSGQMERSQGI

SEQ ID NO: 333780 - protein, 430 aa, unidentified
MKSNTQNAKIEAITEKTLVLGIDVGSETHYARAFDYRGIEYSKKPFKFSNTEVGFATFKEWILDLKERHEKDKVVPGMEPTGHYWFNLGKFLQDNEMKPVLVNPHHVKKSKELDDNNPTKNDRKDPKVIAGLVREGRYMIPYLPDGVYADLRTASNIRFQLQAELTRIQNRISRWFNIYFPEYKTVYGKPDAKSGMLILKAAPLPEDILTLGIDGVNQIWRDAKLRAVGKARAKTLIEAAEHSIGSKEGTMSARMEIRMLLEDYESKNMRLQEVMVLIEELVKEIPMAEKLLEIKGVGIRTVSGFLAEVGDISRFNNPKELQKLAGLALVENSSGKHKGKTTISRRGRKRLRYLLFEVAMSLVAKNPEFRELHNYYTTRRLNPLKKMQSLMAIAAKLIRVFYAMLTKDVDYDPKKMISDIKRPTVYLQAA

SEQ ID NO: 333781 - protein, 351 aa, unidentified
MNILAMDLGKSNTVFCLYNSENSKHRFGKVVTRPQQVHDLLVEASADRIVFEICSIAGWVYDIAFALVNEVEVADVNGQAWRWKNVKSKTDRKDALKLAQLSSMGQLNCVHIPKKEVRQKRSLITFRQSLVGRRTQIKNSIHSILDKEGLGHVLPKGRKGWTKRSIKMLSNLSQKLEDCSLDSTWRGQLHIELAELERVGEKIAELEAKLDKLAEDDKHIRVLRTIKGVGPRLSEAVAAFLDEPSRFSNGKQVGSYAGLTPKQYQSGSMNRQGRISGQGNKLLRSLLVEVSWLGLRHNSWMRETYQRVLRGSASRKKIAITAVARKLLVLCWAMMRDGTEWREVKQTKDAA

SEQ ID NO: 333782 - protein, 350 aa, unidentified
MLIIGCDFHTRYQQIAMLDQATGELVERRLDHENGEAHTFYRGLPKPVRVGIEATGPMHWFERLLGELGHELWIGDSAKIRASEVRQQKTDERDAALILDLLLSNRFPKIWVPSTQERDLRQLLWHRHKLVRLRTMLGNQLHFLAMSQGLCRKKKLWTKKGRAELEGLALGPWSSRRRGELLRLLDQLDPSIAELDRAVLEQAKLREDASRLMTHPGIGPVNALAFVLTIGPVTRFGRSKQVVSYLGLNPSEYSSGGRQRLGSISKQGNTLVRWLLIEAAQHTVRFDPELRQDYQRLKFRKGSAVAKVAIARKLAVRMFWMLRSGADYAQLVRMQGSPGATLVNASSSLG

SEQ ID NO: 333783 - protein, 452 aa, unidentified
MEKEKKYEKMAVVHPHAAGIDIGSKSHWVATGQNKEDVKEFGVYTEDLHAICQHLKDRNVTDVAMESTGNYWKAPFILLQTYGFKVILVNGKYTKNVKGKKTDLLDCQWIQKLHTLGMLEGSFIPDNDTEKLRHFCRHRQSMIEDSASLIPKMQKALRQTNIRLDNALSDITGLSGRAIIEAIIEGHRDPEYLASLIKFRVKKSKEEIIKALTGDWRDEYIFELKQSYELYLFYHKKIDECDKQIEAVLQERIRRKDDSDPSPTLPKDSKKMRKRNKNAPKINLQELSFQITGGVDLSLIEGIGPGVLLSILSEVGIDFSKFPTAKHFSSWLRLSPNNKITGGKIISSKTPKGKHRIADALQHAAVTIGNGIKTGYLHYFFKRIEIKKGAQAAIVATARKLAVIIWNMMTKKTNYISVKEEDYLIRIREKQIKSLNRKIKSLKVKPNELALL

SEQ ID NO: 333784 - protein, 390 aa, unidentified
MSKIRFVGLDVHADTIAVAVAEPDGEVRALGIDPDGEVRALGIIPNRLESIRKLVTKLGPAKQLKACYEAGPTGYVLYWELTALGVACEVVAPGLVPVKPGDRVKTDRRDATKLARSYRAGDLTAVWVPDAAHEALRDLVRTREDARQDQHRARHRLSKFLLRHGRRPPEDVKKAWTLKYMTWIQEHVHFDQPALETTLLDYVQEVEHMAERIVRLEKAITEAIQKAPPEIRAVVQALQALRGVAQLTAVTVVAELGSLSRFQSPRQLMGYSGLVSSEYSSGNRVQRGGITKTGNAHLRRVVIESAWAYQHRPWIGGFLLRRQRDLRLDPEVKEIAWKAQWRLHTRYKKLAAAGKKKPQIVTAVGRELLGFLWAIAVQTEAKFRPDRKAA

SEQ ID NO: 333785 - protein, 402 aa, unidentified
MIDTSSVGVFLGLDVGKSTHHGHGLTPAGKKVFDKSLPNSEPKLRAVFEKLAAKFGTVLVVVDQPASIGALPLTVARDAGCQVAYLPGLAMRRIADLYPGEAKTDAKDAAVIADAARTMPHTLRSLELTDKITAELTVLTGFDQDLAAEATRTSNRIRGLLTQFHPSLERVLGPRLDHQAVTWLLERYGSPAALRKAGRRRLVELIRPNAPRMATRLIDDVFDALDEQTVVVPGTGTLDIVIPSLARSLAAVHEQRRALQAQINELLEAHPLSQVLTSLPGVGVRTAAVLLVTVGDGTSFPTAAHLASYAGLAPTTKQSGTSIHGEHAPRGGNRQLKRAMFLSAFAALHDPASRTYYDRCRARGKTHTQALLRLARQRISVLFAMLRDGTFYEPRTPEAATT

SEQ ID NO: 333786 - protein, 387 aa, unidentified
MQKPRDNSKASPAAFMQDNTLIAVIELSLSNWLVAGLIPGVSREPLKKLEPNPEDLLKLLHGWRDEAIKAGRPITRIAVAYETGRDSFWLARWLRERGIDAHVIHATSVAVSREHRRAKTDRLDTAMLKRGFLGWLRGERGHCTVAIVPTMEEEDAKRPHREREGLVHEQTRVVNRMKSALIQFGVRNFNPKLRKARVKLETVRTPEGKSLPPNTIAALRRDMERLKIIKEQIKAIEQARLQQFEQQPVALANRMVYLLVRIYGLGWETADLLVHELLSRTLRDRKAVARYAGLTGSPDESGSKRREKGLSRSGNARVRKIMIQLAWRMVKFQPDSALVQWFKQRTENAKGSRKPMIVALARKLIIALWRYANDGVIPEGFRLHSAA

SEQ ID NO: 333787 - protein, 312 aa, unidentified
MDLFVGIDVSKAVLDIAVAPTGEAWSVGNSTEGMQQLVSRLGEISPRLIVLEATGGLERRAIAALAGASLPVVAVNPRQVRDFAKATGRLAKTDAIDASVLALFADRIRPQVRPLRDEETQELEALVVRRRQVVDMITAEKNRLAAAPPSKSVRTAIGKTIKWLQKQLEETDSDLDNAVKGSPIWREKDDLLRSVPGVGKVLSRTMLSLVPELGTLGKKQLAALVGVAPLNWDSGQQRGRRCVWGGRAHVRAVLYMGALVAARFNPAIRAFHARLIAAGKLPKVALVACMRKLLTILNAIVRDQRPWQPQNA

SEQ ID NO: 333788 - protein, 441 aa, unidentified
MALPKGKRRQGVSVMSQGTADWSERAAFVGFDWASDHHDVVVVDGRGMIVEEFRFEDTAEGWQLLHKKLSPHPNPAVALETSSGATVERLLAAGYAVYPINPKAAKRYRERKAPSGTKTDRIDAWSLADALRLDGHTWRALKPDDPLTVELRLLCRDEIGLIRQRTALVCQLRAALGEYYPVALQAFDDWTSPSSWAFVEAFPTPQALHQARKRRWEKFLHVHKLYRPETYEKRLALFAQARAFCGSEPAVQAKSFLALALTAQLRTLEKHLDKYRERIHELFAQHPDHELFGSLPGAGEKLAPRLLAELGDDRERFDSPQALQCHAGTAPVSYQSGQINKARFRIACQKLLRHTVHLWANLSREKCPWAEAYYRTKRAEGQSHACALRCLGQRWLKILWKMWQTRTSYDAELHQRNQLKHGSWVLNLMTPKTTALAAGEA

SEQ ID NO: 333789 - protein, 354 aa, unidentified
MKRTTKYVALDVHQATTITSVREESGRVIARTMLPTEAEPIVEYVRGMRGAIHVAFEEGTQAQWLHELLAPLVDRVVVCDQRGQARQGNKGDQVDADGLSELLRRGGLRAVYHGDAHRATLKELTRGYQNLVEDATRVMLRLKALFRARGIQAPGKRVYHPANRAEWLARLTNRGAQCRAEALYAQLDLLRALHPKAKAAMVAEARRDPAWTLLQTIPFFGPVRVALLLATMQTPWRFRTKRHLWAYAGLAVVTHSSAEYLLVAGRPVRRRRAPLTRGLNRNYNRVLKDVFKGAATAATTRPGPFQDFYQGRLARGMREELARVTLTRKVAAITLRLWKKGERFDPAKLTTQAR

SEQ ID NO: 333790 - protein, 410 aa, unidentified
MYHIGIDWSDKSHSICILDDAGAKLEAFEIPHGLAGFESAHKRILKRSASPDDTRIAIETKDSLIVDFFLELGYSLYFLNPKQTDRFRDRHRMSSSKSDGFDAYVLADAVRTDSHLFDTLSPLDEQSLTLRVLTRTREGIVHRKVAISNELTAALKRYFPVALELFSSLDTPEAIAFLLQYPTYAQARTVSESRLHSILKRQGLSDKIASRHAQNICCKLKDPQPTPAQSVARAYPIAVKSLLRQMQDVLRELEAIEQDISDNYTDHPNKELLESMPGIASTLGPVLAAELGADITRFVDVKMLKAFAGSSPVTERSGKYCEINYRRACNWRVRQALHLASQSAITCCRWARELYDKQRSQGKYYGRALRAVANQLIEILYAVLTRRTPYSEEYHLTMKLIHSKTKAILT

SEQ ID NO: 333791 - protein, 339 aa, unidentified
MEEVSIIGLDLAKRIFQAHGADRSGKCLFSRKLSRAQLLGFFSSQKPCIVAMEACSSAHYWGREIAALGHEVRLIPAHYVKPYVKRGKNDAADAEAICEAASRPTMRFVEIRSAEQHSQAMVFRSRDLLVRQRTQAINAVRGHCAEFGLSAPTGHKGYEALKGLIGEATDLPEVAREVLELLMASIDQLEGQIGVLEKKMAQLAKRDPVNKALMSIPGIGPITALAVKALGPDARGFASGRDYAAWIGLVPSQHSSGGKERLGKITKKGNRTLRRLFVICAGTVITSIARSRTVPDPWLAKLLARRPRMVAVTALANKIARIVWALQVKGGVYQSPMTT

SEQ ID NO: 333792 - protein, 319 aa, unidentified
MAKQTIEFDQVIERGCGLDVHRDTVVATVMGKGLQTETRTFGTTTSSLKELGEWLESLQVTDGAMESTGIYWKPVLHVLREYPLNLLVVNARHIKNVPGRKTDKADSQWICKLLISGLLKGSFIPPENIQALRDLHRYKKKLVGTVASEKNRIIRVLEDANIKLSSVVSDTSGVTATYLINGLIAGRKDLEKLVSECYHKKLQATPEQIVEAINGRLTPHLAFLLKSMQKHIQSVEEQITEIDAEIEKHIKDFEKEIELLQTIPGVGKEGAIGIVSEIGVYMEVFPSEQHLASHSGMCPGNNESAGKKKVQEHDKEINI

SEQ ID NO: 333793 - protein, 404 aa, unidentified
MNTHKAILGLDAEQAGVDYHLIDTNHNLLARGSAEASQAGLDTLNAALAKHHLAWADVLVGVEATGQWHLHWCEKLHALGAKVYAVNPLVAKRTSALPNAIRDNKTDPIDAAGLAELVQREHTRLAHFLYTPAGALFKLQRLQNARQAVREKLTDLKKSLGALRDLVFPELHALRFSDKTERAIIKKAPTPAQVLALETKELKTLARDKTAALRKAAAQSFASASLSEASASALVHLALTVEDMERQLERMDADIEKQAREALDNELLEAAQTLPGFGRKTTVAILSNIPVGLLQASGLSRRKLSNKIQAHMGADPRVRQSGKKKGRMAISKRGSRYARTALYQAAVCAVMNDPSLQAIYKALKARGKHHTVAMFDIARRLIRRLVAVIKSLPKNYIQSAIQPA

SEQ ID NO: 333794 - protein, 344 aa, unidentified
MDHYAGIDVSLEYSSVCVVDASGKVVREAKVVSEPEALIGWFGSLGLELARIGLEAGPLSQWLYAAMKQAGLAVELLETRHVSDAFKAMPVKSDRNDARKIAQLMRLGWFRPVHCKSITAQEIRAMLTARKLVQSKLLDLENSLRGILRGFGLKVGKTTRTKFAGRIEELVKGHPNLQTIGQALLRARAVLLAEFNGFEKRVRAMSRLHDKARLLMSTPAVGPIVSLTFACAIDDPSRFTSSKQAGPHFGLTPKKYQSGETDYTGRISKHGDASVREALYEAAHLMLTKPIKGCSELKSWAMRIARRAGTNKAKVALARKLAVIMLRMLKDNVPFNPAAKPATA

SEQ ID NO: 333795 - protein, 350 aa, unidentified
MTTMPLRVTGGVDTHLDVHVAAALDDRGALLGVESFETTPAGYRRLLGWLGAFGEVELVGVEGTGSYGAGLTRHLHSEGVCVVEVDRPNRQRRRRRGKSDPQDAITAARAAQSGDALGEAKTRDGNVEAMRVLRVARSSARKARTQALNQMRSIIATGPEPIRAELRDLNVYRLLERAARYRPGQRHDVASLTKRTLRMLARRAQALETEVAELDAILEPLVADTAPALVARPGIGAECASALLVAAGDNPQRLRDEATFAHLCGVAPIDASSGKHQRHRLNRGGDRQANAALWRIVITRMVYDPRTRDYIERRTKKGLTKKEAFRCLKRYIAREVYNHLPHPQLSLDGP

SEQ ID NO: 333796 - protein, 434 aa, unidentified
MWKDALLVVFQKASDEFLGGAAMEVVYPRCSGLDVHKRFVVACLSLIQNGERHKEIRQFSTMTSDIQALKEWLKAAGCSHIAMESTGVYWKPIFHVLEGEFEICLVNAQHMKAVPGRKTDVKDAEWIADLLQHGLLKASFIPSSEQQAVRDLTRTRTRLIQERNRLVNRIQKVLEDANIKLASVVSDIMGMTGHAILTALVAGQEDAECLAHLAQGRLIKKQDQLKAALQGKLISHHRVLLGELLQLIATLDRSIAHLDREIAERLRQHDGLIDRIDEVTGLSRRSIEVLLGELGWDMSRFPDAAHAASWVGICPGNHETGGKRLSGRIRQGNRWAKTVLIQAAHAAAQTQTYLGEQYRRIRTRRGAKRAAVAVGHSMLVIFYQMVKTGESYHEKGSDYFITAHKQKIQQRLVRQLERLGNTVILQPKGETALA

SEQ ID NO: 333797 - protein, 406 aa, unidentified
MLYVGIDLHRKQLTVCVRKENGDITCRRQVSTRPHKIREFLDELKLHDFVVLLEACGFEDWLIKILQHEPRCQQIVVVQPDAQSKTKTDRRDANRLCEVLWLNRDRLKNGEKLQAIRRVYIPTDDEQQDRRLTSVRQRLVRQRTRTLNQIHYLLRRHNLEWEQPTKTFQTKKVKQWLKDIELNPIERLELNQLLEQWDLLDQHIDQLDRQIVVRFEANDEAQLLNSITGVSHYMGLAIACRIGDISRFPTPRSLANFFGLTPGSRSSGETQRLGSITKEGSRHVRFLLGQLVLHLLRKDARIRTWYQRIKKRRGSKIARVAVMRRLAVILWHMLSKREPYQYGSRPTSPRQQAALAADQAALAEHRREVKESLGITRTSDSGVGSSRDVSTGSSSLCSTGSDACLV

SEQ ID NO: 333798 - protein, 352 aa, unidentified
MNKYNQVMPEGKTVFIGIDMHRNKWHLTAVVEDEVVFSGAMPADPEALLKFLKRYCNNPIESVYEAGYFGFWLYELLNDSGIKCTITPPTLVPMEYGNHVKTDKRDSRKLACLLSRNILKKVWVPSPQQLAHRQVLRRRQKLIGDRMRMQHRIKSELCFYGITVDKPRGAWPAYFVNQLKDISFADPFQQQSFWVLLEEYEYLNQLVEQQTKLLKELAASENYEKQVRLLRTIPGIGPVSAMSLLLELGDISRFARAEQLAGYVGLTPAQYSSADKIRMGRITRCGKNSLRAVLTEAAWTAIKKDPELRSFYENLKFRRGAKKAIVAVARKLLLRCRRILLENRSYCLKKAA

SEQ ID NO: 333799 - protein, 450 aa, unidentified
MSSRGPKGRGDLIIQLMRLSAKGRIRRGGLRFACNDTFGFRLSPIRLSMLINIKYTKHRQRLNKSTAFAGKNPDPDSDPIVAETTLNRIMSLLRELIGTAPLLSSMLLKGALPMTNILGIDIAKSSFTFSVFNVREKSTGPSLNYSNNHDGFTQLATWLERHNLTTNNLTVCLEDTGVYAESLCYFLAAQGFTVAVEPPHKVKRAFHDPNVKSDRIDCRQIAEYGYRFFDQLSTWKPSEPVLEQVKVLLSTREQFVEQLTAQQNSLHMLTWKVIKTPLAEKALQQTISHLKEQVKKIDKAIKDLISKDPTFKQTFSLLLSVPGVGTLLASNLLVLTKGFQGHTNPRRIASHLGICPHPFESGSSIWRKPRSRHYGPSRLRKLLYLAALSMRTHNPTFKSYFLRKVQEGKSKKLVINNIENKMIRLICAIVKSQKPFISHYKSVNPRLLCA

SEQ ID NO: 333800 - protein, 345 aa, unidentified
MWFVGLDVHQRFTVMVILSARGVRVKRERIDGPPPQTVERLRELKGKRRLAVCYEASCGYGPLHDQLRQVASRVVVAHPGRLRLIFRSKRKNDRADAQKLATLLFLDQVPGIHVPSVKVRNWRHLIEHRHRTVAKRTRTKNALRNLVRNHGLVPLPGKRLWTGKGRVWLAQLELPTSQAELQRDLLMDELAHFDRQVQRVEKELNRIADAHPGVHLLKTIPGVGPRTAEAIVAYIDDPKRFGRNKQVGSYFGLVPCQDQSGDRNRLGHITREGPSRARHLLTEAAWRGIRKSAHLQAYFERIQGGDPQRKKIALIATAHYLVRVMHAMLRTGEVWRHEEVPQKVA

SEQ ID NO: 333801 - protein, 485 aa, unidentified
MAKRRMSTFERLESGRLNRKQRRELGRQVAVADPGLTIVHANAGGIDVGNESHYVAVPPDRDPNPVREFGCWTAALNQIAEWLQSCRIDTVAMQATGVYWIALYDVLEQHGIQVVLANAQHTKNVPGRKTDVQECQWLMKLHTYGLLRDSFRLAQEMESVRTIWRLRDRHVKEAGRAVQHMQKALTKMNIQLANVISDINGLSGQQIIAAILQGERDPWKLADLKHYRVRASREEVARSLEGNWREDVLFELQQAVDSYHFAHRQMQECDRKLEGYLASLPARMLDIPVQPEDTQAATPKKKTKKAKRPRGNQPHLDLKTELKRICGVDLTSIDGIDVMTALTIVSEIGTDVSRFQDETHFASWLGLTPAKDITGGKTIGRGKRKVKNRVAVALRTAATTLLKSDSYLGARYRSLRRKLPSFASAVKAMGRYLAILIHRLLTKGEAWVDRGATQFERRHTEQELASLSFKARAKGFKLIPITEAS

SEQ ID NO: 333802 - protein, 356 aa, unidentified
MGLYAGCDLHAKSNFWGIVDGEGKRVFKKRVGNDGERILEILERFRGDLVGVVVESTFNWYWLVDLLMEGGYKVHLANPSKMEKYSGLKHVDDEDDAFWLGEMLRLGVLPEGYIYPKEDRPVRDLLRKRGHLVRIRTSALLSLKNIVSRNCGRGVKAYILKGEKGVGGLLEGNEDLALAGQVSKEVIDYLSGKIAEVEKAILGRREIRESYEGLLTLPGVGKVLGLTIRLETGPIGRFGDVGNYVSYCRKVPSRWFSDGKVKGQGNRKNGNRYLSWAFSEAAELARRFHTEPRAYYQRKRAQTNAAVAHSALAHKLARVAYYILRDGVRYDAAKLFGLNRAGAESLKGGLGKSHET

SEQ ID NO: 333803 - protein, 386 aa, unidentified
MQLVRPAQEDGAVAEFNAYVGLDVHKDSISVAVAEAGRDGEVRPWGVVRNTPDAVTKLARRLVERHRTVELAYEAGPCGYTLHRHLTAAGLTCRVVAPSRTPRKPGDRIKNDTRDAVTLARLLRAGELTFVWVPDEVHEAMRDLVRARQTAANDVRQARAHIQMFLLKHGIRYLGKPWGFRHRVWLADRRFPHPAQQLALQSYVNRLDQAESRKRQLEQQLAELVPAWSLAPVVTALQALKGIQLVIAATLVAEVGDFSRFASPRQLMAFLGLVPSEFSSGRRVRPGGITKAGNVAARSSLFEAAWSYRLPAKVGQAMWLKQRGVAQAWRDISWKAQVRLSGRYRKLVGRGKKSNVAVTAVARELLGFVWAIATSSMPAPPKASPM

SEQ ID NO: 333804 - protein, 402 aa, unidentified
MNSVGIDVSKGKSMIAVMRPFGEVVCSPFEVSHTSSELSKLTKLLKSLDGETRVIMEATGNYHLPIAVTLHKAGIYVSVVNAMLVHDYGNNTLRRAKTDKKDAVKLANYGLDRWLNLPKFSPEEEIRMQLKTCYRQYQQYSKVQTVLSNNLISLLDTVFPGVNRLFSSPVRADGSEKWVDFVETFWHCECVSRLSQKVFEKKYQKWCHRYGYHFSEAKAQIIYTAAYEAVGVMPKTETIHLLITQAVSQLKATASALAELKKEMLRLAKLLPEFSVVQKMYGIGPTLGPQLMAEIGDVRRFHSKKALVAFAGIDAPPNDSGQISGNHKAMSKIGSSALRRTLFLIMSVYLQNAPVDEPVYQFMDKKRAEGKPYRVYMMASANKFLRIYFASVKAYLDALETA

SEQ ID NO: 333805 - protein, 408 aa, unidentified
MNTLYVGIDVSSKSNVIYLMLPNGDKHSNFSVANSHEGSTQLVKRILSALTSHSLDTVLIGLEATSVYGDNLVYFLREDATLAPFNRKIHVLNPKQVKKFHDTYNDLPKNDYVDSFVIADCLRFGRINKEVYMGEYRYKALQNLTRARFFAVQNLVKEKQRFMNVLFKKYSTMTQEKVFSDAFSTTALAVYDEFESAEALANMDLHELTDFIIEKGKNRFPDPDAVAKAIQKAARSSYRLPKTVNDSVNQVLSISITSMKALESQIKEFDKAIKALMELLPNVLISIPGIGPVYSAGIMAEIGDINRFDNQASLAKYAGLAWKQHQSGGFEAEVTRLIPSGNRFLKYYLCEAAFSLVRCDKEYSDFYHLKYKEVNRCQHKRALALTARKFVRLVFRLLKDNRLYCPAK

SEQ ID NO: 333806 - protein, 321 aa, unidentified
MSQNNHSTFYAGIDVAKATFQLHAGGCSESLPNTRAGHAACLRRLAAAEAAGPGGKVHVILEATGGYEAALCAALHAAGRLLSVIQPARARHFARARANHAKTDDIDAEVLTAFGEALRPAPTPAPSPEQSRLAALVGRRAQLVEMRTAETLRTEHAWDPLVRRQIRAHLALLERQIAQCDQQIAAQIAADAQMKARAERVRQVSGIGPVIAAILQADLPELGRLAPGEAASLAGLAPYNRDSGTQHGVRFIRGGRASVRCALYLAAMSAIRHDPILRAFYQRLRAAGKLKMVALTAVMRKLIELLNRMLKHPAFVLQSAR

SEQ ID NO: 333807 - protein, 312 aa, unidentified
MKKVFIGIDIAKDTIEICVLPSSESWTVGTTPAELLETVDRLAALKPTNIVLEATGGYENRLAASLATTGLPVAVVNPRQVRDFARALGILAKTDAIDAHVLALFSEKLQPECRPLPTDDEHALKELLTRRHQLVDMRTKESNRRQQIVSKQVCESITTLIESINHELDVIEREIDIRIKASPVWRAKDILLQSVPGIGKTTASMLIVALPELGHLNRRQIASLVGLAPMNRDSGTFRGRRMITGGRALIRTGLYMPILSAIRYNPKIKTFYDRLIDAGKLEKVAITACMRKLLTMLNSIVRENEPWHPINA

SEQ ID NO: 333808 - protein, 349 aa, unidentified
MKRTTIGLDIAKRVFQAHAVDPESGEVRRTKLQRGEVLRHFAQLRPSLVAVEACGSAQHWAREIRKLGHEVRLISPQFVRPFVKTNKTDAADAQAIWTAAQQPEMRSVAVKTEEQQAVLALHDIRTRLQKSRTAAINQLHGLMGEFGVELPRGWRTMLPQAATALDSASSPVPALLQPQLCFQLMEIRSLTARITEVEGRISAWMRRREDCERIAAIPGVGLLTATAAVATIGEARTFRSGREFAAFLGLVPRQSGTGGRVRLLGISKRGDRYLRTLLIHGARAVISVRKGKYATDPNTWLDRVLQRRPTNVAAVAQANKTARQIWALLAHGRIYEPKHGALEPAAAPA

SEQ ID NO: 333809 - protein, 349 aa, unidentified
MDYRVYCGVDFHARQQTICSLTTESGVMSTHELKHQNKAELKAFYAQFSGPVLVGLEASGYSPWFEQLLESLGHEVWLGDATEIRRRARRRQKNDRRDAELILDLLIHNEFPRIHRPTPTSREILRMLRYRHKLVKMRTIIKNSLQSLSIQSGLSLRARLFTHAGLAQVRAAAMSPVMQYQRDQWLQSLEPLNQRILEAANWLQQQAAGDERIERLRTHPGIGLLTGLGLVHTLAPVGRFSNQRKVAAYVGFDPKERSSGEKKRYSGISKAGSRVLRFLLVEAAQTACKGDPELKRFYLRLLHRHGKPKAKVAVARKLLVRSYILLRDGIDYAEFNRRAVAARLAREAT

SEQ ID NO: 333810 - protein, 423 aa, unidentified
MNADCPVVGIDVGKDFSYFCVLTSGGRLHCEPTRVTNDAKGLTELLKALRKAEEALETKPAILLESTGHYSERLVCFFIRNDHKVFLINPLQSHSIKNVNIRKVKTDKMDCEGIARLYFILKLREYKLLDDDVANLKILTRTYQTVVKARNQLINQFTSHIDQVWPGFTKIFSNVGSKTAQSLLFTYPAPAQLLDAPKNDVVELIRVNSRRGLEYAKNKYKALQQCAQDALTFGTQLSAHFTCIKLHAATLQHNDEQLKQLEAEIETFAIEVPAVELLKTIPGFGPKLAATIAAEIGDINRFDNAKQLVAYFGIDPSVRQSGHFVGTKNRLTKRGSPFARRALYLAALVSVRGGGEKEEYPNKVVYDYYHKKIKSKAKKQALGAVMNKLVRIIYSVLTNKRDFFMITPEEHNRLYAAGMLPAA

SEQ ID NO: 333811 - protein, 541 aa, unidentified
MRVMYERVAGIDVHKDMIKVGIRVPGHRPWTRASEVLEYRTFFGVLLTMAADLRRRGVTHVVMEASGVYTEPVYYALAGRGFEQVAVINPAHAKALKGHKTDAKDALRLAELFECGLLRSSYLPPQDLKDLRDLTRYRAKTVQARTSEIQRLAKALESAGIKLDSVVSDLTGKSATLMIDALIDGERRGQVLADLAIGRMRTAGKLADLSQALTGRFTGHHAALCRLHRDRIALFDAAIADLEYDIVVKAAPYQRELDLLKSVDGFGDAVAWAWLAEIGPAPHEYFASHEKLASWVTLCPGNHMSAGKRAHGRTGTAGTYIKPMLVQAAWAAIRHEGRLQARYHKLVRRFGGPKNPAAVKKAILAIAHTLLKIAYQVLKSGQPYQDLGADFYTRRESPSSAAPTCCASSKSSAPAAPSPSPPRRPPDRRRQAGSPPAAPLPSAGRPCQAASARRPANNTFHQHIPRTPADITAEGSLPRAWTGSVSCQPLIPPRRRRTGVKMAGGTARDVVCSLVAVEAACQPDAGIRTQGAVHCCFEHAG

SEQ ID NO: 333812 - protein, 406 aa, unidentified
MPVYIGIDWSQTKHDVCILNEAGAPLARLIVAHSPEGFQKLDAQRQPLGLAASECLVGIETAHNLLIDFLWGHGYQQVFVIPPNVVNSTRGRYRQSGARNDQSDAFVLADVLRTDRARLQPWKPDHVLTRQIRSRVSLLNHLTHQSVQLSNRLRAVLWRYYPAALNVFGTLDAQITLEFVRLYSTPQHAAALTLAEFKAFAQRHRYPRPKQLPARFACLQEPQPEADRDTVCVFQGEAVQLATLLLGLVQTKTTMLKELRHLFEQHPDAPIFGSLPGAGELLAPALLAKFGDDRARFPSPASVQGLAGTCPVTAASGKKRVIKFRKACDREFRVIAQQWAMASLADSTWANAYWQHVRPHCDSNSHAYRCLANRWLAIVWKLWQTRKPYDEAYHLQQRAQHSQPRS

SEQ ID NO: 333813 - protein, 400 aa, unidentified
MRAVFGIDVSKTSSEVAILVNGEKVHGYTILNDTIGFNRLLGDLKTVHNPEIIFEATGVYSRRLQAFLEEYSYAYTRLNPLEAKKQLDSLRVRKTDKIDAEKLAKSQLVHNRKPTYVQEEVYQHLRDLSRFYQNMTEDLVRTKNRLHKVLQVTFPELENLLSTPTGEQYWNLVMAFPCKEFVLSLSQSNLCEIIRQSTSKRISEKRIAYLTDKLIKLAKQSFCAVKKTSPMLEEVRYYAQELLRLSERRQVVLNDMVALAQPLPEYDILRSIPGIAEATATSIIGELGDIRRFQSTNQINAFIGIDLRHYESGNFLAKEHITKRGNPYARKILFKCIHNIASASHTNPCHIADFYEKRKRQSTIASTKPHTIASIHRLIRTMYYLITHNKLYDYSLAQNR

SEQ ID NO: 333814 - protein, 347 aa, unidentified
MRFYTKQHPFYCGIDLHARTMYVCILSQDGEVMLHRNMKASPDALLKAIAPYRDDMVIAVECIFTWYWLADLCAQEGLPFVLGHALSMKAIHGGKAKNDKIDSQKIAVLLRGGMLPQAYVYPAAMRATRDLLRRRTHLMRKRAELLAHIQNTNSQYNLPEIGKKIAYKANRDGVAERFPDPAVQKSIEVDLALIGHYDQLLRDVELSILKTAKQHNAQTLYLLRTVPGIGEILSLVLLYEIHEITRFPRVQDFLSYCRLVKCTKESAGKRYGTSGTKIGNTHLKWAFSEAAVLFLRANPAGQKYLTKLEKKHGSGKALTLLGQKLGRTVYYMLQRQTAFDMGKFLNG

SEQ ID NO: 333815 - protein, 332 aa, unidentified
METFVGIDIASKNFDVVIRKNGINQKVETFQQTAADIEKLIGKLKPMSPTAVVMEATGIYYVDLARSLYSAGLPVSVINPKSFRHFAELMLKRTKTDAVDAALLAEYGQRMEPQTWEAPSQHLVDLRDVARQINRLTHMKVQSKNRLHALRATKTTNAMVIESEQDVMDFLELRIERMRQHALELIAADERLNRQLENITQAKGIAENSAICMMGELNVLPFTLKAPQVAHHAGLSVRQTQSGSSVNSPGRLSKAGNTYLRSALFMPSLAAGIHDPHAKAFKEALVARGKKKIQAQCALMRKYLMGVWACIKNDTPFDSAKLFSPEHKKACI

SEQ ID NO: 333816 - protein, 346 aa, unidentified
MNSMNYVGLDIHKKSISCCVRQADGTIIRETTITATRHALDECMRRLPDPWIAGMEATLFTGWIYDHLVSGGAMVKVAHPAMLQAIAAGKKKNDRVDARKIADLLRCDYFPECHMASREIRDRRRVLRYRNLLVRQAVQMKNKVSGLLMEAGVPYNQQKVHQKKYFSELLQKEKKEMPPSMPALLRLSRSTVEALTGMQRQLIRALESDALLAARVERLASIPGVGRVVALTWALEMGDISRFASVKKAVSYCGLCGAEKSSGGKTERTPISKQRNKHLQTILVEAAKLAPRWNPDLALVYEREKQKGNRNRATLAVARKLVAYLLAVDREERPFDTQLRVADNAA

SEQ ID NO: 333817 - protein, 335 aa, unidentified
MQIYGIDLAKEKFDVSFFDLTSKKVSNQPSHKVVKNNFKSIGRFLETLPSDAVLVAEHTGVYGDTLLKCCMDSNVKIAFVGGYVIHRYRATPDRAKTDVLDCALLRDFGERYPDKLKYKTFPEEALYELRQLARHREMLVEQRKQLITADKSEDCRPIRSLAVKRSMDRIKEMLDTEIAETEKEMLKVINGHESIHHNYELVKSVDGVGLITAVELLVKTENFTKITTARQYAAYAGTAPYEKSSGKMDKGAHISKIGNRRSKTLLYICAESARLHNKEIKLYYERRTLIDKKPRHYVLNAIANKLLRIIFTLVEKGEYYDANFIRQDPRGVKYN

SEQ ID NO: 333818 - protein, 334 aa, unidentified
MTCKELPGAGMGPTPDNMNSINNTELSSHEGTRCQFNGSKEVIKLGIDVHQHFYVVVEQVGGSNPKPPQRFRKEAFLCWAVKVKNQGKQVHAVYEACGFGFGLQRQLSALGIDCYVVCPQKLDEHNRRVKTDGLDAKALCLKLDRFVQGNGDALARVRVPSEQEEQQRAIHRQREQLVKARKRLEAQGRSLMVNHGIEPIQQWWKGRAFAKLQVPTWMQELLATSQPILLALEQKIKTLTLQLQNAAEPNQPRGFGALTSVVIDREIGNWQRFSNRRRIGSYTGLCPGEYSTGDTRLQTCVTKHGNPRLRAALVEAAHFCRAPSTAVDERAARK

SEQ ID NO: 333819 - protein, 318 aa, unidentified
MKTKTNQNINVGVDTGKFQLDIYIRPLDIYFTVTNDDKGIKEAVKTIKKYKPERIIIEATGRLEMPFILACAKANLPFVIANPIHIKRFAGAIGQRAKTDKLDAQLIAHFGEAIQPKLSMLKPENMQAMSDLVARRNQLLTMQTMEKNRLQILPANLAMTIKPILTAFKNQINKIENKIAELIEKCPDYQAKNLIVQSMPGIGKIAAASLIGNLPELGYISSKQASALVGVAPINRESGRYKGQRKIQGGRHQVRTVLYMAMMSAMQCNPIFKATYQRLVTAGKPKKVAIIACVRKMIVILNSMLRDGVMWDATTVNN

SEQ ID NO: 333820 - protein, 440 aa, unidentified
MSKRAYRATRVNDVNWDQLAQGKDGLDIALGVDVGKYSLWAVCRWADGRFERPWRVQNPGEIPTLLTLLKRVSAGRKLVVAMESSGTYGDALRQALADNQIEVQRVGGKAAHDYAEVFDGVPSQHDGKDAAVVAELAALGKAMPWEYQPADPWEQELAYWVEWMVAHRQMLTIWQGRLEGLLARHWPEATQVLKLSSGTLLRVLKRYGTPQALAADGEAAKLLARWGGAFLAPEKIEQLLAGAGASVGVRLGEWPQRQIQNYAQQALAARQEANRAQRRLRSLAAGHAVLQAQGKVVGVPTACVLWVSTGDPRKYHAAGAYRKAMGLNLVERSSGTYQGRLRISKRGSPRTRQWLYFAVLRLVQKCGVRPWYEAKKAHDEADARRVVVAVMRKLAVALYYVGVHNEEFQPGRLFGRIRRRRDSPGEQKSRTKRRSRAEQI

SEQ ID NO: 333821 - protein, 406 aa, unidentified
MQTVYERCCGIDVHKKLIVACFRNGKKAELRKFDTLTCNIKELANWLLDNDCEMVAMESTGAYWKPIYNILELFGLDVMVVNAHHMRNVPGRKTDAKDAEWIADLLQHGLLKASYIPSKEQREIRDVVRYRKSLIEERSREINRLEKMLEGANIKLSSYVSDLTGISSRKLLNQAIEDEVTPDNIGDLVHHSMQGKIPVLLKAMDGVLTPIQKKLVKAILDHIDDMTRRINDLDDIINNEMKHYEDAINKIEEMPGIGKRSAEVIIAEIGADMSRFPTAAHLASWSGLCPGNNESAGKRKSGKTNKGSKHLKSILIQCAKAAKAKKESFFYAQYQRLVTKRGANRATVAIAHSMLIAIYHMLKDNVPFKDLGSNYYTKFNTDKKANYYLKKLQELGVSVPVSLATA

SEQ ID NO: 333822 - protein, 343 aa, unidentified
MTNITTVGLDLAKLVFQVHGADADGKPVVRKKLRRGQVLVFFAGLPACLIGLEACASAHYWARELQALGHEVRLIPPQYVKPFVKTNKNDASDAEAICEAVMRPTMRFAPIKSAEQQSVLMVHRARELLVRQKTMLINALRGHCGELGIVVAQGPSRVSELIEMIEDPDDDRLPAIAREALVSLVGQLKAIRVQIQDLEKKLMAWHRANEASRRLATIPGVGVITATALVATIGDATQFHSGRQLAAWLGLVPRQYSSGGKERLGRISKRGDGYLRKLLVHGARTVLLWSRRKKETRSPWLEALLARRPTNVVLVAMANKTARVVWAMLSRGETFRTEARVAA

SEQ ID NO: 333823 - protein, 351 aa, unidentified
MSQKTEAGLACTIGIDTGKNTLHLVGLDAKGAVVLREKLARGRIAARLANVPPCLIGIEAGMATHYVARELLVLGHDVRQVPPAYAKPFRQGHKNDFRDAHAIAEAVQRPSTHCVPIKTDAQLELQALHRVRSRLIGGRTAVINQIRSFLLERGITVRQGLRFLRQQLPQVLATRTDVLSPRMIRIIEDLSSDWRRLDERIEHVTEEIELLASDSEACRQLMTVPGIGPIIASAMVAAIGNGAAFAKGRDFAAWLGLVPKQMSTGDRTILGRITKRGNRYLRTLFMQGARVVLLRPTNWAKYSFGPWLAAAAKRLHHNVLATALANKLARIAWTVLAQGRSYERRAAPGII

SEQ ID NO: 333824 - protein, 373 aa, unidentified
MNYSTVYVGMDVHKETFSLCCYTNEKEQAEYPQKVDGHYSKVINYIEAMRFHYGDDALFICGYEAGCLGFTLYHQLTDHNVKCVILAPTTMLQQKGKKKVKTDKRDAVLIARCLAHHDYSPVHIPTEQDEQTKEYIRMRDDHKLALKKVKQQILSFCLRHNYRFDGTANHWTQAHLKWLRALKPEGLYAEILKEYLLTYDNLTDKLERLDKRIEELASDDAYQENVHKLSCFIGVKTVTALAVLTEVGDFNRFSSAQHFASYIGLTPGEDSSGDDQNRLGITKAGNRHVRSLLVEAAQSYSRGQIGFKSKALKARQDGNPPEVIAYADKANERLRRKYYRMVLKNNKRTNVAKTAVARELACFMWGMITGNVA

SEQ ID NO: 333825 - protein, 313 aa, unidentified
MYKYIGIDVSKATLDLYDGEKSYKVSNDTTGFKAVKKLSSKKEELCLIFEPTGIYSHSLIEYCQKYSIKAIIVGSKEARDYARSIKQRSKTDKIDAKVLYRYHTQVAPKSITVPSIDTHMRKVTQRRNVYEKYQKMMGQLNNLIEASHKADKSLITSLKKQIISLEKSSQKVLAEIEKLLLDNREQQQAFTHLQTIPGIAKKSALVILMEFLRYPEAKSNEMVALMGLDPVLKESGMFRGKSRISKQGGKYFREKIYMSTVVAIQYNDRLKSFYERLVQNGKPKKLALIAAMRKLLRIAFAIVKNKEPYLALV

SEQ ID NO: 333826 - protein, 343 aa, unidentified
MRHYAGLDVSVKETSVCIVDESGKVCRETKVPSHPEDLVRALHDRTWCLERVGLEAGPLSQWLFSGLAATGLPVVCIETRHTKAFLQAQVNKSDRNDARGIAQMMRVNLFRPVHVKTLTSQKRRALLTARKLLQEKALAVDNDIRGLLRNFGLKVGPIGASRFETRTRELVDGMPELAEIIDPLLEARRKLRELFAVLHRKLLVIVRDDTVCRRLMTVPGVGPVVSMAFTATIDVPARFKSSKAVGAALGLTPILNQSGESKRLGRVSLCGDGMTRTLLYEAAQVMLTRTTKWSWLKAWAMKVAARRGIQKAIVALARRLAVILHRIWVSGTDFRWTREVQST

SEQ ID NO: 333827 - protein, 405 aa, unidentified
MTVYIGIDWSSQKHDIVFLNEEGGIITYQTIPHTPLGFEAFDNQRMKLGVGVEDCLVGIETEHNLLIDYLSSHQYRQIYIIPPTTIKDSRGRFGASKANTDRSDAHLIADMLRTDRARLHVWHADSLLTQQIAALASLEQFLTHTIIQTNNRLRNVLWRYYPNAASVFTGLDLQISLEFICAFPTPQAAAELTFEQFKAFARSHHHSAPSKLPACFARLQKPQPEARQQTVLAFQSEAVRLARLSLLAVQDKAATIREIQDLFVEHPDYPIFSSLPGVGKILAPALLAKFGDDRLRYPTPQVLQSVAGTCPVTRQSGKHKYVSFRCACDHEFRWIVQQWAKCSIDDSVWAYTYFQSIRPHCDSLSHAYRRLANRWLEIAWRLWQDKVPYDEERHLRQHALRVKPI

SEQ ID NO: 333828 - protein, 348 aa, unidentified
MHFYTGQHRFYCGVDLHTRTLSLCVLDQAGGVALEATLPPEQDRFLEVLAPFRDGLVVGCECLFAWYWLADLCAAEGIPFVLGHALYLKAIHGGKTKTDTIDARKLARLLRGGTFAEAYVYPKAMRATRDLLRRRTYLVRKRAELLAHLQMTFLQYNLTPPAQKLAYAANRAGLDLDVFPDPSTRSRLAADLAIVTGLSQQIKRLEAELVRSAKVHDPQAFHRLRTVPGIGPVLALILLYGVHDIRRFEDEGRFLSYARLVGGVRESGGKRLGSAGRKIGNAHLKWAFSEATCLLIRSLPKAKTWLARKERKLGKKRALGALATRLARTVYHLWRKQEAFDVNRFLAS

SEQ ID NO: 333829 - protein, 313 aa, unidentified
MASGVGIDVSKAKVDVAVRGHGVIGAFERTAEGLSELVETLEGFDVQCIVLEASGGYEQAVLAALWTADLPCVLVSPSRARHFARALSQYAKTDELDAQVLAHMAEVAVGTSPLWCPPEPEVAELRGLVDRRNQLIEMVGAEVKRLRHVHPKLRPSIERIRKVLRAELKRVDKAIAALIAGRNSLRERAAVIRSVSGAGPQMAATLLSHLPELGRLTRGSVAALAGLAPMNRDSGTKRGQRYIRGGRKAVRNVLYMAALSATRWNEHLKSFYAGLLARGKPPKVALIAVARKLLVHLNSLMRAHLSQPTWAAA

SEQ ID NO: 333830 - protein, 384 aa, unidentified
MKESSTLYVGLDVHKDSIDIATADAGRDGEVRHVCSLGGDLVGLDKALRRLLSKGQRLHVVYEAGPCGFVIWRHLSAQGIDCEVVAPSSIPKRAGDRVKTDRRDAMMLARLSRSGDLKAVRVPDAADEAVRDLARSREDAVRECRNARHRLKALLLRGGIGYAGKSAWTAAHLRWLATLKMEHAAQQIALQEYLNAVTESSTRIGRLEQAMRDTLPEWGLAPVVQALQALRGVQLVAAMTLVAELQDFLRFDNPRQLMAYVGLVPGEHSSGPKRRQGSITKAGNSAARRMLVEVAWHYQHSPRVSPIIAARHDGLPKAVTDIAWKAQLRLNAKFKRLVARRVLKNKAVVAVARELTGFVWAIGREVQTSGWQGVKVEPVGAAAD

SEQ ID NO: 333831 - protein, 424 aa, unidentified
MRQPLKIMLLFITIFLSDFYFNITIFACIGITDSHRRTEYKQARFSSFTKGLQELCDWLAKYNCTDVCMESTGKYWIPVFNVLEKNNIWVTLSHPKYTKPQKGNKTDCKDAKWICDLYMCGMVKPSFIPPADIRQLRDLVRYRFKLTCMITSEKNRAHNCLTISNFKLDEVFSDIFGKSSRSITEQILQHPGETFDVAQFVDGRCKTPIEEIQAAVDGAISTEQAVKLRQCLNHIDELEKHQAEIEREIFRLSDKYEEVLNLIRTVPGFDKNPMTAIQVLSEIGGDMSVFPTAKNLVSWAGCCPRNDQSNQKIKSTRISRAGSYFKPVLVQVANALIKSKKHPEFTTRYRRIKARRGHKKAIIAICRMILTAIWHILTDLKPYTTEGFLESRPVNDSKILTTSQALNLLKQRGYVIKDDIVSVP

SEQ ID NO: 333832 - protein, 346 aa, unidentified
MVCGLDLHRRQITFDAVEVESGEEWKGRLWQPDRERFRRWLRDDVTPRARGGRVALAVEGCTGWRYVVEEVVAAGFEAHLAEPADTQAARGRKRHAKTDRSDCRLLRELLAGGRLPESWIPPTAVLEWRERVRLYKSLVDQRTTWVQRIHAELYQHGVALPESSIRWAKTREALEVDELELSPAARQRIAVGYRMIDAITVESRPLKSDLQCFGHHQPACRALADSQYGIGGLLAVAMWSELGDCRRFARSEQVVRHSGLDVTVDASDRRRAGGFLSRQGPSTLRWALYEAAKNASHQRSPDHDYYATVKDRHDGKLATISMARKLARRCFHTLRSIDPDVVYAMP

SEQ ID NO: 333833 - protein, 346 aa, unidentified
MKKIFIGIDFSKEKFDVVIIMAENLEEKAPRVHEQFANDKAGYRKFLKWVKVNSHGVDMSLWLFCGENTGDYSKGLANFLYGKGCDMWLENAKCIKDSCGIRRLKSDRADAAMIAEYAMRNHDRMTLYEPLSGPLAQLRELFLFRQMNVRKRSGYIVRKGEKGRTLDSSPAKSFMARKCKHMIAELDKTIKECDKMIEALIASDRELQETYEIVTSVPGIGAQNAVCMMVYTDNFKRFDCNPRKIACYYGIAPFGHDSGTSVHCDPHVHYMANKTIKGILTQAALCAINHCPPVAHYYARLIERGKKTMVALNNVKNKLVRIVTALVRTKQKFIPEYEFAKRYAMD

SEQ ID NO: 333834 - protein, 342 aa, unidentified
MQISTIGLDIAKNVFQVHGIDAAEKVVVRKRLRRRRVLEFFKALPPCLIGMEACATAHYWARELTKLGHEVRLMPAKDVKAYVKRNKNDAADAEAICEAVRRPTMRFVRIKSAEQQGQLMQHRTRDVLIRQRTQIINALRAHLAELGLVAAQGNAGVNELRAIVTDEQDTRLPIDARASVIVLAAQLEALESVIGAIEKRIKMQHRSSEASQRVEAIPGIGVIGATAIVATVADPTIFRSGRDFAAWIGLVPRQDSTGGKQKLGPISKQGDRYLRRILVVGAIAVLRRAQENPGKYPWLTQLLARRPFKVVAVALANKMARMAWALLAHGGTYRAPELAETA

SEQ ID NO: 333835 - protein, 406 aa, unidentified
MTSVFCGIDWATDHHDIALLDESGTLLAKLRIDDNPTGLAQLLDLLARHGDNPDNPIPVAIETSHGLLVACLRATGRPVYVINPLTAARYRDRYALSRKKSDHLDAKVLAHILRTDPAEHRPLPADSHLAQAITVLARAQQDAVWNRVETGNRLRSHLREYFPAFLTVFRHFREGLASPVSRTLLATAPTPTQAAQLTRPQLRAILKKAGRQREITAEVERLHGLLREPQMHQPPLVEQAMGTKALALLRQFEAACTSADELEAAVVDAFTAHDDAEIITSFPGLGHLTGARVLAELGDDHTRFATARALKAYAGSAPITRSSGRKTTVLARHIKNQRLASAGYNWAFAALTASPGARAHYDRRRATEERHVAAQRNLFNRMLGCLHHCLTRRIPYDEQTAFPDTA

SEQ ID NO: 333836 - protein, 356 aa, unidentified
MSHEVKYIGMDVHKEAIVIAVLDGSGKQVMETIVETKANSILEFLYGLRGELRVTLEEGTWAAWLYDLLQPKVQEVVVCNPRRNALLKEGSKSDKVDARKLADLLRTGMLRPVYHGENGLRTLRELARSYQTINKDLTRVMNRLKAAYRSWGIPCGGTQVYAQRYREEWLGKLPQAGVRRRAEQLYQQLDGLQALRREVRKEFVAESRKHKATKLLRKIPCIGPIRAGLLIALMQTPYRFRSKRQLWTYSGLGVETHDSAQYRFVRGQLQRSKKPQQLRGLNRNHNHAMKDIFKGAANRASCSTGPLHDFYAALLAKGMKPEMARLTLARKIAAITLTLWKKGERFDGEQLKTQAA

SEQ ID NO: 333837 - protein, 372 aa, unidentified
MTRRTRTGSRHAGGNVAGADPHRKTVSVTVLDERGGVLGTKHFNVSGVGHRAMWEWIQSFGPVSRFGIENATGIGRHTAMFLIERGVDVRDVCPTRTAEQARRRQQGKSDELDATRIARETLADPNLPTAFKRAGGDRGPDPVHEQILLWHKARRSLVKSRTHLLNEADHLLIELPLELRAELPRTSDVRRLLHALQQLDTAAYSDPVTRLRLRFLAEQTARIDALDREERAVARELTALVNLSGSTLAELRGIATRSAAELLVEVGDPRRFTEAGFARFNGSAPLPCSSGEGAGEPVRHRFNPHGNRRVNCVLHHMALTQLRCDPRARQLYDHARQRGHTKPEAMRVLKRRLSDVVYRRMIRDVEGAARAA

SEQ ID NO: 333838 - protein, 351 aa, unidentified
MKKVVKQVLGVDVAQKELVVCLGRMYEDLQSELYARKTFANTSKGFEALLQWIKKLIDPGITVRYVMEATGVYHESLAYFLANQGLEVSIVLPNKISNYARSLTIKTVTDKTASEAIAQFGLERNLDKWERPSPVFKKIKQLTRERDQIIEARTMVNNQLHAEQAEAEPNKTSIARIKKRIEFLNRQAKEVTAEIATLVKSDEKMNGLVQLLCSLTGVGILTAATVLGETNGFDLIRNKRQLTSYAGLDVKEKQSGTSVKGKPKISKKGNRFLRKALHLPALTAIRHDERFKAVYARLVSRHGIKMKAAVAVQRKLLEMMYTLYKTNKKYDKEFFKNQQAETTEKQNIKAA

SEQ ID NO: 333839 - protein, 343 aa, unidentified
MPHYVGLDVSQKTTSICVVDERGRRRWRGVCVTDPGAISACVLKHAGVDAKVGVETGAMTPWLVHGLRSTGLDVECLDARRVKAALQMRLNKTDENDAEGLAQIMRMGWYRPVHVKSLNAHRARALLGARAQLVGMTTRLSNMMRGVLKTFGLLPGAGRGLRFDQRVEALIDGAPDIALIVRPLLATWRQLREQIAVFDKAVQQQVRTDPICRLLMTVPGIGALSSLMYVSTIEDPDRFSRSRAVGAHLGLTPRRYQSGETDRSGHISRCGDGLARTLMYEAAIVIRHRVKRSLHLKDWAEAIERRSGPGKARVALARKLSVILHSVWRSGEPFRWVPNAPAA

SEQ ID NO: 333840 - protein, 379 aa, unidentified
MSTSMFSVGLDVHKDSVTIAVFRDREPEPTRVDRLPNDHKKLRRYFERLAAEGSVRACYEASGAGYVLQRALADWGFPCELAAPSLMPTRPGEHRKTDRRDAIKIAQDFRDGRLVLIHIPTEEDERVRDLVRCRETFQRESIKSRHYILKFLRRRGFIYRDGTHWTTRHLNWIRQVLQPDVLAEEDRIVLAEYFALLEYKLQRRDELDRRIEALALTPRYKPLVDRIACFRGFKSQAAMVLATELGDLRRFESPRQLMAYLGLVPGEHSSGDRRRLGTITKAGNARVRHVLVQAAWSYRRRPTVGAALRSRQQGQDPSVLTHAWKCQHRLYKVFHRLAAKKPKQVAATAVAREMVGFLWAVLKDIDVTALSHSEVSCAA

SEQ ID NO: 333841 - protein, 342 aa, unidentified
MGQITTIGLDIAKSIFQVHGIDAAGEVVLRRRLTRGRVVPFFEKLAPCLVGIEACATSHHWARELRKLGHDVRLMPPSYVKAYVKRQKNDTADAEAICEAVTRPTMRFVEVKTQQQQSVMVLHGTRTMLMRQRIQLSNVIRGHMAEFGVVAPIGREGLLTLIDALHEDTDDRVPAEARHCLQMLADQLRLVNAQILENDRKIRLSARATDVGRRLMGIPGVGPVLASAFVATVPDPYAFRSGRSLAAWIGLVPRQNSSGGKERLGGITKQGNRYLRQLLFVGAMAVIRYAERHGTRRPGLVQLLARRTTKVAAAALANKTARMVWAIMTSGQPYREPELRAA

SEQ ID NO: 333842 - protein, 427 aa, unidentified
MKYTQNEKIMQISEEILVVGVDIASEIHYARAFNNRGIEVGKLIRFTNSEEGFIAFETWAEELKVKYNKNQVIVGMEPTGHYWFNFAQHLKDHGIKIVLVNPFHVKRSKELDDNNPTKNDRKDPKTIAMLVKDGRYMVPYIPEGIYSELRTAMETRWQIVKQLNTIRNRVKRWISIYFPEFNTVFGDWEGKAALIALKEFPTPARVVEIGVEGIVSYWKKEKIRAVGKRRAVELIEAAKKSIGIREGLAAANNELLTLLEDYEMKIKQYERIMALIEQLTLQIPGMEEILKIKGVGLTTAAGFIAEVGDISRFEHPKQIQKLAGLSLKENSSGKHKGKTAISKRGRRRLRALLFQGIMPIVATNEEFGELHRYYTTRDKNPLKKKQSLILLCCKLIRIFYALLTKKVAYDPQKMMSDIKRPILQEVA

SEQ ID NO: 333843 - protein, 351 aa, unidentified
MEEFIAFDSHKRYTLVEREDVETGKTKQFRVEHCPGAIRQCLEGRGKGTPVAVEATGNGYWIVDEIEQAGLEAKLVHPRKAKLMMGMINKTDKLDVHGLNRLQRNGTLPTVWIPPRELRDQREIPRARMVMTAHRTRLKNRIQATLSKYGWAGTEASDPFGKKARKELKQAIKELPPQTAYITEALLEQLDFVQGQIEEIESRMREWVQDTSEMDLLRSLPGIGWILSAVTGLELGSIKRFASAERYASYSGTTPRVHASGDKIRYGRFRPDVHRYLRWAYIEAAHSVALHRGTYPSRHVSRLYERIRTRKGHPKAMGAVARHLAEATYHVLTRGEPYRDPVVKKGRSREV

SEQ ID NO: 333844 - protein, 401 aa, unidentified
MRVVFGIDVSKATSTVAVVVNKNKVAGFEVQNNRSGFDKLLKSLANFQKPEIVFEATGLYSRRLRVFLDDYGYRYTQLNPLASKKQLDRLRPNKSDKNDAFNLAETQFQISRALTYVQAPVYQSLLDWSRFYDQVTVDAVKDKNRLHKALQCTFPEVENLLNAPTGHLYWHLLRQFPISSTVTKLSSTQLSNTIEKLPHVSHQRSIELANRLSQLASESYPCVGEKSAMVEEVCYLATELLRLDTQKTEIINKMAILAQNLPELDILESIPGISINTAVRLIGELGDVRRFKSANKLNAFEGIDLRHFESGEFVAVDHISKRGNPYARKILFRTILNIMTSSRTKPSHINDYIVRKKKQSSGKSSFKKIAIGAIHHLNRTMYHLITTNQKYDYPRAQPKLR

SEQ ID NO: 333845 - protein, 415 aa, unidentified
MEIIYSRVAGIDVGKREVAVAVRMPGDIPRQRRQLVRKYKTFYQVLREMVAWLVEQGVTHVAMEATGVYWKPVFHALCEAEQIEVLLVNARHAKNVPGRKTDVKDSEWLAQLLECGLLRGSFIPPKDIAAIRELTRYRKKLIEERTRELQRLSKVLEDGGIKIDSVASSITTLSARDMIEALIAGERDPRVLAELARGVMRNKIPDLTMACAGRFGDHHALLARMHTDHIDHLTTMIEGLDHRIEEVVDPFAEPLRLLRSIPGIGERAAQVIISEIGVDMSRFPTAAHLASWAGLCPGNNESAGKHKTGRTRKGNVEVRTILTECAWSAGRTGTYVGAQFRRMHRRFGKTGGGKAAIAIAHTLIVIIWHVLHDRAEYRDLGADYFTRYDNPDARKRRLIHDLQSMGYEVTIAPAA

SEQ ID NO: 333846 - protein, 453 aa, unidentified
MPKTVPSECQNLKLVNRGAAAIDIGSRMHMAAVNSDSDDMPIRAFGTFTHDLHDLAEWFKSCGVTSIAMESTGVYWIPAFEILEQHGFEVILVNARYAKNVPGRKTDVSDAAWLRQLHSYGLLRGSFRPTAQIATLRAYLRQRERLVEYAAAHIQHMQKALMEMNLQLHHVVSDIAGVTGMKIIRAIVSGERDPDILASLRDVRCHSSVETIRSSLIGNDRDEHVFALSQSLELYDFYQQKMLECDRKIEMAIAAMAAEIETPLAPLPKIRTKTKQVNAPSFDVRAALYGLVGADLTQIHGLGSSLALKLIGECGTDLRTWPTVKHFTSWLCLAPGNKISGGKILSSRTRRSSSRAAALLRLAATTLGRSDTALGAFYRRLAARIGKQKAVTATARKIAVLFYNSLRFGMVYRDPGAAAYDERHRSRILANLQRRARSLGYQLELMPAEGCVS

SEQ ID NO: 333847 - protein, 346 aa, unidentified
MEQIIRIGMDTSKYIFQLHGVDAAERPVLRKRLGRKQMVAFFAKLRPTVIGMEACGAAHYWARELAKLGHEVRLIAPQHVKPYVRRNKNDGRDAEGLCEAMSRPTMRFVPVKTAEQQAALMLAGVRERLVARRTQLSNAIRGYAAEFGITTAKGLDKIEPLLAELAQAESVPVLARELFVMQGREYAQLQVELKAIEARLRAWHRANAESRRLAQIPGVGPIGATALVMKMPDPGAFSSGRHFAAWLGLTPKDHSTAGKTRLGKITRAGDERLRSVLVAGATAVIQQAKHGRGHPSPWLVALLKRKPPKLAAVALANKIARIAWKLMVTGESYDGARMLSASSPAA

SEQ ID NO: 333848 - protein, 515 aa, unidentified
MVPSVQEVLTLVKLCWSGAKSHRPRRVIPFRRLPTHLPDTGLGRFALTINESESMSRKTKRKAKVTTSLPPGLESINLNAAAIDIGSTEHYVAVPPDRSEPAVRSFGSDTAALHEMARWLKECGITTIALESTGSYWIAPYQILEASGFEVVLVNSRHVKNLPGRKTDVLDCQWLQKLHTHGLLSGSFRPEDKVCVLRSYLRHRENLVRAGSAHIQHMQKALTEMNLSLHQVLSDLTGVSALAIIRAILAGERDPWKLAALKDNRVKKSNEEIARCLEGDYRREHLFALGQALELYEFYQGKIAQCDREIEGQLHQFEARIDVAQHPLPEKPQKRTLKAQGDFELKNHLYAICGVDLTRIDGLEVLSVQALLSEIGLDMTRWKSEKHFASWLNLSPARRISGGKPLARKPHRGHNRAADILRLCAQSALKSKSALGAFGRRLKARLDAPTAIKAVAHKLARIVYRMLKYGNQYCDAGERYYENKYQNHLIRRLQKQAAAFGFQLAPRQSTVTTVS

SEQ ID NO: 333849 - protein, 459 aa, unidentified
MSQLPTLSYKGFAGSKAGLVRLRFQEEVSKSTMSEVESIQSEPEFAAFIGIDWADQKHIWCLQTAGSKQRESGELEHTPEAVECWVANLYQRFAPRPIAVAVEQSRGALVFMLSKYELFHLFPVPAQMAASMRQALYPSGAKDDPRDADLLLDLLLQHRNKLRRLSPDSEATRRVQNLVEERRKLVDEKTAQINRLTDHLKVYFPQMLEWFGRLDSELVCALLERWPALEELQKASPASLRTFFRKHRCRDRERIECRIEAIRRALPAIQDRAVIDAKSAVVKVIVQLIRILIGGIEDLDGQIEEAAAAHPDFFIFNSLPGAGPVMAPRLLAAFGSQRDRYRSAHEIQSFSGIAPVTESSGKRKWVHFRWACPKFLRQSFHEWAGHSIVQSEWARVYYQQQRSKGNTHHAAVRALAFKWIRIVFRCWQDGVAYDENTYLAALAKHGSPLSGLVAIGKTL

SEQ ID NO: 333850 - protein, 340 aa, unidentified
MKYVGVDLHKQFIKICVVQVVHGKRKVMIRRRFECQQTTAIREFFETLTPFQVVVEATASYEWFFLLVENFADRLVLAHPKKLRIIAESTRKTDKIDAEVLAVFLALDMIPESYRPSPRVRQYRVLSRNRHWLQGRITSVKCKLRNKLAHYNADIAELFTQRGQQYLAKLAMSSADRFEVQLLQEQLRLFQRQLEEARQELRKFGKTAPLAEREARAVLDSIPQVGPVTIDAVLSELGDWRRFRSAKAVVAYAGLSPGVRQSAGKRHNLHITKEGSRLLRWAMVETAWRLVGRSPRWNRMFQRLQGNTGSKKKAIVAVARHVLCMMFSMIQSGQTYRLAA

SEQ ID NO: 333851 - protein, 484 aa, unidentified
MHLQITNKLTLALDAFRFNFESAGALELVDEYSGLASEAAPILPSQSSGMHVPLHKLAQWSGMMNQLTDTQYTAYVGIDWAAAKHDICVQAADDGRREFACISSQPEGIETWAQDLYRRFGGPIAVALELSKGPIVSALQKYDFFVLYPINPSTLAKYREAFTPSGAKDDPTDAELAVDLMTRHPERFSPLKPQSVDMRKLIGLVEQRDKFVSDQGRLVNRLGHALKQYYPQVLEWFSEHNTVVFCDFLSQWPTLNQAKRARKASLERFFRSHHVNSAELIERRITAIKSAMPLTLDAAVIEPHRLQVEILVEQLRITIKALKRFDDEIAVTANKLPDYDLLFSPLPGAAKVLAPRLLAAFGEDRQRYPQADALQKYSGIAPVTKRSGKTTWVHWRWQCPTFVRQTFVDWAAQTINKSAWAGAYYRQQRAKGCSYHVAVRALAFKWIRILHRCWQDRIPYDESKYLEALRRKGSPLLKYLAEAA

SEQ ID NO: 333852 - protein, 344 aa, unidentified
MKYYVGLDVSLRTLALCIIDGDGKVVLEKALFCEVAEVADCLRKFGQPVEMIGLEAGTMSQHLFHGLSAEGFNVVCMETRQVHAALSAMRNKTDKNDARGIAQVVRSGWYNPVFMKSKASHCERALLTSRKTVLSKCLDLENEIRGLFKAFGIRLPKSIKRYNFAKEVRPIIEADDGLSHALLPVLDAHEVLLATFAELDRRVKRDARQDEVCARLMTVPGVGEITALSFKSAIEDPARFKSSRNVGAHFGLTPRRFQSGEMDNHGHVSRAGDAAVRANLYSAANSLLLRTRGPSDLKSWAMKLMRKKGRRRATVALARRLAVILHRIWMDGTEFRANGSEVTT

SEQ ID NO: 333853 - protein, 425 aa, unidentified
MSEKIVVGIDVSKAFSDICILSPNNDIIKRLKISNDINGMKSLIYVLEKVEDEYEDSAVIIMEATAHYHQILANFFRKHNYEVIVINPIQSGALKNINIRKIKSDKTDAYNIALLYRIKNYNETITHSDTVNSIKKLCRQHKELTDEIVEHINRLIAFLDISFPDFKKVFTDLQGKTPLSLLEKYPTIQEVLSPENKQDIIQLIKENLHKSNCYAEAKYEKLVKAAEKSIEVCIVSLSSAVLIQTTVRVIFSLQEALKAIDDEIKRLSLLDEKFHKEIVLLQSIPGVGEYTACVVLSELGDISNFSKPKELVAFFGLDPGVSQSGTYNRKNNKISKRGSPHVRSILHMLAKSNVYPNRNREYLNPVMRAYFEKKIAEKPYKVVMCAIMRKMVQIIFAVLRNQKSFELRTPEEHQKLIREKSKLVA

SEQ ID NO: 333854 - protein, 379 aa, unidentified
MTTEFAVNDVCCVALELSKSTWVCAFAPPESGRASVHRMRAGDVDRLVSILETGRARAMRDASRALEIALCYEVGYDGFWLARLLIARGIRTIVFDPASFLKPRRGRLAKTDRLDAEEMTRILRTWLSGDRAVATAVRIPTVEEEDAKRIERERKNLVEERTRIVGRIKGLLALHGIWLSSKRIGKGLLGRLHTMMTGDGRPLPPFLRRDIVRMIQHYEFICDQIAEVEADRKTALNDETSCFPQRDKVRRLTSLGAVGVTTATVLVAEVFHRTFETRRHLASFIGLAPSPYASGDVNRDRGINKAGTKLARQTLVELAWFWLRYQPNSKLARWWHERFGNMGMRGRKVGIVALARKLAIALWRFVEQGVVPEGATLKS

SEQ ID NO: 333855 - protein, 360 aa, unidentified
MRIIGCDLHARQQTLAMLDTETGEVVNRTLMHEGNQVREFYSELPGPVLVGIEAIGPMQWFLDLLAQLGIECRVGDAAKIRAAEPRKQKHDRRDAELILKLLVEKRFPAIWMPSKELLDVRALLLHRHQWVRLRTQVQNALQAIALANGLRRGPSLWSYDGLAKIAFLPLPPHTSLRRSALQALYRHMDEEVEKLTVQVAEQVEHHSGAQLLMTHPGVGPVTALATDVFLGDPQRFADGKALASYVGLIPEERSSGRRRRLGRISKQGNPLLRFLWNEAGAHAARRDPELRRFYRRKVVQKGLGKARVAVARKLGIRLWIMLRDQIDYQEFCRRGQKQSSAACAGMPEVGNGANRHRPVE

SEQ ID NO: 333856 - protein, 357 aa, unidentified
MEEYIAFDSHKHYTWVEHQEANTGKLRQYRVEHGPGAIRAALHKCQPGTEVAVEATANWYWITDEIEQAGCRPRLVHPRKAKLMMGQINKTDKLDTHGLNILQRNGTLPTVWIPPGPLRELRELTRTRVVLVAQRTRWKNRITATLAKWGLPASEYSDPYGKKARQELEQRLERLPEQTRWATRQMLVQLDGLSVQIKEFEKRLEELVERTPAMQWLETLPGVGVILSATIALEIGDIGRFLSAERLASYSGTVPRVHSSGDRTRYGRTRPDVNRYLKWAFAEAANSTAVNHRRFPERHVSQLYARLRARKGHNKAVGAVARHLAEAAFHVLSRQQAYRDPTNTSGSDQRGVNAIRS

SEQ ID NO: 333857 - protein, 670 aa, unidentified
MPASATAARRLRLGVGIDTARYGHHVTFLGDDLQRVAPDLPVPESRVGYQRLERQLRRLCEKHPDAELHVRIDAAGQYAANLEHFLRSLDLPLPVSVGEPKRNKDYHHAHSPKRQDDQTESWAMARYAVLERPAPSQETPPEFAVLRRIASRLEAQVRQTTRLTNQLHELLSAVFPELANLARDITVQWVLKLLERYPTAPRIAAARFDSLQGIPRLSPEKAQQLQTAARNSVGALRGETCEALVRQLVRELRASLDDESRWKKLLTQAFDALPPGPHRRIATITGIGKVTAAAIVATAVSIERFETPEKFVGFYGVFPQAASSGVDKFGRPNPPGKKSMCARGNDLVRGLLWNCAKSAAMFNPAARTLYQRLTSHSRPDGKLPLRGDVAFGYCMTKLLRLVFAVWKTDRDFNPRHFPWEPQENTCPLDRTERATSDAATSDPTSLEETATPDQTEVGDERESVAADAAASAQEIAKAAGHNEPQGSRDNVVTAATASLSVSLSVRTAADQHLPPSATCGSAAGSPQPFRGPLDFAALRRQVTLRQVLQHLGVLHRFRNSSGSGSQLRGPCPLHQSRSERGRTFSVDLQRNIFRCFNPSCAAQGNVLDLWAAYHGLPLHAAALHLAETFGVLPSRLENGSQTQKQRRGTRNPAVAGSSTNKAGITPAHDP

SEQ ID NO: 333858 - protein, 309 aa, unidentified
MLTGIFVGIDVAKATLDVAVTDRPAQTFAQDEAGLRALVQYLHPLRPALIVLEATGGYETAAVSALALAALPVAVVNPRQVRDFARALGILAKTDTLDAHVLLRFATQVQPVPRSLPDDLHADLRALVARRAQLIEMRTAEHNRMATARRTLHRGLRQHIAWLDRRIKDTNDDIGRLIAASPLWRTRDQLLQTTPGIGRQTSARLLVSLPELGMLTGKQIAALVGVAPLNQDSGMRRGRRTTWGGRAPVRAALYMATLVATRHTPSIKAFYRRLRDAGKPPKVARVAAMRKLLTMLNAMLKHQRSWSPA

SEQ ID NO: 333859 - protein, 342 aa, unidentified
MQIITIGLDIAKNVFQIHGIGAAERVVIRKQLRRNQVLAFFEALPPCLIGMEACATAHYWARELTKLGHQVRLMPAKDVKAYVKRNKNDAADAEAICEAVRRPTMRFVQIKSVEQQGRLMLHRARDLLLRQRTQVINALRAHLAELGIVAAQGREGVKELLKIIAGEQDARLPADAQASLVVLAAELQAMQTMIGAIDKRIMAQHRSSEASRRLESIPGIGVTGASAITAAVPDPKVFRSGRDFAAWIGIVPRQDSTGGKQKLGPISKRGDRYLRRILVVGACAVLRYARHRPEKYPWLTQLLARKPFRVVAVALANKMARIAWALLAKGGTYRAPALATAA

SEQ ID NO: 333860 - protein, 319 aa, unidentified
MDATAQDQKMFVGIDVSKGQLDVHVHPAGLAFFVNRDVDGMEQLVTRLKSLELTVVAIEATGGYESLAVAALAEASLPVVVVNPRQVHNFAKALGLQAKTDSIDASVIARFAEATKPEIRPLPDRETLALADLMARRRQIVQMITAERHRALRVATNKRLQKSIARVIGVLQRELDDLDDDIDKTVKGSPLWREKEDLLSSVPGVGKVIARTLMAEMPELGSLDRRQIAALAGLAPWTRQSGKWRGKSFISGGRSVCRTVLFIGALVAARHNPDLKIFRQRLLDAGKPKMAVTIAVARKLLTILNAIMRDNKPWTQKTA

SEQ ID NO: 333861 - protein, 342 aa, unidentified
MTITIGIDPHKGSHTAVAIDSNEHVLDEIRVRSCSTQAERLREWADRFEERTWAVESAHGLGYLLSQQLVAAGEDVVDVPPVRASRVRVLGSGKSQKNDPNDARSIAIAALRADDLTVVCADDHARVLKLLSKRHRDLGRLKNKASCRLHALLLEMVPGGASFRITTVTRINAVINDYEPADAMGRQRQEIASELAGDIDRYNTLLDASKQRIQSALAASGTSLRTISGVGPITAAMIIGESGNIERFASKHHFASYNATAPVEASSGSKVRHRLNQRGNRKLNWALHVIAISQLSHDTAGREFFDRKVAEGKTTKEAIRSLKRQISNVVYRHLAADARQQS

SEQ ID NO: 333862 - protein, 364 aa, unidentified
MKEEKKETRYVGIDLGKRTYEMAIVEKSGKVTMSNGKTYTEGRQKLYKKLQLTDKVALEAGSLAFIMAKEIEASVGCQVYVLNPYRLGIIYKSMKKTDKEDALKLAHIIEDFQEERLPVVSVPSDKKMENRKILAGYRRAQQSRNRDINRLHALFVNQGITTVVRKDLAESENRKEAIEALKGYEKEDAKYILETLELHEKRMELLEKKIKKEAEEDEVIQRLQSVPGVGPMVSFAFASHVGAERFENAGQLSNYIGLVPRVYMSGDTVRYGSITKRGNGYLRALLVQAAWALVRSKQGGKLKERFNYMTIQKSIGKKKSIVSIARRLAELMYVLMRDGSRYEARPFIVNKEVVRDISGVKFCA

SEQ ID NO: 333863 - protein, 406 aa, unidentified
MATAPKKHKVVPPPGANAFGTPARSETQRMRAKGRTTVRTVALDYGNRITLCEVSNGEVIARTTVDDFGELQRWLGPRTMPARVAVETCREAWWLVRKLKAWGHEAVIVDATRVRQLGIGQHGRKTDRIDAEVLARSLEKGLIPCAHVLSEERQELRLQLSVRRALIEARAQYITTVRGLLRAHGYRLRGGHPASFVNVVREAALDSAARELVTPLVVVLETLNTQVRQCDGKIEGLATRDPVIAKLKTAPGVGTVVAAAFVSVVDDAHRFAGAHGLESYLGLVPSEHTSGKRRLGAISKHGNPYLRALLVQTAWTILRMKTADPLREWGRAVMQRRGGRVAVVALARRMAGILWAMWRKDTVYEARRVGHESAAGLRLQAQSIQFQAALIVRAGRKRIQSSLSSY

SEQ ID NO: 333864 - protein, 346 aa, unidentified
MLYAGLDLSRQRLDVHVLDEQGQTVEVTAVRPDADALRTLATHVLRRGHEVTAVIESMTGSRFVHDQLEMAGWDVAIGDAVKVKGLAPLAAKTDKIDAWVLAELARRDLVPEIWLPTPDVRAERERARFRLHLVRHRTALKNRIHATLMTFGHPVPVADLFGVSGRKLLDRFALPSPWSETLSTSLAMVDELDDRIRTCTEELRSLGADHPSIPLLVTVPGVGWVLAYTIGSEIGDVHRFASPKKLVGYTGLCPIVRQSGERDVRGPLAKNGPKYLRWALVEAATHAARDARYKQRYERTKHRLGRQRGAKVARVELARRLAETIWHILTKNEPFAPAGPAMRLVA

SEQ ID NO: 333865 - protein, 354 aa, unidentified
MGMIVLGADTHKSSHTIAAVDAATGQVLGEKTVTVGPRGFAALLIWARGLAGERVWAIEDCRHVSGHLERFLIGRGERVVRVSTRLMATTRRSAPARGKSDSIDALAVARAALAAGLETLPTAALAGPELDLRLLVDHRERLVRQRCALNNTLQWHLHDLWPELELPGGALFSRKWSSRIGRRLARAEQTMRVRIARDELRRLRELTTTIVALEAEIADLVGQLAPQLLAEPGFGPLTAAKLVGEIAGADRFASDAKLARAAGLAPIPVSSGKTDRHRLDRGGNRQINAAIHRVAVTRARCHPETRDYIARKRSEGKTHREAIRSLKRHLARRVWQLLRAPTRTANDALQISIH

SEQ ID NO: 333866 - protein, 409 aa, unidentified
MNEIGKRFIGLDVHKHYLIALGVDEELQVVLPARRVELSNLESWMKKTLTRQDEVVLEMTTNTWQLYDELSAYAGSVTVVHPPHVALITRSQVMNDKIAALILARLLAKGLLVGIWVPPQEVRELRGLVAQRQKMTRLATQAKNRLHAVIQRHHLKVPAGNPFSKAHNDWWQALSVGRLEKMNLQSDLETLQFAEQQEARLQVEMTGIAAEDEELGRLLHIAGFGVITAVTVYAAIGDIRRFAEAKKLVGYAGLGARVHDSGLTTRTGKITKAGRRDLRVALVEAAHVAANNHPHWKAELARLQPRLGYNKAIVAIARKLLITVWHVLARKVTDRFAEPEAVAQKLLRFAYEVGKENRPGRQTAAGFARDRLDVLGLGQDLTSIPWGAKKPIPLPPSSITKKRSDVPNR

SEQ ID NO: 333867 - protein, 379 aa, unidentified
MKKHITFVGLDVHKDSIDVALADAGRDGEVRFYGTIGGDLESLFKVVRKLQSTGAELRFAYEAGPCGYTIYRALTGKGFDCIVVAPSKIPKKSGDRIKNDRRDALNLARLHRCGDLTAVYVPAAEDEAMRDLTRSREDAVKALRVARQELLAFLLRHGFRYSGKSYWSKAHLNWIAAIKMPHRGQQIALQEYVHAVQERLERVCRLTQQIRQLIPQWQLAPLVSGLQALRGVSLIVAATTVAELGDLTRFDSPKQLMAYLGLVPSEHSSGGTTRRGGITKTGNGHVRRALTEAAHTYSHPARESRVLLARLDGLPQEVREISWKAQLRLCGRFRALMARGKNKKTVITATARELAAFMWAIACALLPTAPSKPQPVPAN

SEQ ID NO: 333868 - protein, 371 aa, unidentified
MKKNNSSKQHPSKGNCPKQGKETLAFYIGIDLGDKNSDVCVMNAAGEVEKEFRLRMNAADFEGYFRTIGRSRVALEAGGQSQWVAEVIEKCGHEVYVANPHKLRYITESDDKDDPGDAYKLAELVHFKPRLLHPIRHRSQALQADLSWIRGREAAVAVRTQLINTVRSLSKGFGERLQKCSTESFTAKLAEQIPAAIRRAVAPLLEVIDHLNEQIGYYDQMEEQIARERYGKYVLLTKVNGVGVHTALTYMLTIGDPERFEKSRQVGAFLGMRPRKQDSGASKPQLGITKAGDEFLRKTLVNCAHYMLGPHGADSDLRRFGLRICERGGKNGKKRAVIAVARKLSVLLHRLWVTGEAYEALRNSKKQQAAA

SEQ ID NO: 333869 - protein, 357 aa, unidentified
MESQEVKYVGVDCGKKSIEVVRINSENSLERRQFSTTESGINNLLQWLTLNDIVGLEAGSQSFRIAKSILNKGVQVIVLNPGNLATIYQSLKKTDKEDSLKIARLIQRHPIEELPTVPIPNDEEEDNRRLCSEHENWTKQLTQGKNRLHSLFTQAGLTQITKKHLRTKVSREASVTLLSDRYKKEAERILKVLDLVELNLKLIEKEIQEALKKNKAYVQTIMSMPGIGMITSLAIMSYMGDCKRFSSAKQAAYYAGLVPRVDISGDTVRYGRIINRGCHSIRRVIVQAAWSLVRCQYGGKIKEFYQRLYLKKGAKKSIIATSRKMIEVLYVMIRTGKLFDSMPENILNRKLTQYGLM

SEQ ID NO: 333870 - protein, 346 aa, unidentified
MKVSTVGLDLAKNVFQVHAVDEAGEVIARKALRRRQVMPFFEGLEPCLVGMEACGTSHYWGRELVGLGHEVKLMPPAYVKAYVKRGKTDAGDAAAICEAVTRPSMRFVAIKSPDQQSLLAVHRARDLLIRQRTQLVNMIRGQLAEFGIVVAKGIHHVLNLVARLLDGETLDLPALAAKVVIALAEQLRDLQARIGDLEKDLVSWSRDDPVVKCLQTIPGIGIITASALAASVTDPHQFTSGRQFAAWLGLTPRANCSGGRERLGRISKMGDQYLRRLLVNGMTSRLRWLRRRPEAHPWAAKLLRRKPAKLVAVAMANKTARVAWAVMTRGEIYRAPQPSTQQQAAA

SEQ ID NO: 333871 - protein, 399 aa, unidentified
MESIHPNGERIKRFRELKATLRTQRDWLLVGIDVAKAAAVAQIRLAHTRILERQVVLPMTTTGFTAFWRRLERHQRATGAQAIIVALEPTGTYHQALAQFLVAHGADVVLVDNHVAHLNRRMLDRTWDKHDAKDAANLCDLLEQGKVLFCSLPDEPLASLRRLVRLLRRARVELGACKTRWQNTLRPALGPVGDPLPPAVVAALPAPLRALLPPAERAGGPGRPRALPPGLAAEVAALAARGTAVQQRIAALEATLTWCAAPLPATGLLDSLPGVGGTLAAILVAEIGEITWYTKFSQLRKLAGLDIIRLQSGQWAGTARISRCGRPLLRWALYQAALGASRTPAWRAKRTALLAKRQGDPHAFFKANVELAAKLLRLVWGVWRSGRPYTSARALPPAA

SEQ ID NO: 333872 - protein, 416 aa, unidentified
MGKLIERCAGIDIGKRFLVCCVMTGAAHEEPRSETRRFDTTVPGLKRLRNWLNEERVTDVVMESTGSYWIPVFNLLEGHVTVVLANPEEVKNRKGHKTDRKDAEHLADLLRHNHVRSSYIPAQPVRQLRDLTRRRVQLTQDATRERNRVQKLLEQVNVKIGSVLTDVFGVSGLHMLLALLDGRAAPEEIAGLARGSAKRKTPQLIEAIEGNRMSDHVRFLIRGCLRHLACLEEEMEELDAEILRRMQLSTFQKAFTLLQTIPGVGQLSAATILAETGPDLDSFPTIEKMASWAGLCPGNRESAGIQKGPQTTHGNPYLCTALVQCAWAATRKRDSVFRSRFQRLALRRGEKRAIIAVAHHMLIILYCMLKRGVPFHGAEHAPKQRRGERRAHHHLRCLRRLGLSVEIRLDPRVHPA

SEQ ID NO: 333873 - protein, 475 aa, unidentified
MNLKGTKKKNQVSNANIFEQQELLKKIEVVRENLTASTWHELETKGKFDKNAKLSFICDDMLILGCDVGSETHYLRAIDTRGRELSKSAFSFSNNADGFSKAKEWAVKIAAEYDKKQIVLGLEPTGHYWFCLATWMISNGISVVQVNPYAVKQTKELEDNSQLKDDTKDPKLIANLVKDGNFGMPYLPEQLYADLRRLSMFRDQLNEDRIRSINRLHRELKIYFPEYKEALGKTEGTFSLELLKQAPFPDDLAALKEDGIRQIWHNAKLRGRGYSRAGEILEYAKASVGIREGKETGKLVVQWFVQKILELDEELALIETQINQKCLEIPHTDKVLEICGIGENTLSGMVAEMGDISRFDDVKEIQKLSGLGLVASSSGKHKGETRISHRGRKRLRYWLFQAAKSAVAHAEEFKKLHVYYTTREQNPLKKMQSLIAIACKLLRIIFTILKKGIKYDPRKMLKDIRRESRQESLAA

SEQ ID NO: 333874 - protein, 316 aa, unidentified
MSAVQLFVGIDVAKAQLDVALRPTGERWAVVNEDTSIATLVARLQAMHPTLIVLEATGGYQRAVVAALAAAGLPVAVVNPRHARDVAKATGPLAKTDALDARALAPFAEAVRPTPRPLPDAQADELRALLARRRQLVAMRTAEQNRLGSAPARLQADIQAHITWLNTRLAALDDDLDTTLRASPVWREREELLRSVPGIGPVCARTLLLDLPELGTLRRQRLAALVGVAPLHCDSGTFRGSRTIWGGRAHVRATLYMSALVAVRYHPVLKKFYEHLRAAGKPAKVALTACMRKLLTILNAMVKHRTPWQVQEVPNA

SEQ ID NO: 333875 - protein, 343 aa, unidentified
MQTITAIGLDIAKSVFQVHGIDAEGKVILRRQLKRRYVLAFFEKLPPCLVGIEACASSHHWSRELQALGHTVRLMPPAYVKPYVKRQKNDAADAEAICEAVTRANMRFVPTKTPEQQSGLMLHRTRHLFIRQQTSVINAIRAHLAEFGIVAPVGRHGVEQLLGVVADASDARLPEVARGCVAALGAQLRTLKAQILEFDRMIMAWHRSSEVSRRLDDIPGVGPALATALVASVADPKAFRSGRDFSAWIGLVPKQNSSGGKDRLGSISKRGDRYLRSLFTTGALAVIRYAKIHGTKHRPWLTALLVRRPTKVAAIALANKIARMAWAIMAKGERYKEPAALAA

SEQ ID NO: 333876 - protein, 410 aa, unidentified
MEVMFDRVAGLDVGKDSVTVCVRTPGPRGGRRSETRTFKTVFGSLRVMRDWLMECGVTIAAMESTSTYWKPAFYCLEEVMVVWLLNAAHMKAVPGRKSDVRDSEWIAQLLEHGLLAPSFVPPPDIRRLRMLTRYRMQLMGDRTRETTRLELMLEDASIKLSTVASSLNTVSARAMLGAMINGESDPLRLAELARGKMRRKIPDLAQALTGHFDAHHAQLAKSILHRLRLVEQALAELEAVIADAFRPWAHQIELLQTIPGVGETVAQVIVAETGADMSRFPTAGHLAAWAGLAPAMHESAGRHHPAGKRHGNKWLTAMLVEAAGAAGRMKGKNYLSARHARLTKRRGMGRAQVAVAHSMLVSAYWMLKRDEPYHDLGADWHSQRNNEAHTRRLIAQLERLGHTVILDPAA

SEQ ID NO: 333877 - protein, 354 aa, unidentified
MNTIKYIGIDVHQATSVFAIRDSRGNILGESILKTEPTTIIDFLKGQRGTVRVTFEEGTYASWLYDVIKPYVSKVIVCDPRKNKLDENKTDRIDARKLAELLRLNALSAVYHGEQSNQTLKEYARSYLSLQQDSTRIINRLKAIYRGRGIGCRGTAIYRPKNRKEWLDKLKDKGAQCRAERLLKQLESFGKLRLEAQRDLVRESRKQKDYKILKGIPGLGLIRTALIMAFVITPHRFQNKRQFWTYIGFSVVRRGSSEYEINEGELKRKKRKPLPRGLNRNYNHVLKDVFKGAALTAAYRGQFKKLFEQRVADGAAENLALLTMARKIASITLAIWKKGERFDIKRHQLSEQKT

SEQ ID NO: 333878 - protein, 467 aa, unidentified
MKHNGRHQSQPRGRVSPTLLTQINPNVAGIDCGSAEHYVAVPPDRDPNPVQSFKTFTTELIRLADWLAACGVTSVAMESTGVYWIPVFEILEARGFHVLLVNARHLKNVPGRKSDVTDCEWLRDLHSVGLLRGSFRPVEAIVALRAYLRHRQTLVESASMYILRMQKALVQMNLQLPLVVSDITGLTGLRILRDIVAGRRDPVQLAEHRDPRCHASKADLIAALTGNYRAEHLFVLEQNLQLFDTCQAQLAACDAAIEAHLKTLTAALAAPATPLPAARTKKKRSRNEPRLDIRSLLHHLTGGIDLTQIDGLGPHTSLKLIAKIGTDMARWPTEKHFTSWLTLAPNNKISGGRLLGSRTQPSANRAAAALRLAAEAVGKTQTALGAFYRRLAFRIGKPQAITATARKLAILVYRALSGTLVYRDPGATAYDQQQQARTVRHLRRRAAALGFELVNRNTGEVLAPAGA

SEQ ID NO: 333879 - protein, 358 aa, unidentified
MNYIGCDCHISTLDCAVVNEKGQETKKQKMNTGVKGLMEFVKSIPKPRKIIIEEGTLASWLLEVCSDYGEELIITDPKINRWIGRAGQKNDEIDAAKLAQLARGGYIKEIHHPIGHRRRFRELVMIYHSTVKSQTRIKNQLKGKFRQEGIKCSGKTVYSAEFRNEWKKKLPQDKVVQIMVEGLWRQLDQVHEVQEELLGHIRKQSKQYPEIKRFKKIPGIGTVHAATISAIVENPHRFAHKKKLWMYAGLGLAERSSGEKVYSRSLTRNYNRLLKNALKQATEAAIIAKDNQFRRQYLRLTIEKGIPSHRAKLTVARSILATIYGIWKSGEDYDATIDKKRIESDKTQVRAYHLVRNG

SEQ ID NO: 333880 - protein, 343 aa, unidentified
METLYVAADIAKQSFTSAYWSEKQAKYWQAYANEPTGYEAFAQQVQAAQSASGAEQVHLILEPTGGYELGLALFAYEQGWLVTKPNPKDLRAWATGMGYRAKNDKIDAMMLAEYGGRNEPDPQELVPQAVRELDYYLRRLDELKRDRQAERNRLDTAKQKPDTPRPLLDNIERSLERLQEQMAEIEAAIATLLKRSPELRHQRRLLLSVPGIGAKNSLPILVLCYRFHALTCGKGTKKQLAAFLGVDSQTYVSGTSVRGSVAISKRGSRMGRAFLYMGALGGIRGHNVLRLFYQQMLARGKAKKVALVACSRKILTWAWAVFTSASPFDPTRFSHLESSPSLP

SEQ ID NO: 333881 - protein, 346 aa, unidentified
MDHYAGIDVSLECSSVCVVDAKGKIVREAKVASEPEALIDWFHSLGFDLARIGLEAGPLSQWLYAAMKKAGLAVELLETRHVSDAFKAMPVKSDRNDARNIAQLMRLGWFRPVHCKSMSAQETRAMLTARKLIQTKLQDIENSLRGILRGFGLKVGKTTKRSFATRISELVAGHPALETIATAMLAVHMVLLREFNSFEKRVRAISLLDAKARLLMSTPAVGPIISLTYACAIDDPARFASSKRAGPLFGLTPKKHQSGETDYSGRISKNGDASVREALYEAAHIILTKPIKGCAQLKSWAMRIAKRAGINKAKVALARKLAVIMLRMLKDNVPFNSTAKATAAAV

SEQ ID NO: 333882 - protein, 340 aa, unidentified
MGVFVGIDVSLENSAVCAVDEHGKLVKETKVASDPAALNACIRGMPGVVEAIGIEAGPLSQWLHKSLTDLGLPVVLMETRQVKAALKAAPVKTDRRDAAGLARLLQMGWFRPVHCKSLSAQELRVLLGARRSVQDAAINIEMSIRGMLRNFGLRLGRIGKVSFEDRVRELTEGNKLIQLSIEPMLRARAALRSELVRLERMARDITREDPVCRLLMTMPGVGSVVALTVRSSIDDPGRFRRSKDVGPAIGLTPRRYQSGETDIVGGITKAGDLDMRTALYQAATVVIHRSKKPTWLRAWAERVVRRRGAKRAAVALARRMGVILHRMWVDNTEFQAARQV

SEQ ID NO: 333883 - protein, 378 aa, unidentified
MPSETTIHVAIELSVSSWLVATRPPGAEKSRLHHIEGGDTTALLALIAELRTRASTKLGKPAEVVCCFEAGRDGFWLHRALTMHGVAAYVLEPTSILVNRRARRAKTDRLDAEGMLRVLAAWLAGDRQVCSMVRVPTPEEEDAKRPHREREHLVQERLRIENRIEALLFTQGIRKRPSLRSWERDLAELRTGDGRALPSLLRVELDRLRRRLVLALELIREVEAERAEALAVTAEDEMTQKIAALQRIRGIGTNFAAVLVREVLYRSFANRRQLASYVGIAPMPYQSGGMDRDRSISRAGNPRARTTLIQLAWLWLRYQPGSALGAWFRQRVGTLQGRTRRIAIVAMARKLLIALWRYVETGVMPDGVEFRAEADVTA

SEQ ID NO: 333884 - protein, 335 aa, unidentified
MEFQFFLGMDVGKSTFTYCLRDQAGVIDHGEIENTLKAIIRWVTSLKKTHRQLVENMIFCMEYTGIYNSILLRVLHQRGLHLCMESASNIKLSLGMQRGKNDKVDAQRIAEYAMRFMDRLKEWSPRREVVEQLGRLMSSRTRLVNARKTLSVPNHEAELFLDKRISKELTHHVAGTLKAIDRNIDSIEKEMKEIIENDENLKMLLKLSTSVPGIGFITGCTLIVKTNEFKSFDNAKKIACTAGIAPFEHTSGSSVRGKTRVSHRAHKDLKTALHLAALGAVRSKGVIQDYYVRKVAEGKNKMLVLNAVRNKLVHLVFAVIRDNTMYQKNYQYGVV

SEQ ID NO: 333885 - protein, 350 aa, unidentified
MDKELYIGVDVSKQTLDLAYYDGESIDWKKAHIKVSNNNAGFKKIGSWVAKVSKGFDIVLFCMEYTGLYTQNFRLWLEEKHYIYRMVEPRKMHRFEPDLDDGLRSLDRIKTDELDSFRIAIYCEQNHRKILRNPSKLPSPVYFKLKRLLAERKQTVKQSVLYKQQLHDICAYDTDLSVERKNGQLKTLNDALKSIDNEIDMYIKEDADISKNFSLLTSIPGIGRVVALETIVLTENFMAIDNPRKYACYIGVAPFKKESGTSVRKGSSVSKKGFKQAKADLSIACLVCMQHIPNIRDYWERKRKEKCSGIVFNAIKFKIILRMFAVIKRGTPYVETDNYRNGKNKQPGVN

SEQ ID NO: 333886 - protein, 338 aa, unidentified
MSIVFVGIDLAKNVFALHGVNATGAVQLRQPKVARAKLNEVVATLPACTIGIEACSGAHHWARLFAAHGHTVKLLAPKLVTPYRMSGKRGKNDAADAAAICEAVQRPNMRFVPVKTEEQQSRLMVHRARQGYVAARTACINRVRGLMSEFGIVLSQKAEVVRREAGKHLEEVPGYANLLIGDLLSEVHHLDERIQQYDGHVRAMARDCTAAQQLMQLCGVGQTTATAIVAMVGNGAEFSSGRQFAAWLGLVPGQYSSGGKARLGRITKAGDAYLRSLLVLGARAVLNAAAAKADSLSRWALAVRERRGYWKAVVAIAAKNARMAWAVLTKGESFKLPA

SEQ ID NO: 333887 - protein, 426 aa, unidentified
MRVMYERVAGIDVHKDMIKVGIRTPGHRAWTRTSEVLEYRTFYGVLQTMARDLRKREITHVVMEASGVYTEPVYYALMEQDFEQVAVIGPAHAKALKGHKTDAKDALRLAELFECGLLRGSYIPPQALKDLRDLTRYRAKTVQGRTSEIQRLAKALESAGIKLDSVVSDLTGKSAGLMTGALIDGERRGRVLADLAIGRMRTAGKLADLSQALAGRFTDHHAVLCRLHLDRIALFNTAVAGLEAKIAVKVTAYQRELDLLKSITGFGDAVAQAWLAEIGPAPHEYFASCEKLASWVTLCPGNHMSAGKRKHGRTGNAGTYIKPMLVQAAWSAIKSQGRLQARYHKLVRRFGGPKNPAAVKKAILAVADTLLKIAYQVLRSGRPYEDLGADFYTQRESPEQRRAYLLRQLEKLSPGCTITITPAEAA

SEQ ID NO: 333888 - protein, 389 aa, unidentified
MLLDHPFDGPTAIRTHIAAIFMSLELSRSNWLVTSLSPGKGEKMSKHSVAAGDTAELLALFADLRRKAEVRTGQSYPIITIQEAGLDGFWLHRVLQQNGLESYVVDPASIATPRRRRRAKTDRLDGETLLRALLAYKRGEPRVCAMVVAPSPEEEDRRRICRERRSLIAERITHVNRIKGLLFAQGISDYEPLRRDRRARLEALRTGDGRELPSHLKAQIGRELDRTELLLEQIKAVEAERDALLAAASEPASEEAAPDVVTMLLALKGMGANFAAVLWSEAFYRQFSNRRQVAAYAGLAATPWQSGGIRHEQGVSKAGNPRLRTTMIQLAWLWIRHQPQSALTRWFKQRSPQGRKRAIVALARKLLVALWKYATQGVVIEGAVMKPAA

SEQ ID NO: 333889 - protein, 344 aa, unidentified
MITIGIDPHKNSLTAVALEPSSQSHPRLRVVVDKNTSASLLAWAKQWPDRQWAVEGATGLGRGIAQQLVTAGEMVIDVPAKLAARARLLGSSSARKTDVADAISVAAVALHNRRLNRVRVEDHTTIMRLLTERRDDLVAEHTRWINRLHVLLRDLLPGGAELRLDTVEASALLTKIRPVTAADHQRKQIARDVVRDLKHHEASIKELEKQLRAAVTASDTTLTQIQGIGFLTAAKILALTGDIRRFPNQEHYASYAGTAPIDVSSGEQETHRLSRRGNRQLNAAIHVAAVTQARDPGPGRDHYRRKIAEHKTAKEARRSLKRRISNAIYRRILADQQRLQLEAA

SEQ ID NO: 333890 - protein, 390 aa, unidentified
MSQSFDASRSLTAFGQDSTLVAVIEMSQSKWLVAAMIPGIARQPLKKLDADAGALLKLLQRWREEARKAGREVKRIVCAYEAGRDGFWLARLLQAHAIEAYVIHATSIAVSREHRRAKSDRIDTELLMRSFLGWLRGEKRHCSMVAIPTMAEEDARRPSRERENLVGEQTRIVNRVKAVLALFGIGGFNPRLRKAVQKLETLHTAEGTPLPENAHAELRHDLERLRLVHDQIGTIESERLRRLAQAPAAATGPHAMVRLIARVLGVGIETADMLVNEVLTRNLRDRRAVARYAGLTGAPDESGKRRREKGLARTGNGRVRRGMIQLAWRFLIFQKDSRLVQWFRERTADGRSTTRKTMIVALARKLLIALWRLVTTGEMTEGVKLRPAGT

SEQ ID NO: 333891 - protein, 346 aa, unidentified
MHTAQDVILTVDYHLEHLEVRWLNCATGQEQRRNIPTDRRSIMRLVEEALAEATPAGGKVIWIMESTTGWARVKDLLDSKVEFILANVLQMPLPPKAYRRKSDKIDTGRIQREFLNGSLPQSYQPTIWWRQVRRVVDSRQDLIDRQTAVKNWIRHYLYHETWIPSDNLWSQKGLRRLKRLELSESDRMVLNLKLKDLEGIRVLLSAVEARMQQVYETWPEAKLVDAVRGIGMVTAVSILAHIGPIERFRDAEALISYAGLAPAHRQSDGTSHHGRIGGGGTDSHPRYLLIETMQWVCQIPRYRPAFERAQAKHGTNVARIIVARQLLRSLYKMLRDQVPFNQMLAA

SEQ ID NO: 333892 - protein, 397 aa, unidentified
MQNHLHVAIDIGSVCHRVAIGLDDGAVIDEFDCPHTPLGLSNFFKRVQSHEHKHAAQVAVAMEGFGGYARPLDSQVLAQGWSLYSINNLKFARFKEIFPAPAKTDAIDAKRMLELMRLRNRVPMAQAVLQEVAPVDALHQQMKAVTRRRKQLVFERMKISQRMQAELQGAAPGLLAITGQADNLWFLNFLTCRESLAKLKTVRRASLLKVAGIGVGYAAKIQAWQQSAAFAPPIDWIGPMIQADAKRILELRDAINALDESIAVLVEQSTIAQRLMRMPGFGNTTAGEVASEIGNIARFRDEASLAIYLGVAPLDRSSGKRVGAIPRQINPRARDAMLIVTIHHMATVATSRAYYDRKRAQGKTHMQATRALARHLVRVLFSMLKQNRDYRLPAVSA

SEQ ID NO: 333893 - protein, 456 aa, unidentified
MKRKKSKIGFKIPKLEALEQINFNAAGLDVGDEEIYAAVPEGRDEVSVRAFRTFTVDLYALAEWLTSCGVDTVALESTGVYWIPIYDILETRGFEVYLVNARHIKNVSGRKTDILDCQWIQQLHTYGLLQASFRPAEEIRALRALVRHRENLIKSMTREIQHMQKALQQMNVKLTNVISDLTGVTGMLIIRDIVAGERDPDQLAQHRNEHCAKSEAEIAKSLQGYYKPEHVFELKQALAAYDFYQGQIKECDTEIEQRYTDLAPGNDEDDTPLSPPKRKRSKTSKNAPDFELRLHLYRWAGVDLTQIDGLDVLTVQKVLTEIGVEMNCWPTVKHFTSWLGLCPHNDKTGGKVIKRSTKKTQNRAAAALRMAAQSLVHSKSALGNYHRRMRAKLGKPEAVTASAHKLARIIYAMLKNQTEYVDPGPDYYDEQARQRALKRLRRSAKTLGFEMVPIAA

SEQ ID NO: 333894 - protein, 375 aa, unidentified
MLYIQNIQPGDKTRGGFSLFHFIILKSIGMKKTVKQVCGIDVAQKELVVSLGRMFDDLTLEIYAHKSFPNTSKGFVALLEWIKKLTNEAVEVGYVMEATGVYHESLAYLLHQQNRKVSIVLPNKISNYFRTLDVKTVTDKTASEAIARFGLERKLDNWKPPRPTFKKLRQLTRERDQLVQTRTAAKNQLHAEQAEAEPNKSSVARVKKQIVFFDKQEQEIKTEIAALVNKDESVKKKIKRITSIPGVGLLTASTVLAETNGFELIRNKKQLTSYAGLDIKEKQSGTSVKGKPRISKKGNKYLRKAMHLPALAAIRSDERFKAIFARLVSKHGIKMKAAVAVQRKLLELIYIVYKTENLYDKEYLKKTREQQIATP

SEQ ID NO: 333895 - protein, 345 aa, unidentified
METMYYIGLDVHKRAISYCVKDVSGRVYAEGSVPATRFDLDRWMKTLPGPWTAAMEATVFTGWIYDHLQPHAAALKVAHPLMLRAIAAAKKKNDRIDAKKICDCLRCDFLPECYMASTAIRERRRTLRYRNLLVRQMVQMKNKIAMLLMEAGVSYNKQKLHKAGYFRELLATNPDINEGLCSLLRVCRETVVRLQRTESALVRSLERDSLLMDRVERLMTIPAVGPITALTWALEVGDVQRFSSIKKAISYCGLCSAEKSSGNTVQRTPLSKQRNKHLQTTLIEAAKMAPRNSPELAMLYDKEKRKGHANRATLAVARKLVAYLVAVDRGQRNFQVVETSNCIAA

SEQ ID NO: 333896 - protein, 350 aa, unidentified
MIIIGCDYHPAFQQIAFVDTDTGELQERRLQHREEAEKFYRDLAAQGMKVRVGMEASGHARWFERLLAELNFELWIGDAAEIRAKRVRKQKTDRQDAQLILQLLLEDRFPQIWVASWENRDLRQLLWHRHRMVQARTRIMNQLQGVALNEGLRCKKRLWRAWGREQLEAFRLAPWASRRRHDLLELLDRLTPTIAELTQAIEQEVEKCPEAQRLQTHPGVGALTALAFVLIIGKAERFQCGKQIASYLGLVPLEKSSGNQRRLGHITKQGSSLLRFLLVEAAQVTARSLPEWRSKYYHLTMRRGRKIAKVAMARKLAVRLYWMMRKEWDYGQLTKFGSHAGKLGTGDGVK

SEQ ID NO: 333897 - protein, 386 aa, unidentified
MSQTTHQPSVPFYIGIDFHKHYSVFCVIDDRNTILERGRIDHKIPIGFELLIKRYPGCRVVFETTMNWHWLYEILEAHMDHKDIVLANAYKMRIIAEAQVKTDKVDAYMLAKFLKAELISTVHIPSKSTRQRKEVLRQRCFFVRQRTMLRNRIQRLLSAQHNLQLPQCSDLFGKKGISALGKLELPDPAGLLLRQQLEMLENLKTRIAEDEMALKKMLEASPELEFVKSIPGMGPILAAVVVSEVDDISRFASAQRFCGYAGLCPTTYSSGGNTFNGRLMRACNKWLRWAFVEAAWVSVGCSPYFGDYYKRKRALGKKANTAIIATARLMARICWQLLTEKRAFETLPPAQKTKGRTGGETDSSPVSVNGQEATAISAPLSPAAPL

SEQ ID NO: 333898 - protein, 499 aa, unidentified
MSLSGARRRHILGVIPSPGTSLRGGASGLADNRYGMPFPGQARGFIWLPGGYFNLGRRIEAPEPESVVAKSQPEIRAPDFNLEYSMKAQPESRTIHRYVALDLHKEYVMTGAMNAAQEWVLRPRKVEMMRFREWAAANLRQGDAVILETTGNVWDIYDIVAPLVTRTVVAHAGAVRQIAEARVKTDSEDIKRLLRLLIADIVPEVWVPPAHVRELRSLISYRNRLVKTATMIRNRLQSLLHRHNLKLGENGLTDAEWWESQPLSALEKLQVRQELALLSRVEQSKAELETELAKMSMSAKWGKSAVRLLQLPGLGLITAMTVLAAIGDIRRFASPKQLVGYAGLGAGIHHSGKERQEKGITKSGRKELRWALVEAAWRAVRSSEVWKQRFDQLAKRRGEHKAITAIARKLLVTIWYVLTREETDRHASEEDLAYKMLVLSWELNEEARLGLTYKQYAKYALMKLGIETDITRFVRKNVPRRVAPREEVLARMKELGLSL

SEQ ID NO: 333899 - protein, 399 aa, unidentified
MVNVGIDLHKTQFTICVRDRKGNRFEKYPTSQEGYQGFLAQAAEWQGKGEKVRVGVESTGNTRYFKNRMEGAGIEVIVINTMKMKVVNESVKKTDKHDAATIAEFLEKDMLPESQLCSRESEQLRRLLKVRGTLLTSEVVIKNQIHGLLTAEGMEDVKGSLQSKKGRRRVLEALKANENGLVVQPLVETIEQLEAQITGIEKQLRTLTEKDRMVELLKTIPGCGEICAWTIRAYTDDIKRFASAKKYASFAGLAPWVQNSNESIHHGSITKRGPKELRTALVQVVMGLRRMKEKTYSWRFMQRYEAMKKHKGSGKAIIATARKIAVVIWNMLSEDVEFDIGQMVERKVGKKIESVKESEGTVKEAEENAEKKADEKRDEGVKKSVQKTGVARKKRKKVG

SEQ ID NO: 333900 - protein, 342 aa, unidentified
MQVTTIGLDIAKNVFQVHGIDAAEKVVVRKQLRRGQVLALFKALPPCLVGMEACATAHYWARELTKLGHQVRLMPAKDVKAYVKRNKNDAADAEAICEAVRRPTMRFVQIKSAEQQGRLMLHRTRDLLMRQRTQVINALRAHLAELGIVAAQGREGLKELLKIIASEQDARLPVDAHTSLVVLAAELQAMQTLIGSVEKRIMAQHRSSEASQRLESIPGIGVVGATAIAATVTDPKVFRSGRDFAAWIGIVPRQDSTGGKQKLGPISKQGDRYLRRILVVGAHAVLKRARQQPEKYPWLTQLLARKPFKVVAVALANKMARIAWALLAKGGLYRAPALAAAA

SEQ ID NO: 333901 - protein, 449 aa, unidentified
MAKSKRSQPERDISPTYRDAAAIDIGAKMHVAAVPPDRDTEPVRSFGTFTGDLQRLADWFERCGVRTIAMESTGVYWIPVYEILEQRGFEVMLVNARDAKHVPGRKTDVSDAQWLRRLHEYGLLRPSFRPKGELAALRAYLRQRERLLDYAASHIQHMQKSLMQMNVQLHHVVTDITGATGMRIIRAIIAGERDPAALAVHRDRRCHATVEVISAALTGNWRDEHVFALGQALELYDAYQAKLTDCDAQIETVLRRLRNVANPAGPLPAARHRDNTANAPTFDARAALHAVLGVDLTQIHGLGASLALKLIGECGTDLTAWPDAKHFTSWLCLAPANKISGSKILSTRTRRSGSRAAALLRLAAVTVGRTETALGAFYRRLSARLGKAKAVTATARKIAALFYNTLRHGMAYSDPGASYYEQRYRARVLSNLQRRAKSFGYVLQEASSA

SEQ ID NO: 333902 - protein, 408 aa, unidentified
MIYCGIDWAERTHDVALVDDTGALVAKRHITDDAAGYQLLLELLAEHGDTKETPIPVAIETSRGLLVAVLRAGKRRVFAINPMAAARYRDRHSVSRKKSDPGDALVLANILRTDMHAHRPLPDDSDLARAIAVLARAQQDSLWNWQQLANQLRSLLREYYPSALEAFAIWANGLCRPEARELLKVAPTSSRAAKLTRPQLQAALKRAGRKRGIVAEVDRLHDVFRAAWAHQPLLIEDALGKQMLALLTQLEAACTATDGLAEAVEEAFPQHPDAEILLSFPGLGIQLAARILAEIGDDHTRFADARGLKAYAGSSPVTRASGKKSSITRRWVKNDRLNHVGYLWAFASLRASTGANAHYRRRREHGDWHAAAQRNLFNRMIGQLYHCIQHHKPFDENAAFPTELAAAA

SEQ ID NO: 333903 - protein, 396 aa, unidentified
MTTIGIDIGGRTHVVARCRDGTSRADREILRVNQSRAGFAALDAWLGRQTEPVTLVTMESSGHYWMPLASHLCRRDISVAVVNPLAAKYFAKSRLARTKSDPADARSLAEMAMRDTPPARDPLTGVELRQAARFAMTLVAEQAKVCQRLIRLVELGFPELGELFDDPTCRTAREVLRIAPTARAAARRRPTTLANANAGPGRRRLGTAKAERLQAAAADSIAVPELDAEVAFEVGLLLDQYDLLERQIEEADRRVASLLDGETARRLQTIPGVGPSIAATLLAEIGDIARFTDFDQLLAYAGVHPAERSSGRKGANPETAWRMSKAGNSHLRAAAYRMAVVGVQHNPVIAAHYARKRAAGKSKMNAIGHCMRKALAIVWGVWRNGRDFDPDWGSTC

SEQ ID NO: 333904 - protein, 358 aa, unidentified
MSNDKYIGLDVHQSSVVTAVHNHQGKCMMESIIETKAQTIRDFIKSISGTVHVVFEEGAQAAWLYDLIHPLVAEVVVCDPRANNSSLGNKSDRVDANKLAQMLRMGSLRAVYHGQTGIRALKELAHGYESLVSDMTRVMNRIKAIYRARGVLCSGTSVYRSCHREQWLSQLQEAGVRRRAEYLYRELDTLRQLRREARRDMVREAQRHRAYKILRKVPGLGPVRIAQIIASVSTPYRFRTKRQFWAYCGLAVVTRSSAEYEFVGGKVRKRHRPIATRGLNDNHNRRMKEVFKGAAVDAIKRGIFNQYYEGLVGKGMRAEIGRLQVARKIGAIVLAVWKRGEDFDQDRVIGQRAQGQGA

SEQ ID NO: 333905 - protein, 370 aa, unidentified
MDESIKFFVGLDVHKDSIAVAVAEAGRTPARLMGSIAHDVGKLRKLLARFGEAARVQVVYEAGPTGYGLQRELARRGYLCQVIAPSLIPKRAGDRVKTDHRDGLRLAELSRAGELRAVWIPDPADEAMRDLARAREDAVNARTQARHQLKAFLLRHDVRYVGKTSWSKIYYRWLATLNFGLPGAQTAFTEYWQAVTAADERVTRLTTASANSIEGWRFEPVVRALQALRGIDAISAIGLVAEIGDIGRFAHPRQLMAYLGLVPSEHSSGERVVRGSITKTGNAHARRLLTEAAWNYRFQPRIGRRAQQRAEDLPQAIRDVAWKAQLRLSGRFARLLARGKERNKVCVAVARELAGFVWAIASTQAKLPQS

SEQ ID NO: 333906 - protein, 609 aa, unidentified
MTSDVLLRDVTERDLPIFFEQQLDPAANQMAAFTAKDPADRAAFTAKWAKILDDDSITKRTVLFGGRVAGTVGAFVAPWSGKLEVTYWIGREFWGQGIATAALSALLRAVKPRPLYARAAKDNIASLRVLEKCGFTIAGYERGFANARGEEVEEVVLELRAEAPEVGAKHAEPLYGLESQELPCRKSGLVKRGRCTVQAPSRLKFSVFFLERSMTMTATYADCITRSRPVLYLAFELGAKDWKLGFSIGLGVAVRLRAIGAGNLAMLRREIELAKKKFKLTDDVLVCSCYEAGRDGFWMHRWLVEQGIDNVIVDAASIEVNRRYRRQKTDSLDAAKLVAMLIRHHAGEKLWSVVRVPAREEEERRHLHRDLEEMKAEVTQHRNRIRGLLAGVGARVAEINAGFVELLPTVQTADGREVPGALRERLVREFERLRFVQQQIGSLEQERKRKLRDDGHEEHVVKARKLMQLRAIGPHSAWVCMLELFGWRRVHNRRQLASLVGLTPTPYSSGEDEREQGISKAGNRRLRTLLVEIGWCWLQYQESSALSQWYRRRFAGGGKRQKKIGIVALARKLLIALWKYLERDEIPEGATLVDWRAKLAGFSARPLPA

SEQ ID NO: 333907 - protein, 351 aa, unidentified
MVAGGDVPNTERGFAQLVDMFTAHHVQRVGIEGSGRFGRAVAVHLALCWQSGQPVAVVEVPTLMTSRERHGQLGKGKTDPVDALAIARITTREQQLPPVRLTVGAAADLRALLDYREDLVRERGALVNRAHAELGGLRPGYQQQIPIMTTRARVRAAVDLLGDDGSIRATLCRRRLERVIAIDAETAELKQQITRLVAAADTTLTDLYGVGPLVAARFLAEVVDIRRYPNRNAFAAANGTAPLPASSGRTVRHRFNPGGNRQLNRSLYTIALTQIRGDTEGRAYYERKRAAGKSKREALRCLKRRLSDIVFTTMRHDAASADASCDQASPPAWPLLVGVGAVDANEARLTA

SEQ ID NO: 333908 - protein, 412 aa, unidentified
MQDILTCAMGLDVHRDIIVACLVKGAVDAEPEAETRTFSTLIPEMQKLRDWVIESECRNIAMESTGIYWQPIYEMLESCFDGEISILVVNARHMKNVPGRKTDMKDAQWIATLLRAGLLKGSFIPDKAFRELRHLTRYRKSVVHDITAQKNRIDKFLQSSGFRLTAFLSDTFGASGRNIIRHLIEHGSIDREALDKCLKTKTRNRIDEILVALNGSLSEHQRRFLNMVFRHLEDLEAHKHTVEDEITEEVLKHTDTLNLLCSIPGIDVTAAAAIIAEIGTDMSSFPDSQHICSWAGLSPGNNESAGKRKSVHINKGNPYLKSMLCEVAWIMASHRKLYLSGWYWKVKQRKGAKRATIALARKILSIIYTMLKTGTPYNEECFEQRRLRCERKRANRLVNELQKLGYVVVAPD

SEQ ID NO: 333909 - protein, 323 aa, unidentified
MTVYLGIDIASKKFDVAELCDGNYRCKAFENSSAGFLALYKWLGQSTMPDIHACLEATGDYGTSLATFLYENKIKVSVVNPARIKGFGASELSRTKTDKADSKLIARFCKAAEPDGWKPTPAPVRKLQALLRRISALNGMLRMECNRRENADANIQASLDRIISLLKTEIEVVRQEIKDHVRSDDELKKQDALIQSVPGIGEVSSNLILSFMSGKGFRKAKEVTAYLGLNPRHHQSGSSVRGKTRMSKMGDSRLRSALYMPALVALRYNPDIKAFGQRLLLAGKPRMLVVGAVMRKLIHIVFGVLKSGTAFSSRIAVHSVVSG

SEQ ID NO: 333910 - protein, 325 aa, unidentified
MSSHEIVGIDVAARTLVAIGDEVVLQPAYANTPDGRRALVTALGRSKRPVRVVLEATGIYFLDLACELAAAGVEVMVLNPKAAHHFAEAILQRRKDDPVDAAMLREYGRRMAFVRWTPPRPELFAVRALAREAQAQTKAVTAAKNRLHALRAATLTPARLIRALERQIRASEALIDQLITAARELIAGDGELQRLFERTDSVPGFAAKGAVMVMAELVILPPMGARQWVAQAGLDVREERSGTSLARKPRISRRGNKRLRQALFFPALTAARCCPEAGAFVDRLVARGKTKLQAIIALMRKLLHALHALWRNNEDFNAAKLFAKA

SEQ ID NO: 333911 - protein, 392 aa, unidentified
MYIVGIDIGKNHHEASIVSPEGKQIGRSLRFATTHKGADSLMSFIFKNIGNSPCVFGMEATGHYWYPIYSFLKAKGYTICVINPIQSDSLRKMYIRQTKNDSIDSFLIAEVIRFGQFGTTSMADENILAMRQLCRYRDSVISSRTEIKLRIGTIMEQIFPEYEKQFSSLWVSTSMGILEKYLTPENIENAPIDELFEIIKDKSHNRLTRAKAISIKEAAADTFGIKIAQDAFSFQLKQLIDRMNFLDKQIEALDCQILEYYEKFDCYLHTIPGIGMIAAATILAEIGDINRFKSSSALVAFAGIDPTVRQSGEFSSTHNHMSKRGSPYLRHAIFLAATTCSFHNSPLNAYYKKKREQGKHHLTATGAVARKLTTVIYAVLRDGKPYEPKSFC

SEQ ID NO: 333912 - protein, 327 aa, unidentified
MTQKMDVVGIDVSKATLDAYALTSQQARQFANDPAGHQGLVAWLQELGVGVAVFEASGGYERAAAQSLRRAGLVAHVVDPKRVRHYAQAAGQLAKTDRIDARMIAAFGAAFLLGKPSGVAGGDDPARQDLAELVGTRQVLVDHRTSLQQQADAVTSRVAKKLLLATLKQFDRQIETSDRQIAAAIARHEPFAALARRLDTVPGLGPVSIAALIAWLPELGQLDRRQLAALVGVAPFADDSGKRTGQRHIQGGRMKLRNVLYMATVGAATRHNPVLQARYRRLLENGKKPKVALIACLRTLLTILNAMVAHQQDWNPTKLPATEPVAA

SEQ ID NO: 333913 - protein, 349 aa, unidentified
MSNVARYFVGVDLHKTIIQICVLNGFGDVVEERRHSAFDLVDGLTVIGSLMKYRDLGRIAVEAIGVNRWFVNGLLERGFDVTVCDPTKLNLKMLGRKTDRRDALEIARRLMLGDVTRNAVTYYPSDEEYGMRKVIRVRHGLRDMRQRVVNHIRAMLNAYKITGYGESLLSKKSLRMLKLQEWPTEEMAVVVQAFITSLTGLTESISQLDHQLQEMAKQPLVAAMARPLPSVGPITATALFYELGDVTRFTRTRAVSSYVGVVPRVNQSADTAHHGRLTKRGNRVLRHVLGEWAVRLLTHDERVKKWAAPRLKRSHKNKVRMALARRLLIGVYKMLRTGEIFSMERCLGQ

SEQ ID NO: 333914 - protein, 355 aa, unidentified
MTAAYEYHIGVDYHKSYSHLVVQDSNGRTLRSGRVKNDRQSLSAFLQRYRQNSHAVVEATRNWMVIYDWLDDICDDVVLAHPLKVKAIADAKIKTDKIDATVLAHLLRADLVPEAWAPSETARELRVALRERMFYVRLRTMVKNRIVTVFDRYPEQTAQLKKLGDLFGKAGRVQLAQVKVSEIDRIQIDRGLAFAGDINERIRQSEATIRAMTKANANVKLLKTIPGIGEFFARLIDAEIDDIGRFRTPKKLAAYAGLVPSTYSSGGKTWHGKITRQGNKWLRWAFVEAVAPATVSDPQLRAQYEHLKIIGVNKARVAIARKLLTIAFQILRDQRAYERRGANSEADASTISRLS

SEQ ID NO: 333915 - protein, 316 aa, unidentified
MQDQAVFVGVDASKAELVSSVHGGQGCAALPNQDAAVAAWLRTLPPGAKVAVESTGECHLTLVRQAVRLGVTVYVLNARDVYFYAKALGMRAKTDRVDARVIARYLAEHHAQLRPYRPPSPTQAEIEQLLGQRWVAVTKRTALRQALRGSPAIDQQVQHLDASFDSLLQAIDQRIEQLIDADPTLKASQRQLLTIVGVGSQASALLSSLLARLQFASADALVAFSGLDPRAQDSGRSHGKRRLSKRGSPDLRRQMYMVAMSACHSKVFGPLYQQLRSRGFKTTEALVILARKLLRVAYAVWRSGKPFEPDRFTVPT

SEQ ID NO: 333916 - protein, 379 aa, unidentified
MIVIGADTHKRTHALAAVDAGTGRQRGARQIRAEEQGYLAAVRWARGLDQARVWAIEDCRHVSRRFEEALIAAGERVVRVAPHRMGASRRGEREPGKSDEIDALAIARAVVKDGAERFPAAHLDRAAMEIRLLSDHRKDLVAERTRAQNRLRWHLLELCPEPGPSLGRGALAQPRQLARVDRRLCRLPACARVRIAREQITQLRVLTRRVDALERELHALIGAHRPQLLAETGCGALTAALLIGRTAGAQRFPTDASFARQTGTAPIPCSSGQRHRHRLDRGGDRQQSHALHMIAITRARHDPATQAYLARKKAEGKGNKGALRCLKRHLARRFHHLLSLPPETPHSQPSTSAAVHPAAPPPPDITIVNAAPALMPCIS

SEQ ID NO: 333917 - protein, 381 aa, unidentified
MRILALDVGKCKTVSCLLDTDTGEVAYHTDPTSPCGLSALLAERRPDRVVLEVGPMAGWIRDVASASGVKDVQVANPTHEAWRWRNVKRKTDRLDALKLAQLSAANQLPTVWLPEGNVRQWRQLIHYRNALVERRTAIKNNIRSVLDTQGLTLRAGRCGWTAASLAGLRLQARPLAGVGMTELWRGILDIEIRALEQIEQQVREVESALDALGAADERVQLLQTIPGVGPRLSELLVAMIDDPHRFRSGRQVGSYFGLVPRQHQSGQMDRQGHITRQGCRLARKLLVEVAWVSLRYNPRLRQVYQRVHGACRTRRKIAVVAVARRLAVIGWAMLRDRKAWRPPAAQPTAAETSAEPPPRVRPPRPRAKGARKRTATATAQN

SEQ ID NO: 333918 - protein, 353 aa, unidentified
MTQAHQRPAQDITVIGVDIGKDVFHLVGFDSRGKIAFRRKIKRLALIDTFEALPACIVGMEACLSAHFVARSLRKLGHEPRIIPAKYSKPFVKGQKNDYNDAEAIAEAALRPNLRTVREKTQEELDLQAYHRIRSRLVSRRTATINQIRAFLIEQGITVRSGAHALRTSLFQILKNRADEISPRMTDLIVGLYEDWLWLDERIEAITAEIEKIAAEETSCQRLMSVPGVGPIISTAMVAAVGDGEAFERGRDFGAWLGLVPRQYSTGGKSILGRISKQGNRYLRTLFIQAANVILMRPHNWPKFSFGPWLTEAATRLHRNKLATALANKLARISWSVLRHARPFDTLREAAAI

SEQ ID NO: 333919 - protein, 404 aa, unidentified
MRAICGIDWADEWHDVRVGESETGKLLVEERFAHDEAGIAALVRALVERRVERAAIERPNGLLVGRLLAAGVTVLAIHPNQVKAARERFRAAGGKSDRFDAFVLCELARTDAHRFTALCPQGDETLALQALCRAREDLVEARVALANQLRAQLDAFWPGARRIFAEVDSRIALAFIERYPSPADARGLGLTRLERFLARNSYCGRRPVEELLKRLRDAPVAVLGEAETEARREAVLALVTCLRPLVTQLAELTSEIRGAVRSHPDGKIFLTFFRDPKSAVTAAGLLAEIGDNRARYPTNAALAADAGQAPVAIESGKQRAANFRWACDKRLRAHLCVLADSTRHWHPWAAKVYANTRARGQDHPHAIRTLGRAWTRVLWRCWQDRVPYDPARHGNLNRLLAAEG

SEQ ID NO: 333920 - protein, 346 aa, unidentified
MKQSNTIGVDLAKNVIQISEVAPSNKELSNRELSRLKFAEFLAKQKPALVAFEACATAHHWARVASSHGHTVKIIPAIAVAPFRQGHKTDQNDALAVAEAANRPNIKVAPLKSIDQQAMQAVHRSRELIIQDRTALSNHIRGLLLEFGIAIPKGFTYLRTRVPLVLEEADNGLPMAYRPTLQRMFQRFLALEQDLVFMDEQIASLVKSNDGCRRLLALEGVGPIGAVLLYATLGTGEAFKNGREFSAYLGLTPKQYSSGGKANIIGIAKRIANRRLRAVLIQGARSYVRQHKYTESSKDAWMFALKVRAGTGRTAVALANKNVRTAWAMLTQGTEYTRRPMKAVAA

SEQ ID NO: 333921 - protein, 398 aa, unidentified
MLSIGIDVSKGKSTVCGMKPGGEIVYTPFEVQHTREGMSELVSLLRGSGEEVRVVLESTGSYHCPVVAALLENGIFVSVVNSLRMKRFCSQSIRRVKTDQIDAMQIALYGLAYWPELQPTRLPENTYRELQLLARQYYQMTSMLIKAKVDFNAICDQVLPGMQELMSDHAGRHKLSDFVLRYHHTAHILKMGETRFRKDYCKWAEKKGYRNHERMAALIFATAQNGIPVLPNAPSTQIVITEAIRVLHTVEASRDAILTQMQALAKTLPEYSLVREMPCIGDTLAPRLIAEIGDVRRFHSKRALIAYAGIDAPPYQSGKFSANNRHISKRGNRYLRKTGYEVMQSYVMHKPANDPIFTFIEKKRGEGKSGKLAMVAGLNKFLRVYYGKVTELYRSLPQ

SEQ ID NO: 333922 - protein, 381 aa, unidentified
MTATRTYEYSAFEPVLYLAFELSDANWKLGFTTGTGRSLRQRNIKARDLEALQEEVRRAKKRFDLPETTQVVSCYEAGRDGFWLHRYLVEQGIENLVVDSSSIQVNRRARQAKTDGMDVKKLVSQLIRYRSGERDVWSVVHVPSVEEEDNRQLHRELKTLKKDQTRHINRIKSYLVGQGIRMKIKKEFLKEIEGVRKWDGSQLPESLKARLQREYQRLQLVQEQIKDLERERVEAIRHSEEESVKTVRDLLKLRGIGLNASWLFGMEFFSWRTFNNRKEVGSLSGLVPMPHQSGDSYREKGISKAGNRHIRAMAIEIAWGWLRYQPESELTKWYEKKFGHGSKRIRKIGIVALARKLMIELWRYLETGVIPEGAVLKTRLI

SEQ ID NO: 333923 - protein, 340 aa, unidentified
MKIIGCDLHAAQQTIAMLDRETGEIVEKTLKHEAGIVREFYAALPAPVLVGLEATGSMGWFLQLLDELSITYRVGHPATIRKAETRKQKHDRRDAALLLQLLSENRFPAIWIPSTELRDLRALLLHRHQWVRLRTRVQNALHAIALGYGVQRGHALWNRDGQAMLAMLPLPPHAAHRRDELQALYQQLDEQVDRLDDRVKDAAAQRPRATELTTHPGVGHVTALATEVFLSDPTRFADGKALASYVGMIPSEYSSGARQRLGGLSKQGNPLLRFLWGEATMHAVRRDPELRRFYRRKLQQKGLGKARVAAARKLGIRLWIMLRDQIDYAEFCRRCPRRQS

SEQ ID NO: 333924 - protein, 373 aa, unidentified
MNYNTVYVGMDVHKESFTLCSCKYEDEKASHYQRTQASYKNVLRYLEFLRTIYGDDTRFVCGYEAGCLGYSLYRQLESFNVECVILAPTTMLTQQGVRIKTDARDAHMIAQCLSYGGYHAVYIPTEEDDSVKEYLRMRNDHKLSLKKIKQQINAFCLRHGFQYPGTKWTQAHLKWIKKLEVKNMYRETLDEYIASYEEQESKIERFDTRIEEIAGQEKYREKVKRLGCFLGIKTHTALSLIVETGDFERFAKGNTYAAYLGLAPGENSSSDNINRTGITKAGNSHLRQLLIESAGGICKGAVGHKSKDLRARQNGNSAEVIAYADKANTRLRSRYYKFIRHGKKRNVAVAAIARELACFVWGMMTDHIEMKSA

SEQ ID NO: 333925 - protein, 340 aa, unidentified
MGEITTIGLDVAKHVFQVHGVDAEGAAVLRKQLRRGQVLIFFSRLPRCVVGLEACATAHYWARELAALGHEVRLMPAQYVKAYVKRNKNDAADAEAICEAVVRPTMRFVATKTAEQQAALLLHRGRERLVRQRTALVNALRAHLAEFGVIAPQGLRNVGRLIAIVRDEGDARLPDLARQVLQVLAEQIEQLEAAVAALEKQLMTWHKSNPVSQRLATIPGIGPIIATAIAATVAEPSEFRSGREFAAWLGLVPRQNSTGGKHRLGGISKRGNQYLRRLLINGASANLLRSKATNADPWVIGLRRRRPSLVVAVALANKTARIAWAVMHRQENYQRTVLAA

SEQ ID NO: 333926 - protein, 393 aa, unidentified
MILVGIDVASNKHDIFIMNALGEVFNKHFTIDNTRQGYKKLLEQISLAKEFFKDSNVRIGLESTGHYSRNILHFLILEGYDVMFINPLLTNMDRKASSVRKTKTDSIDAKAICMFLIRNQNDFKPYTLSSYHIDELKILVRQRKSLKKQLNQITNQLHAFLDQAFPEYHTVFKNILSNASLTLLSSYASLSELKRVRVNTLSELLKKSSKGRHGLAKVELIKTLVKDSIGIDSASLSLSIKQSVQTIRTIQSQIDQINQLLEHHITESKTTLLSIPGIGTQTGAIILAEIGDINRFKSDDALLAYAGFDPSVYQSGNYEGSFKISKRGSSILRWAIFQAAKIAVIHDPVFNAYYEKKKSEGKHYLTIIGHVTKKLLRVIRSILKNNSVYTVSH

SEQ ID NO: 333927 - protein, 383 aa, unidentified
MRHGGILIEANDSEGEAMKKHTTNNQSLSADVSACSTVAVDLAKRVFQVAGEDALGLLIFEERIKSREAFQVFLRELPPSVTVLVETGPGAQAWARLLQMQGNPVRILPAQLVASHRSGPKNDRNDALAILRAGRDCKISAVPIKSAAAMAMQALHRARQGYVRRRTAVGNQMRGLLLEHGVTMAQGEIAISQLVPRILEDATQPLPDLLRELIAELLGEWSQLGDRVNVLTGRLEMAAKEDETAKRLMTVRGVGPIIATALIAKQTEPERFANARLFAAYFGLVPSQHSSGEKTRLGKMSKHGDAYLRSLTIQGAHAVLRQLRPDSQQPDDQRLQRWINRLGRKEAAVRLANRNLRILWVLLQNDQTYRRQPGNGQEATMSH

SEQ ID NO: 333928 - protein, 332 aa, unidentified
MQAITVGLDIAKSVFQVHGVDADGQVVIRRQLKRRYVLAFFEKLAPCLIGIEACASSHHWSRQLRALGHTVRLMPPAYVKPYVKRQKNDATDAEAICEAVGRANMRFVPTKTPEQQSGLVLHRTRHLFIAIRAHCAEFGIVAPVGRRGVEELLNAIANEKRVPEIARACLLALGAQLRTIKEKIVEFDRMIRAWHRSCETSRRLDEIPGVGPALATALVASVADPRTFRSGRDFSAWIGLVPKQNSSGGKLKLGSISKQGDRYLRGLFTAGALAVIRYAKIHGTGHRPWLTALLARRPTKVAAIALANKIARMAWAMMARGECYREPVALAA

SEQ ID NO: 333929 - protein, 345 aa, unidentified
MNKVTPAFVRLAVDLAKQVFQVAGEDAYGRVVYEERIKSRPAFSKLLAGLGAKVEVLLETGPGAQAWARQVQEAGAKVRILPAQRVAEHRSGAKNDRNDCLAILRAGRDEAIHGVPVKTVHALEMQAEHRVRTGYIRRQTSISNQVRGILLEHGIAIAKSNSALALWVTRIQQDTSFPIPEMLREIIADLWAEWEHLGQRRKRLDRQLEQIAQNDEVARRLMTIRGFGPIMTTALLAKQTQPERFPNARQFAAYFGLVPDQHSSGSTVRLGRMARRGDGYIRSLAVTGAQSVLHRVRADATGADDKRLQRWCRQHGKKGAAIRLANRNLRIAWILMTTQAEYQPQ

SEQ ID NO: 333930 - protein, 355 aa, unidentified
MDRTKYIGMDVHQASISIAVRDASGKLVMESLIETKAATILEFLQGLKGTLWVTFEEGTSAAWLYDLLKPHVFKVIVCDPRKNALLKTGNKNDRVDARKLSHLLHAGLLTPVYHGESGVRTLRELARSYLTLTKDLTRVMNRLKALYRSWAIPCAGEKVYSPRHRSVWLEQLSEAGVRRRAEQLYQQLDILLQIRRDARRELLRESRKHPAHELLRQIPQLGPIRVALLIALVQTPHRFRTKRQLWAYCGLALQTRSSGEYRFTAGQLQHSNKLPALRGLNSNHNHDLKNVFKSAATHVSTSPDALGDFYRTLLAKGMKPAMARLTLARKMAAIVLTIWKKGERFDPGELKRQAA

SEQ ID NO: 333931 - protein, 335 aa, unidentified
MQIYGIDLAKEKFDVSFFDLTSKKVSNKPSHKVVKNNFKSIGRFLETLPSDAVLVAEHTGVYGDTLLKCCMDSNVKIAFVGGYVIHRYRATPDRAKTDVLDCALLRDFGERYPDKLKYKTFPEEALYELRQLARHREMLVEQRKQLMTADKSEDCRPIRSLAVKRSMDRIKEMLDTEIAETEKEMLKVINGHDSIHHNYEIVKSVKGVGLVTAVELLVKTENFTKITTARQYAAYAGTAPYEKSSGKMDKGAHISKIGNRRSKTLLYICAESARLHNKEIKLYYERRTLIDKKPRHYVLNAIANKLLRIIFTLVEKGEYYDANFIRQDPRVVKYN

SEQ ID NO: 333932 - protein, 343 aa, unidentified
MKITTIGIDLAKNVLQIHGADANGKPVLRKQLKRNEVMKYFANLEPCLIGMEACGSAHYWARQLQSLGHEVKLIAPQFVKPYVKANKHDVADAEAICEAVSRPTMRFVPIKNVEHQAMLSLHRAREGFIGDRTATANRIRGLMAEFGLIIPQGIGHVRSKVPDLIEDATNELPGMFRVLVDQLLAHLKWLDMQIDQIENQINAWHRSNADSQRLEEIPGIGPIIATALIATIGNARNFKNGRQLAAWIGLVPRQHSTGGKQTLLGISKRGDAYLRRLLVHGARSIAYYAQKKANPTTWLNKLIARKNFNVAAVAQANKTARIVWALLVHGRNFRPDYALKAAA

SEQ ID NO: 333933 - protein, 429 aa, unidentified
MRTESTPGARGPVFCGVDTHADSHWLCVLDWRGRKVLSRRFPADAAEYEALAGAIAAAGEPACVAMEGTSSYGAGLTRHLASLGMPVREALSPARTQRRRPGQGKCDESDAERAARAAMSGSKLGTPKSQDGWVDGVRCMLAARSGAVKARTSAINTARSLLTTAPEGLRSRFRGMGGPRLMEELPSVRAEGALGAALGALADLWAAARDAALDMELAIEASLEENCPALLAMYGCGPVSAAKLAVAAGDNPGRLRSEASFAAICGACPIPASSGKTVRHRLNRGGDRQANSALHEIARQRVMRDPETAEYAERARGRGKSDREVMRCLKRYVAREAYRALMRPHEIRRPEDASGLVAARRAAKVSQVRAASILGTSEKYISMLERGQRELKPIRRAYEAWVEAGLPLNWDRQAFEAERKMDSKKHLAK

SEQ ID NO: 333934 - protein, 445 aa, unidentified
MQVRETRKHSEAEPEYAALVAIDWGDQKHVWALQAAGSDRIEQGELEHSPETVAAWASGLVERFGGRPVAVCLEQSRGPLIYGLGHYEAFVLYPVHPSSLAKYRQTWHTSGAKDDPDDAALLLEMLDKHRDRLRRLEPDSDQTRTLRLLVEQRRKLVNEKTRQSNRLKAQLKQYFPQPLKWFARVDTALVGELLERWPTLEKLQQADQRKLRSFLRQHRAGGAGRIESLCEQIRAAAPATRDRAVIRAGELIAGCLVRLLATLRESIAEFEHQIDQLAQAHPDFAVFDSLPGAGKALAPRLMVAFGDRRERFGAAAEMQAFSGIAPVLERSGRQCRVHYRWACPKFVRQSLHEWAGHSIAQCQWARAYYDRQRLKGKPHHIAVRALAYKWIRILFRCWKDRVPYDEQIYCRSLSQHGSPLANAPAVVELQFKSAAGFWKISPANP

SEQ ID NO: 333935 - protein, 336 aa, unidentified
MIAVGVDTHKHEHVAKALDGLGQIVGGLQIMADLDGYVELLRWLRALDDDVVVGIEGTGSYGAGLCELLLAEGIRVVEVERPRREDRRRGKSDQIDALLAARKVLAKDGLSTPRAGHTRQALQALLIAQRSCISERTRLLNQLQALHTTAPLALRERVGPGNGRALVTRLHRMRARQGAPEAEQLIFAVLRDLAARARELGGRAEAYKRELSRLIGSLDSTLLDEPGVGPISAAKLLACDPKRLKSEAAFARCNGTAPKPASSGQTIRHRLNRGGDRQANNALHTIARIRARHHEQTRAYLDRRVSEGKTPREAMRALKRHLSRSLYKRLITVPLT

SEQ ID NO: 333936 - protein, 532 aa, unidentified
MWGATTSSAGQNNEAPQRPLHVLCAGWTCRNRGFALMRVQEPNAPGQRGGDEATATPALVTTSDRATPARHERIYVGLDIGYREHVAAASPLAVFNVGRNPDAWKRVKPIHFASDAIGLGRFQRYLDRHSPHPGDFLILLEPTGSYGLTALLYLLGKGYRVLQVDNRAVKDYREKIFGSETKTDDTDARLMARMGFLHELVGEEFSIQPVLLMNSDASALRGMVHDLAKLQKEITRRRNQLQQLAAVTFPELKTFFKGSTAAPAARALLEHFASPQHLAAAPTEHVADVLRSAHAYSHAARAAELQAMARTTSGVPTLTHHQWRQGWLIKQLELLENARQDLVDQVAHATATHPYARIIESLPVKSPIWTATLIGAIGDIGRFTTASQFKAYLGWYPQLSRSGSSTDSSELAKRGVRPARHVLGQMTVIMLSSTIRSNPFRDVYQRLTTRGMRPAAALGHVAGKLSVVLYGMLKTMTPYDERKHREQLGLLTAAEQPSSTPVEVALELVDLVDQQTDLAEEPTNTDDLRRVL

SEQ ID NO: 333937 - protein, 400 aa, unidentified
MNAVGIDVSKGKSTVVVMRPFGEVVAEPFEVSHTDAELSKLACFLGELPGETRIVMEYTGNYWQPIAKALHDVGLFVCVVNALLIYKYGNNSIRKGKTDKLDAVKIANYCLDRWANLERYTPADQIRQILKTCRRQYDQYIKLKVNLKNNLISLLDGTFPGVNTLFKSAPRDTDGHEKWVDFAENFWHRECVCMKSEKAFTNQYRKWCAKTGYRFSVEKAVAIYAHASSQVNTLPMSDAIKLLVTHAAVQLNTIIKTISTIQHQMLTLASQLPEYPIVMRMFGVGPVLGPQLMAEIGDVRRFDRKQSLVAFAGVDAPPCQSGTFDSKNRHISKRGSPRLRKTLFQVMSTLIQHAPADDPVFQFLDRKRQEGKHYYVYMTAAANKFLRIYYGTVTAYLETL

SEQ ID NO: 333938 - protein, 347 aa, unidentified
MLYAGLDLSRQRLDVHLLDDDGRTVEVIAVRPDADALRTLVASVGRHGQAVTAAIESMNGARFVHDQLEFAGWDVAIADALKVKGLAPLAAKTDKIDAWVLAELARRDLVPAIWLPDPANRAERERARFRLHLVRHRTALKNRIHATLITFGHPVPVSDLFGVAGRELLTGLAIPEPWATTLATSLRFVDELETEIDACATDLRAQGADHPYVSLLQTAPGIAWVLGYTIAAEIGDIGRFTSPKKLTGYTGLCPIVRQSGRRDDRGPLAKNGPKYLRWALIEAATHAARHPTYRERYERTKKRLGRQRGSKVARVEVARELSTAIWHMLTKNEPFAPGRPHVRPLVA

SEQ ID NO: 333939 - protein, 315 aa, unidentified
MTTKSETYVGIDVSKDRLDLAVLEEKRIEQYTNTERGIKELVDEMKALKPALIVVEVTGGYERAVVKALFEAGLRVARVSGYRARQYARAKGLLAKTDPLDAMNLADYGKHVQPRVYEAKSEEGQYLAGKLARRRQLGEMVQAEKNRLRLAYGDIGPSIERVIKFLQGELKQLEEEIRAYLDANPVWLEQEQLLRSMKAVGPVTAATLLAELPELGKLDGKQIASLVGLAPINQDSGKRSRYRKTGKGRPSVRNVLYMAALTGLRYNPVIKKQYDGLVFRGKVKKVALTACMRKLLTILNAMVRDQKPFGYAAMS

SEQ ID NO: 333940 - protein, 326 aa, unidentified
MACIEPPILGIDISKAKFDVALLVDGKVKKTRVFENNLTGFKALSLWLMKQDITHLQACMEATGTYGDELATYLYDQGFEVSVVNPAQIKSFSGAQLNRAKTDKADAKLIAQFCASMHPTAWTPPPIHVRELQALVQRLAALLQMERQEQNRFGTAAPVIQPSIKAVLATIKVEIKTVERMIRDHIDQHPDLKDQSNLLDSIPGIGVATIARLLAFVGDVHRFNDAKALAAFVGLNPTVHQSGSSVRGKSRLSKKGNATIRKALYMPAVVARRYNPTIKEFAERLKKAGKSNMLIIGAVMRKLLHIIYGVLRSGKPFDANYAVKNA

SEQ ID NO: 333941 - protein, 357 aa, unidentified
MRLKGGAVQTIYIGVDFHARQQTLCYLTTDSGEIRLHQLKHEDKAAVRTFYAQFSGQVIVGLEASGYSPWFERMLEELGCEVWLGHATEIRRRARGRHKNDRRDAELILDLMLHDEFPRLYLPPLPSREVLRMLRYRQKLIKIRTIGKNSLQALALQAGLAKGPHLFTKAGLQELRHATMSPAMQWQRKQWLQLLEPLNERLLETMLWLKQQSQADERISRLRTHPGVGLLTALCVVHSLEPVSRFANTRKVAAYAGLDPLERSSAERQRFLGISKGGSRVLRFLLVEAAHTAIRKDAELKRFYQRLAERHGRPKAKVAVSRKLLIRTYIMLRDEIDYAEFQRRAVAARSAPPAHGH

SEQ ID NO: 333942 - protein, 313 aa, unidentified
MAKSERFIGIDVSKATLDVHVLPEGQDFVFANDIDGIKAICRKLGKLRPHLIVLEATGGLQIPVASALGIEKHPVAVINPRQARDFARATGRLAKTDKIDAQVLALFGQQIRPEAKPLKDEQAQELSALMSRRKQLVGMLVMEKNRVSLAIGSIRDDIVKNIEWLEERLDDINTRLGQAVRMSPVWREQDDLLRSVPGVGEVLSATLLADLPELGKLGRREIASLVGVAPINCDSGKHRGKRRVWGGRGNIRSVLYMAIMTAIRFNPVISKFYKRLIDAGKPHKVAATASMRKLLTILNTMVRTGQPWAYSPN

SEQ ID NO: 333943 - protein, 363 aa, unidentified
MERDTVYLGMDVHKDLVALAAYVGNEPNPRFQKTIANDNSAIRKHLKKVDQLGTISCCYEAGFSGYDLYRFIDSLGYRCQVIAPSLVPEKASDKIKTDRKDAEKLAKLLRADLLTSVSVPTIETERIRGYIRLRYQVKEDLTRARQRILKFLQTKGLVFRGTKENWTVSHRNWLDGLNLEGEDQLVLAEHRAMMSYLEIRLKDINQRIETIAAQDRYRAHVGRLSCLKGISTFSAMVILTEIGDFKRFSHPRELMSYIGLVPSENSSGQSQRKGRITKCGNNRLRHVLVEAAWHYRNKPFTSRYLAKRHEGQPKQAILYATNAMHRLYRRYWALAARKDSNVAIVAVARELTGFIWGMMRTEF

SEQ ID NO: 333944 - protein, 326 aa, unidentified
MQGKEASEQETKTKSSVGIDVSKCWLDAYIAPAGGRLRVANNGVGIRRLKRWLSAFDIALVVVEATGKWHRHVQRSLAASAIAVAAVDPYRVRMFAKAQGVLAKTDRLDARVLAAFAAVMQPAVRAPAAPLMAELAELVAARANAVAMRTVVKNQLAAAQSKFLQRQLKQRIERAAKDVTALDDEILKRIEADEVLARRYAILTSIPSFGFAVAATLIACLAEIGSLNAKQAGMLAGLAPVADQSGEREGVRVIWGGRPAVRRILYLAAVSAVRANLDMKAFYARLRASGKAPKPALIAVARKLAVLANTLLSENRFWQLQAPKHA

SEQ ID NO: 333945 - protein, 391 aa, unidentified
MIFVGIDVAKDKHDCFILNSEGTVLADVFTIANNRIGFETLLSRIQSCSQGESKIKVGLEATGHYSYNLLGFLLDSGLATYVINPLHTNLYRKSLSLRRTKTDRIDARTIAMMLMSDVDLKSYSNTAYHNEELKSLTRYRFDKVKERAKLKSSVARLVNILFPELEKLVSSLHIAVVYALLSNYPGASYIANANTEERAETLCTASKGRYTKSKTAEIQVAAGVSIGSKMPAKSMELKHTIALIRELDKEISEVESAIDKITSQMDSPIFTIPGIGRHMSAMILAEVGDFSNFASADKLLAYAGLSPSTYQSGQLQNCYAHMEKRGSRYLRYALFNAAKYVCLWCPTFSAYLEKKRSEGKHYNVAISHAAKKLVRLIFAMQRSGKAFLADY

SEQ ID NO: 333946 - protein, 277 aa, unidentified
MIISVLGIDLGKNICSIVGLDKAGAVVVRRRMRREGVIAFASKQPTFVVAMEACCGAHHMGRILAAQGHTVRLMSPEYVRPYVKAQKNDDRDAEAIAEAATRPTMRFVELKSEEQLDMQTLHRVRDRLICDRTSLMNQMRSLLLERGHIVPQGRAQLREHLARLLDFEESPLTSRIRELLIDMRQRWEALNKRIADLDAEFVEAARADERTQRLLSIPGIGALNATALVAAVGDARTFNRGRDLTAWLGLVPRQATTGGKPRLLESPREVADTRERT

SEQ ID NO: 333947 - protein, 379 aa, unidentified
MQSIKTWAGVDVSAKTLMAKRRKNEADETREFPNDAGGHRELRKWVGKGARVCMEATGVYHLQLALMLAGAGVEVMVINPRVAKDFGRALMNRSKTDRVDASTLLEYVYRMDFVAWKAPSAAVLELRELGRRLSELVRTGAEEKNRFHAKKVAAISRTVISDVEAHVAQIEKRVKQIEKAAAVVIRGDAGLSEQYAILTKIPGVARRSAILLLTELAVLDPTMTVKQIVGHAGLDPREYESGSSVKKPARISKLGNARLRAILYMNALTAIRHDRGARLFYARLMARGKKKMQAIVAVMRKLLHGIWIVLQRRVPFDSSILFAASLAKAESSDSAVAAKQPEPSQDHPKGRSEAEELRQQLDPGSAQATRSRRRRSKAA

SEQ ID NO: 333948 - protein, 404 aa, unidentified
MKLVGIDVGKNSHHFCVMDKETGEFNVAPSSFSNNKEGFDFLINSLKPYSKKSILIGMEDTGHYHVALLKFLLSNGYTVALINPKTTDLTRKMEGGITKNDKLDTITICDVLDTPERKKQYRITKVDRFDLYEQRQLTRHHHNLKEELNVYCNRLQKSIDLVFPEFNTLFSSKYSIVYMNLLKTFGSAEAIASTDIRTIRKCFEIKGRGNRISLTPEKLKECAKNSIGISSEVETIQIKHLVSQITLIKEQIAEIDKKIEEFSITNNSPILSIPGISHFSGTSILAELGDIGNYSKPSQIIKFAGVAPYHYESSQYNAQHTGITKKGSKYLRKTLYQIILPVIKYNPVFKKYYLLKISQGKGHRCAQGHCIRKLLRIIYHLLETGQSFVLPLSREQNNHLILHY

SEQ ID NO: 333949 - protein, 365 aa, unidentified
MSLIHVPPEVTVLAMDVHKNSISTGLLEPGSTVPAVDKISSDDEMVRRLIGRFPDPGRVWACYEAGPTGYELARTMRRGGVRCEVIAPSLIPTRPGDRVKTDRRDARRLAVLFRAGQLTAVRVPTPAEEAVRDLCRARADMVIDRTRARHRLGKFLLRHGRIWRDGDNWTLKHHAWINQQRFDEPALTATFNHYRATLTAREAAVEAIDADIEHTRGPFADTVARLCAYRGITELGALTLASEVCDWRRFPTASMFMGFCGLVPSESSSGERTQRGGITHAGNTHLRTQLVESAWAYKSRPAAGAILQRRQAGLDPTVVARAWSAQLRLCGKFGRLDARKTNRKIVVTAIARELAGFVWAEMTAT

SEQ ID NO: 333950 - protein, 374 aa, unidentified
MGHHSEAFIGIDTSKLKNAVAIADAGRDGEVRYLGEFDTTVAATRKLVAKLAARYDKLTFCYEAGPTGYGLHRLIESLGHACPVVAPSLIPKKAGNRVKTNRRDAEGLARLSRAGELTAVWVPDERHEAMRDLSRARGAAVDDLKSKRQQISALLLRLGLHYPGQTTWGKAHRTWLSCQKIAQRESRIVFEELMGAERQAQDRVDRLAAAIRAAIPDWSLSPVVTALQAMRGIDLIAAVVLLAEIGDLSRFASPRQLMGYLGLVPSERSTGDSVTRGGITKAGNRRARCILIEAGWSYRYPPRIGRDKQAKVEAAPEAVRAIAWKAQTRLSGRFRTLARNGKRPTIVVTAIAREMCGFIWAIDRAMRQPGAAQA

SEQ ID NO: 333951 - protein, 351 aa, unidentified
MKQFIAFDSHKRYTQVELEEVETGKTRQFRVDHGPGTIRRCLQGQARGTSVAVEATGNWYWIVDEIEQAGLQPKLVHPRKAKLMMGLINKTDKLDAHGLNQLQRNRTLPTVWIPPRELRDLRELTRTRMVLAAQRTRLKNRIQATLSKYGWVLKDYSDPFGKKARVELNLCIGRLPSQTAYVTGVLMNQLDKLEEQIKEMEKRIRALAQETPEMKRLMTLPGIGWILAVVIALEIGEVLRFPSAEHLASYAGTTPRIHQSGDKTRYGRLRPDVNHYLRWAFIEAAHSVCLNQAVHPQRHVTRLYQRVRGRKGHAKAVGAVARHLAEATYHVWSTGEPYRDPALSKGQSREV

SEQ ID NO: 333952 - protein, 423 aa, unidentified
MDILYERVAGLDVHKDTVVACVRSVTEGKTTRECRTFATTTDALGELRAWLEQYRCTHVAMEATGVYWTPVFRILGEGEFELILANAAHIKNVPGRKTDMNDAMWIADLLACGLIKGSFVPDEKVQHLRALTRTRKQLVREQTRHVQRIDKTLAEANIKLSSVICDIMGASGRRMIEAMIGGVHQPNRLAALAGKQIKATPKQLYDALHGRLTDHHRFLLELHLKQWDNLDETIRKLDREVDQRIARMEAPAEGGRAPFRALIELLTTIPGVSAVAAPSILSEIGADMSRFPTAGHLIAWSGLCPGHNESAGKRKSSRLRKGAPWLKTMLVQCAWAAKRKKDSYYRAQFFRLQSRRGPQKAICAVAASILTAIYHILKDGIEHHDLGAAYLDRRPIALNVSRLVARLKKLGFNVQLQPIAEAA

SEQ ID NO: 333953 - protein, 410 aa, unidentified
MEILYSHCAGLDVHKASVAACVLTPGEGAEPRKEIREFGTTTGELRELAAWLKQCGVSHAAMEATGVYWKPVFNVLESACELILVNARHIKQVPGRKTDKADCAWLASLLRHGLLQASFVPDKEVRQLRDLCRMRTTLVRERVQVGNRLRKVLEDANIKLDSVASDSLGVSGRLMIEALIGGERDPKKLAGLAKGRLKQKRGELEQALEGQVTEHHRFLLRELKESVEHLDGKIERFEAEIARHMPPFEWATGLLMTMPGVDRTAACALLAEIGADMSRFPSARHVASWAGLCPGNNESAGRRRSGKSHRGNRWIKGLMTEIAWAASRTKNTYCGAFYRRLVSHRGKKRALVALANQLLQVVWHMLTHQQNYQELGADYFDRLHQKQLTRSLVRRLKKLGHKVSIEPVAA

SEQ ID NO: 333954 - protein, 423 aa, unidentified
MKNSAARKLKQVPKGYLVMGVDPHKKRHAAVAVTQDFTTHSKFKFNNSREGFEMALERARAEMVRTGSRGVIFAIETGGHYWRNLAYFLDERGIPFHFINQFTLKRRREGKDLNRRKNDYRDSEVAAQLLCTGEFTDTKLQHGVYAELRAAYNAYRRLVKERTRITNLVKGLLDGIFPEFTRVFKDPCGQTALSVLSICSIPTVIARMTEEEFVDATRARHQGRLMRKKLRALHCAAQVSIGIDAGAQSVSSEISFLVEKLCLIRRQIRSIDETLARLVDKTEEGKYLLSIIGLNYISVAGLLAELGSFRSYRSAKQLIKMAGSNPTESESGGKRSAHTPMSKKGRPVLRYCAWTAVIPMLRFNADFRAWAKKLRERPVHANPLNGREIVGAALNKLLRLAFALVKKQTFYQVPQLEIVEVAV

SEQ ID NO: 333955 - protein, 403 aa, unidentified
MPTGILDAMRLQIPARLRLIQQVRSVATAPTELCPPAGPTFVHLFYVKEATTMVVVGADVHKQTHTFVAVDEAGRRLGEKVVKAISDGHAEAVMWARERFGADVIWGIEDCRNMSARLERDLLSAGQKVVRVPTKLMTQVRASARTRGKSDPIDALAVARAVLREPDLPVACHDEVSRELKLLVDRREVLLAQRTSAINRLRWWVHELDPTKGPKPRSLDRAKPREALRVWLDTVVSVVAELARDELADITRLSEQIDALAERIGARVRDVAPTLLAIRGCGELTAAKIVGETAGVTRFKSEAAFARHAGVAPIPVWSGNTEGRVRLSRSGNRQLNTALHRIAITQIRLNGSPGQAYYRTRIAAKDTTAGSRRCLKRHLSRVVFRALHIDDQIRNQSPQTAAA

SEQ ID NO: 333956 - protein, 392 aa, unidentified
MIYVGIDVAKDKHDCFITNSDGEVLFKSFTIPNNREGFETLFQRIGSVSDDLTKVKVGLEATGHYSYNLLGFLLDKGLTTFIINPLHTNLYRKSLSLRKTKTDKVDSRTIATMMMSDMNLKSYSDTSYHNEELKSLTRYRFDKVKERAKLKSSVSRLVCILFPELERLVPTLHMASVYALLCEFPSADAVANAHLTRLSNLLFDSSKGRYGKDTAVMFRDAARSSIGSHMPAKSLELKHTIKLIRELTIEIDEIEAAIKRIMDEEIQSPILTIPGISYRMGAMIIAEIGDFSRFDSADKILAYAGMSPSTYQSGQLDNCYSHMEKRGSRYLRYALYNATKYVCHWDKSFGAYLEKKRSEGKHYNVAISHAAKKLVRLIFAMEKSGKAYLPAA

SEQ ID NO: 333957 - protein, 348 aa, unidentified
MRFYKNAHAFYCGIDLHARSMFTHILDQAGMTVFERDLPANPDAFRNAIAPYRAGLVVGVECMFAWYWLADLCDDEAIPFTLGHALYMKAIHGGKSKNDRIDAAKIAGLLRGGMFPMAYVYPRGKRPTRDLLRRRCFFVNQRSQLIAHVVNTNSQYNHPPLTARLCYPRNRSEDFADRFTDPATQLSVRADLKLIDAFDAQIDDIERVVLKTAKIDDPVTLQLLRTIPGIGKILSLVMLYEIDRPERFPEVGNFLSYSRLVRCEHESAGKKKGSGGKKIGNAHLKWAFSEAACLMLRAMPEAKKWLARQERKRGKKKALSVLEAKIGRTVYHLWRKQQPLDRRRFLAQ

SEQ ID NO: 333958 - protein, 313 aa, unidentified
MKKTICGVDVSKAKLDVCIEPGHRFASFDNDTAGIAELGRFCREHAVMLVVMEASGGYERRAFVGLWETGISCALTNPRNVRRYAEAMGILEKTDRIDASVIARFADARNLAPTPLPSQAQQRLKALVARLRQVTDDLTVQKQRRANLLDNPEMLASLDEVIALLKRQSRSLEGEIASMIDDDPLWAKLAETWREMKGVAGRTVARLHAEIPEIGTLSNKAIAKLVGLAPIANDSGNRKGKRPTRGGRAGVRSILFLVAAIAARYDKSLGEFRDRLLKAGKDKMVVRIALARKLLVRLNAKARDARAQYANAT

SEQ ID NO: 333959 - protein, 347 aa, unidentified
MSITMIGLDTAKSVFQIHGVDNAGKAAIRRKLRRSELIAFFEKQEACTVVMEACGAAHHWARVLTGLGHEVKLIAPEAVRPFVKKSKKNDAADAAAICEAASRPDVKFVPIKSLEQQGVLALHSARSLLVKQQTMLANAMRGLAAEFGLTVPLGLDKLVELMVLVDADEAIPEPARQAVRGLLDHRNTLAASTKTFEAAIVVHARHDETARRLATIPGIGPITASLIAATVADIGVFQSARHFAAWLGLVPRQHSTGGKTRLGRITKTGNREIRRSLVLGATSMVHRAARWNSAAGVWTRGVLERRPVRLVTVALANKMARIAWAMMTRKEVYHAKGRVAAASEAVA

SEQ ID NO: 333960 - protein, 425 aa, unidentified
MNYKQNEKINQVKESTLVVGIDIGSTTQYARAFDWRGIELGKVFTFSNSREGFESFKAWMQHLQDKYRKSDVIVGIEPTGHYWFDLGAYLEDEGILLVMVNPYAVKQTKELDDNSQSKNDRKDPKVIAKLVTEGRYSAPYTPDGVYADLRIMVVNRKRLIREMTQIKNRFARWFAIYFPEYTDVFGDYEAQSSMLLLKKVCTPEAIVELGAEKINQIWRDAKLRAVGMKRATTLCEIAKRSIGLKKGSSATRYEMKLLLEDYEYKKAQLDAVMEEIEKLCRKIPESRQMFAIKGIGVITVAGFLAEVGDVRRFESPGQIQKLAGLSLRENSSGKHKGQTTISKRGRSKLRAVLFNVAIPLIAKNPEFKSLHEYYTTRANNPLKKKQSVIAISCKLIRVFYAILANGVTYDSQKLLSDIHRQPQAA

SEQ ID NO: 333961 - protein, 310 aa, unidentified
MENIVVGIDISKDQLDIHVLPSQASFCVARDAIGLEELVQRLLVLKPKLVVMEATGGFETIVASTLAAAGFPLAVVNPRWIRAYAQALGRLAKTDRIDSALIAAYGRDAKIEAQKVPDEAAQMLGELVARRRQIVETMGVERNRRRSLTRSKLIKGLDRILAALQKELSDLEQDIDQAIRGTTAWREKDELLQSVPSVGPRISSMLIAELPELGTLTRRKIAALVGVAPMSDDSGKHRGRRHIKGGRIRVRCALYMAALVASRRNPVIAAYYQRLIAAGKKPKEALTACMRKLLVILNAILRDHRPWQPA

SEQ ID NO: 333962 - protein, 381 aa, unidentified
MSMPAESRIIGLDLSKKTFVGCILSGEGFVKKSIFQGHMTQDEQGWKLIQRKIRQNDLVLMEAGTSTFSLARYLETHSAAEKVVVLNPGQLRVIWMSQKKNDKADATKIACIARDMAEESWPTVSVPTAQEQAERSIITSYVFVRKQETQLVNRLFALYNALGYPEIHRKVLRDDPAARRSLARELLSDHPIALQDAHMIMDQLDLVQLQVDAKLQSLRTICLDHPTQALAWLSIPGIGLINAATLTAYVGDGSRFSNAHQLLNYAGLTPKQDQSGTVDKQLGVSKRGNRVIRRNIVQGAWVITKLKPTCPLTKFAYRKKQEGKIKQKVAVAVANKMLRTGFALLRSRELYRPMIESGYDKLESKLQSYKLQALMKSPQQD

SEQ ID NO: 333963 - protein, 330 aa, unidentified
MRKVTEAGIDVSKDVLDVAVRRDEHRLETARFDNDAAGHTRLVRWLTKGGTFARVVLESTGTYSLDVALALHRTRGIAVMVANPRAIKQFTGALMQRSKTDLTAAVALRDYAIRMPFVAWQPPAAHVLAVRGIARRIAALVVERTRERNRLHALEATAEASPVVCNDIEVNLRHLARRVELLSAQAIAVIGAHADLQASFELLVSVPGIAAHSAVQLLPELLVLPDTMTVRQWVAHAGLDPRAHQSGTSVDKPARISKVGNAHIRRALYMPALVAVQHNPHVRAFFEKLVARGKTPLQAYVAVMRKLLHAIYGMFTTRTPFLAAKFHAAA

SEQ ID NO: 333964 - protein, 311 aa, unidentified
MHREFAQVAIWQDGQVRQAGQVAATPEGLRTFADSLAPSDEVAIEATCNTHAIAKLLEGRVARVVISNPQKTRAIAEAKVKTDKVDAAVLAQLLAADYLPAVWLADDATHALRRQVARRAHIVRQRTRLKNQVQAILHRNLIPRCPAADLFGHKGRRWLAEQTLPADECQAVGALLRQLDFHAQELAIIDAELGRVALGSAEVKRLMTIPGVDATVALSIVAAVGDFARFRSPEKLVSYLGLNPRVRQSGGQPASHGRITKQGRAHARGMLVEAARRRDRCARSISVCAPAAGCRSRWSRPRASSRCSAGS

SEQ ID NO: 333965 - protein, 420 aa, unidentified
MKKHSKSSQRSEPSLKRTKARGPVQRDAKAVLAEVLGKLTGKLNAPAELPSAKENRKGNTVGPNRDRLTVGVDLGDRWSQYCILGLEGETLAEGQLRTTQEDVREFFQALTVARVVMEVGTHSAWVQDVITEWGHEVLVANPRLMEGSKRRKRKSDRIDANKLARLGRVDPQSLHPIRHRSREVRQDLVVLRARDALVSVRTELINTARGLVKSMGTRLPRCSSPSFAEKVKDAVPVEVREALLPLVQLTETVNDCIARYDQKIEELGQKKYGHTTLLRQVKGVGPITSLAYVLTLEDPQRFSSSREVGPYLGLVPKQEDSGDSQPQLGISKTGDRMLRRLLVGSSQYMLGAFGPDTDLRRYGLRLCERGGKNAKKRAVVAVARKLAVLLHHLWVTGDVYEPLRRTGAETRTAQPTATAA

SEQ ID NO: 333966 - protein, 358 aa, unidentified
MPYRTSIGLDVHAHTISACALDHLTGEIAQTTFSEPVPQDIIDWASRFESPMRAVYESGPTGFTLARALNASGLECLIGATSKMLRPSGDRVKNDRRDAVLLARMLSTGNIPAVAIPDPEQEAAKDLVRMRESARVALTAAKLRLSHFLLRKGHVYEKGKKTWTKTYEDWLRHLKFETALDRAVFDELLADVLAATDRRNRVQRMVEEQARSERWLPVVSRLSCMKGISSYTAFAIAVEIGDFSRFPNARAFQSYVGLLTTENSTGMRVSTGGVTKTGNALVRKLLTEASWFYLRPRMLNPTIDSDGVPAQVAEHARKGCMRLKKRAAHLQSRGKKGCVVVTAISRELAGWIWALATM

SEQ ID NO: 333967 - protein, 367 aa, unidentified
MTVTIVDVARPVLGGVDAHLEVNVAPGLVTGGVDTHLDLNVAAALDGIGGLLAVAEFPATAAGHRELLGWLSGFGPVARVGVEGTGSYGAGLARFLRASGVDVVEVDRPNRQARRRSGKSDPLDAVEAARAAMSGRACGAAKSRDGNVEAIRALVVAKRSARSAKIQALNQIRHLSFTAPEQLRQRLAGVSRHHLAARAAGLRPATGAGADPVIAATKTALRILGRRVLALDEEKARIDALLTGLVTQTAPQLLELFGVGIDTAAALLVTAGDNPGRLRSEAAWAHLCGTAPIPASSGKVTRYRLNRGGDRQANCALWGIVITRLGNDPRTRAYMTRRLAEGRSKPEVIRVLKRYVAREVYHRLPRT

SEQ ID NO: 333968 - protein, 334 aa, unidentified
MKKLKEITESIGIDVSKVTLDVFIHTKQLHKQFLNNKKGFSELLKWVAKEKVNIEETIWCFEHTGWYCILLSHFMYSNKIHYCCVNPMEIKRSMGLKRSKTDKQDAQEIARYAWLRRNELDSSIPMPLNLVDLQRLMSLREQLVKQTTALKNLSKGFKVTVEKESSDFGMKTIKQALKQLESQIKKVEKEMTRLIKQDGNMYHNFKMSKSVKGVGDVMAIQMLLHTHNYSRFGTWREFSSYCGLVPYPYQSGTSINRKPTTHSISDQKMKSLLTMSAISAIQADKELKQYFKKRVEEGKPKMVVLNIIRNKIVSRIFATVKRGTPYVEMYKFAA

SEQ ID NO: 333969 - protein, 421 aa, unidentified
MNFINQEVFQMNAVGIDVSKGKSTVAILRPMGKVVQTPVDVPHDTVSLERLAYQILSLGENTRVVMEATGRYHEPVAMELHDRGIFVSVVNPLAIHGYCSGGTVRKVKNDQKDSLKIAKFALDHWVDLREYTPMDAVRQQLKIFSRQYNLYMKSRVALQSNLISLTDKVFPGVNEIFTSPERSDGHLKWVDFVTTFWHCECISLVSENAFTERYKKWCKRMGYKFSAAKVSDIYIDSLGHIVTLPKNNNTKLLIQTAAKELTAMNELLAVVKAEMIRLAKELPEYETVHAMFGVGELLAAQLMAEIGDIRNYPRRSSLAGFAGVDPEVNQSGKMNSESNPSTKRGSPHLRKTLFQLMTVYLRLSPADEAVYQFLDKKRSEGKPYYVYMTAGANKFLRIYYARVKECMAKLETPAEIAEENG

SEQ ID NO: 333970 - protein, 346 aa, unidentified
MSEISINGLDLAKSVFQIHAADAEGRCVLRRQLKRSQVLTFFAKQKPCVVAMEACGTAHHWAREIGKLGHETCLLPPSYVKPYVKRGKNDANDAEAIAEAAGRPSMRFVPVKSLDQQAIGLQHRARDLLVKNRTMLVNALRSHLAEFGFITGKGIGKVPDLIKMVAEAAAERLPAAARGTLEGFIGMIVHLNQEIATIEKVLLAWHRASAQSRRLETVPGIGLISATALAAFTPDPKFFQNGRHFAAWLGITPREDSTGGKTRLKGISKAGDGYLRRLLVLGAVSMLRSLTGKTGALAVWVQAMLARRPRKVVIVALANKLARIAWAVMAKGEDYRAGAGMAEAAA

SEQ ID NO: 333971 - protein, 334 aa, unidentified
MSIQVYVGADIAAESIQIDWLDVTNQQRQQVNILQQKRDYARFVKQLTKQVTAEQIHVVMEATGNYWMAFAEYLHYAGLQVSVLNPTQAKHFAQARLQRAKTDRVDAQLLREYGRLMEPEIWTPPPPICQQLQQYLNRRDDLIAMHTAERNRLHALQYHPQALEDLLLPLQAHIRDLKAQIEQIEQLIQTLLLSQHEWVEMVRRLRTIKGLGYLTIARILTSTHAFARCSTPDEAVSFAGLAPHVRQSGKWKGKSRVGGGGHASLRQALYMASLSASRFNPPLHAFYHQLRQRGKLEKVALCAVARKLLIFAWTLIVKQRDFDPLWASKSQSAA

SEQ ID NO: 333972 - protein, 365 aa, unidentified
MKRKVYVGMDVHKETIQIAYLTSNSKEILKEQQIKHNEVQIKKFIKKLKLEWNEIHCYEAGVTGYPLYRYLKSLGVNCILVAPGKIPRQNTDKIKTDKRDAIKLARLMRSGELESIHVPSEEDEAVRDYLRSRDSLRLDLGRNRQRLMKFLLRKDIKYSTTKYWTVSHYKWLNNLHFNNEILQETFNDYYSRVRVQEENLKAMDKKIQEIAESEPYREKVGILRCFRGVDYLTAMFLLCEVNDFKRFKTAGSFMSFLGLVPGEYSSGSKRKQTGITKTGSPRLRRILTEAAWQHRFPGTGSKIITARRSGQPALVVALAEKASLRLHKKFRNLQRKNSSSDDNGSFKRVIRISLGGNESCSLKLE

SEQ ID NO: 333973 - protein, 309 aa, unidentified
MKEELVYLGVDIAKAYLDRAIGNEKSRFSNDALGHRQLINWIKQKPAKVQVICEPSGGYERALVRALVGAQLKISLVPANRVRQFARAKGILAKTDRIDAKLLCSFGEAMQPGTISASQLEQQHLRELESQRRHLTHLLVMEQNRAARMSDLCVCKMNRRLITQIKKQIEQLDLLIKGHIDQSHELSAKAAKLTAISGVGARTAALLLAQLPELGELNRREIAALVGVAPFNRDSGRMRGKRAIYGGRKPVRHGLYMAALVAAHHNPILRNFYLRLRAAGKPAKLALTATMRKLLIVLNSALKPDLSYA

SEQ ID NO: 333974 - protein, 412 aa, unidentified
MKDLLEISCGLDVHKDKIVACILSGPIGKTTVSEIREFTTLIPDMAALRDWIVSCNCHHVAMESTGIYWQPIYEILEDAYSGDITLLVVNARHMKNVPGKKTDMRDSEWIATLLRAGLFNGSFIPDKQIREFRYLNRYRKSIIRDITSQKNRVEKFLQSSGFRLSTFISDIFGASGRNIICHLIQHGCIDRESLDSCLKTKTRNHINEILVAVNGTLSQIQQDFLEMLMDHYDSLKSHLAEIETALEEAMAPFSLHIEQLTSIYGINTTASCAIIAEIGTDMSYFKTAEHICSWAGLCPGNNESAGKRKSTSITKGNPYIKSMLCEIAWVIAGKRNTYLSAWYWRIKQKKGAKKAIVALARKLLVIIYTMLKQGTLFDENCFETRRKNCEQKQVSHYIRELEKRGYHIEASA

SEQ ID NO: 333975 - protein, 356 aa, unidentified
MEQLTTVGIDLAKDVIAACVLDVHGAVVERRVLRRGAFERWAEQLPSCKVAMEACGSAHHWGRWFAAHGHTTLLIAAEFVVPFRKGGKNDTADAEAVAIAARQPTMRFVPIKTVDQQAILAWHSVREGWKEERTALLNRVRGLLAEFGIVIGRSSDRLLTALPGLTEDSRLPDAMRALLLEAREQFAALHARLARCDAQIAAHARNSPAAQRAGELLGVGPVTASALAATVPDARVFKGGRQFGAWLGLVPRQHSSGGRTRLGRISLRGNVYLRTLLIQGARSTLQAAINAVPSRASRLQRWIIELYGRKGYYKTLIAIANKHARILWAMLAKDERYDAAAWQRHPMHQPPLASNA

SEQ ID NO: 333976 - protein, 424 aa, unidentified
MEEKEQKKPIRAWIGIDWADEKHDVSVYDVASGKQESLVIRQTPEALQEWLGQLRSRYEGGYVAVVMEQGRGGLLNALMGCEFLVLYIINPKSLSNFREAFYGSGATSDPVDAELMRDMVRQNPNRFRAWRPDDVMTRSLRLLTEGRRNLVDQSTALTNQLTALLKGYYPQALAWVGTLDTAWACDFLQQWPTLQSLQSSSRRQIRRFYEKHLRSSLNLTEQMKQIQDARALTQDEAVLESSAMMVQALVSQLRPLLANIAEFDRKIAMTFRKHPDRPIFESFPGAGAALAPRLTAAFGTDRDRFQAATEMQQLAGIAPVTEKSGKKSFVHWRYACPKFIRQTFQEFADHSRRWCKWAKAHYELLRRRGKSHNAAVRALAYKWIRILFRCWRDRQPYQDQIYTQALLKHGSPLSPLLAESVENP

SEQ ID NO: 333977 - protein, 366 aa, unidentified
MKKISTMAKRGNEIFKEPKLTIGLDLGDRTSHYCILDEAGNVILEHRLPTTPRGIHQVFCRIPRSRIALETGTHSPWVSRQLTQLGHEVIVAHARNVRLIGESSRKDDQLDARTLARLARIDPGLLGPVRHRSAKAQIHLTVIRARAGLVSARTALVNTARGLTKSYGERLRKCGSGQINREIAKGLSQELRDALDPLLGEIESLNERIAEYDRRIERIAKEVYPEVTLLQQVKGVGTLIALTYVLTLDDPHRFRRSRDTGCFLGLRPGRRNSGMSEPQMHISKEGDGYLRTLMVQGAHYILGPFGEDSDLRRWGLKLAERGGKNAKKRAVVVVARKLAVLLHKLWVSGEVYEPLRNNHKVVSAVA

SEQ ID NO: 333978 - protein, 424 aa, unidentified
MKVTYQTCCGVDVHKSFLVATIVKTTGGIEPSYQKKRFSTFNNSILEFKQWLLDNHCHDVCMESTGKYWVPVFNLLEDKINVVIANPKWVKAVKGNKDDTKDSKWIGDLFRLGLVKGSYIPCKKVRILREYTRYRYKLVSCRSSEKNRYQNALTVCNVALDSVVSDIFGKSSTSIIDYLLEQSGTSINHEEIASKLLRSLKSKEDAVIESVEGYQMTDAQKYRMRLVRAHMDYITAEINDVDIMIENMISSNPDFENAVQFLCTIPGVKRDSAITIISEIGIDMSQFSSSKRLCCWAGLTPGSNESAGKKKSVRITRAGVYLKPALVQCAHAAVKSDKSPYYKKKYESLVKRRGKKRAIIAIARMILTAIYQMLSTGEQWNPSDLYKVDMPEALLEKQKQKAIKQAQKLLIREGLLPPTEPIAS

SEQ ID NO: 333979 - protein, 352 aa, unidentified
MSEHSKEAVIKVLGIDLAKRSFHLYGVDGDGRQVLSKKLTRARLGEFVANQPPCTVAMEACGSAHYWARKFRRYGHEVRLIAPQFVKPFVKSNKNDAADAEAICEAAQRPNMRFVAVKTIEQQDIQAIHRMRSLAVDRRTALINQIRGLLLEYGIEIAKGRPAMQRRLPEILEDADNGLSERFRAELHGLAEELRHLNERVAHYDAQIEAIAHSDPQARLLMTIPGIGAKGATALLAAIGEDPRLFKNGRGLAAWIGLVPRQHSTGGRDRLLGISKRGDVYLRNLLIHGARAVLRFVERKEDPTSRWATALKARRHANVAIVAMANKIARVAYAVMTTGKPYDPAAGALPNR

SEQ ID NO: 333980 - protein, 338 aa, unidentified
MLYCGIDLGKKSSRFCVVDENRKVRKQGWAKMREDSFVERFGQMPPMKIVLEASCRTFWVADLLEEMGHDVSVVDPGRTKAIGASRIKHDKLDARVLAELCQAGLLAIVDRPSIAERLQRVSVTVRDVLVRTRTKLINAARSMLENEGCQVPSTSNNRVVVTLDEMLERAPEELANSVALLVDEIERLNESIGVCDESLKQMSQENEAMKMLQTVDGVGPLTAAVYVLVVRNPERFSSGRQVGAYLGLVPSLYSSGQTHVLGRITRHGNRQLRFLLTMAAGALMRTRRDSPLKRWALELAARVGRKKARVALARKLASVMWSMWKHERPFELRWAVAH

SEQ ID NO: 333981 - protein, 381 aa, unidentified
MGKSIATVRRFVGLDVHAETIAVAVAEKDGEVRNLGIIPNRPESIRKMLPKLGPIGSWTACYEAGPTGYTLYWQLTQAGVSCIVVAPTLIPMKIGDRIKTDRRDALRLAKSFRAGELTAVWVPDAAHEALRDLVRAREAALQDQLRARHRLAKFLLRHGRRPKQPLRAWSQSHLDWIRTLLKYEQGALRSTLEDYLAEVDHQAQRIHRLETALDQAIEQAPPSLREVVQALQALRGVRKMTAITVVAEVGQLSRFPKARQIMSYSGAVPREHSSGQSTRRGSITKTGNAHLRRVLIEAAWCQRYAPTLSRTLRLRQQGLSPEVIELAAKARHRLSARFRRLMARGKPRQQVATAIARELLGFIWAIGVLVERCSTASTKAA

SEQ ID NO: 333982 - protein, 492 aa, unidentified
MARRKMSTFERLQRLQKGQLSRKQRKQLEREFRAEDPAWEIVHPHAAGIDVGSASHFVAVAPGKDPQPVREFGSWTAALQEMVTWLKGCGIQTVVLQSTGVYWVALYDQLEKAGFDVWLVNARGTKNLPGRKSDVQECQWLRKLHTYGLLRHSFRPPTEIRAVRAIWRLRERHIGDAGRSVQHMQKALITMNVQLAQALSDISGVSGQAIIRAILGGERDPWKLAQLRDKRVQASAAEVAHSLYGNWREETLFELRQAVEAYDFAHQQITECDQQLQRYMATLPTREAAAGVPPTTESVAAAAGKDHPIPVGKPKRKAAKNQPAFNLDSEVQRVLGVDLTRIDGINIMTAQVICAELGPDLSCFPSEGHFASWLTLAPRREISGGKVIRQEPGHAKNRVANALRMAAESLWNSDSYLGARYRHFRARLGGKKAVKAMARYLACLIYRMLTKGQGWVDRGAAHFENNRKERELMRLKQKASALGLQLIPAPSA

SEQ ID NO: 333983 - protein, 347 aa, unidentified
MSITMIGLDTAKSVFQVHGVNETGKVEIKRKLRRSELIGFFEKQEACTVVMEACGAAHHWARILSSLGHEVKLIAPEAVRPFVKKGKKNDPADAAALCTAASRPDMMFVPIKCIEQQGILALHSARSLLVKQQTMLANAMRGLATEFGLTVPKGIDRLEELLALVDADKAFPEKARQVFTGLFDQCRALAESIRVFEVEIVAHARHDDTARRLATIPGVGPITASLIAATVVDIGLFKSARHFAAWLGLVPRQYSTGGKTRLGRITKTGNREIRKLLVLGATSMVYRTPQWNSVVGVWTRGVLERRPVRLVTVALANKMARIAWALMTRKEVYRATGRVAAATEAAA

SEQ ID NO: 333984 - protein, 418 aa, unidentified
MIKLPGKYSVYIGIDWANDKHDVCIQVTHLSTRKFKVIKHSANAINDWITNLHKQYKGQIAVAVELSKGPIVYALQKFDFVTIHPVNPSMLATYRKAFSPSGAKDDPTDAELALDLMLNYPNKIKPLKMESESVRKLMYLVEQRRRLVEDRRRFSNRLINTLKQYYPHLLDWFSHRGSGLFCDFIARWPNLQKLKRARPETLRKFFASHKGRSSTYTEQRIQSISEAEHLTLDRAVIDSHQLLAVALAKQMLVAVEMIKVFDREISDLFETLPDAELYKSLPGTGPCLAPRLLVAMGENRSRFNSASEIQMCSGIAPVTERSGQKSWVHWRYQCSKFNRQSFIEWAAKSVHQSYWAGLYYQQQRGKGNTHQSSVRSLAFKWIRILYRCWKKKVPYSEAKYLKALKERNSPLLFKEKAC

SEQ ID NO: 333985 - protein, 420 aa, unidentified
MKSFVPVAGVDVSKRFSDLCVLSPDNNVLLRQKIYHDMVSMKLAEKKLHEIELECGARPVVVMESTSHYHLILFQFFTDAGFEVVVVNPIQSGALKNINVRKVKNDRVDAYRIAMLYRLKVLRPSQIPTSSLRGLRLLTRQRSELKSDVARFKNRMTAYLDQIFPGYGEVFSDVGGSASRAVLHMCPTPEELLNADGSLLAKAICEAGNKGPKFVAEKAAKLREAAGSAQVIGVRSASNASLIKNVLDIIEGLLAAIQRIEREIEELVTQDTRLDEDVKLLCSIPGIGFSSAVVIVAEMGDISLFRKPKQLAAYFGLDPGERQSGTFKGRKNKLSKRGSPQVRAALHMAAVSSVSRNRDGTYRNPVLAEYYERKCAEKPCKVARVAVMRKLSNIIYAVLRDRKPFELRTPQEHMALLAAA

SEQ ID NO: 333986 - protein, 399 aa, unidentified
MKSPCVAVDVSKGKSYYQGFIEIDKPASKATPIMHDLEGFKSVYELGQTLKETYSDVVYVFESTGIYHKALETFLMKHEEKCVILNPLEASKIRKTDLRSTKTDARDCKSIAKAYFMKDFRLHNQKDELYEKLHSMNGHYNFLIQQLREMKVHFRNALDIVFPRFDEIYPDPYLDIPMSILKRYTHPDELKNKRVETIVKYLMKDTKHRESKAVDETKKLKGYIDNVSSGCRISSYEVTILKSMVQKIGDQEVEIELCLDEMRDLATEIPLYHQLMSIPGIGDNLAIRLIGELGDLDRFERSEQLVAYAGIDPRVYQSGQMTGEHLHITKKGNKHLRTLLFLAVSSNVRIGKTNSILDFYNKKRQQTNPLVYKAALIACANKLLRIIFGMYKSGINFHK

SEQ ID NO: 333987 - protein, 443 aa, unidentified
MSNSRKLTRGDRRRNGRLSRLREIVRRDYALVGVDLASAKQAAVVADHDSVVLARKMFDGDAWVIDDILDWAVPLAVEAGYAGVVVGCEPTGHRWKPLLERTRERAIEMVCVNPMLVHRGREEEDFTRDRSDFKDATIIAKRVAELRCYVPYALEGNWCRLRHLGARRNDQITEATAARQGLRDLLECVWPTALQAAAKPLESLTWRAAMDVSTDPAAIAAMGYDAFAAAVADRLGAWGGQRRNLRVLKAVFEAAGAPGGVERERAAVSERAGFVLADWHRALDQIATVETRMLDVLDQLGLTELVTTIDGLSAVGAAAILAETGDPARYDCARTWVKHAGLCPRDNESGTFHGQTTISRRGRPALRTAAWRATWGALRANTVYAARYEHLRTRATNPLCDGKARAAIAAALLRQLFVIVTRRVAWDPTIAGNTDTKVAPIAA

SEQ ID NO: 333988 - protein, 411 aa, unidentified
MESAVITAVGIDVSKSKSTVAVRRPGGEIALRPFEVHHTNSDLKKLASTLKKLGGDIRIVMEHTSTYWRPIALTLKEAGFFVSVVNAMLIHDFSDNTIRKLKTDRADALKIANYALTFWDTLPPFNNEEETRLLLKMQSRANERITATATALRNGLIALADQTFPGVNIAFDPNTKNANGHEKWVDFFLRYWHKDCVCQYSMEAFTESYRGWCKRKNYKFRTDTAHKIYLLAQEGVATLPKCESTKMLITQACKSLNAVCEAKQSTQLEIQRLATMLPEYEVVMQMEGAGPITGPALMAEIGDVRRFKNKKALVAFAGIDAPPFQSGAFESKSRHVSKRGSPHLRRTIFIVSNIILTRSNPENAVYCFMDKKRSEGKHYYVYTVAGSAKFLRVYYARVTEFLRSQPSPDAC

SEQ ID NO: 333989 - protein, 376 aa, unidentified
MERGSLMLNTTTFVGLDVHARSIKAVALDAMTGEVRSATFAYDAAAVAEWVGSLDPAAKCVYESGVTGFDLQKRLAALGVDCVVGAVSKMIKPSADRKRKNDRNDAEFLARMLSVGNVVEVWVPDDGCEAARDLVRALDDAREDLKRCKQRLSKFLMRHGYAFSETTPTGRRKGNWTAAHWAWIRSIEFPEKADDDVLAYYIDATRQAMEDKKRLEKLVEAEASKPRWKKRVDSLRCLKGVDAMTAADIVFEAGEFSRFKNARSFAAWLGLTPSEHSSGESARQGGITKAGNKHLRRVLVEAAWHYISAGPHPKDLAKGQAPDPAARRHAAKGIRRLVKRREEMLGRGVHKNKANVATARELACWCWAIGRMVENG

SEQ ID NO: 333990 - protein, 370 aa, unidentified
MGKSVLYVGLDVHKMSVDVAIAETGPAGEVRFYGRIGGDLEALDKVTRKLQAKGAELRFAYEAGPCGYQVYRHLTAQGHSCLVAAPALIPRRPGDRLKNDRRDALALARLLRAGELTPVKVPDADDEAMRDLTRAREDAICVERRARQRTVAFLLRHGRVYPGKTTWGRGHWAWLLEQVMDHPAQQIVLQEYLDAVREASARVLRLTGQIRDLVPQWHQAPFVAAYQALRGVSFIVAATVVAEVGDLDRFNNPKELMAYLGLVPSEHSSGASVRRGRITKTGNSHARRVLVEAAWAYRLRARVSRTLLKRQEGLPERVRQLAWKAQLRLCTRYRRLLARGKARQTIVIALARELAAFLWAIGRAVAPATA

SEQ ID NO: 333991 - protein, 339 aa, unidentified
MICAAVERCAGIDVGKTFLAVCVMTGPLDGEARTQKRRFGTIVAELESLRDWLKQEGVTHVVMESTASYWKPVFNVLEADFQVYLANPQEVKNRKGHKTDDKDGWWLAHLLRHAMIHPSFIPARAIRELRDLTRRRKRLLSNATAEKNRIQKVLEDANVKLGNVLTDVFGVSGQLMLEALLKGKAEPADIAQFAKGRAQRKIPEIIQALEGHQMSDHHRQMIRYSVKHLEFVEEQIGELDLAIAKKIKEAGLQQQWELLQTLPGVQDRSAATILAETGGDMEQFPSAKDLSSWAGVCPGNNRTAGKNKSSRTTGGNPWLRAVLTECAWAAAAKKALTQH

SEQ ID NO: 333992 - protein, 427 aa, unidentified
MKQEAQKQQEFGAYIGLDWADRTHVISLRGTDSGKVEHYQLVHKPEALAEWVSDLQRRFPGQRVAVALEQARGAVVHALMGYDFLVLYPVNPKTLAKYREAFSPSGAKDDPTDADLLLELVTLHRDKLRAWLPDDELTRTITLLVEYRRQLVATQTSLSNRLTSLLKLYYPQALAWAGELTTVQACDFLQRWPTLAQVQQAAPAKLRQFYLAHGCRKADVIEQRLQEIKLAQPLTRDGAVISASVVMVQATTTQLRPLMEAIARMEKQIAELFRQHADHELFSSFPGAGPVLAPRLLAALGADRGRFAAATEVQQLSGIAPVMERSGKTCWVHRRWACPKFVRQSFHEFAGQSIRWSTWARAFYDQQRQRGNGHHAAVRSLAYRWIRIIYRCWQMRVPYCEETYCRALQRRQSPLARVLAAPMQNAS

SEQ ID NO: 333993 - protein, 356 aa, unidentified
MPMLAEQVDGVIGVDTHRDTLTAAAVTRLGGVLAHITTSADAAGYRRLLDFAHAQLPGRRCWAVEGTGSFGAGLAGFLQQHGEQVLEVGRPKRPASRSGAKSDALDAVRAAREALGQDHLATPRRRGEREALRVLLTTRRCATLARVAAIGQLKALLVGAPEELRAELRGRSTAGQIDYCAGLRARPARSLEHQATVRALLATAQRIQALAAEADELEAELTVLVGAVAPWLLEVPGVGPLSAAQVLVSWSHAGRFRSEAAFAALAGTNPIPASSGQVTRHRRNRGGDRQLNRALHTILLVRLRIDPDTRAYMARRTAQGKSRRDAKRCLRRVIARQLFRLLERYDQPGVEILQAA

SEQ ID NO: 333994 - protein, 412 aa, unidentified
MEGETVIAGVDTHKDVHVLCLLDGLGRKIWSGSFGADPEGYDRLAEAIGDPGSCMVVGVEGTASYGAGLTRRLVELGYNVVEVLRPKRDKVRPGEGKSDPLDAERAARKAASGKGCSVPKSQDGWVEAVRQLYVARRLAVATSTSCVACAKSMLTTAPSALRERFRGRERPKDLMPLLARGRKAGDALEESVLASLRSVAAVWKEARSQVESLDERIRALLEANAPALLGVEGCGTTTAAAPVVAAGDNPGRLKGEAAFSMMCGASPIPASSGKTDRHRLNRGGNRQANWALYEIAIKRMAYDERTRRYVARRTSEGKSRREAVRCLKRYIAREVYHVLMDPNPDGAAPEGPELAKMRKAMRVTQKKAAAELGLSAATLGHLERGKRRSTKLERRYYELLCELERALPQTAS

SEQ ID NO: 333995 - protein, 343 aa, unidentified
MQTVTTIGLDIAKSVFQVHGVDAEGNVVIRRQLKRRYVMTFFRKLPPCLVGVEACASSHHWSRELQALGHTVRLMPPAYVKPYVKRHKNDATDAEAICEAVTRPNMRFVATKTPEQQSCLTLHRTRHLFIRQQTSVINAIRAHLAEFGIVAPVGRNGVEQLLGVAADASDKRLPEVARVCVAALGAQLRMLKAQILQFDRMITAWHRSSEASRRLDDIPGIGPVLATALVASVADPKVFRSGRDFSAWIGLVPKQNSSAGKDRLGSISKRGDRYLRSLFTTGALAVIRYAKIHGTKHRPWLTALLARRPTKVAAIALANKIARMAWAIMAKGERYKEPAALAA

SEQ ID NO: 333996 - protein, 363 aa, unidentified
MEVAKEGRFVGIDMGKTGYVLRMIDCCGKITGWEGKTNPEGRKELYKRLRPEDRIAIEACNLAFIMNKEFKKLTGTEFYILNPGKLYQIYMTDKKTDKEDALKLAKEIRDKPEADLPRVFAPTEEMKEMRKVISEYREIVRLHTQRVNRLHTVYEHCGITDLKRCDLKTRANREKNLGLLTGYEKEEALRLMQVIDLLESQKDVLEKKIKEAERSDEKIRTVEQVPGVGKITAYAFVASVGGAGRFANMAQVSSFLGFVPKIDCSSQTAHYGHITKKGNGYLRGLLVQAAWVLVRSKSGGALKEKYHDLVLHGLSRKKAIVAVARKMAELMYTLLKNGSKYEPRKFVTPLGRTDRLAQLAVAG

SEQ ID NO: 333997 - protein, 344 aa, unidentified
MNISMIGLDTAKSVFQVHAVDPSGKVAMKRKLQRGELIPFFEKHEACRVVLEACGAAHHWARVLTGLGHDVKLIAPEAVRPFVKKGRKNDAADAAAICEAASRPSVKFVSAKSLEQQSVLTLHSARCLLVKQQTMLANALRGLATEFGLTVPKGIGKLEELAALVNADEAFPETARHVLTGLFDHCRATAASIETVEAEIVVQARQDETARRLATIPGIGPITASLIAATVGDIGMFKSARHFAAWLGLVPRQYSTGGRNRLGRITKTGNREIRRLLVLGATSMVYRAPQWKSAAGLWTRAVLERRPVRLVTVALANKMARIAWALMTRKEVYHAKGRAAAAAA

SEQ ID NO: 333998 - protein, 344 aa, unidentified
MECYVGLDVSLKQTSICVVNEKGLVVREGVVDSVPEAIAGFVRSKAPGAVRVGLETGPTATWLWTELARLDLPVICIDARHAKAVLKMQVNKNDRNDAAGIARIMQTGWFKEVHVKDLDSHAVKALLASRALLVKIKRDLENQVRGLLKNLGLVVGHGTFNVFAVRAKELIADRPELTSAVSPLLTARTAIEQQIGKLDRQVLKLSRQDAQARRFMTVPGIGPITALCFKATIDDPARFRRSRSVGAYIGLTTRRHASGELDWSGRISKRGDAMLRMYLFEAAGVLLTRVPKWSALKAWGTRLTKRNGLRKAKVAVARKLAVILHRMWVDGTEFNWSNNKEVAA

SEQ ID NO: 333999 - protein, 381 aa, unidentified
MHVGLDAHKKHTVGFIVHLDGRREGPFKFKTTKEELARRAGAWEGARVVVEASSTGKGVVRVLGELGVDALLVHPDALMMTLRSKKTDETDAEHLALVSRLDALRVSYTPTFYEEGLRTLSRHRRDLTHRLTQLQVMAKSVLQRNLVEAPAGRLTRLSCRRRYQNLDLPSTEKFALKQILNEIEFVANQRDVTKLQIMSQTQDDEDIKLLLSIPGVDVMNAAMIKGELGDIRRFPSPKHAASYAGLTPRTWQSGATSVTGRISKRGSPHLRHALVEAVHQAQRYDGPIRQTYRRLRPRIGTGKALVACARRLVHVITAMLKNREEYAGTQTTDMTQIKRWRHHAITTCLGQGESAEALRLLLSQDPRREHQKWTSNHSGDS

SEQ ID NO: 334000 - protein, 322 aa, unidentified
MQYLGIDISKEKFDVALIVDIKNPEKVKQKNFTNDQTGFDKLGKWLSSRASEPVHVAMEATGSYWEALAEYLYDAGILVSVINPSLIKREAQSWSIRNKTDELDAKTIARFCLSKQPRAWIAPDPDLRELRDMVRHLDNLQSERQRHINRLEARCCQTVIESLEQMISVLDKEISLLEDRINKHIDGNPRLKKNAQLLDSIPGIGEKSIAVLLGELMNLTSFAHSKAVAAYAGLSPKRIESGKMKGRSRLSKMGNSRLRRALYFPALTAVRYNPIVKALYERLLENGKTKMSAIGACMRKLLVLVYGVLKNGKSFDPAFEKI

SEQ ID NO: 334001 - protein, 365 aa, unidentified
MKKISTVARKQVRNFSEQKLTIGLDLGDRSSWYCVLDEHGEVVLEEKLGTTPNAMKAGFGGMPRSRIALETGMHSPWVSRLLSELGHEVIVAHARNVRLIGESRKKDDRLDAQTLARLARIDPQLLCPVKHRSARAQADLTVIRARAGLVRARTALVNTARGLAKSYGERLRGCNVRNMNPEKAEVLSPELQKALEPLLAGIESLSEGIREYNEGIEQLAEQSYPQVARLKQVKGVGTLIALTFLLTLEDAHRFRKSRDVGCYLGLQPGRRNSGQSEPQMHISKEGDPYLRTLLVQGAHHILGPFGMDSDLRRWGLKLAERGGKSGKKRAIIAVARKLAVLLHRLWVSGEVYEPLRNQRAMPAAA

SEQ ID NO: 334002 - protein, 445 aa, unidentified
MSDSLPSVSSKRDYAAFAAIDWADQKNFWRLHQADSQKEERGELENTPEAVEVWAASLYERFGGRPIAICLEQSRGALVYMLAKYPHLVLFPVHPTTAARYRETFRTSGAKDDPSDTASLLDLLLRHPEQLRAQQPDTIHTRLLQFLVEQRRTMVDEKTRQGNRLTDCLKLYFPQLLRWFNDVSSPLVGALLERWPNLLALQRSHPGTLRKFFHEQNCRGEDKIEERIAAIYQAVPATGDAAVCEGVSLMARGLTAVIATLRTHIAEFDRRIAEVVATHPETPIFDSLPGAGKVLVPRLIVAFGTRRERFADAEEIQRYSGIAPVPKASGKTQLVLCRRACPKFLRQTFHEFALHSIGQSEWAKAYYVHLRNDEKKDHHAAVRSLAYKWTRIIYRCWKDGKPYDEQIYLRSLRRRGSLLGGAFAAATSAGWKSVGGFQKLSENNS

SEQ ID NO: 334003 - protein, 422 aa, unidentified
MLEQSQDDEQIIARVAALDIGKAEVMCCIRVPRDAPAGRRRQEVQAYSTMTRSLLVMADRLRELGVTRVVMEATSDYWKPVFYLLEAHGFDPWLVNAKDVKHLPGRPKTDKLDAVWLCKIAERQMIRPSFIPPPPIRQLRDLTRYRVDLVSARTAEKNRAEKLLEDAQIKLSVVATNIFGVSGRDMMAALIAGERDPRVLAQMARVRLRAKMSQLEEAFHGHFTDHHAFLLAKMLARVDAISADIAEIDERIEAHLRPFADAVTRLQQIPGIGPVAAAVIIAEIGTDMGRFPTAGHLASWARFTPTVKQSAGHNKGNGSTGRGNPYLARILGEAVVAAGRTRTFLGERYRRLARRRGKQKAIVAVGRSMLIITWHLLSSPSTQFADLGPSFYDSRIQPDRKKREHIRQLEALGYKVNLEPAA

SEQ ID NO: 334004 - protein, 328 aa, unidentified
MSYVGVDISKDSFVVAFSSASKSKTITYQNDDKGIEKFINTLDKEQHHCVMEATGNYGVNLLYHLCEQEIKVSLINPKQSNFLSKMKLSTAKTDNKDARLLVEYGEKMNPEVYKMPSDKIILLKQKQTVLTHLIKQRTASKNQLKSLELLNKKDNLAIDMLKNNIDNLDKLINNLEKDIVSITEEEFEKQVQLLTSIKGIGKKVATTLVIITNGFSFFENPKQLSRYIGICPTYQQSGKSLNYNGHINRNGHSTLRGQLFIASWSATKYNSSCKALFERLREEGKPWKLAQIAVCNKLIRQAFAVIKSGVAYIDGHIPTLSAPMQTAI

SEQ ID NO: 334005 - protein, 338 aa, unidentified
MYYTGIDLHKFTSYLTTIDSDGCIVKQANIKNVDYNFFQYFSDLGVEHQTTVESTCTWYWLNDLLTSINIPLTLAHAKYVKAIAYAKVKTDKVDSHILAQLLRLNFIPQAHKISNENRTLRDALRARLKIVQRHTSVTNSMALLLAKYNLTEPEGLQDIPKLQYEQLSVHASLLKEQMLTLEKSLYPYLIPNEDIQRLLWIPGIGKMNAFTIVLEADDINRFADVKNFFSYCRLVPSARNSAGKSKQRSSKDGNKYLKIAFTDAATHAVQYYSEIRKYHSSLLRKKNKQIAKTIIAKEIAEIVFHILKNKTNFNNKFKGVELQNKKSLQWPRVVSPDV

SEQ ID NO: 334006 - protein, 399 aa, unidentified
MRKPKQPNRKQPPQQRKPNDLSHCLAALDSNHTLIAVVELSLSSWLVAGVVPGVERLPLKKLKPEPGALFELLQRWRIEAERSGRKITRIAVAYEAGRDGFWLARWLMANGVEAHVIHPASVAVSREHRRAKTDRLDTDLLKRAFVGWLRGEREHCKMVAIPTLEEEDAKRPNRERECLVAEQCRLINRMKATLIRLGIRSFNPKLQCAAERLETLRTPEGEAIPPNTLAELRRHIERRSYIREQIRKIETERIERLTQTPNTGPNVMVRLLMRVIGIGIETADLLVHEVLLRPMRDHRAIGRYGGLTGSPAQSGSMSREKGLARSGNARVRRTMVELAWRFLRFQNDSALAQWYHQRTDNAPRVRKTMIVALARKLLIALWRLVREGVVPEGVAMRPA

SEQ ID NO: 334007 - protein, 471 aa, unidentified
MGKGSGNGTTRGDRKRNARRERLRGLLPRDGAVIGIDLAEDKQAIAVIDHDVRVLARKTVRVKAFRLGEALDWAVGQARAKGFARVTVACEPTGPRWLQVQRLCAERGLPLVCIQPLMSHIAREQQDYTTHKTDEADCVLIARLAVELHCYIPEELDETWAHLRHLGRRRTQLITAATASGQRILDFLSVAWPTVTETCADPLKSVTWLAALQVVTARCGADPGKLAVMGTEAFTAAVRGAVAGWGGKKAWGPITRRVFAALTSTEGVVVSSRRGLLRRIADELGDLQRTRAQLRAVEADMAAVLAELGLSRLAGIPALSAVGAAAILAETGDPRRYDSSSSLVKHAGMSPSENASGAFYGDAHISRRGRPGLRLTVWRAVWPMLRFNPVMAAKYAAMTQAADDAAAAADTGSRQASAAAATARARHAKARVACAASLLRWIYCLVIHGTSWDPDAASGPASGRPALAEAA

SEQ ID NO: 334008 - protein, 410 aa, unidentified
MQVLYQRCCGLDVHKETVVACLRVVSGGEVVREVRTFETTTASLMALSEWLAENGCTHVAMEATGVYWKPVWHILDDGDFQLILANAAHVKNVPGRKTDVNDATWLADLLAHGLIRASFVPDTQTQELRTLLRTRKQLVREKSSHILRVQKTLEDANIKLDSVITDIIGMSGRAMIEALIAGESNPAKLARLANYRLRASQEKLREALRGRVTKHHRFLLRLHLNQIDALDASIATIDQQVEAGIAPFRVAVELVTSIPGVSDVGAQVIVSEIGTDMSRFPSEGQLISWAGMCPRNDESAGKRRSNRVRKGAPWLKTTLVQCAWAAVRKKDSYLKAQFLRIKARRGPKKAIMAVAASILTAIYHMLKDGTLYQDLGSNHFQSRSKGQQTKRLVKRLADLGYDVALTPLAS

SEQ ID NO: 334009 - protein, 280 aa, unidentified
MMDTETGELVERRLEHENGEARAFYASLPKPVLVGMEAPGYAQWFERMLAEFGHELWIGHASEIRAGVVRKQKTDARDAQHLLRLLLEKRFPRIWIPSPAERDARQLLRHRYKLVCFRVSVKNQLHGLAMSQGVCRKKKLFTAQGREELEKLSLGPWGSCRRQELLGMLDQLNPVIDELDRAVRQEAESRADAARLMIHPGVGPVTALAFVLTLGPVARFRRSKQVVSYLGLNPKERSSGDKQHTYAISKQGRRNAVDLARGRAVNFSESRREPHKFGQR

SEQ ID NO: 334010 - protein, 394 aa, unidentified
MKLVGIDVGKNSHHFCVMDKETGELNVTPSSFPNNKEGFDFLINSLKPYSKKSILLGMEDTGHYHVALLKFLLSNGYTVALINPKTTDLTRKMEGGITKNDKLDTITICDVLDTPECKKQYRITKVDRFDLYEQRQLTRHHHNLKEELNLYCNRLQKSIDLVFPEFNTLFSSKYGVVYMNLLKTFGSAEAIASTDIRTIRKCFEIKGRGGRISLTAEKLKECAKNSIGISSEVETIQIKHLVRQITLIKEQIAEIDKKIEEFSITNNSPILSIPGISHFSGTSILAELGDIGNYSKPSQIIKFAGVAPYHYESSQYNAQHTAITKKGSKYLRKTLYQIILPVINNNPVFKKYYRLKISQGKGHRCAQGHCIRKLLRIIYHLLETGQSFDPALLR

SEQ ID NO: 334011 - protein, 411 aa, unidentified
MLKIVFKICCGIDVHKNFVIACIAKTDDNNVTTYQSKRFSTFTKGLRELREWLNSNSCKDVCMESTGKYWHPVFNILEDTCNVIIAHPKYVKAIRGKKTDKKDAKWIADLFKHDLVVSSFIPNLCIRQLRDLCRYYCKLTNFSTSETQRTQNCLTVSNIQLANVVSDINGKSSQRILAKILENPSDTNFNIEPLLHKSMLDKVDDIALAIDGVITQEQADKLKIIEQHYDSLQLCKSNLEKIILELAKPYEHEIALLQTIPGINSKLTAIRIISEVSNDVSAFPTSKHLCSWAGLTPTNNESAGKKKSVRISKAGCYIKPLLVQCGLAALKSKDNPEISNRYKNLKMRRGHKKAIIAIARMLMTIIYHILQDKVCYDKELYSHYNQLPISKEITVEQAIALAKRQGYKLVC

SEQ ID NO: 334012 - protein, 325 aa, unidentified
MTTSCPVSVGIDACKEKLDVALLSPDHSASLYSYTNTAEGITKLLSDLATQKTAETVPCVIESTGNVHFRVALMVSREGYAVKCINPLITKKYQRASIRNAKSDRVDAKRLAEIGLIEPDLQPYKATKENLFIAKLIASLAKCEKLKQQLVGHRRQLRESLETLNVPLDLTQYDLAITALETQIGTLQAILIVHAPDEAIDLAKNTKGVSTEQTSILLASLKDKHFTNRDQLVAFVGLDIMSRKSGSWVGKQKLSKRGNAYLRKVLYQIAWGLKSHNDTYRAYYEKLRARGLHYTTCLIAVARKFVRYLYAYYYKRSVTFPHTIV

SEQ ID NO: 334013 - protein, 367 aa, unidentified
MSSIAHRGFVHLGMDVSKDSISVAVLSPDRDTAEVDKIFHDADSVRRLVKRLGKPKGIWACYEAGPTGYDLQRLLTSMGVRCDVVAPSLIPKSSGDRVKTDRRDARRLAGLHRAGELTPVAVPTPAQEGVRDLCRTRGDMVQDLTRARNRLSGFLLRHSVVWRGGSKWTERHRRWLATLSFDDPAIATTYSHYLATVKLRDTELESVEADLVPWCTKDPFGDQVTRLAAYRGVTTIGALCLAAEVFDWRRFPRARPFMSFTGLVPGENSTGLTQRRGSITRAGNAHLRGQLCEAAWAYQHSPNVGVAIKERQVNVPPETVARSWAAQVRLSRRFHQLGAHKNVRSVVAAAIARELAGFLWAEMVAEV

SEQ ID NO: 334014 - protein, 415 aa, unidentified
MSIGVTCGIDWASDHHDLALIDHAGELLAKARISDDAQGLQQLLDLLATHGDSKQAPIPVAIETSRGLLVACLRATGRPVYAINPLAAARYRDRHAVSRKKSDHLDAMVLANILRTDAAAHRTLPADSELAQAVAVLARAQQDAVWDRTQAGNKLRSHLREYYPGLLLAVHDLRDGLASPLARTLLAAAPTPAQAAKLTCPQLRALVKKAGRKRGIEAEADRLHAVLRVPQMRQLPQIEKAMGTKTLALLRQLEAACTSADELAAAAVESFEKHPDAEIITSFPGLGSLTGARVLAEIGDDRSRFADARSLKAYAGAAPVTRASGKSVSVQARRVKNQRLAAVGYVWAFSALTASPGARAHYDRRRKAKDRHTAAQRNLFNRFLGCLHHCLTQRIHYDEATAFPTLCQKPEAAAA

SEQ ID NO: 334015 - protein, 416 aa, unidentified
MDLDEVVYATACGLDVHFAFVAACLVTTGPKGKPKVEEREFPTNLKGLRSLREWLSAAGCEAVGMEATGVYWMPVYAALEGAFELVVGNPQHMKNARGRKTDRMDARWIAGQMRHDRIKPSFVPPPEFRDARELARARRQLVQERTSIRNEVQRLLARAGITLGDLVSNVFGVSGMNILEALAEGKSLQEELPGCLRTKLKGKLAPIAAALEAPLSEISQYLLSVALRRLEAQEALIEDLEAKLFKHLAPHKAKIELLLKIPGISKISAHIILAEIGVDMAAWPTEKQFSAWAGVAPGCNQTGGKSKRAKTRKGNPYLCTILMECAGAAIKTKGCHLQAKYHRLSAQVGSKKKARMAIAHKLALIVYQVLGQNLSYFEPKPKPQTEKIKRKIYQKSVRDLERLGYKVSLEPIGAVS

SEQ ID NO: 334016 - protein, 318 aa, unidentified
MNTNTLQNINVGVDTGKSQLDIYIRPLDIYFTVPNTDKGISDAIKTIKKHKPQRVVIEATGRLEMPFILACDKAKLPYVVANPLRIKRFAEAIGQRAKNDRLDAALIAHYAERVQPELTKLKSENIRLMSDLVTRRNQLLTMQTMERNRLQILPKNISSTITPILTALKNQLEKVEAKIAKLIESSPEYQAKSTILQSMPGVGKVLAASLISNVPELGFITNKQASSLIGVAPITRESGRFKGKRMIKGGRPQVRTVMYMAMMSAIQCNPVFKATYERLLAAGKPKKVAIVACMRKMVVILNSMIRDGVMWDKGSAKN

SEQ ID NO: 334017 - protein, 419 aa, unidentified
MRIIKTKKHEIVNGRTLLVAVDLGKNKHMGYYRCPDGTDIKPFEFSNNRPGHQKFYDRICQAKAVYHLEEVVVGFESTGVYGEPLIHFLNDKGIKLVQVNPMHTKRIKELEGNSPGKTDRKDPKVIADIMALGHFLTVVIPEGVSAELRRLTQARERSVERRTAFYNQLQDLVFIIFPEFLEVMKDIKTQSAQYLLRHYPTPQAILQCGVDGLSLVLRRVSRGKLGRQRAEALYEATVRSVGIKEGQRSIVLEIEEILLGIERCECFIAKLEREMRRLLDQIPYSRSILSVKGIKTVTAAGLIGEVGDFRKFRTISELLKLAGLDLYEISSGNHTGNRHITKRGRSLLRKLLFFASLNMIRKGGVMHEPYQRYIGRGMPTHKALVAISRKLLGILFALVRDHTEYVVNYSERENLKLAA

SEQ ID NO: 334018 - protein, 357 aa, unidentified
MGKATGNLARVTRIGLDLAKTVFQVHGVDAKGEVVIARKLRRGTMLEFFGRLAPCMVAMEACGSAHHWGRQLVALGHAVNLIPPAHVKPYVRRNKTDAADAAAICEAAMRPGQRFVALRSIDNQAAVMRHRIREQLVGQRTALLNALRGHLSEIGVVTAQGAQHAYRLKRMLADGADENGEIVIPEHVRVALAPLAAQIDALDQAIAAIDDKLIETVKADEKARRLMTIPGVGPVIATAVVATVGEVSSFASGLEFAAFLGLTPRQRSSGGKERLGRITKMGDRYLRKLLVVGATTVLHHAIGHNDSLRRWARQMLKRKGGRAGFKLAAVALANKLARIVFAVLRSGEVYDDRPVAA

SEQ ID NO: 334019 - protein, 397 aa, unidentified
MNRLLYIGMDVHKESFTLSTYHVTLDESELTQDFIGAPLKITDATASGVEKYVKNLKTMLNIKATDNVWIQCGYEAGCLGFDLYFQLKAKGIECVILAPSTIQKSANAKKKKNDPLDSKAIAMALANKTYKSVHVPDKDDLNVREYLRMRNAHRDAVKKVKQQILAFLLRQGIKYSNTNWTKALITWLHGLKFDHALLKETLDEYITSLENYVAKLERLDKRIEEFAQGDKYQEKAAELGCLLGIKTQAAMTMMSEISDFSRFRTASEFASFLGLVPGENSSGEKTQRTSITKSGNSQCRKTLIEAAAGICRGKVGHKSKELMRRQALCNNPIAISYADRANERLRSKFYRLNLRNGKPANVAKTAVARELACFIWGIMTDTYNGKVPRNDEYALGK

SEQ ID NO: 334020 - protein, 471 aa, unidentified
MTPASTRAERRRQVRTASKPKVPLPPQLKRVNLNAAGIDIGSEEHWVAVPPGRDPEGQDVRRFGAFTGDLCAVAEWLKRCGIETVAMESTGVYWIPLYELLVERGFEVLLVDARQVRNVPGRKTDALDCQWLQELHTYGLLRGAFRPADQICVLRSYLRQRSMLVAYGSHHIQHMQKALEQMNLKLAHVVSDITGVTGMGIIKAILSGERDPAKLAKLRDPRCKHSEATVAHALEGHYREEHLFALRQAVELVEFYQRQITACDRQIEACLQQFEDKSAETSVSPRKGKRRRGEVSFDARAYLHRITGVDLTQIDGIEANTALTVVSEIGVDMNRWPTEKHFGSWLGLAPGSKISGGKRLSSRTKPSANRAAAALRLAAQALSHSQSALGAYFRRLKARLGAPKTITAAAYKLARLVYRMLKFGSGYVDQGEAAYEERYRERLFRNLKRRAAELGFELTPMSSTPNQPVLT

SEQ ID NO: 334021 - protein, 418 aa, unidentified
MTRRDDSRIIRIVHPICCGLDVHKESVSACIIFPDDKGEEQYDVKVFGTFTDDLMRLRDWLAEHNCPVVAMESTGVYWRPVHNVLEDSVDVVLANARDMHNVSGRKTDIGDSKWIAGLLRHGLLKSSFIPPQDVRQWRDLTRLRKKYVHTVGDYRKRTHKLFESANIKIDSVVSDLFGVTGRNLMQLLVADRKLTLSDIQTCVRGKLKGKEAELFRSIQGFFTDHHRFVLKMILETIATLEAQIEALDLQIRCAMKEHEALLDRMKQAPGIADVASREILAEIGPTLDSFPKDTALVAWSGLCPGNNESAGKRKSGKSPVRKHHLKTIMIEVAWAAIKKKDSYFKDKYYRLKARRGAKRAIVAIAHRILLGIYHVIKDGADFRDLGGDYLTLRNKSQKVFHLRKQALSLGFDLVPQAV

SEQ ID NO: 334022 - protein, 376 aa, unidentified
MAFKILRKNCCGLDVHKTWIFACIGITDANGRTEYKQARFSSFSNGLRDLADWLAKHGCSDVCMESTGKYWIPVLNILEKTCWVTLAHPKYTKPQKGNKTDRKDAKWICDLYMCGMVKPSFIPPADIRQLRDLMRYRTKLTNMLTSEKNRALNCLTVSNLKLDDVFSNVFGKSSRSIVQHILEHPGEQFDVAPFLDRRCKHSVEEVQAAVDGALSREQAAKLRECLLHIDQLNEHRKTIETEILRLAQPYSHQLELLRTVPGFSAAPLTAVALISEIGADMSVFPSAKHLVSWAGCCPRNDQSNNKVKSTRISRAGCYLKPLLVQIANAVIQPCFALYWFWNLFSWGCYEFFGDSSGNGIVGALRSFFGGAFSRNL

SEQ ID NO: 334023 - protein, 346 aa, unidentified
MMIIGCDYHPSWQQICWVDTVTGETGEKKLEHASGEAEKFYRGLSGAALIGMESTGNCQWFVEMAAAAGHDLWIGDAAKIRACDVRAQKHDRRDAALILKLLLEGRFPRIWVPSSQEKDLRQLLIHRYKLVRIRAQVKNELQHLAMNQGVTKKRKLWSKAGEKVLRELALAPWASRRREDLFKVREMLSAQIDLLDQAVVEVAEKNEKARLLMTQPGVGPITSMAFVLTMGDVSRFQRGKQVASYLGLIPREYSSGGHQRFGSISKQGNWFMRMLLVEAAQNAVRYDPGFRNEYLHRCHNKAKGVAKVAAARKLAIRLYWMLRTNTGYPGVVRVESSSRVPLVSAS

SEQ ID NO: 334024 - protein, 342 aa, unidentified
MAIVAGFDVHRAQITFDALDTDSGEVMRGRIDATPAAVTRWIGRFAGRRIDVAVEACTGWLFVCDALVAAGAVPHLAEPVETRALRGRKRRAKTDREDARWLRELLAEGRLPEAWIPPEHVRQWRSRARLRHALIGERTQWMQRIQATLYHHGISGTPDKLRTRAGRVFLDELEVPGDARERIEVALAMVDAIDAQIAPLERELRQLARRQRGCQALMGLYGMGELTSLVTLCELGDVRRLSASRKAVRIAGIDIGVHRSDRRARAGKLTRQGSPQLRWALYEAALAACRPSSPDHADYLALKARGLSHTRASLTIARKLARRSFHVLRDLGPAALEPVATP

SEQ ID NO: 334025 - protein, 365 aa, unidentified
MTKVRTWVGLDVHAAKTVACVVDALSGEVTVRRLPGASGEVVSFCAELPGPTRVAYEAGPTGFGLSRTLSTAGIGCVIAAPGKIERPSADRVKTDQRDAERLVRLLMIDALHPVRVPSDSEEAIRDLVRAREDLRGDLMRARHRLSKLLLRHDVRYEDTTSAWTQRHRGWLTSVELGERGAQATLLDYIGAIDALVLRRDTLEATIGELIPGSPLEMTVARLRCLRGLDTLSAVGLAAEIGDFTRFERPAQLMSYLGLVPSEYSSGQTRRQGAITKTGSGHARRLLVEAAWHYRRPPRKGTTLERRQDGQPQLAVAISWKAQQRLHQIWRRLDHDRKKRRTLVAVAVARHLAGFCWAIVNTNQEP

SEQ ID NO: 334026 - protein, 352 aa, unidentified
MTLVGCDWHSRKQQVAVLDTDTGEVLEQELLHEGDAVERFYRGLPRPVTVGIEATGYTLWFHALMQKLEYTLLVGEAAKIRAMVVRKIKTDRRDAQHLLDLLKHDRFPTVWMPDPATRDLRALIAHRVRFVRMRTMVKNGLHAIALNHRVALGPALWTKRGLAQLQALALPPHTAQRCGENLELLTWLTTRIAQLDAQIAAAAAADARAQLLLTHPGVGPLTALITVLVLGPANRFPTSKHVVSYVGLAPAINASADTYHLGKITKQGNALLRWILGQAAPLAARADGELKRSYFTVLHRRGRSKAKVALARKLLVRLSIMLRDQIDYDEFRRRGGARRSQPAWHPVAAPTM

SEQ ID NO: 334027 - protein, 296 aa, unidentified
MFANSQDGWKQMLSWLKAMGGKQARICMEATGRHSLGVALALHNAGHLVSVVNPAQIRNFARTKLGRNKTDKVDAALIRDYAALFSPAPWTPPSPAMRRLCELQTVRAGIIGGRTEWQNRLGSGLGDSTATTLMTATIEHFTSQLEAVDRAIGETIDRDAELRRRRDLLISIKGVGETLAASLLTEMPEPGVLRRSGEMVAYAGLNPRHHRSGTSIDRQTHISKIGNAALRASLYMPALSAMRFNPAVAALVARLKQAGRLTPKQIVVAAMRKLLVLCFGVLKTGRPFDPAIAMPA

SEQ ID NO: 334028 - protein, 348 aa, unidentified
MTLVGCDLHSRKQQVAVLDTRTGELIEQELAHEGDAVERFYRALPTPVTIGIETTGYTQWFHALMHQLGHTVLVGEAAKIRAMVVRKTKTDRRDAKHLLDLLQHDRFPTVWIPDPGTRDRRALIAHRVRLVRMRTMVKNGLQAIALNQRLALHSALWTQRGLTQLKALALPPHTTRRRDDSLALLAWLTTRIDQLDAHIAAVASADPRVQLLLTHPGVGPLTALTTVLVLGPLARFPDSKHVVSYVGLAPAVNASADKQRLGKITKQGNALLRWVLGQAAPLAARADDELRRRYFSVLHRRGRPKAKVALARKLLVRLYIMLRDQIDYEEFRRRGRTPRPQHIPGAVM

SEQ ID NO: 334029 - protein, 311 aa, unidentified
MTDDTIGMDISKAALDIHRLSDGKMMSFSNCPAGFKALSKFCAQTAVIRVVYEATGAYHSGLERALGAHLPLVKVNPLQARRFAQAQGVRAKTDAVDAKMLAVMGDAFALEPDEPATKIQHDLSELRTFRSGLIKDRTRIMSRLKTQTLSIICRQSKARLVHINKQIAEIYAEVERLINSNDTLAHSMKILRSIPGIGAICASTILIEMPEIGSMDRKQVASLTGVVPMTRQSGQWRGKSFIQGGRKVVRDALYMPALVAMRHNPNLKAKYQAMIKAGKPPKVALTALMRKLIELANALIKANRNWVKKEA

SEQ ID NO: 334030 - protein, 341 aa, unidentified
MKKFIRIGVDLAKNYFQIHALASEGAPAVTRKMTRVKMREFFSRIEPCLVGMEACGTAHYWARELKAMGHEVLLMPPAYTKPYVKRGKNDAVDADAICEAMSRPGMRFVPIKSAEQQATLMLHKTRELLIKQRTMSVNALRGHLSEFGIVAAKGIGHVDELLDLAESDATLPAAAKTAMRVLAQALEGLDKAIDDLEKEISSTHGQNEVSRLLDQVPGIGKLIASVIAASVPDPSVFKSGRDFAAWLGLTPRQNSSGGKQTLGGITKQGNRYIRKMLVLGATSLLNVVGKRKGALHDWIVGLLAKKPARLVTVALANKLARILWAMMKTGECFRTEMFAKA

SEQ ID NO: 334031 - protein, 339 aa, unidentified
MIIIGVDYHPSVQQIAYVDTETGETCERRLNHSDGEAEHFYRALERRQVRVRVGIEATGHARWFERLLAELKFELWIGNAAEIKAARVRKQKTDRQDALLLLKLLVEDRFPRLWVPSPENRDLRQLIWHRHRLVQMRTRAMNQIQATAMNEGVRRKKALWSKSGRQQLESLLLAPWATRRRQDLLELVDRLNGTIAELTTAIEQEANKRPEVLQLAFVLVIGSPDRFACGKQIGSYLGLTPCEDSSANRQRLGHITKQGSSLLRFLLVEAAQAAVRRDPDWRRRFVHLAMRRDRRIAKVAMARRLAISLYWMWRKGYDYQQSLKFGSHAGEPGYRHGVK

SEQ ID NO: 334032 - protein, 351 aa, unidentified
MVVIGTDVHKRSHTFVAVDEVGRKLGEKTVAATTTGHRKALRWARSEFGDNLKWGIEDCRNYSARLERDLLTAGQSVVRVPPKLMAQARASARTRGKSDPIDALAVAHAVLRHPDLPVAVHEEVSRELKLLTDRREDLVAQRTATINRLRERVHELDPAAEPPLGSLHRARPRAHLAQWLDTQCGLLAELARDELADVTRLTDVIDALADRIGDRVQQVAPKLLALPGCGELTAAKLVAETAGVTRFKSEAAFARHSGAAPIPVWSGNTAGRVRLTRSGNRQINAALHRIAITQIRLAGSPGHIYYHKRRAQGDSTNEALRCLKRRLARVVYKRLLTDTHTPPQTHDLAAA

SEQ ID NO: 334033 - protein, 355 aa, unidentified
MDSKKYIGMDVHKESISIAVMNGAGKIGMECVIETKASMILQFIDGLRGDLQVTFEEGTSAAWLYDLLKPHVTKLLVCDPRKNASMREGHQSDKIDARGLAELLRLNHLSPVYHGEHGLRTLKELVRSYLTITKDLARIMTRVKAIYRSWAIPCTGKQVYAPRHRAEWLGKIGEPGVRRRAEFYYQQLDALRTVRQEVRRELLAEAKKHPAWKRLCQIPSIGPIRAAVLLGILQTPHRFRTKRQLWSFSGVGIETHSSADYRSVDGRLQRTKKQISIRGLNRNCNRDLKNLFKGAAIVASSKPGPFQEFYNGLLTKGIRPEMARLTLARKIATIVLIMWKRGACFDAQHLKPQTA

SEQ ID NO: 334034 - protein, 388 aa, unidentified
MRLIPAAYVKPFVKRQKMGWLPPSPDGIAMCQECGCESHKSGEDGKMKDTIIGVDLAKRVFQVHGASIAGEVKFRKKLTREQFRLFIAQQPACIVVFEACGSANYWAREVEKLGHEPKLIAPQYVRPFVKRQKNDATDAEAIVIAARQPEMRFVLPKTAEQQAKSVLFRNRERLVRQRTELVSALRSALYEYGHVFPIGLAHLKRMDALVRGPDCDLPYLIVTECQELLSQIAETTEKITTKTKRLKALADETDTARRLQTMPGVGPLTALAVEAFAPQMGQFRCGRDFSAWLGLVPRRHSSGGKERLGRVSKAGQTDIRRLLIIGAMTRILAHARYKGPAESWLGRMLAKKPKMLVGIALANKMARQLWAMLTRNEDYRDPAMAAAM

SEQ ID NO: 334035 - protein, 414 aa, unidentified
MDRIVERCCGLDVHKASVTACVRVPGEEAGERHQELREFATTTPELLQLRDWLAAFGVEVVGMEATGVYWKPIYYLLEEDFECWLLNAHHLKNVPGRKTDIKDAEWICQLLEHGLVRPSFVPPKEIRELRNLTRYRKTQIEERTREVQRLEKILQEAGIKLSSVASQVLGVSGRVMLDALIEGTTDPEVLAELARGRLRSKLPALRDALQGRFSSHHALMAGKMLAHIDYLDESIAELSGEIERVIAPFSEKVELLDTIPGLNRRLAETIIAEIGVNMDQFPTHCHLASWAGMCPGNEESAGKRRSGKTRKGSKWLRSALVEAAHAASRSKGTYLSAQYARLRGRRGPRKAAVAVGHSILVIAYHILERGRPYHELGDDYFDQRRSKEAYTKRLVRQLERLGHQVALEPFPQPA

SEQ ID NO: 334036 - protein, 367 aa, unidentified
MTRHSIVRSLLLVGWKVTATSKGAWDVTMIGAGRPDSKVEVILGVDTHLDVHVGVAVDHLLGRSLGELSVPTTANGYERLLCWAESFGPVRCAGIEGASSYGAGIARHLKAQGVEVLEVERPKRRQRSSRRNVKSDPSDAESAARAVLAGETSGVPKSGDGCVEMIRALRAARRSAMKSRTQAANQLQGLRVTAPDELRHRLRGLSSKKLVSVAARFRLGDDPRDVPAATKFALRSVARRHEALSAEIAKLDAQLDRLVTQVAPELVSLPGIGTDHAATLLIVAGDNPQRLRSEASFASLCGVSPVEASSGKVVRHRLNRGGNRDANRALYMICLARMRRDRRTWEYVARRTAEGKSKREIIRCLKL

SEQ ID NO: 334037 - protein, 402 aa, unidentified
MNCVGIDVSKGKSMIAVMRPFGEVVVSPFEVRHTANELSELAGLLKSLDGETRVVMESTGNYHAPVAWLLHDAGLYVSGVNAMLVHDYGNNSLRRAKTDKKDAVKLANYGLDHWLTLPRYIPEEDTRLMLKICYRQYQQYSKVQTMLKNNLISLLDTTFPDANRLFTSPPRADGSEKWVDFVATFWHCECVCGRSEKAFTTQYQKWCRKHGYNFSEDKALDIYASACRHFGVIPKTDTAKLLVEQAISQLQTTSSALAALKQEMQSLAASLPEYPVVMGMFGVGPTLGPQLLAEIGDVRRFHSKKALVAFAGIDAPPYQSGQIDVRSRSISKRGSASLRRTLFLVMSVILQCAPIDEPVYQFMDKKRSEGKPYRVYMMASANKFLRIYYASVKAYLESLEHD

SEQ ID NO: 334038 - protein, 370 aa, unidentified
MSQSSTLFIGMDVHKDSIAVASIAQEHGAEVIYLGAIGTRQGDIDQLIRKLPSQATPLLFVDEAGPCGYWLYRYLTKKGYDCWVVAPSLIPKKPGDRVKTDRRDAVQLARLARSGDLTSVYVPKVEDEAIRDLTRAREDTISDCKDAKFRLKAFLLRHDIRYVGRANWGPAHLRWLSEVVCQTPAQQIVFQEYVRAVNEHSERLERLEQELREHVRAWRLYPVVEALQALRGVQFTVAVTLVAEMGDLTRFESPRELMKFMGLIPSEYSSGAQRRQGSITKAGNTHARRVLVEGAWAYRYPAKVSRHLQLRLETQPKVIQDISWKAQVRLCKRYRRLVSRGKHANVVTVAIARELVGFLWAIAKEVPLIA

SEQ ID NO: 334039 - protein, 486 aa, unidentified
MAKRKMSTFERLRRGERLGRRERRALERCLQAEGPELEIVHPNAAGIDVGNKSHFVGIKPGSCEQPVQEFGSWTADLKRMVAWLKLHGVKTVAMQSTGVYWIALYEVLEQAGLEVYLVNARGTKNLPGRKSDVQECQWLRKLHTYGLLRNSFRPPEEIRAVRTLWRLRERHVREAGRAIEQMQKALTTMNVQLANAISDLSGATGLAIIRAILAGERDPQQLAKLRDRRVEASEEEIAHSLEGNWRDDVLFELQQVLDGYDFLGRQIAGCDVELQKYMAALPSREVGESAPVASTSALEAGPLPQKARAKRKSKNAPSFDLGAELRRITGVDFLSIDGINVMTAQVILSEMGADLGAFPSESHFTAWLGLAPRRDISGAKVIGHKSRRVKNRVANALRMAAEALAHSDSYLGARYRHLRARLGGLKAVKAMARYLACLVYRLLTQGQAWVDRGSAEYERKRQGRELVALQRRASELGLRLVPVQAS

SEQ ID NO: 334040 - protein, 359 aa, unidentified
MTSPKAQRASVVGGVDTHKDLHVAAVVDPQDRVLGTRSFPTTRQGYRLMLAWMRSFGALQRIGIESTGSYGAGLLRYMQAAGVDVLEVTAPDKQDRRRRGKNDDFDAESAAHAAFAERRTVTPRSRDGMVESLRVLKVCRKTSVQARRIALQLIQNTIVCAPDRLRDPLRNMTRMQLIRTLAAWRPDLTAYRDIEEAYRIALKSLARRYLELHDEIADLDAMIAAIVKELAPELIARPSIGLASAAQLLLTAGDNPERLKSEASFAALCGVSPVPASSGKTVRHRLNRGGDRAANSALHIIAIGRLRLDPRTQDYVARRIAAGHSKLEAIRSLKRYIAREVYAIIRRRHREINQTQIAA

SEQ ID NO: 334041 - protein, 340 aa, unidentified
MDQYVGLDVSLKETAVCVIDAAGTRVWQGVCPSSPEALAKVVRARAPHATRIALETGPLAVWHWHELRKAGLPVVCLHARHAQAALSLQINKTDANDAYGLAQIVRAGWYREVDLKSMDSYRLRLLLAARNRLVTIRTSLYNQIRGLLKTFGVVLPAGKGGRFERSVLGQLPTDEAVRLVIESLLNTWRSLTAELKKFDLAIERTARANPVCRRLMTVPGVGPVTAVAYVATIDDPMRFRHSKDVGAYLGLTPRRYQSGDVDRAGRISKSGDTMLRSLLFEAAHILLTRLRQPSTIRAWGVRLIQRVGPRKAKVAVARKLAVIMHRLWVENTVFSPAPTL

SEQ ID NO: 334042 - protein, 392 aa, unidentified
MNALHVAVDVGSRFHQVAIGDDRGRLLDEFQIDHGQAGFKRFFARIACHAASDIRVAMEGYNGWARPLDQQVLARGWRLYNVNNLKLARYKEIFPAPAKSDSIDTRRMLELFAFDEQRPLGRDVLQEVTVSTKAQRQLKYLTRRRRQQVADRATRLTRLRVDLLAVCPDLLALTRAVDNLWFLRLLTCRDRLTALPRLHVKTITSIRGIGAKTWPRIRAWQKSATFGSNIDLADADIVADAAAILTLNEQIKALNMRIEATARTCPMTCRLRTVPGFGVTGTAELSGEIGTLDRFDTEASLALYLGMAPLDHSSGLQHRGKRPKCVNSRCQAAMMTCIVRHMACVTESRVYYERKRAQGKRHNQAVRALGRHLVRVIWRMLKDERDYQMKSD

SEQ ID NO: 334043 - protein, 316 aa, unidentified
MAKSVAKITLGVDVAKDQHVVCNWQTEETFSIPNQRSEIKTWLKSFHGPVQIAIEPTSHYHLAVVEEAQALGYEVFLINPRQLVHYREAINLRHKTDVLDAQLLARYLQHEGSQLRPFQPQDPRAQRLWALVLRRATVVQSRQQLQQSFRELNLSIQGLLTQFKHLLERIERQMITLVRELGWWSDYRRCQSIPGIGLANAAALTAAYHRGAFAGSDAFVAYMGLDVRIRESGKYQGKRKLTKRGEAELRRLLYCAGKPAQTCQRFADYHQKLLDQGMCKIAARVALGRKLARIAFTLMSRQQFFNKPEEIYCTSP

SEQ ID NO: 334044 - protein, 350 aa, unidentified
MLAELVDHVIGVDPDRDTITVAAVDARTSGVLGTDRFPATRSGYSDAMSWADTHSSGSERAWVIEGTASYGRGLTMALQSNDEFVVDFDRPMRKASKDGTKTDALDAIRAAREALGRDKLNAPRASDGLREAIRVHTVARAAAVRARTAAVNELKAFIVTASEGLRSELRGLSTVKIVTRCSRFRATSSRPIAERCTRNAMRALARRVQFLDAEIADHDKVLKELVDEAAPQLIAERGVGYVTAAAFYLAWSHPGRCRSEAAYARLAGAAPIEVTSGQNQDRHRLCRGGDRQLNRALHLVAVTRLRCCPETKEYMVRRTSEGKTHRETTRCLKRYIARSVWRLLEHPNQT

SEQ ID NO: 334045 - protein, 370 aa, unidentified
MAKSTPLFVGLDVHKDSIAVAHATGGRSDPPVFVGEIGTRQADLDRLIRRLQGKASALRFVYEAGPSGYGLYRYLTKKGWPCDVVAPSLIPRRPGDKVKTDRRDAVELARLSRSGDLTAVYVPTVEDEAIRDLCRARDATRVTLKDAKLRLKAFLLRVGLHYVGRADWNAAHKRYLAKVVCPTPAQQIVFQEGVRAVDEQVDRLQRIEAELQELAPQWRRYPVVEALQALRGVQWVVALTVVAELGDLTRFDNPRQLAAFVGLVPSEYSSGTARRQGGITKDGNGRARRVLVEAAWAYRHPAKVSLHIQQRIDQLPKVLQDLGWQAQVRLCKRYRRLIARGKHPNVVVTAIARELIAFMWAIARAMPTRA

SEQ ID NO: 334046 - protein, 348 aa, unidentified
MMTPFETAAPPPPQMEETAIALVDQTGRIVREGKVASEIEAIDGWLNRHRDGMARIGLEAGPLSSWLYAGLKERGWPVICIETRRLRAVTRAMPVKSDRKDAEAIAQVMRTGWYRPVHVKSLASQQLRMLLRHRKVLQAKRLDIENELRGTLKAFGLKPGAVTPSTWAARVRELVGDEPWLERLARPMLAARQALIASFAELHALMLKIVKDDPICRRFMTVPGIGAVNALAFKTGVDDPGRFRHSADLGPHFGLTPRRYQSGETERIGPISKCGDAMVRSLLFEAALILLYRVKKTSALQRWARALAKRIGARKAAVALARRLAVVLHRMWVDGTDFNPDPVRVAAR

SEQ ID NO: 334047 - protein, 338 aa, unidentified
MKVYAGIDLHSSNNYIGIINEKDQRLYQKRLPNQLEHILEALEPFKESMEGVVVESTYNWYWLVDGLQAHGYKLHLANPSAVKQYEGLKHTDDKWDSFWLAHMRRLNILPEGYIYPKEERPVRDLLRRRLLFVRHRTSHILSLQSSITRNLGYKMSAGDIKKLKSCDADKLFDNPFLALAAGNSISAIRFLGERIAEIEKTVKSHIQVKPEFEYLLTIPGIGNILGLTIMLEVGDISRFLKVGNYSSYCRCVKAERISNSKKKGQGNRKNGNKYLSWAYVEAANFAIRSYPKFQSFYQRKKAKTNGVVAIKALSNKLARASYYIMRDKVAYDANKMFR

SEQ ID NO: 334048 - protein, 366 aa, unidentified
MNTCEHSKTLFVGVDVHKDTHTAVGLSPFGEKIFEMKIGNEVVDFVSLIEKAQQEARRIGLVASFGLEDVHSWGERLSSFLVEEGLPVRAVAPVLVDHIRQKATHPEKSDSLDAQGVAEVMIRRIDTLHVYTLTEETKKSKQIRELSCEREWLVKERARLKNQLHILLHRIHNTVYRTIFKDPFSKKALRHWMRSIPKATDAILAQRMKREVHRIVDLGEEIIEIEKELAVLIETSGHTLSTASGCGIVIAAEIIGEVGDISRFHVPASLAKYAGCAPREHSSGKTIRWRKTRSGNRRLNRAFHRMALSQISRSGNGAARIYFQRKISEGKSKSQALVCLRRQMVNIVWMMMKHKTEYRVPAEASA

SEQ ID NO: 334049 - protein, 345 aa, unidentified
MKKVVKQVAGIDVAQKELVITLGRMFNDFTIELFSYKVFKNNDSGIKLLVDWVNKLTDHDEPVRYVMEATGVYHQKFAYYLVDNGYEISIVLPNKISNYIRTLELKTVTDKSCSQAISQFGLERKLDKWAKPKSIYKELQQLTRERDQIVQERSMIKNQLHAENVEAIPNQRSLERMQSRIVFLNSQEKEIKQDIAALIKMNPDIKSTIERIKSIPGVGELTAVIVLAETNGFELIRSKSQLSSYAGLDVKEKQSGTSVKGKPRISKKGNRNLRKAVHLPALTAVKWDDNFRNIYARLVSKHGIKMKALVAIQRKILELIYILFKNESVYDKEYITKNSVQTQVV

SEQ ID NO: 334050 - protein, 411 aa, unidentified
MIEQQNLVYVGVDLHKQHHTAVIIDCWSKKLGEIKFDNKPSAFPLLVKEVRKYAKKGLSVVYGLEDVGGYGRGLAVYLKENQCWVKEVNAKLANARRQSHVTVQKSDSWDAECVAKVLRDELERLPDAKPIDLYWAISQLVTQRKWFAKSLTATVKKLHQQISYPYPSYKKFFSEVDGKTALAFWEAYPSPYKLKDLSEEKLAEFLRSHSNNGLSHKKAGQILSLISVDGDTYRDFQDSRDSVVVSQVRSAGFFKKEIARVEVEIEQLMGQLGFQLESMTGIDIVTAAELVAEIGDIHRFPTADKLARFAGIAPVMVGSGNKSRNYKSKQGNRELHDIIKSLAIRQIAVTRTKRVPRNPYFHAYYLQRMSEGKTKQQAIICIMRKLINIIYAMMKKKSAYEMPTIPRVQVG

SEQ ID NO: 334051 - protein, 404 aa, unidentified
MSETRDKVSFCGFLGIDISKRAFDGCCIDSEGKVLFRVSLPMNRAGFEKLVTHVCAISLPQGSILIGMESTACYHVSLFSFLMALGYSVAVINPLLISNFLKLQLRKTKTDKKDAAVIARYLSAQGACLSQTTADARIADLRELSRQRESLLHQMTALKCDIKRVLSITFPELEQTMGIFTRTTLRLLCRFPSARALEQANREELSQLLRHNSRGRNTPVPVDTLLGVARSSVGTASPSREMILRQKASILVHLEEHLQEMTKTVIELCQSTLERDVEILTSIRGIGDKTAATFLIEMGGEIQKFDTHNKLIAMAGLDPSVYQSGQYDGHSRITKRGNRHLRRVIWLMTIRVIQFNDLFKSYYRKRIGDGLPFKKAVLATAHKLIRIIFVLLTRRTMFCYQVTS

SEQ ID NO: 334052 - protein, 450 aa, unidentified
MSPLALDVVTKTGKTPVLGRMLSKYVGRKTSSIENDITKARNHSRQRGKIMRVVFGIDVSKASSEVAILVNGEKIHGYTIPNDAIGFNRLLGDLGTVYQPEIVFEATGVYSRRLQAFFEDNSYAYIRLNPLESKKQLDSLRVRKTDKIDAEKLATSQFILNRKPSYVQEALYQELRDLSRFYQNLTEDIVCSKNRLHKVLQVTFPELENILSSPTGKQYWNLVMAFPCNSFVLELDDAALRAIIRQSTSKRISEKRVTYLVDKLTKLANHSYCAVKKTSPVMEEVKYYAGELLRLSEYRQSVLEEMITLAQPLPEYEILLSIPGIAETTATSIIGELGDIRRFHSANQINAFIGIDLKHYESGDFLAKEHITKRGNPYARKILFKCIHNIASASHTNPCHIADFYEKRKRQSQVTSTKPHTIASIHRLIRTMYYLITHNKLYDYTSTQNR

SEQ ID NO: 334053 - protein, 375 aa, unidentified
MAASVARFTGPIHLGLDVSKDRIAVGILRWDEQVPDVEMIINEEPFVRRLVDRFGDRDQLRVCYEAGPTGFGLYRLLTSMGVACEVVAPALIPKAPADRVKTDRRDCRRLARLHRAGELVAIRVPSPAEEAVRDLCRARADLVDDQTRTRHRLSKFLLRHDRVWRDTAWTHRHEQWLCGQRFDEPALRASYGHYRAVLTARDGELAAIEADLAHWYTHGPFAAAVTRLAAYRGIARLGGLTIASEVGDWRRFPTARTFMGFTGLVPSEYSSGAAVHRGRITKAGNAHLRTQLIESAWAYQHRASLGAVLRRRQDGIDPATAARSWTAQQRLCGRFRRLAARKTSRNIVVVAIARELAGFLWAEMTADHPANPAAS

SEQ ID NO: 334054 - protein, 347 aa, unidentified
MKHYVGLDVSLKEVSICVVDADGVVVAEGKVATEPALIVSWIGERIGAVERIVHESGPLSIWLTRELTGRGAPVVCIDARAAHKVLSARMNKSDRADAEGLAQLARTGWYREVHIKSESSDRLRLLLGARGRMIDIRRDIEAQARGVLKTYGIRLGTVTRGRNRAGFRDQLRAVTSGDPILETVAASLIAVHEVACVETATIEDELLAIARDSELARRLMTVPGVGPIVALNFIATVDDVGRFAKATDVGAYLGLTPRRYQSGEIDYSGRISKRGSGAMRTLLFEAANVLITRVRRFSPLKAWAVRLAARKGFKKAAVAAARKIAVVMLRLRRDGTTFAWTKEALPA

SEQ ID NO: 334055 - protein, 355 aa, unidentified
MEHLQAIVIGGVDCHLEQHHAVALDAHGQRLGDHAFPTTRQGYQHLLTWLQHFGQVQSVGVESTGSYGAGLTRFLLGAGVHVLEVNQVHRSLRRRRGKTDALDAEGAARQVLSGEATGLPKDTTGSVEAIRQLRLVRASAVKARTAALAQLGELIATAPAELREHLTTKPRASVRARVKTCARSRVDLLQLDQPRQAAKLALRSVSRRILALDAEISTFDEHLTNLVRTVAPRTRALLGVGNITAAQLLLTAGQNAQRIHTEAAFAHLCGTAPVPASSGKTNRHRLNIGGDRQANAALYLIAVCRLRYCERTRAYAARRTAEGHSKREILRCLKRYIARELFHALRADLAASAHP

SEQ ID NO: 334056 - protein, 347 aa, unidentified
MKFYNQPHKYYCGVDLHARKMYVCILNHKGKVVVHQNIKTDPELFFELIFPFIEDVVVGVECVFCWYWLADLCADHHIDFVLGHALYMKAIHGGKTKNDKIDSYKIAMLLKGGNFPTAYPYPAKWRASRDLLRRRMYISRRCSELVAHINNTNTQYNLPAFRKKLSRKYNHDGVAERFDDPVVRKSIEVDLEIINALNQTLKKLEWHIEKTARQHDYHTLYLLRSIPGVGQILALVILYEVHDVRRFPRVQDFSSYARLIRPVKESDGKWAGHSNKKIGNHHLKWAVKEAAILMLRDSAEAKYFVSKLERKYNKGKALGIFTHKLGRAIYFMLKNKEAFDMKRFFDK

SEQ ID NO: 334057 - protein, 315 aa, unidentified
MNVVGFDVAKSSLVAARIDRSGIVKEHWELANTKVAVLPLLKILRSKYKHLVIASEATGEYHRPLAESCLELSIAFRLLNPLTVKQYVRATVRKRKTDLTDAEAIARVALQGQGTLLTKASLSLTKPMLRTSISLTQMSQMCNLMGQHVLALAPEETELNTELAQCNERLRQAAEVYRSYAARHIDSGTKDLITSIPGIAEKLATGILVEIGDITRFKGPKQLIAYAGLDPRILQSGKTLNRYGHLTKRGSKQLRRALFIAASVAKRCDPSFRAVYDKKRAEGKRYTEATIVVARKLVRVIYTVLINGKPYEPIT

SEQ ID NO: 334058 - protein, 320 aa, unidentified
MTSRGAEKMKNDTIGVDVSKDHLDAHRLADGAIRRFANNKGGHKALIKWLAETPLYRVVFEPTGPYHRAVERALGASGVPFVKVNPRQARRFAEATGKLAKTDRLDAAILARMGALLELEARPARSEVLLELKELYVAREALVKDRTAAKNRGKALTLSLLKRQNAQRLEQIDRQIATVEAAILQIVEADASLADRFDILTSIPGVSSITAFALMIAMPELGDLEAGQAANLAGLAPIARQSGRWTGRSFIRGGRADVRQALYMPALVAARFNPDMKAKYAHLIQTGKPAKVALTAIMRKLVVLANALLKANRPWTPRTA

SEQ ID NO: 334059 - protein, 477 aa, unidentified
MARTSALNRKQRKALARQLRSDDPGLEVMHPHAAGIDVGNSAHYVAVRPDRDPNSVRRFECFTADLHRLADWLQQCGVTTVAMQSTGVYWIPLYEILDARGLEVYLVNARHTRNLPGRKSDVQESQWLLKRHTYGLLRNSFHPPADIRVVRTFWRQRGDHVQAVSTCIQRMQKALTQMNIQLANVISDLSGWTGQRIVRAILDGERDPQKLATLRHPGIHATQDTIAKSLEGTWQPDLLFVLQQEVAMYDAYQQRIVECDQQLEQHLKQFADKAADTVPADEPSPTTSHARLRSGPKRRRKAGSHTPQFDLGHELHRISGVDLTRIDGIDVGVAQTLISEVGLDMTRWKSEAHFASWLGLCPDNRISGDRVLRRGTRHVVNRAATALRLAATTLLRSQSYLGAQYRRLRARLGAPKAITAMAHKLARLVYRMLTWGQEYVDKGLQYYEDRHREQQVQLLKKKAAKLGLQIAEPTAAA

SEQ ID NO: 334060 - protein, 386 aa, unidentified
MATAKGAFDVTMIGAQRPDSTEVETILGVDTHLDFHVAVAIDHLGRRLGELSVPTTAKGYERLLRWAEGFGPVRCVGVEGTSSYGAGLARHLRAKWIEVLEVERPEHRRRSSRGNHEKSDPSDAEAAARTVLAGEASGVPKSADGRVEMIRTLRAARRSAIKARTQAANQLQALCVTAPEELRNRLRGLSTKKLVCVAARFRLAGDPHDVPTATKFTLRSVARRYEALSEEISELEAHLERLVAEAAPELVSLSGIGTDSAATLLVVAGDNPQRLGSEASFASLCGVSPIEASSGKVVRHRLNRGGNREANRALYMICLARMRRDQRTQEYVSRRTQEGKSKREIIRCLKRYVAREVYRVLATYGGRFSPTVPMDEAQIGAGANAA

SEQ ID NO: 334061 - protein, 326 aa, unidentified
MSKKKLDLCLRSNGKGILYDVIPNDLSSIKSWLTRTFEKFFLSEDSLVVCAEHTGQYTYPLVCATKSIGVYLCLEDAAKIKYCHGIPRGKNDKIDACRIAMYAERYNDCLQPYTASELIIQKLKNLSTERSMLVADRAKYQSQLKDQVDYMEHSIYIAKCNRVEGIINTFTDYIAQIDLEIKELINQAPVIAHQMDLLMSVDGVGERVALKMIMETDAFTSFTDPRKFCCHAGVVPFVYVSGSSQRSKNRVSNRADKSIKHLLHMAALSVSQVKNSPLKKYYDRKVEEGKNKMSVLNAVRAKLVTIMFAVIRTDAFFSRNYQNSLA

SEQ ID NO: 334062 - protein, 304 aa, unidentified
MFGIGIDVSKATLDVAVHGEQFRQFSNDQRGFVRLIRWLKTWPIKQVVLEASGGYERAALDVLHAAGLPMVRINPARARRFAQGTGRAAKTDRLDATVLAQMAHLLPLTRYVPPAPWQQRLAEFAQCRRQLVQMRVSEMQRLRRLVDPDLIAMKQRHIAQLSDDLKQLDKAIAEQLEGQPGWKNIGALKGVGPILISTLACELPELGSLGSKAIASLVGLAPMNRESGTWQGQRRISGGRAVVREALYMAALTAIRYEPRLRAFYAGLKAKGKASKVALVAVMRKMLVILNARKRDAEVALGCP

SEQ ID NO: 334063 - protein, 388 aa, unidentified
MIYAGIDIAKLNHFASVLSSDGEVLVEPFQFSNDLEGFRSLSRVLDQYERDQLLVGLESTAHYGNNLVEFLVAKGYRFCVLNPIQTSSMRKNNIRKVKTDKVDTFVIAKTLMQDEHRLFEKQDLDFLHLKNLGRSRQDLMKKRTTCKIKLTSYVDQAFPELQYFFNGVHHKSVYALLKEAQTPSQIASMHMTHLTHLLDTASHGHFKKAKAQELRVLAQRSVGSNDSSISIQITQTIEQIELLDRQIHDDEAKIEEIVRAMDSVIMTIPGIRYVEAGMILGEIGDIHRFPSYSKLLAFAGLDPTVRQSGKFSASRTRMSKRGSRVLRYALIYSAHNVVKNNETFRKYYDLKCAQGRGHYAALGHCAGKLVRIIYKLLSEDIPFDPDRL

SEQ ID NO: 334064 - protein, 389 aa, unidentified
MSQLFEASRSLTAIEQDSTIIAVIEMSEAKWLVAAIVPGIERQPLKRLDADEAMLLKLLYRWRREAGQAGRQIKRIAVAYEAGRDGFWLARWLRVRSVEAYVMHPASIAVSREHRRVKTDRLDTELLMRAFLGWLRGEKRHCSMVAIPTEQEEDARRPNRERSNLVTEQTRIVNQIKAMLVRFGIRTFRPTLRKADEKLEGLRTAEGARLLENTRAELRRHLARLGVVREQIHAIEQGRVRKLAAAPGDQKGPHAMVRLIARVLGVGVETADMLVNEVLSRHLRDRKAVARYAGLTGSPDESGRRRRERGLARAGNPRVRCGMIQLAWRFLRFQKDSALAQWFHARTADGRGSTRKTMIVALARKLLIALWRLAATGEVSDGIVLRPAS

SEQ ID NO: 334065 - protein, 347 aa, unidentified
MRFYTKQHKFYCGIDLHAKKMYLCILDESGEIRLHRNIKTARDVFVKVIEPYREDIVVAVECMFTWYWIADLCTEEQIPFVLGHALYMKAIHGGKAKNDKIDSHKIAVLLRGGMIPQSYVYPARMRATRDLLRRRNHLMRKRAELYAHIQNTRSQYNLADFLGRIAKAQNREGVVEHFEDTSVQKMIAADLAVITAYDPIIAQMERDIIRTANQHDPVAYALLKTIPGIGRILGLVILYEIENIKRFPTVQDFASYCRLVKCAKESNGKRHGSSGKKIGNAHLKWAFSEAAALFLKGNEQGKRYLDRLTSKHRKGKALSILAHKMGRAVYFMLKNKEPFDQKKFLGL

SEQ ID NO: 334066 - protein, 315 aa, unidentified
MEDSQVFVGIDVSQSCLDVAARPTGEVWQVPNDADGISDLAQRLVGMSPFLVVLEATGGLEWALTAELAAAGLPVAVVNPRHVRDFARAVGILAKTDILDAQVLARFGQAMEPEPRPLPDAEAKDLQAMVSRRRQLVEMITAEKNRPRTVIARIRPQVEEHIRWLEKSLTDLDQDLDGFIRSSPMWRTKERVIRSVPGVGPVLSATLLANLPELGELSRGQIAALAGVAPFNRDSGTLKGKRTVWGGRRRVRAALYMAALVASRYNPVIKDFYQRLCSLGKPKKVALTACMRELLVILNSMARHGREWQPNLQAP

SEQ ID NO: 334067 - protein, 430 aa, unidentified
MIAAEIERCAGIDVGKERLAVCIMVGPLAGEPRVEYREFGAINAELERLRQWLEAEGVTHVVMESTGSYWKPVFNMLEDKVRVYLARSQDVKNRKGHKTDKKDSWWLAHLLRHAMIRPSFVPPRGLRELRDLTRRRRKMIGVASSERNRVDKVLQDANIKLSNALSDIFGVSGQLMLEALLEGKAMPEQIAQFAQRSAKRKIPEIIGALEGHRMNDHHRQMIRYSLEHLRFLEEHIIELDEQIVAKIQKLGYVPQWELLQTVPGMKENSSASVLAEIGPDMGQFPSEKNLSSWAGVCPGNNRSAGKDKGGKTTKGNRWLRGALTECAWGVSGKKNCFLKDKFWRLATKKKRRPPATMAIAHTLLVLSYQVLKTGQPYQERGLPVMDEKQRNRLVCHHVRRLGKLGIRVHSLPIDKDRTTPKSKKTAAKVN

SEQ ID NO: 334068 - protein, 404 aa, unidentified
MSENYAVFVGLDVGKSAHHACALAKDGSRLYDKPLVQDEVALRKVFVELQQHGPVLMIVDQPNTIGALPIAVARDCGCEVAYLPGLAMRKAADLYPGRSKTDARDAFIIADTARTMPHTLRAVDRDSEVLSALKMLAGFDDDIARDCTRAKNRLRSVLTQIHPAFERVLVGEILARAIVLDLLIHYGGPTKLAAAGRGRVLKWARNRSRKDPVELIDRIFAALAEQTVTVPGTDAAELVIPQLAANIKALQQQRETIAGQVEGMLDEFPLAEVLISMPGIGIKTASNILLAVGDCSDFASASHLAAYAGIAPVTRRSGTSIKGEFPARSGNKRLKNAMFRSAWIASNCHGPSQAYYQRKRAEGKKHNAAVMCLARRRSNVIYAMLTNREFYREPPAPNDVAAAA

SEQ ID NO: 334069 - protein, 375 aa, unidentified
MKKVRFLGLDVHAETIAVSVAEIDGEVRSLGIIANRQESIRKLIKKLGPAEQLQACYEAGPTGYVLYWQLTALGVKCDVVAPSLVPVKAGDRVKTDRRDASKLARSYRAGDLTPVWVPDEEHEALRDLVRAREAAKQDQLRARHRLSKFLLRHGRRAPSGVKVWTQKHLDWIKEQVHFKQPAQEYTLLDYWHEVEHVTARIRRLEQAIEEAVKLAPARMQEVIQALQALRGIAQISAVTIVAELGEISRFERPRQLMGYSGAVSSEHSSGKRIIRGQITKTGNAHLRRIVIEAAWSYRHRPSHGWALRKRQKDLSEEVKEIAWKAQHRLHQRYRKLLAAGKDKQKVVTAIGRELLGFIWTIGIQVERNNQQSRVA

SEQ ID NO: 334070 - protein, 332 aa, unidentified
MKLKKEIIGIDVSKLTLDVFILSLKHHFIVSNNPAGFSKLLQVIWKELPDKKGNLFFCFEDTGRYSLPLCIFLNGEKLSFAMVPALDIKRSMGMVRGKSDKKDASVIALYAWRKRDEIKPTVFPAGSIVRIKQLLSLRNKLVKHKKAYQTGMCDIQDYFKEGDSQFYLDVNKRVIKSLCSEIASIEKEIETIIKSDPEVQNNYKILKTVPGIGKIIAFYMIAYTHNFTKFENARKFCCYCGIAPFENSSGTSLKGRTKVNHLANKMIKALLNMGALSVIQNYPEFKSYYNQRVEKGHNKMSTVNIILNKIVFRAFSVIKRVSPYINLHKFAA

SEQ ID NO: 334071 - protein, 322 aa, unidentified
MAMLSFCGIDVSKDRLDVVVLPEQQCSSVRNDTAGWAELVEQLRGFSIATIGLEASGGYERGVLRALLAAGMSVRQINPFKLRQFAKASGVLAKNDRLDARMIASFVAIMPTRPAQRHAPAIEQLAEIVTLRRHLSDEKIAAENASRLLENAMLQRLSRRRIVRLAADIAQLDEHLVEIVAADAALAHRYRLLTSMPGVGPVLACTLIALLPELGQLSREKIAALVGVAPYDFDSGKLKGMRCIWGGRAPVRNVLYMAALNASNWNPALKAFHDRLAATGKKPKVVIVAVMRKMITALNAMLRHNTSWVDRCSDRHSVPTAR

SEQ ID NO: 334072 - protein, 361 aa, unidentified
MRIIGCDLHARQQTLAMLDTITGEIVNRTLMHEGNQVREFYSELPRPVLVGIEAIGPMQWFLNLLEELGIECQVGDAAKIRAAEPRKQKHDRRDAELILKLLVEKRFPAIWMPSRELLDLRVLLLHRHQWVRLRTQVQNALQAIALANGLRRGPSLWSYDGLAKIAFLPLPPHTSLRRSALQALYRHMDEEIEKLTVQVAEQAEQRPGVQLLMTHPGVGPVTALATDVFLGDPQRFDDGKSLASYVGLIPQERSSGRRRRLGKISKQGNPLLRFLWNEAGAHAARRDPQLKRFYRRKLVQKGMGKARVAVARKLGIRLWIMLRDQIDYQEFCRRGQKQQSGAACAGMPEVRFGAHRHRPVD

SEQ ID NO: 334073 - protein, 341 aa, unidentified
MQITTIGLDIAKNVFQVHGIDAAEKVVVRKQLRRGQVMKFFAALPPCLVGMEACATAHYWARELTKLGHEVRLMPAKDVKAYVKRNKNDAADAEAICEAVRRPTMRFVQVKSAEQQGRLMQHRTRDLLLRQQTQVINALRAHLAELGIVAAQGREGLKQLLTIIADEKEARLPIDARASLIVLAAQVQALHTIIGSIEKRLMVQHRANEASKRLESIPGIGLIGASAIAATITDPNAFRSGRDFAAWIGLVPRQDSTGGKQKLGPISRQGDRYLRRLLVVGAHAVLRRAKQSPQKYPRLAQLLARRPFKVVAIALANKMARVAWALLAKGGTYQAPVLAAA

SEQ ID NO: 334074 - protein, 314 aa, unidentified
MNEKRVVGIDVSKAVLDVAVLPGGELLQLGNDVQGIEELSKKLKAEAVDLVVMEATGGYETAVATALVAIGLRVAVVNPRQIRDFAKATGRLAKNDRIDAQVIAAFGQAIEPEIVHLPDEETRELQSLVVRRRQLVAMRVQEVNRLGLMQGVMRKRIKAHVDWLDNEIAKVDVDLTAGLRKSPAWRAKDELLRSFKGVGRITSSTLIVALPELGQLDRRAITALVGLAPFNRDSGVMRGRRSIYGGRSQVRTLLYMAAISAIRCNPVIRAFYEGLKSRGKPHKVAMVACMRKILTILNAMVRQSTPWTPETKPV

SEQ ID NO: 334075 - protein, 367 aa, unidentified
MSSVASAAGLIHLGMDTSKNTIMVATLLPGEENPVTDRIANEEAAVRRLVGRFTDRSVLRAWYEAGPGGYELYRLLASMGVACQVVAPSLIPRGGSDKVKTDRRDSRRLARLGRAGELTPVRVPSPAEEAVRDLVRARGAVMEDRKRAQQRLTAVLMRHGRVWRGASYWTAAHRSWIAAQRYGEPALASAISYYRATLAVREAELAAVDAELAPWAAREPLAPAVARLGCYRGIAELGGLTLAAEVVDWRRFPAARAFMSYTGLVPAEYSSGERTRRGHITKAGSEPVRTALTEAAWSCRHAPAIGAGLRRRQAGASPDTLARSWTAQRRLHARYVHLVHDGGKAAPEAAVAVARELAGFIWAEMTA

SEQ ID NO: 334076 - protein, 394 aa, unidentified
MNNVYRKVAAIGMDVHAKFTTVAMRDADGKVVRRERLDHADRSALREHLAGWPAEASVVLEASFGWMWLAELMDAVGLTPQLSNCYKLHQLRKARGWVKTNKKDADLLSLLPFETDRWWQVWLAPPAVRDRREWMRYRASLVAVQTATKQRITALLHRFGILHRFSDVFGAGGRRWLRVIVAAEGTEQVQLSTGAVAALRGHLALLDHVRSELAAITRALRAELPCSELADRLATIPGVGLILAHVLIAEIGRIERFRNHRALASYSLLAPRADESGEQETTTAPLGRHLGCRGNRTLKWTFIEAAHAAVRHGGQWRRRFDAVTDGGRRDRNRGTIKVARELVKVVYIVWSRGVEYSETPPPRPGRSARRRVTNQRTDSRSGTGQPLDPMAVVR

SEQ ID NO: 334077 - protein, 317 aa, unidentified
MSALPIFVGVDVAKTELVTGLRPTGETWTVSNDETGIQELLQRLRPHRPMLVVIEATGGYERGVLAALAAAGIPLVVANPRQVRDFARSTGQLAKTDRIDAQILALFAERVRPEPRPLPDEATRMLTALLARRRQILEMLTAERNRLEHAVPPVRRDLLQHIRWLERRLRDVDHDLDRTVQSSPIWRAKENLLRSLPGVGPVTSRTLLGSLPELGALNRKQIAALVGVAPLARDSGTLKGKRLVWGGRAPVRAALYMAALVASRRNPALRAFYTRLVAAGKPKKLALTACMRKLLTILNAMVKTNSAWQRIHHPKRA

SEQ ID NO: 334078 - protein, 384 aa, unidentified
MNKHSMIFIGLDTHKEFHEVAYCEEQRGAKPVHYGRIPSSKISVKKLLRQFESKYPDATLHVVYEAGPCGYWIYRLITSLGHCCYVVAPSLIPKKPGERIKTDRRDALKLVRSLKSEELTPIYVPEPEDEAVRDLSRAREAAMKDLKEAKYQLKALLLRNNIRYEGTTNWLKKHLRWLTELILPHPAQQIVLQEQLQTIEERIRRLERLDNELTHHVHQWCYYPVVKAVQAMRGVRLLVAVGVVAELGDLHRFDHPRKLMAYLGLVPSEQSSGGKRHLGAITKAGNGRARCLLIEGAHSYRYPANVSTELQLRQEGLPKDIIDIAWKAQLRLCKRYQRMSKKGTHYNLIITAIAREMAAYIWAIAKEVVLTPVNPKLRLSRVPA

SEQ ID NO: 334079 - protein, 376 aa, unidentified
MQAVQTQGYEVGTVLYMAMELSNRSWKLAFSNGERMRRRSLPARDRVQLLEEVALAKQRLGMVAEARVMVCFEAGRDGHWIYHWLTAEGFEVREIDSSSIETARGRKHVKTDRVDVVKLLDLLLRYAHGYRRAFSVVRVPSRAAEAAQRLHREDEYLLRQRSRVSNRIQGLLVVQGVTEAPLRGDFAGWLQRVQLWDGAGLSPALQAELLRLYRQYELLDAQLAELCAAYTEELAGASPVARKRQRLEQLKSIGPKSSRVLAAELFSWRVFRNGKQVGGMAGLTPTPSRSGEVEREQGISKAGNRRVRRVMIELAWLWLQWQPDSALSQWFRRRFAGGGKRLRRVGIVALARKLLIALWRYVEWGVLPEGAVLKAA

SEQ ID NO: 334080 - protein, 375 aa, unidentified
MKEKLRFLGLDVHAETIAVAVADPDGEVRSLGTIPNRGESIRKMIKKLGPAEKLRACYEAGPTGYVVYWQLAELGIQCEVVAPTLVPVKVGDRVKTDRRDAEKLARCYRSGDLTAVWVPDEGSEALRDLVRAREAAKQDQMRARHRLSKFLLRSGQRPPTGVRPWTRPYLIWVAQLRFTQVAQEATRQDYLHEVEHMRERVARLEQAIMEAVKLASPALQQVINDLQALRGIADISAVTIAAELGQVSRFGSARQLMGYCGAVPSEDSSGKRIRRGSITKTGNAHLRRIVGEAAWSYRRPPGIWYGLRRRQESISEEVKEIAWKAQHRLHKRYMKLGAAGKPQGKIITAVARELLGFIWAIGTRAETTVSQRAAA

SEQ ID NO: 334081 - protein, 352 aa, unidentified
MNSDSNPVTGHSAGIDLHKGPLRLHVIDAAGTAVYQETITEHKRARLRAALRRYGKDVTVGLESTYNWYWVIDLLEAEGIPYHLGHACDIHAQRPGKHKSDPKDAAAMSQMIRMQTFPQVYACPLAWRSTRDLLRKRLRLVEERTRHALHVGCVADQYLLAEEPPAVAGYPAAVIADVDKVIAIDCQMQEVLTKMIVGLEEWLIARAEIHDRQWYQLLTGTRGIGPILGLTLMYEVVDIRRFRGPQQFSSYSRVVNPQCESAGKTRPGGNRRRGNPYLCRALNMIALQSINHQPGVGAWYKALVRRKGRSTARRILAHKWALAIYYMSKRREPFDLDKFLGTAHGQRAQSSH

SEQ ID NO: 334082 - protein, 428 aa, unidentified
MTHPPPNAVTSMEHAEERRICDAGRFIGLDVHKHYLVVVGVDAELNVVLPAQRVDFARLETWMKKTLTKQDEVVLEMTTNTWELYNELSGYVGSVTVVHPPHVALITRSQVMNDKIAASILARLLAKGLLVGIWVPPQEVRELRALVAQRSKMTRLATQAKNRLHALLQRHHWAPPEGNPFHSDQSEWWQALPVSRLEKLNLQNDLDTLGFAVTQLARLTSMMKEIAAKDEQVTRLIHLPGFGVVVAVTVWAAIGDIERFADPKHLVGYAGLGATIHESGLTSRTGRITKAGRKDLRTTLVEAAQIAANTHPHWKAELARLEPRLGRNKAIVAIARKLLIAVWYVLAQQAADRFAEPEIVARKLMKLAYQIGKHNRPAGQSGAQFVRQHLDALHLGTDLSAISWNSKKPIIMPPSALQENQVSDVPDT

SEQ ID NO: 334083 - protein, 320 aa, unidentified
MAMTVSQSIIGVDVAKAEVVVHQSETDELRIVRNNKTALKEWLKSLPAGSAIAIEATNIYHLDTVNLAYSMGHKVYVVDGYRLSHYRKSTGGRAKTDASDARLLSRYLTNEQAHLRAWSPPPKIYTVLQSLLRRRAALVKMRVALNQSWAGEPLLKASSKNISACLDRHEALIEKRLLEAVTKAGLLHQVKRCQAVEGIGFLTAVGLTMAFQRGEFENADAYIAFLGMDLRVSESGQMSGRRSLSKQGDSEIRRLLHNAASAGIKSKAWKYLYEGYLARGLKTTQALVIIARKLARIAFSLMKNLSEYQSKAVLEASPKP

SEQ ID NO: 334084 - protein, 500 aa, unidentified
MKTKRSKGKIRVGQKRRSAICSKPEQKLEVLRPDAAGIDCGAEEHYIAVPPDRVGAGEPTVRCFSAFTEGLDAAVDWLKDCRITTVAMESTGVYWIPLHQKLEAAGIEVYLVNARHVRHVPGRKTDVQDSQWLRQLHRFGLLNASFRPQDIVCRLRSLHRHRDNLVSSSGSEIQHMQKALQQMNLHLHHVVSDITGLTGLRIIDAILSGQRDPEQLVKLRDKRVYKSTPRQMQAALVGDYRAEHLFVLSQSLQAYRFYQARIEECDREIEPLLEKLALQVEAASAKLELGALKPASAKDEATTPELSNESKPGCGLKAKRKRKPIANEPKIDLAGLLERICGIDLTKVVGLNVLNVLLIVSEIGVDMSKWRSAKAFCSWLGLCPGNKISGGKVLDSRTRQVVNRVADALRLAAQSVGRTETCLGIFYRRKLAHLGAPKATTATARKLACLIYHLLKYKQPYQEPDPAIYQLRLQKSALAKLQRQATALGYTLQPTSPLPA

SEQ ID NO: 334085 - protein, 419 aa, unidentified
MSRPQVIDDEEHERVHDRVAAIDVAKDTGMVCTRTPHPSRPGARRSTVWTVKARMNAVRALGRQLKHDGIEIVTLESTSDYWRIWFFVLEACGLAVQLVHAAQAKNLPGRPKTDKLDAMWLARLTEMGLLRASFVPPKAIRDLRDYTRMRTRLTQERTRCWQRLEKLLESALVKVSSVASKLTTVSAQDMIKAMIAGQRDPHQLAALARGSMKAKHDDLVEALHGMFDDHHGELAALLLDQIGSLDGKIAQLGARAAELAAAMPAAWGVNADGTTGPGGGGGPGAPVLNAVARLAQIPGISPGLAQSIIAETGLDMGRFPTAGHLVSWAGLCPSARQSGPRTRASKKGQGDTWLRGSLGQAAIGAARTTTFLGERYHRIARRRGKAKAQVAIARSILVIISLDYLAVSDLTVTLGYADS

SEQ ID NO: 334086 - protein, 474 aa, unidentified
MGNAKKHIRGSKGSQLSSQLRGIPFEQILVVAIDASKYLPKALVCNYFGEILEDSFFFTVNSDGFNLLVEKIEHHRRHCNAEKIIIGIEPTGQYQEHVVRFLEDQGYNVSLVNAYTTYEERASTLNWSKTDDRDLRAIISALLASKTTETKLPDEIYEKLQAITRAYRNEVEQLANIKAKIRQLMYMIWPGFQGSFNGKPATFDKIFSDFWGKTPVMLMENYPHPQQVLHLGKEGLQEFSRQHNLKMRTTTIEKLLEAARLATSRSPEALDVYTLQISMKLQQLKQQEQIILALKHKVEEFFVQTPGILLLSVPEIGVVTAATLTAEIGPIERYSSAGQIIKRAGTDSLISQSGGHEAKYRKISKQGNSHLRSAVYMAGFSLATGRTNPYFREYAKRLQDAGKKKRQIFIATGNKFLRIAFAMLRNRTVFCPPTWDAEPLAVGILGKIVSEGNRQIASDTLESLAQETIRKRPA

SEQ ID NO: 334087 - protein, 479 aa, unidentified
MRIIAPLRLRAIVLLFASKEKALSKRTKKSKFQKFNVQSLPEHLRHINLNAAGIDIGSERHMVAVPEGRDEVSVREFGAFTADLQALADWLQQCGVTTVAMESTGVYWIPLFELLERRGFEVKLVDARHVKNVSGRKSDVLDCQWIQQLHTYGLLAGAFRPTDELCVLRSYLRQREMLTQSSSMHIQHMQKALQQMNLLLHNVVSDITGVTGMKIIKAILAGERDPRMLARNRDRRCQNSSATIAKSLVGNYREEHLFALKQAVDLYETYQAKIADCDQAIIKQVEKQPDITDDTLPPSEKLIQARERIRSGVDVRELLFKKSGVDLFATPGLAADTLLTLSSEVGFDMSPWKTIKHFTSWLGVCPGTKISGGKVLNKKTKRNPNRATQAFRMAAATQARSKTALGAFYRRIKSRSGGKQAITATAHKIARIYYTLLTKGTAYVELGQQAYEDKYKERRIHHLIAQAKSLGLQLVPCAT

SEQ ID NO: 334088 - protein, 337 aa, unidentified
MMYCGIDLHSNNSVVAIIDDADCIVAQKRLPNDITKIVGFLARWQDELAGVVVESTYNWYWLVDGLQDAGLHVHLANTAAIKQYEGLKHSGDEADAQHLAHLLRLGILPTGTILPREHRAVRDLARKRMQLVQCCTTQVLAVENIMARQLGGRMTSNQVKRLTADAIDSMPLAADVGLAMKANVAVIATLQSQIDLLEKRLQERVKPRPQYGFLTSVPGIGQTLATVILLETGPIDRFADVGNFASYARCVDSVHTSNRKKKGEGNVKNGNKYLAWAFVEAANFAVRFCPEAKRFHERKKAKTNNIVATKALAHKLARACYHILKEGKPFDVTRCFA

SEQ ID NO: 334089 - protein, 316 aa, unidentified
MKHFIIFCGLDVHKDSITIALADGDRNEEIRSQGTISGDMASLDNAIRKFRRSGVELHFVYEAGPCGYEIYRHLTAQGFHCEVIAPSMTPKRSGDRIKTDRRDAITLARLYRAGELTPVYVPREDDEAMRDLVRGRDDAIKATRHARQRLSAFVLRHGFRYSGGTSWRVAHLRWLADIKMPHPAQQITLQEDIHSVEECTERIDRLTEQISKLLPTWRMAPVVTAFQSLRGVAPVVATVMVVEIGDLRRFENPRQLMAYLGLVPSENSSGQTTKRGGITKTGNGHARRVLIEAAQTAFPPESAEHFGNVKRAFRVR

SEQ ID NO: 334090 - protein, 432 aa, unidentified
MNPFSVSPEPSPVAAWVGLDWADQQHVICLYEVATGQRTVSRLEQKPEALQDWLSQLRQRFGGSPVAIVLEQARGAVIYALLSADFVRLYPVNPQSLASYRKAYAPSGAKSDPADAVLLMEMVRNSPERFRAWKPDDADTRSLQLLTQNRRQLVDQKTALTHQLTSLLKTYYPQALELPGVLDSLQACDFLTQWPTLEALQHARPGQIRQLYREHGHPSPEQLDRRLEQIREARPLTTDPAALLSGSMMVQALVQQLRPLLGAIERFDRQIAVLFRKHPDRPLFDSLPGAGAVLAPRLVAAFGTDRDRFQSAQQAQQLFGIAPVTEQSGRQRWVHWRWACPKFLRQTFHEFAGHSRHWCGWAKALYHRLRRCGKGHHAALRVLAFKWIRILFHCWKTRTGYDEQIYLKSLQKRNPTLWAEIQLLPPRKKKVA

SEQ ID NO: 334091 - protein, 321 aa, unidentified
MSAALGIDIAKKKFDVALLRDGKFRAKVFDNSPAGFAALKNWLASLGVAKVHACMEATGILFEGLATFLADEGHEVSVTNPLQIKAFGESLLSRTKTDKADARLIARFCDTMKPMFWQPDAPEIRQLKALGRRRDALIAMRTQETNRDLSAHNRVQESIRTVVSVLDQEIDDISRQIKDHINNHPDLKNKSDLLRSIPGVGDVSIEAILSETNGFANFSKVEQVVAYMGLSPKEKSSGSSVRGKASVCKTGNRRLRKILYMPALVAMQHNPMVKELAQRLKQKAKHGRLIACACMKKLIHIMFGVIKNSLPFNPGYNLKFG

SEQ ID NO: 334092 - protein, 413 aa, unidentified
MSNAVAAAPSEPEWAAFAAIDWADQKNFWRLLPAGGRKSEAGELDSTPEAVEVWAANLQQRFGGRPIAVILEQTRGPLVYMLTKYPHLVLFPVHPTTAARYRETFAPSGAKSDPSDTDSLLDLLLRHRERLRPLRPDTVETRLLHFLVEERRQTVDEKTRANLRLTDCLKLYFPQVLRWFDDVTSPLVGDLLERWPTLEQLQRVHPGTLRRFFHDHNCRSEEKNAERMAAIQQATSSTQDQAVREACVLIAHSLVAMLATLRAQINVFDKRIADLVADHPDGALFRSLPGAGGALAPRMIVAFGTQRDRYQSAYQMQCYSGIAPVTEASGNSQWVHFRFICPKFLRQTFHEFASCSIQQSEWARAYYDHQRHDKNKSHHVAVRSLAFKWLRIIYRCWKDRKTSNSEDSAVPAM

SEQ ID NO: 334093 - protein, 349 aa, unidentified
MSKKIVKQVMGIDVAQKELVVSLGRMYDDWTPEVYANKTFPNTQKGFMTLAIWVKKLSDPGVELRYVMEATGVYHEPLAYWLEEKGYAVSVVLPSKISNYFRTLEVKTITDKTASEAIARFGLERKLDSWKRPKAIFKNLRQLTRERGQIVEERTMVKNQLHAEQAEAEPNESSIARIKKRILFLNKQEKEVKEDIAVLVKRDIEVTNSIKLICSLPGLGVLTAATVLAETNGFELIRNKRQLTSYAGLDVREKQSGTSIKGRPRISKKGNKYLRKAMHLPALAAIRHDERFKGIFARLVSKHGIKMKAAVAVQRKLLEIIYIIYKTNTPYDKNYLKKNEFAREEKEVG

SEQ ID NO: 334094 - protein, 313 aa, unidentified
MKETEGIYAGIDVSKSGLDVALSQGKEIKRFGSDDRGMAELVSYLAGFNPELVVMEATGGLEKLTAAVLTEAGMAVVVVNPRQVRDYAKAMGLLAKTDTLDARTLARFARDIRPEVRPFADGQTLQIKAAMTRRRQVMGMITAEKNRLAGADLSVRPLIKAHIAWLNGQLKEIDRNLDNHIRSSPIWRAREKLLRSVPGVGPVLSRTLMGSFAELGRMNRKQAAALVGVAPFNRDSGTLRGKRAIRGGRTAIRSPLYMGALAATRCNPVIGAYYQHLLANGKSKKVALTACMRKLITILNAMLRDNRTWQYAE

SEQ ID NO: 334095 - protein, 343 aa, unidentified
MEAKRYIGIDLHRNCFTACLRLENGREYLKEWKLEDMAKFTAKLRPTDQVAVEVTGNTRLFHDAVAPHVERVVAVNASQFKVITHSVKKTDPNDARNLALYLAKDLLPEVRMKDKTQAQIASLTQTRDTMVKLRTALKNKVNNLCSAHGVNLNRESLASEKGLKAVLDLRFDLLVNLELKIIIDQIRSLNKSIAELEETIGQEGQKLEGHKNLTSIKGIGGLSGGILLSIIGDISDFADEGKLAAYFGIVPRVSNSNETEHSGRITKRGTKLGRTTLIQCALIAQRYSPYLKTYYEKMKSRRGTGKAIVALARKFLGIIYRTLKNNWVFADFPNFVLAEEATA

SEQ ID NO: 334096 - protein, 535 aa, unidentified
MSRSKPRRKRSCKTPKPYLLGKPNGQLHTRVQGVGPEHFGVLCFDCGKRGSKYMLADFYGRPLIEPTKVGHTRGELQAALERVDQVTHQYEIKDFAVAIERTGEYHRPVQRACRDRHWDTRLVHPFATKQYRQPADPNNKTDDTDLAAIFRVAINGFGLVEPVWPDAYLHLQLLRRHRRDLVQKTTQLQCQIKEKLHAAMPGYADAVSKDHFWDSNAGMYIARHTGSPPAARQLGFDGLTRLLHDAKIRCTKDTLHNILAWADDAPPALPHSAILQTILDGLDDDRLEKTRQINDLERQLAHLVVRTPYVLLLILPGINIVSSAELAGELGPIELYAHPNNITGRAGLMPCRYQSEGVDVQGPLRRAGNLKLRAVLLQIADSLVRHNDYYRARAARWQTAGKDPRAVRIKVNKCFSRFAFALLTSRQLFRHPACQERHYILGKILKFHTEHGTPTELFRQDMEAACAQLPKQCLAGEKKTLDEHLAALAHKRGPQPLADLISIVLARVKLRQLESKVVRAEDPNAHAQCQEPTTP

SEQ ID NO: 334097 - protein, 345 aa, unidentified
MKHFAGLDVSLEETAICVVDELGGIVREARVPSEPEALVAFFRGLGLAMGRIGLEACSLAAWLHEGLTAAGLPAVCIETRRAKAAMGAMPNKTDRNDARGIAQIVRTGWYRAVHVKSPACRSWRALLAARRLVLNKMRDVENGLRALLREAGLKLGRPARKEFAARVRELVGTDAVLSASAEPLLAIVAAMARELAQLTKRVLAIVREEPVCRRLMGVPGVGPLTALTFRATIDRPDRFRRSRDVGAHLGLTPKRHQSGETDVQGGISRCGDELARTALYEAAHSLLVRSRRWSTLRAWGMQVAKRRGMARARVAVARKLACVLHRMWADDAEFRWGEEGAMPAG

SEQ ID NO: 334098 - protein, 452 aa, unidentified
MELDIINPNCAGIDIGSKSHFVAVGQALEDVKEFGVYADDLTAICLHLKDYGITSVAMESTGNYWQNLYVELERHGMEVTLCNGKFTKHAKGKKTDVKDCRWIQKLHALGLLTGSFLPDETTEHLRTYCRQRTNWIDIAAEASHKMQKYLRLLNFRLDVVVKDICGLTGLAIIADICKGNLDPEKLSEHRHGNCRKSQEEIAKALKGNNRIDFLFGLKQEYDSYLFFQKKIDACDVQINSFLKTEINTHPDKKKLQTDNKTYKKVNKNSLKGIDLNQAAYQYFNGVDLMKIEGLSHSTVLTIMSEVGPEGFPKFPSSKQFTSWLRLAPNNKISGGKILSNKIPKGSNRLKIALRHAANAIGNLKDTHLSDFFKRVAYRKGRATAVSATARKLAVILWNMITKKIAYNPPIEYLFLDQKRKLRLVTKIKKSITKFDLKPDDLGFADASLSASL

SEQ ID NO: 334099 - protein, 450 aa, unidentified
MDLYLHRYSFDWLEVSQTTAFRLLLLISLLTLRRFYLRDYTAGFSVEDSSAKSFLGGTTMSQYFVGIDISKYKHDCCIINAADQSIVAKFTIRNDKDGFNELLTSLQSLSTPEDIRIGFESTAHYALNLELFLEKAHHSFMEVNPVLISEYKKSTSLRRTKTDSIDCESIARWLMTIEYKPHSKGFYHAYSLKSLTRLRDRLIRQRSFYLVKITNVLDHTFPEFKPFFQERFSKTALYLLENYGSAEKMAHMNSASYDNLRRISRGKFTPQKFIELKALAANTVGVNNSIFDTELTCLLTLYKEAAKQVSVLETQITELIEEVHPHYMSIPGIGPLSAAVIYAEYGDISNFSSPAQMLAFAGLEPGISESGTESHKGRMVKRGSSQLRYTLMNCALPLIRFDMTFATYYAKKRSEGKPHRVAISHVTKKLVRVIFALERQNTDFVATALR

SEQ ID NO: 334100 - protein, 353 aa, unidentified
MANPMANLTIGVDLGDRYSELYVVDAAGACVETGRIRTTVAGLEQWFGGRPPARVVLEAGTHSPWASRVLPRLGHEVLVANPRKLRGLYENDSKDDRVDAEYLARVGRLDPALLKPITHRGEAAQADLAVLSSRDVLVRARTLLINHTRGVVKALGGRLPRCSAEAFARRVGPHVPPALRPALAPVLEQLQQLTTTIRGFDRAVEQRCAQSYPETARLRQVTGVGPVTALAYVVVLDDPTRFRRSRAVGAYLGLRPRRSQSGEQDPQLRITKAGNPFLRRLVVQAAHYILGPHGPDCDLRRHGERIAARGGKNAKKRAVIAVARKLAVLLHHLWISGAVYEPLRHRPALAQAS

SEQ ID NO: 334101 - protein, 341 aa, unidentified
MGEVSTIGLDLAKNVFQVHGADASGAVLFRKKLRRHQVLAFFSSQPPCTVAMEACSSSHHWAREIRRLGHEVRLIPPAYVKPFVKRQKNDAADAEAICEAAQRPTMRFVAPKSEQAQAAALVFRARDLLVRQRTQIINALRGYLTEFGIVVAKGPAHVHQLVRAVEDPDEPIPEIARPILQMLIETLHRLDEQIAGLDQEVARRAKDNETARRLMTVPGVGPVTAVALAALAPPAETFKRGRDFAAWVGLTPRQHSTGGKQKLGATSKMGERTLRRLLIIGASAVVRWVARNGAPAGSWMARMIARKPPMLVRVALANKMARIIWALMARGGVYQAPVAVV

SEQ ID NO: 334102 - protein, 340 aa, unidentified
MRIVGVTGGVDTHADTHVAAAVDHNGGLLGIESFPADQSGFEELLGWLVGFGPVARIGVEGTGSWGVGLSRFLHDQEVMVVEVDRPNRQQRRKQGKSDPTDAVSAARAALSGTATVTPKSRNGRVEEMRVLLVARRSARQQRIQSLNQLRHLVFCAPEEIRTRFMDRPKTGLVSEAANMRPHKGSDPIIYQTNLVIRNLARRVKSLHAEMRVIDETLRSLIEETAPGLVALHGVGTDTAASLLVTAGDNPDRIHNERSWAHLCGVTPIPASSGKTTRHRLNRGGDRQANAALYRIVLTRMSSHDETRRYVKRRRQEGLNTAEIMRCLKRYVARQTFKHLT

SEQ ID NO: 334103 - protein, 411 aa, unidentified
MHNRQNYLYVGVDLHKEQHTAVIINCWQEKLGEIQFDNKPSAFSKFLLEVETYVSDDLSVVFGLEDVGGYGRALAKYLVDHEQVVKEVNPALSFLERKSHVTTQKSDSWDAECVARILVNKFNQLPDAKPNDLFWSIQQLVSRRNALVKAQSALKNQLHIQLNHHYPSYKKFFSELDGKTALAFWQQYPSPSCLEGTNIKQLTAFLLDVSNNTCSVKKASEILRLVKEDGQTMKEYQEMRNFLVRSIVREIEFKKKEMKYIERELKQLVNLLDYQLETMPGIELVTASALIAEIGDIRRFPNANKLARFAGIAPVYFGSGGKGKTHKSKQGNRALHALFYNLAVQQVQVAKGSKMPRNPVFHVYYQKKLKEGKTKGQALVCIMRRLVNIVYGMMKYKTAYELPVVEEKEVV

SEQ ID NO: 334104 - protein, 403 aa, unidentified
MFFVGIDWADDHHDVVVIDEQAKQCDSFRIKHAHQGFTILEERLKSLTCDPANIACIIETSNGLLVSFLLDKGFSVYPVNPSTLERKRKPSKAKTDAIDARLLARHGRNEIDELRQLKPDSPIVEELKVLTRDQATLIEQQTRLINQLKNCLKSYYPVALKFFNRLHQKVTLAFLETYPTLEHVRQDQPQNIARFLKNQKHPRPNEAAQKIYTLALEEQLKARIPTVRGKVRLLLTLIRQLKILMQDIDEYDKEIEKLFFDHTDSAIFISLPGAGPRLAPRLLSEFGDDRSRFPSYESITSLSGVAPVPKKSGKNTFTVGKRTAYVKPFHQALYHFARQTSLYEPWSKEYYKSKRAQGKSHSATIRQLANVWCRIIFAMWKNNETYNPEKFLAARQKHKLRAA

SEQ ID NO: 334105 - protein, 353 aa, unidentified
MNYTGIDHHKRYSVACTLDAQGRRLQERRIEHNAPEAFAAYFAALGEPSEVVIEACWNWTTIYDLLEGTPGVTKVVLSNPGKNRIIADAQIKNDRVDAKALATLLRGNFVAAVHVPNKEVRQKKTTVRQRLWLARVRTMVRNRIHTVLDRHPRVERPAVKDPFSNQGKAWMKRVELPAADRLLLDEDLELHELLERHIRALEDHIEADHSAHTDARRLRTLPGVGKVLGPVIALEIDGIERFKTAARFCAYCGLVPTTHSSGGKTFHGRMLPFCNRWLKWAWIEAAWVAIGCSDYFGSFYRRHRARGKGANEAITITARRMATIAWKMLTQHRDYSTVPFDAKTLSPAALATD

SEQ ID NO: 334106 - protein, 350 aa, unidentified
MLAELVDHVVGVDPDRDWITLAVLDARSAGVIAEGRFPASGDGYDEAISFVDGHSVASERAWVIEGSAGYGRGLAVALERHGEWVIEFDRPTRKTKDGAKSDALDAVRAAREMLGRKRLSVPRAHEGVREAIRVHAVTRAAAVRARTGAINELKALIVTADESLRRQLRGLRTAGQVAACAKFRDRPCATVHERATRSSMRSLARRIQLLDTEVDEHDRALKQLLDDAAPQLIAERGIGYVTAAQFYIAWSHPGRCHSEAAFARLGGTSPVPATSGQNQTRYRLNRGGDRQLNRALYLVAITKQRCDPTTKAYVARRVAEGKTDREAIRCVKRYLARRVWRLLEHPPITP

SEQ ID NO: 334107 - protein, 368 aa, unidentified
MASMPNFTTEQNPPLTVSRVVVGGIDTHKDLHVAALIDLAETVLATHSFSTTRAGYRALVKWMRSFGDVSKIGVEGTGSYGAGVCRHLVDAGLEVLEVDRPDRSDRRGKGKDDDLDAISAARAALHGRRVSIPKSKDGAVESLRVLRVTRQTAVRARRNALQLLRMTIVAAPEELRDQVQNLTRMQLIRTCAAWRPETTNAADPVAATPIALKSLARRILELGDEIAALDELIEPLVRALAPQLLERVGIGIEVAGQLLVTAGDNPDRLRSEASFAMLCGVAPLPASSGMTRRHRLNRGGDRQANSALHLAVISRIRIRIDDKTKAYVAKKTAEGHSKLEIIRCLKRYLAREVYYLLNTPATPLAKAA

SEQ ID NO: 334108 - protein, 424 aa, unidentified
MAGRGEAEAEVAIETVVQRAAGLDIAKASLVACVRVPAASGSGWQISKRKFSTMTADLLALADWLASHGITRVGMESTGDYWRAPFYLLEQRFDCWLLNARHLRAVPGRKTDMTDAEWICDLVAHGLVRPSFVPPPPIRRLRDLTRRRTILLAERTREKQRMEKLLEDAGVKLSVVATDIFGKSGRAILDALIAGQRDGQMLAELALGRLRKKIPALTQALVGRFNDHHAFLASMICSHIDATDRMVAALDERIDTEIKPYHAEVALLDSIPGVHTRTAEVIVAEIGTDMSRFDSAAHLASWAGICPGNNKTGGKPKPARTRPGDRWLKAALGTAAMGAIRQKHSYAHALFRRVAVRRGGKRAQGAVAHSLLVAAWHVLITQTPYQDLGGDYFVARDNPDHRRRRAVAQLERLGYRVTLEPIAA

SEQ ID NO: 334109 - protein, 344 aa, unidentified
MGIDYHKKSWKVAILGPEYEHKVMSREPDADGLVKYLKSNFPGADYKAVYEAGFSGFGSQRRLKELGVDCIVIHPADVPTSGKEREQKTDKADSRKLARMLRSKDAGAIDVPDEGLEADRALLRQRYRIAKDLARYKNRVKSLLFQFGIKIPDRFTASQSRGWSKNYMEWLKELPEGSGEVRAVVRNYVETGLKIKAHLTGVTKQVRELAKKERYREAYRLLLTVPGIGPLGAMVLLTQLGELKRFGSLDALCHYVGLVPKMHGSGDRMSVGKLTKRGRREIKIMLIEAAWVAVRQDPALMLRFNGLKQRMNANKAIIRIAKNLLGRIRHVLKHRTAYEPGVVK

SEQ ID NO: 334110 - protein, 342 aa, unidentified
MEHYAGIDVSLECSSVCVVDAKGKIIREGKVASEPDALISWFRSLGYELSRIGLEAGPLSQWLFAAMRQAGLAVELLETRHVRKAFEAMPVKSDRNDARGIAQLMRLGWFRPVHCKSIDAQEVRAMLTARKLVQSKLRDVENSLRGILRGFGLKVGKTTEREFAGRIEELVAGQPHLEVIAQALLAVRAVLRKEFAAFEKQTRKMARTDARTRLLMSTPSVGPIVALTYASAIDDPGRFKSSKQAGAHFGLTPKKYQSGETDYTGRISKIGDSSVRTALYEAAHIMLTKPLKGCSQLKSWAMRIARRAGMSKAKVALARRLAVIMHRMLADGTPFNAAAAAA

SEQ ID NO: 334111 - protein, 384 aa, unidentified
MNKHSMIFIGLDTHKEFHEVAYCEAQRGAEARHYGRIPSSKVSVKKLLRQFESKYPGATLHVVYEAGPCGYWIYRLITSLGHCCYVVAPSLIPKKPGERVKTDRRDALKLVKLLKSEDLTPIYVPEPEDEAVRDLSRARETAMQDLKEAKYQLKALLLRNNIRYEGTANWSNKHLRWLTELILPHPAQQIVLQEQLQTIDERIRRLERLDNELTHHVHQWRYYPVVKAIQAMRGVRLLVAVGVVAELGDLHRFEHPRKLMAYLGLVPSEHSSGGKRHLGAITKCGNRRARRLLIEGAHSYRYPANISTDLQIRQEGLPKDIVDIAWKAQLRLCKRYQRMNKKGKHYNLIITAIAREMAAYIWAIAKEVVLTPVNPKLRLSRVPA

SEQ ID NO: 334112 - protein, 348 aa, unidentified
MTLTIVDGARPVTGGVDTHADAHVAAALDGIGGLLGVSEFPATPAGYARLLGWLGGFGAVGLVGIEGTGSYGAGLARHIAAAGIRVVEVDRSDRQDRRRKGKSDPLDAVSAARAALSGRASGAPRGRDGQVEAIRALMVAKRTARAQRTQAINQARALIITGPDGIRTRFTGQTPAGLIAELAALRPRPGTMVRYHTLLALRELGRRAQFLDGQLGRLDELIVPLVTARAPGLLSLYGVGPDTAAMLLIAAGDNPGRLRSEAAWAHLCAAAPIPASSGKTQNRHRLNRGGDRQANHALWRIVITRMGSHPPTRAYVARRSKEGLSKPEIIRCLKRYAARETYRYLRPR

SEQ ID NO: 334113 - protein, 341 aa, unidentified
MPVVTVGIDLAKSVFAVHGVDEAGKAVLIKPRVARDQLIALIAQLPPCLIGMEACSGAHHWARMFQQYGHTVKLMAPKLVAPYRMSGKRGKNDAADAAAICEAVTRPSMRFVPLKDEHQQATLCLHRTRQGFVEERTAIYNRIRGLLSEFGVVLPQSPERLRREIPTYLDALPGWARRCISDLLEHASNIEARLAEYDRAISRIARDDERSRRLMHLRGIGPTTASALLASLGAGRDFRNGRQVAAWIGLTPSQYSSGGKERLGGITKTGDAYLRNLLILGARSVMASLGDKQDRFSRWVRSLVERRGYWRAAVAIAAKNARMAWATLKYGDAFKYVLATA

SEQ ID NO: 334114 - protein, 419 aa, unidentified
MHERVAGLDVHKAMIVACVRIMAGGRIKRECRTFETSTASLEALLAWLTASGCTHVAMEATGVYWKPVWNILSDGAFELIVANAAHIKNVPGRKTDVNDATWIADLMACGLIKASFVPDEAIQQLRSLLRARKQLSREQTSHIQRIQKTLEEANIKLDSAISDVLGVSGRRMIEAMIAGVRNPHKLAALADRRIKASPKVLYDALHGRLTQHHRFMLELYLGQHDALGQAIARIDDAVDAAIAQMDEEVETGQATFLSLVSLLCSVPGINVLGATIILAEIGRDMSRFPTAGHLLAWAGMCPGQNESAGKRKSSRLRKGAPWLKTILVQCAWAATRKKDSYYGAQFKRLRAKRGPKKAICAVAASMLTAIYHMLKHGTYHQDLGADHFDRRSSEAKARHHVAQLARLGFHVELQPAQAA

SEQ ID NO: 334115 - protein, 384 aa, unidentified
MPSVSERPEAPTAIQTHLAASFVSLELSRSIWLITSLSPGSGEKMSKHSVRAGDVAALLARFSELKRKASERTGESFPIVVIQEAGLDGFWLHRVLQSEGVESHVVDPSSIATSRRRRRAKTDRIDGEALLRALLAYKRGEPRVCAMVKAPTPEEEDRRRLCRERKVLIAERVKHVNRVKGLLFSQGISGYEPLRRDRRQRLDELTTGDGRPLPVHLKTQIRRELDRLELLLDQIKKAETERDALLAAPTPAGRMLLEFKGIGAELAAVLWLEALFRHFDNRRQLASYAGLAPTPWQSGSVDHEQGVSKAGNPRLRTSLIQLAWLWLRHQPQSALTLWFKERVSGNGGHFKKSTIVALARKLLVALWKYVTAGVVIDGAVMKDA

SEQ ID NO: 334116 - protein, 359 aa, unidentified
MQSNKKNFKGQKIFIGIDVHKKTWEVAILTESGVLKRHPQEASAKVLFDFLRKHYPDGEYHAVYESGFSGFSTYYALKEYGINCIVIHAADVPVTQYESIMKTDRVDAERLVRALKKGEILRPVYIRERDNIDDRGVIRIRRTIQKQLSGYKARVKHMLHCNGVELPKRFSTPTNYWSRAFITWLMQDVKLLSSTRTSLNLLIRQVETIRGTLLEATREIRKLSQTERYKHRLELLMTIPGIGQNVAMCILTEVWDVKRFSNEKKFAHYLGLIPTCHDTGEHKSDGVKTFRGNKHLGPMIIEACWVAIYKDMGLGACYADYKKVMKPQKAIVKVARKMSNIIYSVLKHDKPYEPYQWDK

SEQ ID NO: 334117 - protein, 404 aa, unidentified
MLYAGLDWADDHHDVAIIDEAGRKLASKRVKHTKEGLDELILFLEGFTGPTHKEQIACIAETNRGLLIAALLEAGFSVYPVNPKVADRRRGASGAKTDQIDAYLLAKLGRAELVDLRQLRPDSPIIAELKELTRDQDALVHMQTRLVNQLTACLKAYDPVALELFTKLQQRSTLLFLQAFPTPEKAAAASVHQIEQVLKAAGHSTAHKVATRIHETLSQPHLTANAITTRTKSRLALALIAQLLPLLEQIAAYEKEIERLFLTHEDHALFESLPGAGKRLAPRLLAELGDDRSRYTDCTQIQALAGTAPVLYQSGNYLKAHRRHACLKPLRNTLYQFARTSRQQERWADEYYQRKRAEGKSHSVALRALSNVWVRIVYRMWVTSTCYDPAIFGAAQQAHAPRAA

SEQ ID NO: 334118 - protein, 344 aa, unidentified
MTYYAGLDVSLRSVNICVVDDAGERVAETKLASDVQDIVAYLDDLGIELESVGLEAGTLAQYLTYGLQSAGFEVICMEARQVKAALSAMRNKTDKHDARGIAQLLRSGWYSRVHIKSMESHRIRMLLTSRKAVLSKCIDLENEIRGLFKVFGIKLPPKLGHGAYDAAVRDVIEADETLSQALLPVLDARLTLYQTFRVLDNRTRHMAHDDLICRRLMSAPGVGFITALTFKAGVDDPARFKHSRTVAAHFGLTPRRLQSGEMDIEGHISKCGDADVRCTLYTAANAMLTRSSRWSSLKAWGMKLAKTRGHRKAVIAVARKLAVILHRMWIDDAQFQWGTERVRS

SEQ ID NO: 334119 - protein, 449 aa, unidentified
MHKPQVIEDQQHERVFERVAAVDVAKASGMVCTRTPNPSRPGARHSTVWQVPAAMNAVLALADRLVADGIEMVTLESTADYWRIWYYVLESAGLAVQLVTASQARNLPGRPKTDRLDAMWLARLTEMGMLRPSFVPPAPVRALRDYARARTHLVQDRTRCWQRLEKLLEGALIKVSAVASKLTTVSAQDMIKAMIGGQRDPHILAGLARGRMKAKHDALAGALTGMFDDHHGELAQMLLDQIAFCDTRIAALATRIEQHLAQVRAAWGVDADGSTGPSAGTGTDAAVLPAAQRLAEIPGVSAELARSIIAETGLDMSRFPTAAHLVSWAGLCPSARQSGPRNRTGKKGQGDGYLRGYLGQAATGAAGTATFLGERHQRIARRRGRAKAQVAIGRSILVIIWHLLNNPQDRYADLGPGYYASRTDKDKKIRNHIRQLQALGLTVTIAPAA

SEQ ID NO: 334120 - protein, 315 aa, unidentified
MTQTSMTTAGIDTSKSKLDIAVHGRSERWQVANTVAGWRTLADRLAETEVKRIGIEATGGYERGVVEHLRAAGFAVKVLQPAQVKAFGRVHLRRAKNDALDAVLIAACTAALDLSGTVPDPRLTKLADQMTFLDQTGEDIARFKTRLEHIDDPRLRRIVLGDIARLKARKLARIRDIARQLRSHRDLAARLDLVLSIPGIGELTALAIVIRMPELGQVSREEAAALAGLAPFDSDSGQYKGQRRIAGGRSRLRRSLFAAALPAAFRWNDALITLYRRLIAAGKAHNVALIACARKLLIYANTVVQRGTPWIEKAA

SEQ ID NO: 334121 - protein, 339 aa, unidentified
MVYGAIDLHMRYSQIRLVDADGVVLRQQKVPTTRARLVSAFAGYPEVRILVEASTESEWVAQALEDAGFLVIVADPNYGPMYGTLRRRVKTDVRDVEALCEANRRGWYRAVHRVSRAQRTLRQRLGVRRQLVRMRSSLIAQVRAVLRQEGLRLPSGSTAAIDARLARLAVPSAVQAVLTPLLEALRALSPLIAAEDRALTAVAQADPIVRQLQSVPGVGPIVGLTYRATLDTVGRFPAAGHVSSCLGLVPREDSSGERRQRGPITKTGSSEARSMLIQAAWTCWRSRTVRTTHLRTWADALAARRGKRIAVVALARRLSRILFAIWRDGTMFAAPRVAA

SEQ ID NO: 334122 - protein, 340 aa, unidentified
MTITTVGIDLAKNVFAVHCVDQHGKTVLVKPKVPRAALPELIASLPPCVIGMEACSGAHYWARLFRQYGHEPRLMAAKFVSPYRMAGKSGKNDTADAQAICEAVRRPHMRFVPVKDESQQAMQCLHRTRQGFIEEKTATYNRLRGLISEFGVIAPQSTDALRHMVSEQKKSLPLQVQQCVDNLLEHIDRIENNVTEYDRILSRMAKADHRSQRLMELKGIGPTTACALVASIGNAHDFKNGRQLAAWLGLTPSQYSSGGKSKLGRITKAGDSYLRTLLVQGARSALIGAEKKTDSFSRWGCSLVERRGYWRAVVAIAAKNARLCWASLHYGDDFRLYSVS

SEQ ID NO: 334123 - protein, 413 aa, unidentified
MLLFIGDDWAEDHHDIEIEDETGRRLAKARVPEGLEGITTVHGLIAEHAPVAWADLPSEEVAARVFVGIETDRGPWVTALRAAGYQVFAINPLSSARYRERYSTSGAKSDAGDAHVLAEIVRLDRDHHRQIAGDTDLVDAVKLLARAHQTAIWERTRQVLRLRSTLREYFPAAIEVFEDLAAKDSLLLLARAPSPQRAAKLTRSQVVSALRAARRHHAEAKADALLAVLRAPGLRQPATVDAAYAAVVIGQVGIITALNEQIAQLQEVVAEHFGRHPDADIYFSQPGFGVVLAARALGEFGDDKKRFGDSRARKNYSGQSPITRASGKKTVVLARYATNRRLGDALHRQAFSALVGSPGARAYYDALRARKIGHHAALRQLANRLVGILHGCLKTRTKYDETTAWQHQIVTAA

SEQ ID NO: 334124 - protein, 412 aa, unidentified
MAELLGQVLPGSALVVAIDPGKVQHRVWVSTGDGGLLAEPRSVSSLRAGLEEVAGLVGRFAGAQRPVIAIEATGGLHGAWVRALEQRFPLSVRVFAPSQTAAARAQLGSRRFKSDDRDCAALTYLARQGQGRAAAAVPAETMRAAVRHRRGLVAERKAAQQRLHDQLNALCPGLSAPAGHGRVLELEDPSGQAVLACAVAFAGRAPAVRSLQARAPGRLTAASARFWAERWKGCLPPPPDAAARAGRLGRSIARWDAIRADIAAAEAEIEVLLAATAGQVLTSLPGVAVIRAASFAAFSLPIERFPSAGHLYSATGLAPARYQSATISRTGRIARTGLAEHRDALMGIAWGLSQNCGPFIERDAELRARGMAPIQARVALARHACRLAYRMLVTQQPFDEQRYRQGRHPGGR

SEQ ID NO: 334125 - protein, 383 aa, unidentified
MYSAFKWKLPGVMGWTAPYGIECARMRLLQSQTREPSVNQIIRIGMDTSKHIFQLHGVDAVERPVLRRKLRRSEVLAFFAKLPPTVIGMEACGAAHYWARELRKLGHEVKLMAPQHVKAYVKRNKNDGRDAEGLCEAMSRPTMQFVPVKTEEQQAALMLAGVRQQLIARRTQLSNTIRGYAAEFGLTAAKGLDKIEPLLARIAQDETVPALARELFAVQGQDYAQLQIELKAIEVKLMAWHRANACSRRLAQIPGVGPIGATALVMKTPDPRAFPSGRHFAAWLGLTPKDHSTAGKTRLGKITRAGDEVLRSLLVAGATAVIQQVRNGRGRPSAWLLALLKRKPPKLAAVALANKIARIAWKLMTTGESYDGARMPGAQAFAA

SEQ ID NO: 334126 - protein, 356 aa, unidentified
MTSSSKYIGMDVHKESISIAVRNSAGKIVIESVIQTKASMILQFIDGLRGEVHVTFEEGTWSGWLYDLLKPHVSKLIVCDPRRNALLKEGNQNDRVDARKLAVLLQSNQLRPVYHGDHGLRAVKELVRSYLTITKDVSRVMTRVKAIYRSWGIPCSGTQVYSARHRAAWLEKIREPGVRRRAEHYYQELDGLRSLRRVVRKELLVESKKHQVWKRLCGIPAIGPIRAAVLLGIVQTAHRFRTKRQLWTYSGFGVEGHSSADHQVVNGQLQRKKKPIEIRGLNKNCNHHLKNMFKSAAINASTKPGPFQDFYAALVAKGMRPEMARLTLARKIATIVLIVWKRGVCFDANHLKPQTA

SEQ ID NO: 334127 - protein, 366 aa, unidentified
MKKISTVAMCRDKIFNEPKLTIGLDLGDRTSHYCILNEAGNVILERSLPTTPKGIHQTFSKIPRSRIALETGTHSPWVSRQLSQLEHEVIVAHARNVRLIGESSRKDDQLDAQTLARLARIDPGLLGPVRHRSAKAQIHLTVIRARAALVSTRTALVNAARGLTKSYGERLRKCGTGQMNREIAKGLSQELRDALGPLLQEIESLNERIAEYDRRIEQIAKEAHPEVALLQQVKGVGTLIALTYVLTLDDPHRFRRSRDAGCFLGLRPGRRNSGMSEPQMHISKEGDRYLRTLIVQGAHYILGPFGEDSDLRRWGLKLAERGGKNAKKRAVVAVARKLAVLLHKLWVSGEVYEPLRNNRKVASAAA

SEQ ID NO: 334128 - protein, 352 aa, unidentified
MQYLGIDWAYRRAAWCAKSEGGKVTEEGFFPADEDGLAKLVLKLGPEVRACVEMMSGAVWVRDRLQAAGWEVQVADARKVKGLAPLACKTDKVDARVLAELCRRDLVPVVWLPTLDDRALRERLKRRMHLVRMRTMARNRIHGVLTQWGLKVPARRLRQPDGLALLEARGVPQVWRRSVAEALAVIDWLDGRLAPLERELRPLARADPRVELLETIPGIGALLGLTIATEIGDIARFASARKLVGYAGLAPKIKQSGQSSRTGPLSKAGSKTLRWAAVEAAQHAWRETNPWHELYRDVAKRKGKTNAGKAAVARKVLIASWHVLTREEPFKPCCRHGDTNPVPASSHFHLAA

SEQ ID NO: 334129 - protein, 459 aa, unidentified
MARHQRKGNGLPAQLAAVNLHAAGIDIGAQEHWVAVSPDSDSQPVRRFGACTADLEALASWLQQCGVQTVAMESTGVYWIPLFELLEAQGFAVVLADAREVQRAPGRPKTDVQDCQWLQRLHTYGLLAAAFRPPEQICVLRSYLRQRAMLVTYASQHIQHMQKTLTQMNLKLQHVVSDVTSVTGMAIIKAILSGEHNPTTLAQLRARNCHHSEAEIARALQGNWRAEHLFALQQAVELYEFYHHQIAECDRQIEAQLQTLADHSAGRTLPPAPRPPKRRRNEHHFDARLPLFRATGVDLTAIEGINEHTALVLLSEIGTDMTRWPTEKHFAAWLGLSPLHKISGGKVLSRKVRPSANRAAVALRLAASCLHHSHSALGAFFRRLKARLGTPKAVVATAHKLARLVYRLLKHGEAYVVQGMAEYEHAYRERVVKNLIRKAKELGYQLLPTSEQTAQEAPA

SEQ ID NO: 334130 - protein, 344 aa, unidentified
MKNTTLAVDLAKSVLEVAISEHPGQVHERQRLSRERFQRWLAEQPPATILMEACGSAHHWARRAQGYGHLPVLVPPHVVRPYVLRNKTDRADATGLLEAFRNEDVRPVPVKSETQQALVALHRLRATWLATRTARLNTVRGLLRELGVLIPTGAQRVVPHVRTLLEDADAPVPGLLRLALAQAADEIREIEGRVKTLDRQLEHVASESRLMVQLRTVPGIGVVTGTALVATVGNGARCPSGRHFASYLGLTPREDSSALRRRLGAISKRGDTYLRMLLRHGARSVLSHAKLKTAAPPDRLRTWALQLERRRGSNKAAVALANKLARTVWAVWRRDTDYVSTPAV

SEQ ID NO: 334131 - protein, 344 aa, unidentified
MDYFAGLDVSVKETSVCILDDAGRIVKEVKVASEPQALLKVLGNPTYHFKRIGLEAGPLSQWLFSALADAELPVICVETRHMQAVLKAQINKTDRNDARGIAQMMRVGMYRPVHVKTLRSQKLRMLLTHRKLLQSKAIDMENDLRGTLRNFGLKVGLVGAARFEARIRELVEGLPDLAVLVEPLLVVRQVLRQQLAVLHRRMLAVVRDDEVCRRLMTTPGVGPLVALTYRTTVDVPARFQKSKSVGAVFGLTCSRYQSGEIDWSGRISRCGDEMMRVMLYEAAQTLLTRSTRWSWLKAWAMQVARRRGKKKAIVALARRLAVILHRIWVDGTEFRWTREAGPAA

SEQ ID NO: 334132 - protein, 422 aa, unidentified
MNEQKPVIYSAYVGIDWADSKHDVCICPSDSDAREFDVILHHPEAIDAWVKGLYQQYGGPIAVAIELSKGPIVYALQKYDFIDLFPINPSTLAKYREAFQPSKAKDDPTDAELAVDMLLRHSEHFKVLKPQSVGMRALATMVEQRRRLVSEQGRITNRLRSALKQYYPQVLEWFEHIDTPLFCAFMKRWPTLTQARRARANTLKQFFHEHHMYREDVVERRRKAIKEASPLTLDEAVIMPYRMQVLVLVEQLDIMFKAIDQFDDAIAKLSSQHSDYALFQALPGAGPSLTPRLMVAFGEQRERFSSAADIQKLSGIAPVTERSGQKHWVHWRLQCPTFMRQTFVEWAAQTINKSYWAGAYYQQQRDKGSTYQAAVRSLAFKWIRILYRCWQSGVAYDESRYLKALERRGSPLVKRGEMLKSA

SEQ ID NO: 334133 - protein, 360 aa, unidentified
MSTTPLKTIGVDLHKASLTATVLDSAGVILERKDIPTKCRNQIAEYFASHGPAVQVAVESVGFYHWFWDTVRPKVQTLRLADPAGVRACAGRQTKTDRNDSLLLARLLHEDRLPMAYVPDEPVRALRELCRHRHRLARQLALARRQLRWVALKNNLSGPTTFISDRAQKWLLSQDSKLNPIHRLAGRQLLDQIITLERQLSDTEVALKAAVATHAELAPTLALIESVPGVGFIIALTILCECGDIRRFDSIDELSSYAGLCPRVTQSGETAHHGHISKQGPPILRWVLQQAAWVAIRCDPNARRIYARIAKRAGSKKAATALARKLLSYAWSVCRQGHPFVWPTDRKTGPGPVPVWSYDI

SEQ ID NO: 334134 - protein, 433 aa, unidentified
MKVLYERVAGIDVHKDMIKVAIRSPGEKPWTRKTEILEFRTFYGVLQETARELRRRGVTHVVMEASGIYTDPVYYALCEQDFEQVAVINPAHAKALKGHKTDAKDCARLAELFECGLLRGSYIPPAELKEVRDLTRYRTKTVQARTSEIQRLGKALEMAGIKLGSVASSITGTASTAMIEALIDGERRGGVLADLAIGRMRTAGKLADLSMALAGRFTEHHALLCRLHLDRIAVFDDAVGGLDKRIAGKAARWQREQRLLTSVPGFGDVVAQAWLGEIGPAPHRHFATHEKLACWVTLCPGNNISARKRKHGRTGHAGTYIKPMLIQAAWAAIRVRGRLQARYNRLVRRFGGAKNPAAKKKAITAIAHTLLKIAYQVLKSGVPYQEPGADFYTRRESPEQKHAWLERQLQKLHPGCTVTITISPPEAALPPGA

SEQ ID NO: 334135 - protein, 414 aa, unidentified
MLKIVYRICCGMDVHKSFVVACVASTNEQGVTTYKSKRFSTFTGDLHRCAAWLAENNCKDVCMESTGKYWIPVYNILEQTCNIVLAHPKYVKAIRGKKTDKRDAKWIADIFKHDLVAGSFIPPADIRQLRDLVRYRWKLTNFTTGEKNRAQNCLTVSNFKLDDVFSDVFGKAASAITARILENPTAKITDVSSFRTKHMKATDEEILAAVDGEMCAEQAEKLRIIRSHMDSLELCKSNLESLILSTAENYFPQLELVMTAPGIQSFAAIGIISEIGVDMSVFPTSKRLCSWAGLTPQNNESAGKKKTTRISRAGAYIKPLLVQCALCAVRAKQFPEVRNRYLALKKRRGHKKAIIAVARMLLTAIYNMLKKNEPNNPELYRKGDRPPAHREVSVDEAIFILQRQGYLVTAPSTT

SEQ ID NO: 334136 - protein, 370 aa, unidentified
MSIKRILVNQIDTNLEYEVIGIDLAKNCVSAILLTTDGEIFGIDRLDYQELEKSAQELSPTIFAMEPCTEMNYMVQKLEDWGHQCIVISGKNVKDYVESHFSNQKTDLNDAQALAFLTKDTQLRTVKAKDPEQLKYASLTTLREQYVKQYRQTMVSLKGICQVWGLNISKGISGKARLKDMIENHAEFPAELRTALVGMVAHAQAVQKDLKSVTKILEELAKKDKACQLIQTVPGLGTICSCRLRATVGDIKRFKHPKDFPAYYGLVPRSMATGHNEKKGKITHRGDKTMRSLMVQGAGIVINQATKGNLNSKQLTKWILKKQKEKMPWGKLVCAVAAKLLRIVRAILISGKPYNPKIAGVAKCSLPKAS

SEQ ID NO: 334137 - protein, 418 aa, unidentified
MEVLHERCAGLDVHKKTVVACVRLARGGRVEKEVRTFKTTTSDLLALGEWLDGHGVAHVVMEATGVYWKPVWHVLDDGERELVLANAAHVKNLPGHKSDVSDCDWLSDLEAHGLIRGSFVPNRQTQELRVLLRTRKQIVRERSSHIQRLEKTLEDANIKLDSVISDVVGISGRRMIVAMIEGETDPAVLAGLADRRIKAPPEVLCEALRGRVNGHHRFMLKLHLDHIDDIDGMIDRIDQQVEASLQPFRDGAELLITIDGVNQLAARGIVSEIGLDMSRFPTSGHLLSWAGMCPRSDESAGKRRSTRIRKGAPWLKTLLVQCAWAATRTKATYLHAQFVRLRARRGARKAIIAVAASILTAAYHMLKNGVAYRDLGPQHFDSRNKQAQAKRLLARLRALGFTADGDALKPISEPLASL

SEQ ID NO: 334138 - protein, 438 aa, unidentified
MSNKVIFNLDELFISVGIDVGADFSWMSIALPNQQFVGKPYKILHNSIDSLTTAVSKIKEAEELYSLESRIFLESTGIYHYPLFCYLRDKGFNCSVINPIITKNSTNINIRKVHNDRFDSKKAALVGLKPDLKVSLMPSDLALNCRNLCREYYDLMDNRSAYVNKLQGELRMAFPQYLGIFSKVTINTSLTLLETYTSPSAFLEADKQEIIDIIKSTARFGLTYAQNKYNAIIQAATDANQFGYIIESNIKRIRLYISFIRKYDEEINDILESLHKLVDSNEDTKFVKQVHLIETFKGAGFLSAATIMGEIGDFSAFSKPKQLFAYFGLDPAVKQSGKFEGTKVQMSKRGSAIARRVIHTLTLQSISISRNREAKNPVLREYYLKKCDSKPKLVAMGAVSHKVCNMIFAILRDNKPFKIIAPQEHIKQYNSAKCDIAA

SEQ ID NO: 334139 - protein, 493 aa, unidentified
MGACELESGDVALAAIPIRKMTIGIAQTLLLIIDWRIAMPKKTTGGRPELKAVNVGAAAIDIGSKMHMAAVNSACADVPVRSFGTFTQDLQDLADWFKACGVTSVAMESTGVYWIPVYEILEQRGFDVILVNARYAKNVPGRKTDVSDAAWLRELHSFGLLRGSFRPDAEIATLRAYLRQRERLVDYAAAHIQHMQKALMEMNLQLHHVVSDVTGATGMRIIRAIVAGERNPDVLATYRDVRCHSSIETIRAALVGNDRHEHVFALTQSLELYDVYQAKMLDCDRKLEVLLAGLNDRGAKPVGRLSKPRIKTKQVNAPTFDVRTALYGVLGIDLTEIHGLGPSLALKLVGECGTDLRAWPSAKHFTSWLCLAPGNKISGGKVLSSRTRRSSSRAAALLRLAATTVGRSDTALGAFYRRLSSRAGKSKAVTATARKIAVLFYNTLRHGMSYKDPGADHYEQQYRSRVLANLQRRAKSLGFVLQAIPEDANPAAS

SEQ ID NO: 334140 - protein, 307 aa, unidentified
MNGIGIDVCKAMLDVAVHRGPFERFHNTPAGHRKLLSWLATQQAGQVVLEASGGYEQQILDALFDAGHQVVRADAYRCQAFAAATGLPAKTDRLDATNLACMAGTLELRAYQPMEPWRRKLREFVRARQQLVDLVTSAQNQLEQGMDTSLRRLLQANITQMKKHCVRLEKHIAEQVRQQPQLEAMRSFKGVGAILQAVIASYLPELGTLDGKAIAKLVGVAPIAHDSGTTRGIRRIGGGRIEVRNVLYMACLSAIQHEPRIREFYRSLRARGKPGKVAVVAAMRKMLVILNARARDALAGQAQAIPT

SEQ ID NO: 334141 - protein, 346 aa, unidentified
MGQIIRIGMDTSKYIFQVHGVDASEQPVLRKRLGRKQMLEFFAKLPPTVIGMEACGSSHYWARELKQLGHEVKLIAPQHVKPYVTRNKNDGRDAEGLCEAMSRPTMRFVAVKTVEQQAALMLAGLREQMIARRTQISNTIRGYAAEFGITVAQGLNQIEPLLVRLAQDESVPQSARDLFALQARDYAQLQIELKSIEARLKAWHRANADSRRLAKIPGVGPVGSATAVMKTPDPHAYASGRHFAAWIGLTPKDHSTAGKTRHGKITRAGDERLRSVLVAGATAVIQQAKHGRGHPSPWLIALLKRKPPKLAAVALANKNARIIWKLMVTGESYDGARMLGASVAAA

SEQ ID NO: 334142 - protein, 395 aa, unidentified
MSEQGRVVIGMDPHKRSVTIEVMTADEGVVGGGRFATDVEGYRQLLSYVASWSERVWAIEGCRGIGRHIAHRLIADDQEVVDVPPKLSARARVFSTGQGRKTDATDAHSVALVGVRMAGLRPVVADADLDVLRLLVDRRRQMGAEHTRKVSQLHALLLELIPGGAKKSLTAAQARKLLTALRPRDVTGKTRKRVAAELVGDLERIYARKRAADKELRELVAATGTGLLDLHGIGPQGAARLLVEVGDITRFPDRNHFASWTGTAPIDASSGDHVRHRLSRGGNRQINRALHMMATVQLRNATDGRHYYDHKKATGKSSMEAMRCLKRRLSDTVFRTMLSDVAHHAAHRAGTGPGGQRGNDSDSSAAGSQPQHRLFGQATPGPVNDQPKPALPKVS

SEQ ID NO: 334143 - protein, 400 aa, unidentified
MKYYTSTTEFNCGIDLHARQMYVCVMDRQGKKRVHTNVRDNDFNFFLKLVAPYQHSLTVCCECMFGWYWLADACQNVGLTFVLAHALYVKAIHGGKNKNDRVDSEKLTHLLRSNLIPPAYVYPADKRPLRALLRQRLFYVWRRSELLARIHSHQLAHNRIPAKQTRRTRDLWEEALLKAEDHPLRQFALKNDLAMIKHFDRQIFKVEEELQRQTQKVACREYSLLQTVPGIGENLGLTILHEIGDISRFPTVKDFLSYCRLVKGTVASAGKIKGLRGAKLGNPYLRWAFGEAAVIAKRDHHLVGPLSQRLEAQMGGNKFKANTVLAIKLARAVYFMLKNKTVFDPERLVASMQKCFSPGRRQPGSLTGRAKKAMPPPVPEDASCAPSTALCVGQASSPAH

SEQ ID NO: 334144 - protein, 392 aa, unidentified
MYIIGIDIGKNHHEASIVSPEGKQIGHSLRFATTHKGADSLMSFIFNNIGNSSCIFGMEATGHYWYPIYSFLKARGYTIYVINPIQSDSLRKMYIRQTKNDSIDSFLIAEVIRFGQFTTTSMADENILAMRQLCRYRDSVISSRTEIKLRISTIMEQIFPEYEKQFSSLWLSTSMGILEKYLTPENIENAPIDELFEIIKDKSHNKLTMKKAISIREAASDTFGIKIAQDAFSFQLKQLIDRMNFLDKQIEALDCQILEYYEKFDCYLHTIPGIGMIAAATILAEIGDINRFKSSSALVAFAGIDPTVRQSGEFSSTHNHMSKRGSPYLRHAIFLAATTCSFHNSPLNAYYKKKRDQGKHHLTATGAVARKLTTIIYAVLRDSKPYEPKSFC

SEQ ID NO: 334145 - protein, 350 aa, unidentified
MDRFVGLDVHAASTTVAIMGPSGRHLGTRVVETNGRSLVEALRVIPGDCHVCLEEGIQAEWLYELLKPHVAEIVVAKVERRRQPKNDARDALGLAERMRTHAIGTPVFKDTAPMASLRELARLHAKVVADVVRSKNRLKSLFRARGIETAGKRIYGASEREAWLKKLPKAKRLAAEVIYAELDAIEPLRAKVEEDMIAEARRFPIAAKLETCPGLGPIRVAQLMATVVTPARFRSKRQFWSYCGLAVMTRSSSDWVQDEQKHWKRGTVPLTRGLNRSCNRPLKYVFKSAATTVMTQPQSLLGQEYTHLVTSGTKPNLAKLTIARRIASIALALWKHNQEYDPTKHTKKDA

SEQ ID NO: 334146 - protein, 337 aa, unidentified
MNVTLIGLDLAKNIIQVCGVNRAGKTVFNRAIKRTELLTFLVQYPEVPIAMEACSGSNYWGRTLESRGYKVMLIPPQHVKPFVKGNKNDRNDAFAICEAARRPHLKFVRPRSLEQVDMLWVHRQRERLVGQRTQLINQLRGMLSEYGVVVAQGKERLRRELPFLIEEADNGLTYHARCYAQQMLEEWIELDRRIKMFDQDIREQCRLSEPASRLIEMKGIGKTIATAAVAFAGDAKHYSNSRQFAANLGVVPREHSSGGKQKLGGITKRGNRYLRRLLIQGAWSVILHINSGEDRLTRWARNLVERVGKQKTAIALANKMARLKWTLLTKGERYRAI

SEQ ID NO: 334147 - protein, 420 aa, unidentified
MKTYILRATQTVEPQKSTPHSPPCPESGLTALVNVICGRPVPPPPLLARLVLFIGLDVHNDSIAVSLAPSDSTDVRRYGIIGGEHDDVLKLAKKLQAAHPGTLLKFCYEAGPRGFALCRCLRLHGLECIIVCPSKVPRKPGERVKTDRRDADQLARLYRAGELTGIYVPEPEDEAMRDLIRARYQVGKAQHRARQQLKMYLLRHNLRYGGQTSWNAAHLRYLAQIKMPFPVQQIVFQEMLEVITEATARLERYDQEIERAVPGWRWEPVVRALMALRGMALLHAASLVAELGDFHRFEHPGQLMGYLGLVPSEHTTGNDRQQGGITKMGNGPARRALIEAAWQYCVPARISPHLKKRQEGLPKAITDISWKAQLRLHHRYQHLTRVGKKKSQVAVTAVARELAGFVWAIGCLVQPRAAKP

SEQ ID NO: 334148 - protein, 435 aa, unidentified
MLVSSPSQAEYMARIRDVDRERCLVVPVDVGKRSAMALVADHCHEVVVDPFAFDLNEAGFLELVAKADAYAEFVGAGSVRFGVESAGHYHRGIVTRLDAAGRDVVELNPSIVKDARGRIGARRVKTDVQDCLAIAEVLIDGLGHTPTQRSTAMSTQAAWVGQRRRKVEARGVLVRQLHAQVDLAFPHLTSCYSHGLDMASLRVIMAHICDPVRVVRLGPKRLREYVTNRGVRMWTLKAVEVVEAARLALAVPEGQRKAAELFVARDMALLEMLEAELAECDRQLAQVIAETPAGVLVSIPGVGVTAASYYGAALGDPHRFRNASAAYRYSGLSPASYESAGKTSARTFISREGSAPLRHAIITMGRGMRSHEPDFDAYYQRLKSSGKPPLVALVAVGHRAHRLAFSMMRNQTIYDPQRWVEGVEKGRAVKAAIAT

SEQ ID NO: 334149 - protein, 312 aa, unidentified
MVIIGIDPHPNSHTAAALDLNSKVLSHLTISNDSKGIKELLIWLKSYDISRCGIEGANNPYARDLSSSLLTKGYDVVDVKPALSSQYRSKRGSYKTDEIDAENIARALRANPELNSFSASKQNSELKELSRAREALLDYRKALKLSMQTMRSKVVTKSQTRLIKSIDKEIKALEKKMQVIVDELMPELQSLLGIALVRAAEILAETADIRRFKTKHSYAMFAGCAPIERSSGKHKRRQLNKGGNRRLNKTIHMIIQTRLCFDEATKAYIDKKLKQGKTMRAAIRCLKTYVARQLYTFMLANTLEHPERWVGG

SEQ ID NO: 334150 - protein, 382 aa, unidentified
MITQSAGRCHEADRRDEEVQPVGRMVTTTNIRKLNDRILASKCETVKIGADVHARDIVACVQLDGALPERPVKLTAEQLIGLVAGLIKAGRTVHVCQEAGPCGYVLHRRLLAAGAKSLVVVPTALADGRQQKTDGLDATALVDKLDRYLRGNTKAFTVVTVPTPEQEQVRGEVRLREQLKHDRHAWEARGRSLLLAQGHHVTGPWWRAGNWAPLAATLPAWLVERLEVIRKMVLALDAEERALHTQLEACAPAQLPKAVGALTWVMLAREICDWTRFKNRRQVASYTGLCPGGYQSGGTQRDGHINRHGNPVVRHLLIELTWRLVRWQPDYPPIRRLLESGAKGAARRKLAVATARKLAVDLWRLATKQTTPETLHLLVPTA

SEQ ID NO: 334151 - protein, 371 aa, unidentified
MKKDSTTKFIGLDVHSKTISVAIADEGRKGEVRHYGTIENTFEAIDKVIKSIATAGAELRFIYEAGPCGYALYRYLSGNGFTCIVTSPAMIPKRNSVRIKNDRRDALKLARLYRAGELTGIYVPDPEDEAIRDLTRAREDARLAERRAKQRVISFLLRHNFIYPGKKPWTKTYFVWLGKVGMQYPAQKIALQEYIEAVHECTERLARLSEQISLAVEEWRLAPTVKAIQALRGVSLITAAVTIAELGDLSRFQNPKELMAFIGLVPSEHSSGESVRRGHITKTGNGHVRRVLVESAWTYKHHARITGHLLKRQRDLPKSICQISWKAQLRLCARYRRMIAKKKPNKVVVIAIAREIAAFIWAIAQEVKTAA

SEQ ID NO: 334152 - protein, 339 aa, unidentified
MNITTLGIDLAKNVFQLCGVNAAGAIQFNKKVTRNSLVKTLAKLPVCEIVMEACGSANYWARVFQELGHTVKLIAPQYVKPYVKGNKNDSKDAEGIVNASKAIGMRFVSPKSIEQQDIQSILRIREGYIETRTKTSNQMRGLLAEYGIVVPVGLSKLRKILPSLFDRTQENGLTVMMKHLLETQYNFFLMVDEQIDSLDLQLKALIEVNEKGQRLMEIEGIGVITATALYALVGDGSGFKNGRHLAAFLGLVPKQNSSGGKNRLLGISKRGDDFVRRMFIHGARSVVLHAKKKTDARSNWINALKERASVNKVSVALANKNARIAMAILLSGKHYQKAS

SEQ ID NO: 334153 - protein, 404 aa, unidentified
MVDTTATDLFLGLDLGKEFHHAHGRTGDGRTVHDKRLPNTEPKLLELFTRLVAKFGTVLVVVDQVANIGALPLTVARAAGCRVAYLPGLSMRRAADLHPGEAKTDARDAFVIAETARSMPHTLRAVDRDDEVLAELTMLTGYDNDLAGEVNRTTNRLRGLLSQIHPSLERVLGPRLAYPYVQALLQRHGSPAKLKRLGRARCEALLKAHGSRKAKQLAGEICDALAEQTLVVPGTEASALIVPGLAAQLAAAHTQRQATEQEIAALLEALPLFHLLTTLPGMGVRTTAAVIVAIGDGTGFPTAGHLASYAGLAPATKSSGTSIRGEHAPHRGNRLLKRALFQAAFAAIGCKSDLSSRIYYDRQRARGKTHTQAILRLARQRVNVIHAMIRNSTLYEPRTLDLAA

SEQ ID NO: 334154 - protein, 364 aa, unidentified
MAKQVRRADFLLEPEQLREPFELVSASLGAAEVLMKRELIMSSPSPAINIGIDVSKEKLDVAVHESDTHWTSKHEFTEFPQLIKQLRSLMPTRIIVEASGGLEHLLVSYLATTGLPVIVINPRQVRDFARATGQLAKTDRLDAFVLARLGATLQPAVRQLKSAETQELEALVNRRAQLVEMLTAERLRLQQAQQQRRQAIITDLKAHISWLQKRLEQCEDDLSQLLRSSPLWRATDQRLQSVPGVGPITSLVLIAELPELGHFPNKQLVALCGLAPHARDSGKWHGKRTTRGGRARVRTALYMATLVATKHNLVIKTFYCRLLRAGKEKKVALTACMRKLLVILNAMFRNQTSWQQPSGLIPGT

SEQ ID NO: 334155 - protein, 347 aa, unidentified
MKNYNTIGVDLAKNIIQVSVVSSSNKQLQNKALSRKKFAEFLAKQNTSLVAFEACATAHYWARVAKRHGHEIKIIPAKAITAFRQGHKTDENDALAVAEAAKRPNIKVAPYKEIAQQSMQAIQRSREHLVQERTALSNHMRGLLMEFGVFIPQGFAALTRAIPEVLEDGDNELADTYRPTLHRLYQRFTQLQDDIHFMDNEIKELIKHHDGCQRLTQMEGVGPISAVLLYASLGTGEAFKNGREFSAYIGLTPKQFSSGGKTNIIGISKYVANRRLRAVLITGARAYVHKMKEPKTAKDKWLWSLIQRAGYGRAAVALANKNVRTAWALLTQGTEYNKQHQALLHAA

SEQ ID NO: 334156 - protein, 424 aa, unidentified
MKVTYQTCCGVDVHKSFLVATIVKTTGGIEPSYQKKRFSTFNNSILEFKQWLLDNHCHDVCMESTGKYWVPVFNLLEDKINVVIANPKWVKAVKGNKDDTKDSKWIGDLFRLGLVKGSYIPCKKVRILREYTRYRYKLVSCRSSEKNRYQNALTVCNVALDSIVSDIFGKSSTSIIDYLLEQSGTSINHEEIASKLLRSLKSKEDAVIESVEGYQMTDAQKYRMRLVRAHMDYITAEINDVDKMIENMISSNPDFENAVQFLCTIPGVKRDSAITIISETVTYMSQFSSSKRLCCWAGLTPGSNESAGKKKSVRITRAGVYLKPALVQCAHAAVKSDKSPYYKKKYESLVKRRGKKRAIIAIARMILTAIYQMLSTGEQWNPSDLYKIDMPVALVEKQKAKAIKQAKKLLQREGLLPPDEPLAS

SEQ ID NO: 334157 - protein, 342 aa, unidentified
MDHFAGLDVSVKETSACIVDDTGKIVREVKVASEPKALLAVLKNPAYHFKRIGLEAGPLSQWLCSALAEAGLPVICVETRHMRAVLKAQINKTDRNDARGIAQMMRVGLYRPVHVKTLRSQKLRMLLTHRKLLQSKAIAIENDLRGTLRNFGLKVGMVGKAKFEARIKELVENLPELAILIEPLLIVRRALREQVVILHRRLLAIVRDDAVCRRLMTTPGVGPVVALTYRATVDVPARFRKSKSVGAVFGLTCAKYQSGEIDRSGRISRCGDEMMRVMLYEAAQSMLRSKKWSWLKAWAMQIARRRGMKKAIVALARRLAVIMHRIWVDGTEFRWTREAAAA

SEQ ID NO: 334158 - protein, 411 aa, unidentified
MDRVYDKCCGIDVHKKLIVACFKQGNRQEIRDFGATTRELLEMADWLKEGGCEMIAMESTSSYWKPLYNILEVCELNVIVVNARHMKAVPGRKTDVKDAEWIADLLQHGLLTASYIPDRDQRELRELVRYRKSLVGERNRELNRLQKMLEGANIKLSGTITDINGKSARNILEHILSGKKIDSAEYDILYRQKVIAHNLKATKEQIIDDLNGVMSDLQKKMMRILLNHLDELNAHIRELDDDIDNFMKPEEKRAAEVIQDIPGIGNTGAQAIISVIGTDMERFPTDAHLSSWAGLCPGSNESAHKRKSGRTTKGNALLRDTLVVCAHAAVRNKTSYFSAQFARISAHRGKKRAYVAVAHSMLVAIYHILKDGVVFNDLGADYYNQFNRERKINAYLKKLKALGCEVSVVAA

SEQ ID NO: 334159 - protein, 356 aa, unidentified
MNQLTTVGLDLAKDVIAACALDLHGAVVERRVLKREAFQRWAEQLPVCTVAMEACGSAHHWGRWFAARGHTVRLIAPQFVAAFRKGGKNDAADAEAVAIAARQPTMRFVPIKTIDQQTILAWHCAREGWKEERTALMNRVRGLLTEFGIVIARSSDRFLAELPRLTEDPRLPDAMQGLLLEAREQLASLHARLARCEAQITNHARSNTAAQRVSALLGIGPITSSALAATVPDTTTFKSGRQFGAWLGLTPKQHSSGGKTRLGRISLRGNVYLRTLLIQGARSTLQSALRADLSRASRLQRWIIELYGRRGYHKTLVAIANKHARIVWAILAKDERYDASAWQRHPMAQALPAASS

SEQ ID NO: 334160 - protein, 377 aa, unidentified
MHSENIAAYIGLDVHKETLAVAIAAPERLGEVRYYGTINNEAQAVRRLFQKLQGLYGNILSCYEAGPCGFGLYHQLTAMNIKCQVIAPSRIPKSPTDRIKNDHRDVISLARLLRDGEVPPVWLPELTHEAMRDLIRARAAAKRDSRVARQRILSMLLRTDKRYAGKHWTGKHRTWLANQSFSQPSQQIAFQHYCQNLEQIEDRILQLDQEISRLLPEWSLCNLVCQLQALKGVGQLTAITLVAELGDFSRFSSPKQLMAFLGLVPGEYSSGNSIRPRGITKVGNSELRRLLYEAAWSYRTPAKVGAWLIYYRPDSVTQYSKDIAWKAQQRLCSRYRSLTAKGKKSQVAITAVARELTGFMWDIALAAQSSFSQQKQN

SEQ ID NO: 334161 - protein, 392 aa, unidentified
MYIIGIDIGKNHHEASIVSPEGKQIGHSLRFATTHKGADSLISFIFKNIGDSPCVFGMEATGHYWYPIYSFLKFKGYTIYVINPIQSDSLRKMYIRQTKNDSIDSFLIAEVIRFGQFEATSMADENILAMRQLCRYRDSVVSSRTEIKLRISTIMEQIFPEYEKQFSSLWLGTSMGILEKYLTPENIQNAPIDELFEIIKDKSHNKLTIKKAVSIKDAAADTFGIKIAQDAFAFQLKQLIDRLNFLNEQLEALDHEILSYYEKFDCYLHTIPGIGMIAAAAILAEIGDIHRFKNSSALVAFAGIDPTVRQSGEFNSIHNHMSKRGSPYLRHAIFLAATTCSFHNSPLNAYYKKKREQGKHHLTATGAVARKLTTVIYAVLRDGKPYEPKSFC

SEQ ID NO: 334162 - protein, 319 aa, unidentified
MDGPCFVGIDVAKRTLDGCFRPGPRFQHDNTAAGIAQVVARLTAQPVTLVVVEATGGLEVPLVRALQRAGIAVAVINPRMARDFAKASGQLAKTDTIDAAVLAHYAEAMRPEPRLLPDEDAQFLDALVTRRRQLIDMRTMEQNRLGACMDKHVRADILAHLDWLSKRLKNTERDLADAIRTNPDWQARDQLLQSVPGIGKVVSHTLLAGLPELGTLTARKLTALVGLAPFADDSGRHQGKRRIFGGRAEVRAKLYMAALTAGRSHSPLGRFYQRLRDAGKSAKVALVAVARKLLTIVNAVVRTGRSYDAEFAPLVLTGA

SEQ ID NO: 334163 - protein, 343 aa, unidentified
MQAVTTIGLDIAKSVFQVHGVDAEGNVILRRQLKRRHVLTFFQKLPPCLVGIEACASSHHWSREVQSFGHTVRLMPPVYVKPYVKRHKNDATDAEAICEAVTRPNMRFVATKSPEQQSCLTLHRTRHLFIRQQTSVINAIRAHLAEFGIVAPVGRKGVEQLLGVVADSNDRRLPEVARACVAALGAQLQTLKVQILEFDRRIMAWHRSNETSKRLDEIPGVGPALATALVASIADPKVFRSGRDFSAWIGLVPKQNSSGGKDRLGNISKRGDRYLRSLFTTGALAVIRYAKIHGTRHRPWLTALLARRPTKVAAIALANKIARMAWAIMVRGERYKEPAALAA

SEQ ID NO: 334164 - protein, 412 aa, unidentified
MRVIIERCCGLDVHQETVVACLLIGAPGDRPTKEVRTFRTVTRDLEALRDWLVGAGVTHVGMESTGVYWRPVYAVLEGHFDLIVGNARHIRNVPGRKTDVKDAEWIADLVRHGLIAKSFVPPRPLREMRELLRYRRKLTESQAAERNRLLKLLETANIKLASIMSDVFGVSGRAMLRALIEGQASVEAMADLAKGQLRRKRSELILALEGRMEEHHRFLLTTQLRRLETIEQDIAALDLRINERLEPYQAPHALLMQIPGVDWLVAAVLIAEIGVDMSVFLSVYHLSSWAGVCPGGHESAGRQKSGRARKGNVHLRTMLVGAAISAAKTRGSYLKDKFHRLKARRGAMRAALAIAHKILVSAYHMLAKGLAYRDLGEAYLDQSGQTRTVANLKRRLERLGYHVTLERATQAA

SEQ ID NO: 334165 - protein, 517 aa, unidentified
MKLPSLKAIRYYKGGTIEDQSATGQLKNMEGRSLTMKKRNIYQDRSQELFRLFEQAGNNSKVMCVPIDYAKKDHMVMFCNGYGDIMRKPFNVKNSPEGVKYLIDQTMRSCRHRHINKEHVFFGGEDVNSFAENFVNTLRSKGWLVANVNAHDAKKQRDNLQASTDRLDLMGIATMLLNCRANCCPAQTGVYRNLRTIVRHRKKLVKMKTEVRNRIHGIVDQLFPGFLNEKKSGITPFSTSCLYLMGDRFSVRQIQRRRRSSLIERLRRNGTKNPEDAAAVLQNYATQVLTPPNEYTATLQVSLSSHVNHFRCLLDGSEQLKKEMALLLGQTSGAFLTSIKGIGIVLAAGVTAEIGNPFSQKPSNNLVSYAGIVPKVKQSGGPEGQPRIGRVSKRSNHILKDYVVQAAFHIGRCGPGDLRLDYKRREAAGQHADFGMARRFMRMALCLMRTSQIYLPPHLRKADINPRERADYYLSLWPYLRNKWDKLGALKAAFSQNRPLGQWRDLVQELYEVKLKL

SEQ ID NO: 334166 - protein, 371 aa, unidentified
MNHVTSIGLDVHARSVTAVALDSITGEVRSQKFGYSPAEIAGWILQLDSPKAVYESGVTGFHLVRELREMGVDCIVGAVSKMHKPASDRRKKNDRNDAEFLARQLMAHNIVEVFVPDVETEGARNLSRALEDVRDDLTRAKHRLTHLLIRWGYAWNELNEDGKRRGSWTHAHWEWIRGIELPDAAARESLDYYISEVRHIESQKKAIEKRVAQCASRPRWRDRVEALRCMKGIETVTAFALTVEAGVFSRFDSARAFASWLGLVPSEHSSGERASRGGITKAGNSHLRKLLVEASWHYTRATKERKRSLYDESVPASISNHAAVGVKRLVERRRHLSCELRKRPVVANVATARELACWIWALGRMSEGALA

SEQ ID NO: 334167 - protein, 404 aa, unidentified
MTVVCAGIDWASEEHAVCVLTDEGELLHEGTVRHDEAGLGELCELLCGLGTDRVAIERPDGVLVDRLVAAGLPVYAMHPNQVKAARARFRTAGGKSDRFDALVLAELARTDHQRFRPLAPDSDETRALRALTRAREDLVATRVALANQLRAELERCWPGAARIFADVDSPIALAFLERYPGPADAKGLGERRLAAFLARHSYCGRRAAADLLARLREAPVTALGELEAEGRRGVVLALVAALKVLVERIRLLSSEIAGAVRQHPDGALFLSLFRDRNSTVTAARLVAEIGDQRGRYPSAEALAADAGMCPVAVESGKRKVATFRRACDKRLRDAVVTFCDSTRHWHPWAHDVYERARRRGCDHPHAIRVLGRAWLRVVWRMWQDRVPYDPDLHGSLRALPVTGG

SEQ ID NO: 334168 - protein, 321 aa, unidentified
MTYIGIDISKDSFIVAYSSDKSSKTRAFKNTTKGIHEFIQTISKDEHHCVMEATGNYSALLVYLLSEAGVTTSLENPLKVKNFARAMLSTVKTDEIDARLIALYGEKMQPAPYKLRSDAILTLKQKRTVIRQLKKQLIATRNLQGSMEVLPFFDAKCRRSVEKTIAFLEKQIKDLEEDLTTLARSEYKKQMDLLTSVKGIGVTLAAALIMATGGFTYFDNAKQFTRYLGLSPTYQQSGTSVNIKGHINRNGDSSLRSQLYVAAFSSLRCNTECRACYDRLRSHGKPGKVAVIAVANKLVRQAFAVVTQETPYMDGYVSSKK

SEQ ID NO: 334169 - protein, 421 aa, unidentified
MTEGVGFSSQRRSILEVKVERCAGIDVHKKFLAVCVLIGLAHQKPASEVRRFGTSVPELERLKAWLLEKGCMEVVMESTGSYWKPVFNILESSVRVILANPEQVKALRGKKTDPKDCRWLAGLLRHGLVQPSFVPPRDIRELRDLTRRRRTLMQQGASERNRVQKILEDANVKIGNVLTDVFGMSEQAMLEALLENKLNAEEMANLAQGRLRPKIPQIIEALERHWMNDHHRLLLRQILKHMAFIEDMVDELDKEIWEKLRPYEKHIELARSVPGIGRDAAASILAETGPDMSEDGPFGSCHQLASWSGICPGNNESGGKRKTGRTRKGNRWLRATLAQTAWAGAAKRNSAFRDRYQRLKPRRGPQRAATAVAHAQLIALYWVLRHGKPYQESVRAIDNQRRDLMIRHHLKRLTELGYKPA

SEQ ID NO: 334170 - protein, 387 aa, unidentified
MSRNARVPVPATTLDQDSTLVVVLELSARSWLVGARVPGIGRMSRYALAPSAEALAAWLGTAKARAGVTGRTVVRVVLAYEAGRDGFWLARYLEARGVEVYVIQPSSVLVDRRARRAKTDALDVEMLMRTLLAWLRGEPGVCSMVPIPDVAEEDGRRPVRERQGLIGERLALLNEIDGLLATFGITGYRPLRRDRRAQLAALRTPEGDPLATNAAARIGRILDRLELVMQQIAELEQVRDAVLAKEAASGEAETMIRGLARLKGIGAELATVLVWEAYVRSFPNRKALGAYAGLTGTPFASGSTTREQGISKAGNRRLRSSLVELAWLWLRYQPDSKLAAWFRSRTGSVGSRMRKVMIVALARKLLVALWRFCRDGVLPEGAALKAT

SEQ ID NO: 334171 - protein, 313 aa, unidentified
MSQTNHKIMFAGLDVAKSSLQLHWAGKFHCLTNDAAGWRRLLKLLAAQPGVHVICEATGGYEQAVVEALQAATLAVSVVEAGRVRHFARAKGLRAKTDPIDAAVLTQYGQAFHPASTAAVEPRQRQLSALAARRRQLIDLKIIEQNRAGHYADGFSKKQSRQLLALLEKQIEQCDQQIAQLIEQDPLLNSKAQRLKTIPGVGSTTAASVLADMPELGCLSPSAAAALAGVAPYDRQSGHSDRQRHIGGGRKSIRCALYMATLSAVRHDRILREFYQRLRTAGKPAKLALTACMRKLIMLMNRLIKNPQFSLAT

SEQ ID NO: 334172 - protein, 342 aa, unidentified
MLIIGCDYHPSMQQIAWCDEASGERGERRLEHHSGAAEKFYRELKQRGVQVRVGIEACGHTRWFEGLLAELEMELWIGNPAKIAAQRVRKQKTDRGDAQLLLQLLLENRFPKLWTPSAENRDLRQLLWHRHRLVQMRTRVKNQLHAIALNQGVQRRSRLFSKQGRAQLEAFTLGPWTARRRQDLLRLLDQLTPQIAELSRAVEQEAERRPEVRRLMTHPGVGPITALAFVLVLGSPQRFQCGKQVGSYLGLIPCEDSSGGKQRLGHLSKQGNILLRYLLIEAAQAAVRSDPQWRRRFIHLAMRRQRNIAIAAMARKLAVSLYWLWRNAEQSPVAPQSGSHVG

SEQ ID NO: 334173 - protein, 307 aa, unidentified
MEQITRGVVRGEAVRVGVDLAKRVIQVHAVDSAGHVLSGRALSRDKFLPWCAQLPAGCIVAMETSSSAHHWARKLAALGLDARIIAAQLVSPYRKQGASGKNDANDAAAICETASRPQMHFVPVKTIEQQSMLCVHRLREGMKADRTACINRTRGLLAEFGLVFAQSPAALQAVLGDVLEDASNEMNTLARLVVQRLQAQWREIDTHIAWCDERIAAHARDNDSVKKAATLLGIGPVGASAAVATVGEFKQFRSGAQFSAWMGIVPRQHSSSGTASARCACLPCLQRPSTETSAEESDQMRASPPQT

SEQ ID NO: 334174 - protein, 359 aa, unidentified
MDIRDPAKRHVVGGVDTHKDLHVAAVVDERDRVLGSRSFTTTRQGYRQMLAWMGSFGEVQRIGIESTGSYGAGLLRFVQTVGIEVLEVTTPDRHDRRRRGKNDDLDAQNAAHAAFAGQRTVTPRSRDGMVESLRVLSACRKTAVAARRVALQLIQNTIVCAPDGLRDDLRSMTRMQLIRTLAAWRPDLTAYRDVEAAYRITFKSLARRYLELHDEIADLDVMIGAIVDELAPDLVARNSIGHVGAAQLLLTAGDNPDRLRSEASFAALCGTSPVPASSGKTIRHRLNRGGDRHANSALHIIAIGRLRTDPKTKKYVVKRIAEGHSKLEAIRALKRYIAREVFTLIMRRHKTINQTQIAA

SEQ ID NO: 334175 - protein, 410 aa, unidentified
MEVKYRRCCGLDVHKDTVVACVRIVSGGEVVSEVRTFQTTTASLIALSRWLAENGCTHVAMEATGVYWKPVWHILADGDFQLVLANASHVKNVPGRKTVVNDATWLADLLAHGLIRASFVPDTQTQELRNLLRTRKQLVREKASHILRIQKTLEDANIKLDSVITDVMGMSGRAMIEALIAGENNPAKLARLANYRLKTSQEKLREALRGRVTKHHRFLLRLHLSQIDGLDASIAAIDQQVEAGIAPFRTAVDLVTSVPGVGSLGAQVIVSEIGTDMGRFPSDSHLISWAGICPRNDESAGKRRSNRLRKGAPWLKTTLVQCAWAAVRKKDSYLQAQFHRIKSRRGPKKAIMAVAASILTAIYHMLKDGTLYHDLGANHFQSRSKGQQTKRLVKRLADLGYDVALTPVTN

SEQ ID NO: 334176 - protein, 416 aa, unidentified
MEVLYPRCAGLDVHKDTVVACVRVAGEGKAQTEVRTFDTTTPGLLALADWLGEHSCTHVAMEATGVYWKPVWHVLSDGDLTLILANAAHVKNVPGRKTDVADATWLADLLAHGLIRASFVPEAATQAMRALLRTRKQLVREQASHIQRIQKTLEDANLKLASVLTNIMGLSGRAILDALINGQTDPDHLLTLVDRRVKAPPDKLRAALQGRLTDRHRFLLRLHLRQIDALASAMAEIDQEVDHDLDPFRDAVRLLSSIPGVSELTAQVIVSEIGTDMSRFPTAGHLISWAGLCPRNDESAGKRRSNRLRKGAPWLKTTLVQCAWAGARKKASYLNAQFQRLRYRRGPKKAICAVAASILTAAYHMLRDGTFYRDLGPDHFQTASPQAQAQRLAAKITQLGFICTITEGQTVEAVSV

SEQ ID NO: 334177 - protein, 351 aa, unidentified
MTCKKDVAVVRTIGIDTGKNTLHMIGLNEKSAIVLREKVSRNRIAARLVNIPPCLIGIEAGMATHYMSRDLLALGHEVKQVPPAYAKPFRQGHKNDFRDAHAVAEAVQRPSTRCVPIKTDDQLDLQALHRVRSRLIGDRTAVINQVRGFLLEHGIAVRQGPRSLRQQLPQILATRTDVLSPRILRIIEDIVDDWKYLDDRIEKVTDEIEGLARTDVNCGQLISVPGIGPIIASATVAAVGNGTAFAKGRDFAAWLGLVPKQMSTGDRTILGRITKRGNRYLRMLFVQGARAILLRPKSWAKYSFGPWLTAAAQRLHRNILTIALANKLARIALTVLVQGRSYESRIVPAAA

SEQ ID NO: 334178 - protein, 338 aa, unidentified
MKKITTIGLDLAKNVFHVICCNEHGKVIRKKMLRRKEVILFFTQISPCLVGMEACSGAHYWAHQFTALGHQVKLIPAQFVKPFVQGNKNDYNDALAIAEAVVRPNMRFVTPKTTAQQDLQALHRLRERRLQERTALCNQVRGLLTEYGLVLPQGVNVIRRSIPALLEDAENGLSDLFRQLLAQCYQQLQELDEHIAFYTQTLEIQNQRDEACQRLQTIPGFGPIIASVFYATVGDGSAFQRGRDVSASLGLVPRQHSSGGTNTLLGISKRGDSYLRSLLVHGARSVVLHAQRKDDRLSCWINKIRSERGYNKASVALANKLARIGWAVLSQQTVYRAV

SEQ ID NO: 334179 - protein, 335 aa, unidentified
MQIYGIDLAKEKFDVSFFDLTSKKVSNQPSHKVVKNNFKSIGRFLETLPSDAVLVAEHTGVYGDNLLKCCMDSNVKIAFVGGYVIHRYRATPDRAKTDVLDCALLRDFGERYPDKLKYKTFPEEALYELRQLARHREMLVEQRKQLITADKSEDCRPVRSLVVKRSMDRIKEMLDTEIAETEKEMLKVINGHESIRHNYELVKSVDGVGLITAVELLVKTENFTKITTARQYAAYAGTAPYEKSSGKMDKGAHISKIGNRRSKTLLYICAESARLHNKEIKLYYERRTLIDKKPRHYVLNAIANKLLRIIFTLVEKGEYYDANFIRQDPRVVKYN

SEQ ID NO: 334180 - protein, 323 aa, unidentified
MNLLALGIDIAKLKFNVCLIREDGRLRHKVFANTAAGFSQLSAWLTANNVPQVHACLEATGTYGEALATYLADSGHRVSVVNPAAIKSYAGCQLSRTKTDKLDGELIARFCLTQQPPLWTPLAPEIRTLQALVRRLDSLQEMHTMEVNRLSSGVSVPAVETSIQSLIKSLEGEIKRTEKLIKEHINSHPTLKSDRDLLLSIPGIGAATTARLLAEINFHHHDTARSVAAFTGLVPRLRQSGTSVRGRARLSKVGSPRIRHALYFPAVTAIRCNPQIKAWAKALRERGKCEMQIIGAVMRKLIHLAYGVLKSGRPYDPLYAQNA

SEQ ID NO: 334181 - protein, 334 aa, unidentified
MSLRLLAIDLGKRSFHIHGIDSDGVIISRKTSRFKLIETIGELAPETIAMEACASAHYWGRGFLAAGHRVLLINPRFVKPFVKGSKNDAADAEGIYEAALRPTMRFVPVKSTEQQDLQSLHRTRDRIVCARTALINHIRGLLGEYGVILPQGAWRFLAQANDAIADAELSDFARALFSDMLDELGSLDFRLEKLDRQLVAICRTNEACRRLSKLPGVGPVVATALVAAVDDGRHFRSGRELAAWIGLVPRQYTTGGKPRLGGIGRRANHYLRRQMIHGARSVMFRLAKHEDRRSQWLKGLAARRGFNRTIVALANKTARAAWALLTRKEDYVAA

SEQ ID NO: 334182 - protein, 365 aa, unidentified
MAMAASESPATVSEVVLGVDTHLEMHVAVALDGLGRRLGELAVSTTTKGYERLICWAQSFGTVGCAGVEGTGSYGAGLARYLRAAGISVVEVERPKRRHLRRNGKSDPIDAEAAARAVLADDTVGEPKSGDGQVEMIRSLRSARQSAVKARTQAANQLQALLVTAPEDLRHRLRELPTKDLVDTCARFRPGSDLDEVHTATRFALRSVARRHQQLSEEIAELDEQLDRLVAKAAPELTALTGVGTDHAATLLTVAGDNPQRLKSEASFASLCGVSPIEASSGKVVRHRLNRGGDRDANRALHLICVVRMRHDQRTKEYVARRTAEGKSKREIIRCLKRYIAREIYRLLAPIAAASLPTAPGSQAA

SEQ ID NO: 334183 - protein, 415 aa, unidentified
MEPIYQRVAGMDVHRMKHVVTVLIAQEDGTVASETREFGGFKRDMHALTDWLRANRIQQVVMESTGIYWKSVFSHLEAAGIPALVVNAFHVRNVPGRKTDVSDSEWLAQLARFGLLRGSFIPPKDLRELRLVSRYRRKLTGTLAAEKNRLHKLLDDAGIKLGGVVADIDGACASKMIEGLIAGSAPEQLSALGRGKLKAKAEVLEAAMDGELSARHRLVLDMVLNHLRYLEQKLAVLDRYLIEAMKPYAWAWRLLQTIPGVDEIIATMILIEIGDDLHRFGSPSRLASWTGLCPGNHESAGKRKSGKTRHGNPIVRSILCEAANAARRTKTVFQAKYNSLVIRRGHKKTIIALAHKLIRTIFFVLVRRKPYRDSSVDYEAASVAKNAPRWIRALKKYGYWPQLTDPTPKPAPTAT

SEQ ID NO: 334184 - protein, 444 aa, unidentified
MARKSKKQRLTIVHHRCAGIDIGSREHWVAVNPEHSDQPVRCFTSFTDDLQVLADWLQSLAVKVVAMEATGVYWIPLYELLDARGFEVHLVNSRATRQVSGRKSDVLDCQWIWQLMSYGLLRGAFRPGEAVCALRSFVRQRDSLVEGRSRSVAHMQKALTQMNLQLDNVVSDLMGQTGTAILRGIVAGERDPQQLATLRDRRLKADEATIARSLHGNWRDEHLFALTQALAHYDFLGEQIAACDQQIEQALSRLPKLTEESTEAVKLLRSKHRSDTLQKQLHQALHTVMGVDLCAIPTIGVDTALVLAGEIGADLSRFPSEKQFCAWLSLVPPTNISGGKRLPGRKPKVFNRAGQALRQAAANARRSESFIGANHRARLARMDTAEAIKATAHQLARLIYAMLTKGQPYVEKGMKTYETLSKDRQLRALQRKANKFGLTLTEAA

SEQ ID NO: 334185 - protein, 342 aa, unidentified
MDHFAGLDVSVKETSICIVDDAGKIVREVKVASEPEALLAVLKNLAYHFKRIGLEAGPLSQWLFSALAEAGLPVICVETRHMQAVLKAQINKTDRNDARGIAQMMRAGLYRPVHVKTIRSQKLRMLLTHRKLLQSKAIAIENDLRGTLRNFGLKVGMVGKVKFEARIRELVENLPDLAVLVEPMLIVRRTLREQIVILHRRLLAIVRDDEVCRRLMTTPGVGPVVALTYRATVDVPARFRKSKAVGAVFGLTCAKYQSGEVDRNGRISRCGDEMMRVMLYEAAQSMLRSKKWSWLKAWAMQIARRRGMKKAIVALARRLAVIMHRIWVDGTEFRWTREVAAA

SEQ ID NO: 334186 - protein, 343 aa, unidentified
MKYIGLDLHKKSIFATVLGEDGKILSRAKIGSKTRDIYYYLKNQGKREELSVAMEASYNWPYYYRAVEEAADTIVLAHPLKTRIIGEAKIKTDKIDSKVLAYMLKADMLPRAYVPSRDTMENKMLLRARISLVRIRTQIKNKIHAIVDRNRDSYIGLENIADIFGKTGKKILRDTTICPTDHKIITGYLDLMDEIDKKIKDIESQIDKRSLKDRDIELLKTIPGIGTFTAFLVKSEIDDILRFSSKGKLSSYAGLIPSTHGSGQRLHHGRIVKQGNKFLRWALTEAAQTSIRCSEYFRYHYSRIKSRKNANSATIAVARRLLEIIYVMLKEGREYIEKPVDIK

SEQ ID NO: 334187 - protein, 402 aa, unidentified
MQFFVGIDWATQAHTVCVIDQAGRSRWQGAVPHTSAGLAELRARLRRLRRRGPVRIALERPSGLLVDTLVDAGLEVVPIHPNALKASRPRYSAAGGKSDPGDAFILADVLRTDGHRFRPLRPPSDDTRALRALVRGRDDLVAQRVALANQLRALLERFWPGAAAIFADVDSPIALAFLARYPTPHSAVRLGQKRLAQFLGQHAYCGRRPVAELLARLRTAPASQVGEAEAEASGDVVRTLVAVLNPLGAQIQQLTAAIEAALPQHPDGRLLQSLPRSGAINAAQILAELGDDRTRFPTDDQLAAEGGLAPVTHASGKHHAVVFRWACNKRLRRALTTFADNSRHASRWAALVYQRARARGCRHPHAIRILARAWTRILWRCWQDRTPYDVSRHRAAQTLVAA

SEQ ID NO: 334188 - protein, 352 aa, unidentified
MDATTVAVDLAKDVFEVALANRAGRIIERKRLTRRQFERLIDALQPGTELVMEACGTAHYWGRRAQVRDVQVRLLPPQYVRPYVRRNKTDRTDAEALLEATRCGDSRPVPVKTLEQQTLLALHRVRRHWQADRTARINTMRGLLREHGLPIAVGARTALTRIPTLLEDATVELPDVVRHLVWLRLEEVRGLDARIVGVDQQLTRVAREHPIARRLQQVPGIGVLTSTAFVGTVNHIHAFRRGRQFASWLGLTPRESSTGNRRYLGRISKRGDVYLRCLLTHGARAVLLTAQRTARSAPQRLTRFQQWAVAVAAKRGHNIAAIAVANKLARIVWAVWHRGIDVQSVAAGTATA

SEQ ID NO: 334189 - protein, 346 aa, unidentified
MKHYAGLDVSLKEISICVVDETGAVQARKTVACDPAAVTRFFAEKRIAPVLTVHESGQLSIWLQRSLSDLGLAVTCVDARVAHKVLSARLNKSDAADAEGLAQLARTGWITPVHVRSLDADRLRTLIGARDRLLRLRNDLERHVRGVLKTFGIRMTGIHQGKLRQSFRDQLAEAASREPVFGLIAEGFMTVHATLCSAAAAIHKDLRDLAKESELARRLMTVPGVGAIVALNFIAVVDRADRFGRSASIGAFLGLTPRRYQSGETDYQGRISKCGDAAMRTLLFEAATSLMCRVKRFSPLKSWALRLAARKGAKRARVAAARKIAVLMLTLWKTGADFRWTAEAAA

SEQ ID NO: 334190 - protein, 373 aa, unidentified
MFHFTTLFIGMDVHKESFSLCYYDMMTNQFKHSTKVSPNVSYIVNYVNELRRLYGQDAEVLCGYEAGCLGFTLYHQLQAHGIPCIVMAPTTVMKEGSKRVKTDKKDAAQLAKALAFRSYRPVRIPTAEDEQVKEYIRMRTDHKVALKKIKQQILAFCLRHDFRYTEGSSNWTQKHVRWLRSLNPDGLYAEILTEYLLTYEKLVDQIERYDARIEQLGQSDSYQEKVSRLSCFIGIKTLTALSIVTEIGDFNRFATAQHFASYLGLTPSENSSGDKERKGAITKAGNSHVRRLLIEAAQSLAKGTIGYKSKELKRRQSGNRVEVIAYADKANERLRRRYRTLVLGKNKKQNVAKTAIARELSGFIWGMMTGRIA

SEQ ID NO: 334191 - protein, 396 aa, unidentified
MLRTKLQKQNDFTGQDFYIGLDVHKQSWAVTIRSLGIEVGHFTQEPDAAGLHQYLQRNFPGGQYHSAYEAGFCGTGAHEQLCKAGIDNMIVHAADVPSTDKQKKSKTDLHDSRAIADHLERGNLHGIYVLSQEQQELRSLFRLRECKVKDTTRANNRLKSFLMYYGIIIPEGVSKRGDLTGRALAWLDIELQSAAGTIVLQEYIAELKYQRKQLFQLTKTLREQVMAHDKQTYVNLITIPGMGSITAMGLITEIGDFRRFDDPDEYSSYLGLYPWEDSSGDCIKTKGMQPRCNSHLRPLLVEASWQAIRKSRNLFAYYSKHAGGKNGKKAIVKVARKLAMIARGVAISGQPYQEDYQKKDNKHEPAKKMKAGRFSSGIAEQHINKQPNYGRMSMPG

SEQ ID NO: 334192 - protein, 358 aa, unidentified
MQRNKISFKGQKIFVGIDVHAKNWEVAIAPEVGIVKRHSQKPSAKELFDFLKKNYPDGDYQSVYESGFSGYSTYYALKEVGIDCMVIHAADVPTTQYEEVMKTDRVDAVKLARSLKAGLLKSNYVPEKQYIDDRSVVRIRKTIQKQLSGYKSRVKHLLHCHGVEFPERFSKKQTHWSRAFITWLMNDVRLMSDTRASLDLLIRQVEVLRGTLLEATRQLRMMSQTERYKHRHDLLRTIPGIGIIVTMSILTEVCDVKRFHNENEFAAYLGLIPTSHSSGEKTVHGEKTFRGNKQLGPMIIEAAWITISRDAGLGAQYFQYKQRMEPQEAIVRIARKLSNIIFSVLKNEKEYVPYQTGN

SEQ ID NO: 334193 - protein, 425 aa, unidentified
MGSAEVYVAVPPDRDSESVRAFPTFTRDLHELAHWLLACRITSVAMESTGIYWIPLYDILQHAGIEVCLVNARHVKNVPGKKSDVLDCQWLQQLHSYGLLSSSFRPAEEIRRLRTVSRQRDMLLRYRAAHLQHMQKALHEMNIQLDNVISDITGTTGLAILRAILEGERNPLVLAQHRDPHCRSSQEDIVKSLEGSYLDEHLFELKQALELYDFYSKQILDCDSRLQTLYASSERSPHSQQPPPPTTKAKKRARQDPPFDLRTCLYQLSGVDLTQVDGLNAVTVQMILSETGVDMSKWPTRKHFTSWLSLCPNNKISGGKILDTQTKKTTNRAAYAFRLAARSLYHSKSALGAYYRRIQAKHGPQLAIKATAHKLARIVYTMIKTQTEYHDLGELYYEQQYHERTLRRLQRKATELGFQLVPVTS

SEQ ID NO: 334194 - protein, 387 aa, unidentified
MTKNKGRVVGLDVHPDSFAGAVVQGSDPASAVVSSTSTRVELEQLEHWALRHTSTEDTLVLEASGNAFAVAARLRAIGREVEILDSHRAGKVGKVYCANDRVDAVKIARIYLSALSPIVWQPDQKTLERREIFSAYQAVVKESTRARQQLRSMLNEHCVRLEKGFRLCHPQAIRRLLALREWTQARRMLLQQLHGSLVAARVRRTMLRRHMAQEIVAEEALLRLTRLCGINLITLYGVAAAVGDVRRFTHSKKLVAYLGLNPSVSQSGNFQGSGALKRHGRGALRALLIQSGKKLLEVNNPLQKWGLAVAARRGRNKAAVAVARKLCVALWHVMMGHAIGTLERLDTLQTKLSKFATEIGPAALIAFGYNNKADFVEKKLYVLRSYP

SEQ ID NO: 334195 - protein, 482 aa, unidentified
MGHVGDIGESVATDIPFERVSTTTYLNQRDIPIEIMEDVMAKFKRSKLELIHPNAAGIDIGSASHFVAVPPDRDNKPVREFKSFTADLNGLADWLEACEIDTVAMESTGVYWIPLYELLESRGLTVYLVNARHVRNVSGRKSDVLDCQWLQQLMSFGLLSGAFRPKDEICALRAISRQRDMLIRYQARHVQHMQKALAQMNIQLANVISDIVGETGQKIVRAIITGERDGHILANLKSNRIRAGKDEIEKSLVGNWREEHLFALKQAMSLYDAYSERLTECDRQLETMLAALQVHKVEICQKKRRSNVKNAPKFDLRAHLIGMCGVDLTRIDGIEVTIAMKVLSEVGADMSRFKSAKQFASWLGLCPGTKISGGKVLSGASKRTANRAAQALRMAAVSLKSSQSALGAYYRRLCGRLDKAKAITATAHKLARLIYTMLTKGTEYVDKGQEYYEERYRQRVLHHLTVRARKLGFNLTPVPEAT

SEQ ID NO: 334196 - protein, 336 aa, unidentified
MSHYCGIDLHSNNHVVVVIDEQDRRLYERRLVNDLSLTLRALSPYRGTLEGIAVESTFNWYWLVDGLQEAGFHPRLVNTVAVKQYEGLKYSDDVHDAFWLAHLMRLGILPTGYIYPKAQRAVRDVLRRRAFLVRAACSQLTSVQNQLWRSTGIQVSCNTIRKADFEPEGVDGYTRQGVEAGLAVLRTLYDEIQKLERSALDAVALSDEFRILRTIDGVGSILGLTIMLEVGDIGRFPSAGDFASYCRCVDAKRVSNGKKKGTGNAKAGNKYLSWAFSEAAHFAVRFQPLAQRFYERKRAKTNGIIAIRAVARKLARATWMMLKHQTPYEARLMFPG

SEQ ID NO: 334197 - protein, 387 aa, unidentified
MPQPNDLSRSLVALDQNSTIIAVVELSHSSWLVGGVVPGIERQPRKKLEPHPERLLALLHRWRDEAVKAGRTITRIALAFEAGRDGFWLARWLETRGVEAHVIHASSLAVSREHRRAKTDRLDTELLKRGFLGWLRGERGHCSMARVPTIAEEDAKRPNRERDCLVGERTRIVNRIKSTLARLGIRNFKPTLRKAAERLATVYTPEGMPLPPNTLAELQRDMARLGVVISQIRQIEEARQKRLEQQHETGPHAMVRLLARIVGVGVETADMLVHEVLSRPMRDRRAVARYAGLTGSPDESGVQRREQGLARAGNARVRRGMIQLAWRFLMFQKESALTLWYRARTADRRSGTRKTMIVALARKLIIALWRFVTTGEPLEGVVLRPAT

SEQ ID NO: 334198 - protein, 359 aa, unidentified
MKIVGCDFHPAWQQVAIFDPETGEISELKLLNGDGEAERFYRELEAPALIGIEACGNSQWFIELAERLGHAVWIGDAAQIRASYVRRQKTDRRDAGHILKLLMESRFPRLWTPSAEQRDLRQLLIHRHKLVEIRTRIKNGLQHLALNRGMQKGSRLWSARGRADMEKLPLAGWTARRREDLLRLLGELDRHVDELDQAVKCAAAEHPQARLLMTQPGVGPITSLAFVLTIGDASRFRHSNQVASYLGLIPREHSSGGKQRLGAITKQGNRFMRQLLVEAAQSVTRLDEGFRKEYAARCHHKPKGVAKVAAARKLAVRLYWMLRQNVGYPEIALIESSPAVPLAGKSHADELSGRSRIQQ

SEQ ID NO: 334199 - protein, 428 aa, unidentified
MQIIQKRIERITPTTIIVGIDTAKETHWAQITDHRGIALVKPFKIHNSINGFENLLLRVEKQVKKQGCDKVVIGMEPSGHYWRALGWYLKLHESKPELVGVNPYHTKQAKELDDNSQTKSDPKDALTIAHLIRNGNYFDTYLPEDEYAELRQLNTERQRLMKQISRANNVLIAQLDEYFPEYATVWSNITCPTSLELLKTYALPSDIMSASREKLLEDIRIASNGKESVKLMGEMIRAASRSIGVKEGKKAVRLRILNLIDELIYFQNKKDAIEAELESVMDTLQLGSVLQSMLGIGPIISAAFMGEIGDIRRFDNWKQVRSLAGLNLVEDSSGQHKGKTKVSKRGRPYLRHMLYLAGECGCRCNTEMHEFYRCLRDRKKNPLNPQQAFVATGLKIMRILFHMAKTGESYDPSKALGAVRLQQIESLG

SEQ ID NO: 334200 - protein, 345 aa, unidentified
MKKTIVGVDLAKKVIQVCVVQANQIVSNDEMSPAQFTSWLAMAKPAIIVFESCATSNYWKQVAKDKGHDARIISAKLVSQIRQNQKTDKNDALAIVQASQLVDIKFLNGKTFAQQELQSIMRMRELAVKHKVALRNQIEALLLEFNIRVSPRSGGLCGTVQGVLEDAENGFCMPFRQALNATWRLYLQTVEDIAEKDKFLAQAIKLHPECEKLLALEGVSTINAVSLYIAIGCGEAGTFKTGRDASACIGLTPLQHSSGGKTKLGSIGKSMKNVALRSYLVNGAMSVINHVEKREPRTKKEKWLKQLLARKSKKCAAVALANKTVRTAFALLTQGTEYKAEPLAA

SEQ ID NO: 334201 - protein, 376 aa, unidentified
MNKCHSNTELSSHEGTRSQFNGGTGAIKSAVGRMRPVCALGIDAHQDFYVVVEQVDGTNPKPPQRFPKRAFLRWAARLKENTGAEVHAVYEACGFGFSLQRQLSSLGVQCHVVCPQKLDEQNRRVKTDGLDAKALVLKLDRFVQGNRSALALVRVPTEEEEQKRAIHRQREQLVKARKQLEAQGRSLMVNHGLEPVQSWWKPRAFAALPVPQWMKELLANSQPILVALQQKIASLTIQLQSSATPKQPRGLGLMTSVIIDREIGDWRRFSNRRQIGSYTGLCPGEYSSGNTRLQSCVTKHGNPRLRAALVELAWRLVRFQPNYKPIVKWRQILAKGALATGAARKKAIVAVARQLAVDLWRIKTGRLRAEELGLIN

SEQ ID NO: 334202 - protein, 441 aa, unidentified
MSLNDVIMIDWRGQMTRFATDEFAAFIGLDWADTKHDICLQVAGSDKREFQVLEHRPEVIDTWATDLLQRFQDRPIAIALELNKGPIVEALRKYDGLVLFHINPMMLARYREAFTPSRAKDDPTDAELQLDLLLRHRDKLKPLAPQSPEMRALSQLVEHRRRLVADRVRITNRLTSALKTYFPQVLQWFPNKETQLCCDFLSQWPTLKSAQLARRSTLARFFRQHHVHGEQRINERLEAMKSATALTSDEGIIRPQALLVQALVSQLRVTLEAIGSFDQAIAERAQQHPDFALFEALPGAGAALAPRLLVAFGEQRERYGSAAEVQTYAGIAPVMERSGKRSWVHWRCQCPKFLRQTFVEWAAESMQFSFWARAYYQQQRDKGASHQAAVRSLAFKWIRIVFRCWQTGTPYNESTYLAALQRQGSSLIPNLAKSSKKGENT

SEQ ID NO: 334203 - protein, 340 aa, unidentified
MDIAVLGIDLGKNVCSVVGLDDGGRVLVRRRLKRPAVIEFAGQSPGCVVAMEACCGAHHLARQLAAEGHEVRLMSPEYVRPYVKAQKNDDRDAEAIAEASLRPTMRFVPVKSEAQSDLQSLHRARERLITERTALINHLRAVLLERGIIIAQGRRKLEKALPEILADASGISPRIHQLIGDLREEWHMLDRRITSFDAELVSLARTDEAARRLASVPGIGTITATALVAAVGDGSAFGRGRDMAAWLGLVPRQATTGGKPRLLGISKRGNRYLRKNLIHGSRSVLPYLVRRDTPLGRWVMELMTRAHKNTVVVALANKLARIAWAVLVRGRGFDPAHVGA

SEQ ID NO: 334204 - protein, 408 aa, unidentified
MVMQIVYERCCGLDVHKKTVVACSLTPQGKEIRTFGTMTHDLCELVNWIKERQCSHVAMESTGVFWKPIFNLLEMEGIEATVFNAQHIKNVPGRKTDVKDAEWIAQLLRHGLVQGSFIPDRAQREIRELVRYRTSLVQERAREANRIQKILEGANIKLASVVSDILGTTSTMLLEGLIAGNTDPRNLASKTGNRLKAEKSQIEQSLTGFLNPHQQNMLKNQLEHVRFLDRKIEDLNQEVEERLRPFDQALELIDSIPGIGVQTAQKIVAELGVNMERFPSAHHLASWAGLAPGNNQSAGKRKSGSTKKGSTALRSTLVEAAVTVARMKNTYFASQYHRLVLRRGKKRAIVAVAHSMLVAIYHMLLRSEPYRDLGTDFLDKRNESRILTNALKRITALGYQVSVSKLPA

SEQ ID NO: 334205 - protein, 392 aa, unidentified
MTIPAEVSVYPQVFVPRDYDVFAGLDVDHHSIAATFTDHQRLMQSLRLPYSAGQLLNYVRKHFPGQRLAFVYEAGPTGFGLYDELEAAGHACLVVAPPMVPRAPGQRVKTNRLDSRKLSTALRGGELKSIHVPTPKYRELRHLVQLRDTHVQQLTATKCRIKALLLYEGISFPSDEGKEKQWSARVVNELLELPCSESVRFKLDQLVGTLHFNFNSAAAAQKQIRHFCQKDPELRQSIAWLKSLPGIGEIIATHLAARLGDPSLITNVRQIAGFLGLVSSEHSTGDKQNRGEITRAGDSRLRNKLIQSAWVSIRKDPELREFYQRVYQRHPKKVAARKAIVAVARKLTTRIYAVLKEQRPFVLRQISAAPLTTEETAGHRERLDGQQNEQSR

SEQ ID NO: 334206 - protein, 387 aa, unidentified
MPQPNDLSRSLAALDENSTLIAVIEMSQSSWLVAGMIPGVERQPAKKLTPDEGGRLRLLHRWRGEAQKAGRTIDRIAVAYEAGRDGFWLARLLRAQGIEAHVIHPNSIAVSREHRRAKTDRLDTALLKRAFLGWLRGEREHCSMAAVPSLEEEDGKRPSRERENLVGERTRIGNRVKSTLARLGIRGFKPTLRTAAERLERLRTPEGEPVPPHTLAELRREMARLRLVAEQIREIETARLERLERQPNRGAHPMIRLLAQVRGLGIETADMLAREAFSRRLRDRRAVARYGGLTGAPDESGARRREKGLAKAGNARVRRGMIQLAWRFLRFQKDSALAQWYRARTADARGATRKALIIALARKLLVALWRLVTTGEVPHGVVLRPAS

SEQ ID NO: 334207 - protein, 354 aa, unidentified
MEALKYIGMDVHTETIVIAVLNARGKQVMESVIETTASAVRDFIQGIRGTVHITFEEGTQAAWLYDILRPLVAKVVVCDPRKNTLLLAGNKGDRIDAQKLAQLLRADLLTSVYHGTHGTRTLKELARSYTALMEDCTRIMNRLKALYRARAIPCTGEGVYQKEEREQWLRKLTEGGARQRAEWLYQELDPLVALRDTARGAMVTESRKLPAHKLLQSIAGLGPVRVAQLIAAIDSPHRFRTKRQLWAYSGLAVTTKSSADYRKVKGEIHKAGHARVTRGLNPNYNRTLKHVFKDAALLASVRGALKPYYDHLVAQGMRPPLARLTVARKIAAITLAVWKKGERFDAELVMPHAA

SEQ ID NO: 334208 - protein, 343 aa, unidentified
MQAIVVVGLDIAKSVFQVHGVNAHGDVIVRRQLKRRYVVAFFKKLPSCLVGIEACATSHHWSRELRALGHTVRLIPPAYVKPYVKRQKNDAADAEAICEAVQRPSMRFVPIKTPEQQSCLMLHRTRHLFIRQQTAVINTIRAHLAEFGIVAPVGRNGVEELLYAIADQRDERIPEVARACLEALGTLLGKLKAQILEFDRQINTWHRSNETSRRLDELPGVGPALATALVASVADPKAFRSGRDFSAWIGLVPKQDSSGGKEKLGNITKQGDRYLRSLFCAGALAVIRYAKIHGVKHRPWLAKLLERRPTKVAAIALANKIARMAWAMMAKGESYREPVALAR

SEQ ID NO: 334209 - protein, 345 aa, unidentified
MNKLVPASPPTVFCGIDVSARSLSVALIAPDHPVCQRAFANSASGHRELLVWLGRWNAPVRVSLEATGIYSLDLALALDAQVGVEVAVLNPKLANRFAQTLCRSRTDAAAALVLAEYSQRMPFTPWQRPGIAELGLRTISRHIASMVVDLAEVKNRLHAAQSASTTPRAVLTDLKQAQAALQRRLAKMRREAMKLVQAEARLRQRFALLVSIPGIAEISALQILSELVLLSPATTVRQWVAYSGLDPEHHVSGSSVHKPSRISRAGNRHLRRALYMPALSAARYDPHLRAFYLALRQRHKTALQALMAVARKLLHAIYGIFKSGTPFDGCRLFPNIRTEVESIAG

SEQ ID NO: 334210 - protein, 520 aa, unidentified
MAAVRFRRYRQKRRFRFVQKPRGAFHPRVQKVGPEHFGVVSVDPAKARSKWMLCDFYGNIIVPPTFLVHDRIGFDQALSNIRQAMTGRHLHDLLIAIERTGSYHRIVQRAFSGAGFETRIVHPFATKQHRQPSDPGNKTDDTDLMAIHRSAIGGFALIEQPWDQTSRELCLLIRYRRDLVRQTSRLACQIREHLEASWPGYAANFYNLWLSEVAWEFFDQFETPDDILAAGAQGLRDRLRQAQVRFHRETVERVLNWARTAPAGEREAMLHRRIVMALRADRQQKCREIQALERESAARLVRTPYILLLSFPGINVVSDADFAGEMGPIEHYANNRTITGRAGLYPSRYQSDQVDTSGALVRLGNRRLRAAIMAIADNLMGCNHYFRVLAHRWKDQGKDPRYSHVKIASRFCRIAFQMVAGRQIFHHPGVQQRHYILEKLLAFHREHETPADQMLADVEAAMTYLTPKMRRMEAQPLAEQLRQVQEGRRGPQLLGDILPIVLARLGVGGLQSRASGERPR

SEQ ID NO: 334211 - protein, 331 aa, unidentified
MEQRKTIIGIDVSKKTLDIFIKTLDVYLQISNNAEGFKKLLALLKTSKLKLEDCFFVLEYTGGYEYRLVQFCQSKQISYVRISGLAIKRSMGLVRGKNDKIDARRIADYGDEKQSKLEAETASLDGIVRLKRLLSQRDVFVSDRKAHQNRYQEIQYMMDLPEKDSMLKRYKKIADELQKLIDKTEDEIRKLIKANDAFQFNFDLITSIKGIGEVNGWTMIAYTENFTSFDNARQFGAYIGVVPYPYSSGTSIKGKSRTSKMANQHIKALLDMAARAAINHDRESTLYYERRIAAGKHHMAVMNEIKFKLVRIMFAVVKKQEPYVDKYKNVG

SEQ ID NO: 334212 - protein, 339 aa, unidentified
MFYAGIDLHKQSITVCVVDKHLNVQIRKRLMCANESAIIAFFTELGLFRAVVEATASHEWFVKLIESLAEKVVLAHPGKLRIIAESTRKSDRLDAQILAEFLALDIIPTSYRATPRQRDHRCLVRQRNTIQRWITSVKNRIRRIMSNYNADRQDLFSKAGQEFVSTYSLSAADRFSMDQLIAEWNFFRQQLQAANQALKGFASAAPIREQHQRELLQSIPGVGFVTTEVVLSEIADIDRFDSQKQVVAYAGLAPGQRESAGKSKELHIEKSGSRHLRWALVEAAWQLVRRVPRWKTIYERLKKRLKAKKAIVAIARRLLGMMVAIMKSGEPFSVTHQPA

SEQ ID NO: 334213 - protein, 354 aa, unidentified
MIIFGIDLGSTSRKASKSYISVLNTDTGEIERTSCPTTSEGLLAKIGTYRPHRVVVEQTVGTGWFVDMCRGAGVPEVQVANPRDPAWRNRTSKTDRQDADLLTHLSASGQLRTVHVPPDQIRQWRILIDYRHELVHRRTRIKNRIKSLLRNRGLPTGSLWNREGMASLRAMAMPMDACSITELWRGELFTEYCQLKEIEEHLGSITEHLDRLVAACAPARAMADLPGIGPRTAEAMVATIDDPLRFSDRKKVGGYLGVVPRVRQSGAVARYGGITRSGDALVRTMLTQAVHSAIRRQDGWMYDIYQKHHRTDEGCPNRAAMATVRRVSIILWAKFRDHRRANPGQPLFPERVAA

SEQ ID NO: 334214 - protein, 428 aa, unidentified
MEESIEEPVGFVARVCAIDVGKAGLVVCVRVPHERNPARRVQEVREYATTTPSLLGLAEWLHHLRIELVAMEATSDYWKPVFYLLEAEGFECWLLNAKHVKNVPGRPKTDKLESVWLAKVVERGMCRPSLVHPRPIRRLRDVTRYRRSLVREQSREKQRLEKILEDAQIKLDTVIANLHGVSGRQMLQAMIDGQRDPTVLAQMAHGRMRSKIPQLREALTGHFDEHHAFLCATMLRRIDTLAADIAALDTRIQELIAPFCEAVTKLDEITGIGERSAQEIIAEIGVSMGVFPTAAHLVSWAKFAPIDHQSAGKNKGASTGKGNPWLAATLGEAVAAVSRTDTFLGERYRRLIRRRGKKRAIVAVGNSMLTIIWHLLSDPEARYRDLGSGFYESKIDRQRKQRDLVRQLEHLTGHKVTLEPRPSLPAAA

SEQ ID NO: 334215 - protein, 418 aa, unidentified
MDLDEVVYRVACGLDVHFTFVTACLVTTGPKGKPKVEERRFPTNQKGLNSLREWLTENGCEAVGMEATGVYWMPVYAALEGACTLVVGNPQHMKNARGHKTDRMDARWIAGQVRHGRIRSSFVPPPEFREARRLARCRRQLVEARTSIRNEIQRLLAEVGITLAGVVSDVFGTSGTSILNALSEGKCVRDELSIHLYSSLRKKDKMASIAAALEAPLPEVSRQLLAIHLRRIEALDGNIDEVETLLFRQLAPHAGKLDLLQRIPGISKLSAHIILAEIGVDMTVWPTAKKFSAWAGVAPGCNQTGGRSKRAAVRKGNPYLCTMLMECAGGAVQKLDSHLRMKHRKLCAQLGSKKKARMAIAHKLALIIYKVLGENVEYKDPEPKQPSEKAKRRILQTRVKDLERLGYRVVLEPIEAVS

SEQ ID NO: 334216 - protein, 439 aa, unidentified
MSFAHRFSCSDDDGKEDQVRAVALDVHRDFCEVAIVDGGRVRSAGRVEARPEALELFAASLDPRDWVALEVTGNAWEIARIIEPHVRRVIVVSPSDTGIRQARAKTDRLDARALAKLLWAGQLDGVWTPDERIRAMRRRLARRSQLVRARSRAKNEVHAVLMRCLKDRPPASDLFGVKGRRWLAEQQLPLTERETVDSAMRQVEFLDAEIAEVEKLIAGEALSWPQIKRLMTVPGVNVIVAATFMAAVGDIHRFADRRKLTGYLGLDPRVRQSGAGPATHGHISKQGSASARHALVEACWSTVRQPGPIAGFYQRVKARRGHSIAIVASARKLACLFWCLLTRGEDYAFAQPSLTKKKMRRLELQAGAPRRQGGHGIWSTNDAMRQAERELALQAQRAYERTIQDRQRNTGASATPGRASHGSSKEHVARQTPRPKSAL

SEQ ID NO: 334217 - protein, 391 aa, unidentified
MSKTCRVVIGMDPHKRSATIEAMAADEQVLGGGRFGTDPAGFEAMLAQAGQWPDRVWAVEGCEGIGKHLVLRLLDAGETVIDVPAKLSARMRVYATGQGRKTDDTDAHSIALVGVRMTGLRHVVGDESLEVLRLLVDRRRRIGEDHTRMVCQLHVLLLELLPGGAKKDLSAAQARKLLAGVRPKDVAGKTRKRVALELVADLERVYTRKKAANKELAALIKQAGTGLFGLHGIGPSGAARLLVEVGDITRFPTKGHFASWTGTAPIDASSGDNVRHRLSRGGNRQINMALHMMAVVQLRNATQGRAYYDRKVAAGKTPNEAMRCLKRRLSDIVYRTMLDDLVASAGTGPGGHRGNDSESSVAGSHPHTSSSDKSLPGPATVKPRTSRRNAA

SEQ ID NO: 334218 - protein, 339 aa, unidentified
MNITTVGLDLAKNVFHVVCLNEHNKEVKKRMLRRNQVRQFFAQLSPCKVGMEACATSHYWGRELIALGHDVKLIPPQQVKPMVQGNKNDYNDALAIAETVNRPKVTFVAVKTVEEHDIQAIHRMRSQCIRDRTALSNSTRGLLGEYGISFSKGLATLRRTIPELLEDAENGLSLRFRNLLARRYEQLAELDEHIAFYTKELELLSQQDEACQRLQTIPGFGPIVASAFRSTIGNGSAYTRGRHAAASLGLVPRQYSSGGNTLLLGISKRGDRYLRKLLVHGARTVVRHAIDREDPFSRWINRVSERRGKNRAAVAVANKLARVGWAVLRYNTQYDPTLT

SEQ ID NO: 334219 - protein, 393 aa, unidentified
MENVIIVGCDLHDRSMLIRYAIRDAEPQQQSFRNDTEGRLKMIRVLGELAGKRAAWRIVFAYEASGQGYGLFDLLYDNGIECYVLSPTLLPKTPKRAKMKTDPKDAQMLLEQLRGHVLAGNPLPVVWTPPQRLRDDRELVRSRLEAADSSTRTKLQILSMLKRRGIEKPQWHRGNWTKRWISWLRELAGKLDRCVDPVLGSLIDRFELYRSEMAKLERHIIELARTPRYAAAHAELRKIAGVGLLTAMTFLTEMGDLTRFENRRQVAAYLGLCPASYESGESNNRKGRITRQGPSRLRRMLCQAVWSSLSRDSEASAAYERIKGGKPQRNKKAIVALMRRLGIKMWHRALAFGVSSELVGRGGPEHVRTSAQAQQRGAVPFVSPSPRPQPSPG

SEQ ID NO: 334220 - protein, 333 aa, unidentified
MDTETGELGEQRLIHPKEAEQFYGELKERNIAVRVGMEASGHARWFERLLRQLQFELWIGDAAEIRTKGVRKQKTDRQDAQLLLRLIMEDRFPRIWVADAENRDLRQLLWHRHRLVQMRTRVMNQLHVVALNEGLRRRKALWRPGGRKELELIALAPWAGRRRQDLLDLFDQLTPKIQELTRALEQEVEKRPVTRRLMTHPGVGPLTALAYELVIGTPERFHNGKQIASYVGLVPEEKSSGDRRRLGHISKQGNALLRFLLVEAAQVTIRSQAQWRSKFFHLAMRRGRKIAKVAMARKLAVHLYWMWRQGWDYGQFKRFGSYAGEPGHPDGKQ

SEQ ID NO: 334221 - protein, 379 aa, unidentified
MMFTGAAAETRETVYAAIELSKKTWVLGIATPDRDRPSIHRISGGNIEELVSRLRAAAKNNRQILVCYEAGYDGFWLARALAKIGIECRVLDPASIQVNRRARRVKTDRIDVLALVRALIATDRGERHVCAVVRVPSVEEEDARRSHRERQRLVRERTGHINRIKGLLFAQGIRDIKPKLRRTQIDFAALETAEGHPLPHRLRRELEREYARLALIQAQLREVESERDTADAQDPVVERKRQMLVAVQGVGGTSAAILAREVFARSFGSRQQLGSYLGLTPSAYDSGSVTRSQGISKAGNSWARRILIEVAWLWQKYQPTSPLSVWYMQKTTGQSSRIRRIMLIALARKLAISLWRYVETGLLPEGVVMARAKAQCASA

SEQ ID NO: 334222 - protein, 370 aa, unidentified
MKVYIGIDAHSTNYTLSSYNSEADDCTNAVTLKPEYEGIVKYAEKIKELHGPNTTVLCGYEAGCLGYTLYKQLTGAGVPCVIMAPSTIETVQHNKKHGKKTDKRDACSIAKALAYGLYRKVYVPDEHDVDVREYIRMRADHKKALKKIKQQILAFCLRNGYLYTETAKWTQKHISWLRSVEMRSMQRETMDEYMIAYDTFINYLDQIDTRIEEIAQEDRYKNKMAVLRCLKGIDTLTALALLSEISDFNRFSKADQFASYLGLVPGQDSSSDNVKYLGITKAGNSHLRTLLVEAAQTYSRGSAAVKSKALKSRQSGNDEQVIAYADKAKVRLSKKFRKLQARGVKYSVATAAIARELACFTWGLMTDHIN

SEQ ID NO: 334223 - protein, 395 aa, unidentified
MYFLGIDIGKRTHVASLMCEEGKVILKGFSFPNTTEGADSLIERLSKYSETPADFIVGMEATGHYWLSIFSYLHESDFLIHVVNPLQTDGWRKGTEIRKRKNDIIDSVLIADLMRYGSFVETVLSDENVFSLKQLSRYRTYLVGTASDFKRKIIAVLDQVFPEYASIFSKQGIFGKASKELLLEFSSPIELEEISAETLAQYLAELSRNRIKPEKADQLKQAASNSFGVKFAQEPFTFQLRSMIEQLKFIESQVKETEKEIKRIMSNLDSVILTIPGIGPINGATILGEIGDIRKFSNPKKLVAYAGIDASVSQSGQYEATHNVMSKRGSPYLRKALFSAALVASQCDPVFRAFYQKKISEGKHHLTALDAVSRKLCYVIHAILTKNEPYKIVSD

SEQ ID NO: 334224 - protein, 333 aa, unidentified
MTKKQVIVAIGIDVSKETLTVCERYEKKKRFYDLKNDRREIEKWTKKLKRSGYQGKIVMESTGRHHLPLAVALKNKDLDVRVINPLLSKKYASSSVHKVKTDKRDSEMLSQVALCEERLPETFHLEKREILLKKKISLVAMMDKELQKMKASVKEFNATAQELGFELTVCDREIMEAIKTLGKKKEELEKEIEMIMEENQSEEVERYSTIPGVSLYGATVFTLFFSTEHNLSPRQWISFSGLDISVRESGHWKGKGKLTKRGNCYLRKRLYQAAWGAIMHDDSFKSYYDLLRKEGRKYVEALTVIARKLVTIMFNLSLSKQAFDPSKLLFRTE

SEQ ID NO: 334225 - protein, 446 aa, unidentified
MSALAVLDPRAAFVDVGSEKMHVSIGGGLPRVFGTVTSQLEALRDFLIEHQVRSVAMEATGVYWLPLYGVLEAAGLDVRMVDGRQTRHLPGRKSDMQDCQWGSTLHAHGLLRAGFVPPAHIRRLQDYVRLRGEHIVAAAGHVQHMQKALERMNIKLHAVISSLTGASGLAVVRAILAGERDPAALLELCDVRIRKVKAERVLESLRGEWADEHLFALGQAVQSWDHYQAQITDCDRRIEAVLAQMPGGDGPAGDGPAAGVEKPAKPRTRPGVNTPEISNLRELLERMCDGKDATTLPAHSEYTVLQLIGEVGTDLTKWPTEKHFASWTGLAPGSAQSGKRRTAVKRRRNRAGQIFCVMARALARSKYIALGGYYRRMAARRGGLVANKALAHKLAILFWRVMVKGMDYVEKGLAHYEAQVLETRQRLLRSLAKQFGQQLVPIQASP

SEQ ID NO: 334226 - protein, 331 aa, unidentified
MANIIGIDVSKLSLDCAYLRDVDQHKAKRKKVTNNPEGFISLLNWAETISGLCVTEIRFIIEPSSVYHELLVQFLDQRHATICLVNPGRVRKFAQGMGILSKNDLIDADMLTRFGLLNRKLVAYQPETQVLCDLRSLLNRLDSLERDLRRELNRQEKIGRSRILHRLEKQSMQRCTKQLKAEIALFKKHIRKTINASTVLKRDYDLLMTIPGVGAKTAWVMIVILGSRQFDSAAQVASFLGLNPIEKQSGTTRYRRPRLSKAGNGRFRQALFFPAMVATRKNPDINAQYERLLEAGKTKMCALGAAMRKLVHICYGVVKHQRPYEDRVQQA

SEQ ID NO: 334227 - protein, 400 aa, unidentified
MRAVFGIDVSKTSSEVAILVNGEKVHGYTILNDAIGFNRLLGDLKTVHNPEIIFEATGVYSRRLQAFLEEYSYAYTRLNPLEAKKQLDSLRVRKTDKIDAEKLAKSQLVHNRKPTYVQEEVYQHLRDLSRFYQNMTEDLVRTKNRLHKVLQVTFPELETLLSTPTGEQYWNLVMAFPCKEFVLSLSQSNLCEIVRQSTSKRISEKHIAYLTDKLIKLAKQSFCAVKNTSPMLEEVRYYAQELLRLSERRQVVLNDMVALAQPLPEYDILRSIPGIAETTATSIIGELGDIRRFQSSNQINAFIGIDLKHYESGNFLAKEHITKRGNPYARKILFKCIHNIASASHTNPCHIADFYEKRKRQSTIASTKPHTIASIHRLIRTMYYLITHNKLYDYSLTQNR

SEQ ID NO: 334228 - protein, 456 aa, unidentified
MRKPQVIPDEDHEVVYERVAAVDVAKASGVVCMRTPDPARPGRFVNRIWDNVPATRARIAELGRELLSCQVQMVTLESTSDYWRVWYYVLESIGLAVQLVSASQAKNLKGRPKTDLLDAMWLARLTQWGMLRPSFVPPAAIRRVRDFTRARTDLVRERTRVLQRLEKLLEDAMIKITSVARDGLKAKSVVAMVAALTAGERDPRTLADLAKGPLRGKRDQLAEALDGMFDSHHGVIAQMLLDQVAFLDQRIKQMEDQAIAALAQVTESWGVDAAGQTGPGCGTGPDSPVLAAAYRLAEIPGISVWLAIVIIAEIGLNMAVFPTPAHLVSWAGLCRSASQSGTRHGKGKQKKGNSYARAAAGQAALGAAGTATFLGERYARIARRRGKAIAQVAVARSIMIIAWHLLSDPAARYRDLGPDWHASRTNRDKKIRTHIQALKALGVTVAITDDEQQQAA

SEQ ID NO: 334229 - protein, 402 aa, unidentified
MWSWQKADSTQREAGELEHRPEAVEAWVGELCRRFGYGPIAVAVEQVKGALVYMLRKYDCLHLYPVPSTMSAGMRQALYPSGAKDDPRDADVLLELLLLHRDKLRRLTPDNEATRRVQNLVEERRMLVEEKTAQLNRLTGNLKVYFPQMLKWFAKLDSKLVCDFLERWPSLEELQKVPSAELTKFFRHRRGRHGQLTDWRMAEIGQAMPAIGDRGVIEAKRTVVQVIEQLLRALLEGIATLDRKIAEAAEAHPDFFIFQSLPGAGDALAPRLLAALGSQRERFGSANEVQKYSGIAPVTESSGKKKWVHFRWACAKFLRQTFHEWAGHSIAQSVWARAYYYQQRERGKEHHAAVRALAFKWIRIVFRCWQDRVAYDENRYLMALAKRGSHLASAFAAATASM

SEQ ID NO: 334230 - protein, 354 aa, unidentified
MEQQYIGCDVHRRYSVFVVMDDKGQASKPVRVEHDRSELREYLRRLPAGSRVAIESTGGWYWLVDEIEAAGLKPQLANAYQAKQRMTGRNKTDKFDARGLAMELLTGTLPTVWIPPAELRDLRGLMRTRLALRSCSTQVKNRVSAALNRYGLKKPDEDGDLFTGRGRVHLNSHIQSLPEETREATLHEWILIDEIGEHIAALEKRIEQRIGQREDMRRLKTLPGVGRILGATLLLEIGDVDRFPSAPHLASYAGLVPTVHSSGGKTWHGKVPRSANLFLKWAFIEAANCIVVHQNKLKGRHVVNLYQRLKAAKGHGKAAVAVARHLAEASWWILTKQQSYREPNRAPIASSAHG

SEQ ID NO: 334231 - protein, 400 aa, unidentified
MLSIGIDVSKGKSTVCGMKPGGEIVYAPFEVQHTREGMSELVLLLHNSGEEVRAVLESTGSYHCPVVAALLENGIFVSVVNSLRMKRFCSQSIRKVKTDRIDAMQIALYGLAYWQELQPTRLPEDTYRELQLLARQYYQMTSLLIKAKVDFNAICDQVLPGMQELMNDHAGRHKLSDFVLRYRHTTHILEMGETRFRKDYCKWAEKKGYRNCERMAVLIFATAQNGIPVLPNAPSTQIVITEAIRVLHTVEASRDAILTQMQALAKTLPEYSLVREMPCIGDTLAPRLIAEIGDVRRFHSKRALIAYAGIDAPPYQSGKFCANNRHISKRGNRYLRKTGYEVMQSYVMHKPANDPIFTFIEKKRGEGKSGKLAMVAGLNKFLRVYYGKVTELYRSLPTIE

SEQ ID NO: 334232 - protein, 418 aa, unidentified
MINKDANQFERVIGLDSHPDSFTAAVLRGQTPAQALTEKVFNKVSMSQLQSWAKKHTTDQDLIVLEASGNSFQVARSLAAIERRVLVLESCQMGKLKEAHASNDKISAVRIGKAYLAGTAKTVWVPDTRTQERRDWFHAYRKATKRLTQMRSRLLSYLSDNGVRFKKGTPLTQPDDAEAQLRKAKEWSVRQWAVLESMLKELRHAEQQRKYWRSLIAQEVLADPLLLSLVRLCGVKEVIAFALGALIGDINRFARPGSLVKYMGLNPAFDDSGQGKWSGGIGVHGRKDLRGLLIQGAQAILRSKDPLAQWGRRLMARKSSLKLAVAAIARRLTVAIWYLLKGQWTRLEEVDHKLTAKLGTILAGMGKEAINKTGKTREALRQDCCQLLKAGRTYLLDSNKKFTPKAQPDSLAAEYGLR

SEQ ID NO: 334233 - protein, 308 aa, unidentified
MNYSTIGVDISKHFLDICMLPTGEICRYPNDKNGFEELLGLLNKHSFKRILMEDTGCYHKAFYKFLIQYFDNVFIINPKRIRDFARSSGRLAKTDQLDAYIIAMYGERMNIISKITRSPAAEKLRAYVVRRRQLISLRKQEYNHIETCLDDDFKSSIYKIIKFIDDEIKQIEKAIKDLIKLDDRFKSIYDRLNQIKGVGDVLITTLMSDLPELGYLNKRQIASLAGLAPMNCDSGKMRGSRHIQGGRASVRHALYMAALSATKTNDVIKIYYTHLREQGKPGKVALTACMHKLLIYINSVFNKEFCSI

SEQ ID NO: 334234 - protein, 362 aa, unidentified
MSDSTTWVGMDVHKENILTVSVSGDSGAVMARWETPNTAKGKERLAARLTGLGRIRCVYEAGPCGYDLRRFLDGKGIPCDVIAPSLIPTRPGDRIKTDRRDAEKLARMHRMGELTAICVPTPAQEALRDLVRAREDANEDLVRSRHRLQKFLLRQGRRFEGKSWSREHWRWIRALTFDDANAGTVLAEYVLAVDQQLERVARLDARIEEEAQNPGIAPAVSRLKTLRGVRTLTAMTIHSELIDLNRFASPRELMSFIGLVPSEYSSGGKQRRGSLTRAGNAHLRRVLVEAAWHYRHPPHRTGETIRKRREGQPPDVIETARKAEVRLYRKFTRMVMRGKRTTVAAVAVARELTGFVWAIGRI

SEQ ID NO: 334235 - protein, 346 aa, unidentified
MEHYAGIDVSLELSSVCVVDAQGKIVKEAKVASDAEDLIAFFASLGFAMTRIGLEAGPLSQWLQSGLKCAGLEVVLLETRHVKAALSAMTVKTDRKDARGLAQLIRMGWFRPVHAKSMGSQEVQALLVARKQLLGRLIDVELSIRGILRGFGLKIGVVTRKGFEPRVRELVTGQATLQHITRAMLSARAVLRVEYEKLHKSVLAMVREDAVCRRLMTVPGVGPLVAMTYKSAIDDPSRITKSKAAGALFGLTPKKYQSGEKDITGGITRTGDEMVRTALYEAANVLLSRITRFSKLKRWGLDVAKRRGSKRAKVALARKIAVILHRMWIDGTTYRWSEAQLMATQA

SEQ ID NO: 334236 - protein, 359 aa, unidentified
MAVAIAAPERLGEVRYYGTINNEAQAVRRLFQKLQGLYGNILSCYEAGPCGFGLYHQLTAMNIKCQVIAPSRIPKSPTDRIKNDHRDAISLARLLRAGELTPVWIPDLTHEAMRDLIRARAAAKRDSRVARQRILSMLLRTDKRYAGKHWTGKHRTWLANQSFSQPSQQIAFQHYCQSLEQIEDRILQLDQEISRLLPEWSLCNLVCQLQALKGVGQLTAITLVAELGEFSRFSSPKQLMAFLGLVPGEYSSGNSIRPRGITKVGNSELRRLLYEAAWSYRTPAKVGAWLIYYRPDSVTQYSKDIAWKAQQRLCSRYRSLTAKGKKSQVAITAVARELTGFMWDIALAAQSSFSQQKQN

SEQ ID NO: 334237 - protein, 407 aa, unidentified
MYKVAGIDVHKKVVMVVVIDRHDPDAKLERRRFLTMPTELQQLSLWLQDRGVEEVVMESTAQYWRSEWMELEPHMRLHLAQAYSNRAPRGRKHDFKDAERLVRRLIAKELILSFVPDQEQRIWRNLSRMRLQLVRDRVRLHGQIECLLEEMRIKLSVVVADLFGASGLRILHAIAQGQTDAESLAKLGDERLRCPRERLIEAVTGRSHPTHRQMLALQLERLRLLEEQLDSLNTLLAQTMKSHQQTVLRLAKVPGLGIDSAQQVIAEVGATAASFASAAEFTSWVGTCPGKEESAEENRSSRSAKGNKYMRRLLNQAAHAAARSKGTHFQAVFRRLLPRLGYQSAIWAIAHRICRVVWKILHEGVDYVEYGVGAEPQALMNRARYLARQLRKFGYDLRITATTPTTA

SEQ ID NO: 334238 - protein, 405 aa, unidentified
MPYILALDVSMGHSYSVLYKDDTCLFEDEIEHTQRGFHALLEEIQHLPERPLIVFEATGIYSRPVEKFFQDHHFSYCLLNPLEAKKQMEESTLRSWKTDKSDAHRLAQTHLKNQRQPKEVQSNFYLEMRDLARFYQEIEKKITRLRMDLHNCLQLTFPELEQFFSNRLTPYALTLIRLFPHPDFVLASTRTKIKNKLINETRKKISANRAEQKADQIIHYAQCAYPAVEKDSIHCQKTIYYAELLQDLLEQKKALATQMIKKAEGSPCFLLYQTFPGIGALTAALLLGELGDITRFKTHKQLNAFVGIDIRRYHSGKYTGQDRINKRGNPKARKIIFFTIRNMIRQQRAAPNHIVDYYYKLKKQPIPKKEKVATVACMNKLLKCMHAMVRAHTEYDYAYAVSVDH

SEQ ID NO: 334239 - protein, 408 aa, unidentified
MQVLYTRCAGLDVHKDTIVACVRCVSPPMHQEVRSFGTTTTQLLELADWLGEHGCTHVAMEATGVYWKPVWHVLEDEFELVLANAAHIRNVPGRKTDVNDAMWIADLLAHGLIRSSFVPPHAIQQLRDLTRTRKQLVREVSQHSLRIQKVLEDANLKLGSVLSDVLGKSGRAMLDAIVAGETDPARLAALAQGTARNKTAELREALRGRITEHHRTMLRLHLQVIDALHRTLGELDTAVGKALAPIQQRTRLLTTMPGVSDLTASVMVAEIGVDMSRFPNAGHLISWAGLCPRSDESAGKRRSTRVRKSGTWIKTTLVTAAWAAVRVKTSYLRAQFLRIKARRGAKKAILAVAASMLTAAFHMLRDGTEYNDLGSEHLDRQDRSKTIRRLLKRLQDLRCEVPQMAHET

SEQ ID NO: 334240 - protein, 344 aa, unidentified
MNYKLISIDLAKTVFQVAAFNPDNTIAFNRKINRPALLDTLRQCEPTLVVMEACYSANYWGRTIEKLGHTVKLIPARMVKAMLVGNKNDANDAVAIGETASRPKVSLLRPKTVEQQDIQSLLRIRERLVENRTANCNQLRGFLAEYGLIVAKTRRQLMLAIPLILEDADNELSTVARGFIQRLYEFQLYLNEQIDQVAQEILALAQAMPQYPLLLTIPGVGPMVASTLLASINEVNDFKNGRQLAAWLGLTPSQYSSGTTNRLGKITKRGNQTLRRLLIHGARTVMNWCDKKDDSLSQWLQRLKQRQHVCKVTVALANKMARMVFVVMSRGQVFDMNKACKVAA

SEQ ID NO: 334241 - protein, 434 aa, unidentified
MGQKPEDVFEFSANTSGHDRAIGILREHKVTTVAMESTGSYWQSLFCVLQEAGFEVLLVPGNQTTNARAKTDVKDCQWIQKLHSLGMLSSSFLPNAMTLKLRIITRHRHSLVETVAKYTLKVQKCLRLMNIPLDVAISDIAGKSGRAIIEGILAGERSATTLAALADARVKKSQKELAELLNGQWNDELLYELKDCYELMALHEARISACDEKIEKLLAQHVGLEPAELETPSNVELVRKPNSGKHRCNADLSHHCYDILATDIFAIPGVGSGTALSFISEMGTGIFKFDTAKQFSPWLRLTPNNRISGGKVLSSRTDKSRNVLTKALRDAANALGQSKSDDYLVHFFRKIAYKKGRGAAITATARKIAVILFPGVSSIDVKLNHVTADADGKSLTLATAREHSNVELTGNDVQPMIQGSASKGEKVRGKPNNP

SEQ ID NO: 334242 - protein, 457 aa, unidentified
MGNARARKIPAQVIEDEDYQLRHERVAGIDVAKAKADVCTRLPPARDGGRRGSRVEDSVPATAREILALAGRLLADRVELVVMEATSDYWRIWFYLLEAAGLNVQLANPSQARQLAGRPKTDRLDAQWIARLAEMGLLRPSFVPPPEIRALRDLARTRLQLVRDRTREWQRLEKLLEGALVKLSSVVSSLARVQSARAVLEAIAGGETSPQALAALAHHNVKGGRAAVEESLAGMALAACHPMLIGLHLDHIALLDRQIAALDDEIEAALAQIPAARGVGADGVPSPDPGPGAAVPPADQRLAEIPGVSLALARAIIAETGLDMTRFPTAGHLASWAGLAPAARQSGPRTRKPAKGQGDAYLKGYCTQAAAGAARTETFLGERLRRLSRKLGGTRARCAVGRSILVIIWHLLSDPEARYADLGPDWHQRKTDRDRKTRSHLRGLQALGYDVTITPAA

SEQ ID NO: 334243 - protein, 409 aa, unidentified
MNVMHERCAGLDVHKETVVACRRVMEGARVVREARTFATTTRGLLALADWLREAGCTHVAMESTGVYWKPVWHVLEGELELVLANAAHIKNIPGRKSDVNDATWIADLLAHGLIRSSFVPPGPIQELRDLTRTRKQLVREVVQHQQRIQKVLEDANIKLDSVVSDVLGASGRRMLRAIIAGEENPDKLAALGNEHLKASRQTLAEALYGRVTRHHRFLLKQHLDMVEHLEKSVGEFEAQIEAALEPFRPVIKRLVTIPGVSATAASVIVAEIGVDMKRFPTVGHLISWAGLCPGLNQSAGKTKSRALREGAPWLKTVLVQSAWTASRNKKGYLYAQFLRVKSRRGPKKAIMAVAASILTAAYHLVRDAVPYKELGPVYLLRLDHERTAARLTQRLRTLGYEVEIKKAAA

SEQ ID NO: 334244 - protein, 355 aa, unidentified
MNSEKYIGLDVHQATISVAVMDSRGKVVMESILETKASTILEFFAGLRGTLSVTFEEGTWAAWLYDLLKPHVAKVVVCNPRKNALLKDGNKSDRIDARKLAELLRLDNLKPVYHGETGVRMLRELARSYLTIVKDLTRVMNRLKAMYRSWAIPCAGRDVYYTRHRTEWLGKIREAGVRRRAEQLYQQLDMLQHLRQQARRELLAESRKHPITAKLRKIPSLGPIRSALAVALIQTPHRFRTKRQLWAYSGLALETRTSGEHRYVRGQLRRSKKQVSIRGLNKDHNHDLKGLFKAAATRASVQPGPFQDFYQRSLAKGIKPTMVRLTLARKIAAITLTLWKKGENFDAEKLKSQAA

SEQ ID NO: 334245 - protein, 401 aa, unidentified
MESPIVSIDVSNGNSHYMCFIKNNKRFGKVKKIDHDIEGFKRLLEDIQKLEAETNEKVCAVFEATGVYTKPLERFLSKNSIKTYIINPLESARKRKEEIHNKKTDKLDPISISKVYYDKEKMMELKKKDETHNWLRKKNRLYEDQLNHLRKYKVTFQNQLSICFPGYLDLFKDGYSDIPMTILKKYPHPDLLKNKKAETVARYLEKNTCHTHKVSLEYALKIIEFAKKTYPGCEKDDVEVEIFKILLDKVIETQRECEKTLNEMITVASTLEEYRYISSIDGIGPNLAARIIAEIGDIEEFKSREALVAYAGLDPHIYQSGDQDGKHLKISKKGNKYLRCLLFLAVGCSIRGAKDNPVNRFYQKKKQQSNPLNSKAAKTACTAKLLKIIYGICKNKTTYER

SEQ ID NO: 334246 - protein, 381 aa, unidentified
MTTTVTHHEQRNTTEATLFVAFELREKTWKLGFTTGHGQKPRERTVAARQHEHVLHEIAQAKRRFGLPETAPVVSCYEAGREGFWLHRFLQAQGITNHVVDSSAIEVNRRRRRAKSDGLDVRKLLSMLLRYTQGERQVWQVVKVPSVEAEDHRHLHRDLATLKQERASTTTRIKGLLSRQGLRVTSLTKLPEQLEALRLWDGAPVPPGLRCRVLRVYAHHTFLSAQIAAVEAERRAQLHASTDAKIDKVRQLMLLKGIGINGAWLLVMAFFGWRAFKNRREVGGLAGFTPTPYQSGESAREQGITKSGNRHVRWMTTELAWSWLRFQPESALSVWFRERFGSGGKRLRRIGIVAVARKLLMALWRFLETGVVPEGAGLKEG

SEQ ID NO: 334247 - protein, 320 aa, unidentified
MSKKRSEAFIGIDVSKRLLEVAAHDSDYQFRCANKASAFGELIAELMALRPARIVLEATGGLEIPVVAALHAVGLPVVVVNPRQVRDFAKALGQLAKTDRLDARVLAHFAAAINPPLRPIKSAEELELDALVGRRGQLVEMLTAEKNRRGSAVTDTVRGEIKEHIDWLEERIAELDEQLKVLLKRSSLWQGKDDVLQSVPGIGPVVSFSRIANLPELGTLNRQQISKLVGVAPLNCDSGQQRGTRHIYGGRARVRSMLYMAALTATRYNPVIKEFYQRLLANNKPFKVAITACMRKLLAIINIMLRDGTCWKSKSDPVLA

SEQ ID NO: 334248 - protein, 416 aa, unidentified
MDIVHTHCAGLDVHKKTVVATVITPDGQGGLHKETHTFETMTVDLLMLSDLLLSREVTHVAMESTGEYWKPVYNILENNFEVLLINAQHIKHVPGRKTDVKDSEWIGELLRHGLLKASFIPPVGQRELRELTRHRTNFVRERATLVNRVQKTLESANIKLASVATNVMGVSGRAMLDAIIEGKTGSLEMAELAKGRLREKRDQLSKALEGRVKPHHQFVLSELLCQIDSLDETIARFDTEIEKYCRPFEEAVELLDTIPGVARRTAEVIVSEIGNDMSRFPTADNLAAWAGVAPGNNESAGKRYSGKTRKGDKALNTALIQAAHAAAHTRDTYLSAQYHRLAGRRGKKRAIVAVAHSILVIAYHLIQRKEPYRELGGDYFDKRRPEATAKRLLKRLERLGYDISRIDQPTVLQTAA

SEQ ID NO: 334249 - protein, 402 aa, unidentified
MIFVGDDWAEAHHDVYLMDESGRRLGSQRLPEGLTGIRQLHELIAEHAEEPDQVVIGIETERGLWVGALTGAGYRVFAINPLAVARYRDRHHVSGAKSDTSDAKLLADLVRTDRHNHRLIAGDSPEAEAVKVLARTHQSLIWTRNRHTNALRNALREYYPAALEAFEDLAHGDALGVLGRAPTPQVGAHLDLAAIQSALKRGGRKRNIAARAHEIRAALRTEQLTAPAPVAAAFGATTGATVGIIAELNRQISELEASLDKHFETHPDADIYRSLPGLGVILGARVLGEFGDDPNRYTDAKSRRNYAGTSPLTIASGKKRAVLARHVCNRRLYDAIDQWAFCSINTSPGARALYDQHRAAGDLHHQALRALGNRLVGILHGCLRHHQPYNEHTAWAHRMAAA

SEQ ID NO: 334250 - protein, 422 aa, unidentified
MLNDSEDSEEIIERVSALDIGKAELVACVRVPNPDRPGRRSQEITTYSTMTRALLVLADRLRELGVTRVVMEATSDYWKPVFYLLEAQGLDPWLVNAKDVKHLPGRPKTDKLDAVWLAKVAERQMIRASFVPPAPIRLLRDLTRYRADLVNSRTAEKNRVEKLLEDAQIKLSVVASDIFGMSGREMMAALIAGERDPKALAQLARTTMRAKIGLLEEAFVGHFTDHHAFLLRTMLTRIDETSADIAAVETRIEELITPFAPAVARLDEITGVGLTAAHVMIAEIGVDMTRFATAAHLCSWARFAPGIKESAGKNKGRGATGHGNPYLARVLGEAAVSAGKTNTFLGERYRRIARRRGKKRAIVAVGRSILVIVWHLLSDPEARYHDLGPDFYDNRIGPDRKKRNHIRQLEALGFKVTLQPAA

SEQ ID NO: 334251 - protein, 356 aa, unidentified
MTRIAQLEPTRVTVGVDTHRDVHVAVALDQLGRRLGEIELATTRAGYQRLLAWAERFGAVEAFGIEGTGCYGAGLARHLGARKVLVIEVMRPNRQTRRRKGKSDPTDAEAAARAVLSAEAAGSAKAGDDLVEMIRVLRVARQTAIKARTQAINALRSLLVTAPPELRDELRALSTSRLVGKAARLRPGPLDSPLAASKLALRHLARRYQALEAEITSLDTQLAQLTAAASPRLLEAFGVGADTAGALLVAAGDNPERLRSEAAFSMLCGSSPINASSGKTNRHRLNRGGNRQANAALHRIVLVRMRYHQPTRAYVDRRTSEGKSKREIMRCLKRYVAREVYTALTQPDDKKLARAA

SEQ ID NO: 334252 - protein, 366 aa, unidentified
MKKVTTVAMERIQIFKENQLTIGLDLGDRISHYCIIDEAGELILESKLPTTPKGIEEVFGRIPRSRVAFETGTHSPWISRQMSQLGHEVIVAHARNVQMITESSRKDDRLDAKTLARLARIDPALLGPVRHRSAKAQIHLTVIRARATLVGARTALVNAARGLTKSYGARLPKCGSEQMNREIAKGLCQELRDALDPLLAEIESLNERVAEYDRRIARVAKEVYPQVALLQQVKGVGTLIALTYVLTLDDPHRFRRSRDAACFVGLRPGRRNSGMSEPQMHISKEGDRYLRTLLVQGAHYILGPFGQDSDLRRWGLKLAERGGKNAKKRAVVAVARKLAVLLHKLWVSGEVYEPLRNNHKVESAAA

SEQ ID NO: 334253 - protein, 321 aa, unidentified
MNKDSKTHGVDISKDVFDVVDSKGNHFQYPNTLKGFKAYFKFLGKDTLVVMEATGYYHYLLAQFLFDQCVKVSVVNPLSVKRFVQMKLSKVKTDKSDAKAICEYAQVNEVPLYDGKGAEQAESLQLLALMDIYLKQRTQLKNKLHGEKVLGIPSKAVYSSLKQSLAQLDKQLSKLQERLMTLVKKSQQQQLSNLKSIPGLGDKTAALLIVLTEGFTKFESAAQLCNYAGITPTIRRSGSSVRGKSRISKMGNRKLRNLLFLCSFSACKYNKQCKAIFDRIVAKGKSKKLALIAVCNKLLKQAFAIAKSGLPYDENYVSKLN

SEQ ID NO: 334254 - protein, 356 aa, unidentified
MSVLAEIVDAVIGVDTHRDTLSAAAVTPIGAVLGETKVNADAAGYRELLDFGRTQVPSARCWAIEGAGSYGAGLSAYLIEHGERVVEVARPKRPPRSGGRKSDSIDAVRAAREALSCEHPIDPRRRGQREALRVLVSTRASAVVARTRAINHLKALIVSAPETLRAELRGMTSDNQITYCAALRPRPSRDLEHRTTVRVLRSTAVRILALRQEANDLEAEIEPLVALMKPQLLALPGVGPISAAQVLISWSHPGRFRSEAAFAAFAGASPIPASSGLTTRHRLNRSGDRQLNRALHTIVLTRARLDPTTQAYVARRVAEGKSTRDAKRCLKRAVARQLYRLLEPPVKARESIEIAA

SEQ ID NO: 334255 - protein, 448 aa, unidentified
MRKDGRKPIVRYYEGLPQIRANAAGMDIGSEEIWVDVGSKDPEAVRRFGTFTADLNEMAQWLKRCGIETVAMESTGVYWIAPFQILEAEGIEVLLVNARFVKNVQGRKSDMLDCQWIRLLHSYGLLPKSFRPAAQIAVLRSYLRHRQMLIQYAASHIQHMQKALTQMNVQIHHVISDITGSTGMRIIRAIVEGKRDPKQLAAMRDVRTKATEETMAKALEGDYRVEHVFALKQSLELFDSYQKQIQVCDEQISAHMKTLETKADPGELTVARKEKKKRRNQAAFNIREEAFRISGADLTRIDGISESAALALIAEIGVDMSPWKSEKQFASWLALSPNHKISGGRILKRSTRKTANRARDLLRLCAQGLMNSKSALGAYCRRMCGRLGQPKGIVATAHKLALLIYRLMALGRDYVDIGQDAYEKQYKERVLKRLARKAKEFGMQLVPA

SEQ ID NO: 334256 - protein, 314 aa, unidentified
MAQSACVVGVDLSAARWDVACYPHGPTASFATTPAGQAQFLAWLAQVAQSATVACEASGGLERSLLMLLAPTPVSLRILDAGRVRTFANAAGRRAKNDRIDAAVIAHYAATFPGKPAQHDQARAVLAELLNVRDRLVADVTATANQARSSASKTIKSMLTRQLATLTRWVRQAEAEIAAAITADPQLAQRAALLRSMPGIGPANAARLVARLPELGQVGPRQAAALVGLAPYDNDSGGRRGTRHIRGGRTDIRNTLYMAALVAKKHNTVLAAVFERLTAAGKPAKVALVAIMRKLVVILNAMLKAGQTWTLRNA

SEQ ID NO: 334257 - protein, 397 aa, unidentified
MFYAGIDIAKRKHEVSIIDTEGRALSQSLSFTNDREGSDRLLALFERLSISPQELVIGMEATGHYWLSLYSWLLEKGYDVKVINPIQSDAFRRLSIRKTKNDSKDSLVIAQLMRFGEYSATRLSEENIHALKQLSRYRLSLVEECGNCKRRVIALLDQVFPEYETLFSDTFGTTSKELLLNCPTPEDMLTISSRKLTTLLTKTSKGRFRDEKANQIRKTASNSFGVTFSRDAFSFQIRQLIEQITFLEKQTEELEKKIAALLRKTNTVITTIPGIGETIGAAIIGEIGDINRFDTPGKLVAFAGLDAAVHQSGEFSGTKGGISKRGSPYLRRAIWMAASRAAFCDPILSKYYQGLKERGKHHLTAVSAVARKMCNIIFTILKENRPYEVNPPKGLKH

SEQ ID NO: 334258 - protein, 346 aa, unidentified
MMVIGIDAHKRSHTAVTVDEMGRQGFVKTVGTTTQDHLRLLKWAVGLAEERLWAIEDCRHLTRRLERDLIAAGESVVRVSPKLMAHIRDSARSYGKSDPIDALAVARAALREPDLPVARLDGVERELRLLVDHREDLVGERTRIISRLRWHLHELDPGWTAPTKLQRHSAFDKVQAHLSRRDDGSPIVRRLALRLVEHLRLLTEEIDELTAEITVRVTAIAPSLLAIVGCGALSAAKIIGETAHAGRFRSKDAFARHNGTAPLPVWSSNKQRHRLSRTGNRQLNAALHRIALTQARCYPPARELLERRTNSGDGGMERLRILKRRLSDVVYRAMLADETDPLPRTA

SEQ ID NO: 334259 - protein, 409 aa, unidentified
MKSLYKIAGIDVHKKMLAVVLSDVSEPGEHHFEKRTFGTGSAQLRELTDWLVAQDVREAVMESTAQYWRPVWQQLEAVCQLHLAQAHSNRAPKGRKRDFADAERLVRRFVAGELILSFVPDAQQRVWRTMTRTRQQLTRDRVRLRNQLEAFLEDSRIKLSGEVSDLFGLSGTRMLRAIAQGATDPAKIAALAVPGLHASPEQLADALAAATTLSPQHRQILQLFLDRLELIDQQREALAQCLAKSLREHQQAVSRLAHTPGLGVDSAQQIIAEVGPHAASFDSAGQLASWVGCCPGREESAAVSHSGRSPKGNRQMRRILDQAANAAIKAKGSIFQDMYRRLVPRLGHKKAIWAVAHKLCRVLWKILHDGVTYEERGLHPNPQTIQRRVDKLVRHLRGLGYRVQLTPAV

SEQ ID NO: 334260 - protein, 371 aa, unidentified
MTRKKLIGKRYYIGMDVHKDSVQMAVFEESGEEPIYERRVNNDTSLLLKEVTRYSLRGVTEVAYESGSCGYVIYRAMERAGITCHVLPANKVAKKRDDRIKTDKRDARLIGRELRSQNIRPISVPDESDEATRDLLRCREDVGGDLRRVKQRLLKFLVRHGYDYPGSGNKWTLKHWKWMDMLQFRNEHERVVYEEYRSQIRALEERLARLSRQAEETAESPRYKAAVSRLRAFKGIDYIIALAVICEIGDFMRFANAKAFMSYLGFVPSENSSGGKRNQGGITKAGNGHLRKLLIEGAWHYTRNDRTGKRLQQRRQSSPIDAIDAADRALHRLYKKYIRLVMKGKHKNVAVTAVARELAGFVWAVQVSPAA

SEQ ID NO: 334261 - protein, 337 aa, unidentified
MNHIESTIEYSLGIDISKKDFHAAILRHEDRKIIAEKSFLNTAKGMKEHITWISKHCGKEMFIQACLEATGTYGDSVAIHLHKHLSKVSLVNPRAIKNFGAMQLRRDKSDKADARLIAQYCHNQQPSAWQPPSEAQAQTKALARRLSQLKCDLTRENNRLEATSDKATRIDIKDHLKSLTKRIAKLENHLEELIKNNPENKQTLDLLTSINGIGKKSGTQIISELPDLTNFPTGRELSAYAGVTPRHFQSGTSGKTRTPMSKAGNSQLRKHLFFPAMSAMRYNPICKEFAARLKAQGKPQIVIIGAIMNKLLHIIYGVLKHQKPFDPEYLKKHEKSA

SEQ ID NO: 334262 - protein, 427 aa, unidentified
MSYRIAGIDVHKKILAVVVSDVEVDGEFQFERRLFGSNPEQLRSLTAWLVEQEAQEVVMESTAQYWKPVWEALERHWKPTREKREGTRRSAGMLHLAQALSNRGRRGRKRDFVDAERLLKRLVARELTLRFVPDGEQRLWRTVTRKKYQLRRDRVRLHNQLESLLEEAHIKLSSLVSDLLGLSAQRMLKALADGETNPAALAALADDRLRATPEQLCDALGACTELNTVYRRLLKMALEELRLIDEQIGQLDQEMARLLSRHQDAVQRLAEVPGLGVDSAQQIIAEVGPTVATFPSQKSLSSWVGACPGDEESAGVNYSHRSPKGNRHLRRLLNQTANAAVKTKGSIFEIIYRRSVPRMGHNQAIGAIAHRQCRLIWLILHQGVRYEERGPAVSKQSKQRRTSRMIRQLRSLGYQIEPPNLQPSQAR

SEQ ID NO: 334263 - protein, 359 aa, unidentified
MEAQVKEIDFTDQNIYVGFDAHLNSWKVTIMAEDIVYKSFTQPPRPEVLYNYLKKNFPGGNYHSAYEAGFCGYWIHDKLVSYGIKSIVVNPADIPTTDKERVQKEDKRDSRKIARSLSTGTLMPIYVPSIQTQRDRSLLRTRAMLVKDLARYKNRIKSFLYFYGISIDDSFSNPQSHWSNRFMSWLESIEIDGGSGKEALIVLILECKNLRASILEITRQIRQLSQTAAYREQVILLKSVPGIGLLTAMIILTELESIDRFNNLDKMCGYIGLIPSTKSSGEKERTGDITPRGHSVLRTAIIESSWTAIRNDPSLMKSYLSSCKRMESNKAIIKIAKKLLSRIRFVLSNKKPYVCLIGK

SEQ ID NO: 334264 - protein, 544 aa, unidentified
MKYGHLSTKPFRIDMTLISNFSIPWTLYKIITGGYTPNYDGEKNKYLLVRYKKQPPYNKISYQTNQRYEEVIMYEEERIRHARYCQLRREIRGSEEYLIVGIDIAKDKHHAFFGTARGKVLLKRLVFHNTKEGIAKLLSQVEALKIRHNLPKVVFGIEPTGNYHKALGDHLVKNGHLVVLVSGAAAKKNREIMDGRWDKNDTKDAAIIADLISQGRCLFYEYPPQGIRDLRDFLSLRRRFKKEEHRLRLRIRNNLVTKHFPEFDRFFGENDSESLSIVKWCLDPQEIHAMDFDKFFLMVTSRRRSLAQERRLRAIHFTANDSIGCKMGAAGGFESGTLVDQVKGVRAVIKDIESHMEKICREFPEYEYLLSIPGFGPYVSSVVLASIGNPWRFQNASQVIRLAGYDLSANRSGKSSDKAIPEISKKGNADLRYALYQAALVGSTKNRDVMEYFTRKLKGRSRENGIGTKMRVKLAVKLLVIAWTLMKKKEPFNPEYLKDTCLEKQGGVSHLLEAKRAEAMVRSRASASSSRRDRRPLIVNRSAG

SEQ ID NO: 334265 - protein, 297 aa, unidentified
MIPVGEHWCVQNSETGISSLVKRLKDLAPTLIVLEATGGLEVLAATALALASLPVAVVNPRQARDFAKAMGKLAKTDAIDASALALFAQKVRPEPRPIKDEQLQELSAIFTRRNQLVTILVGEKNRLSSSIKTVRKDIQEHITWLEKRIKELDDSLKQRIKQSPIWREKDELLRSVKGIGPVVATTLLTSLPELGSIKAKQISALVGLAPLNCDSGKHRGKRAIWGGRDSVRSALHMATLSAIKHNPPIKAFHQRLIGAGKEQMVAITACAHKLLIVLNAIIRDSVPWNPQMGGKKT

SEQ ID NO: 334266 - protein, 347 aa, unidentified
MRFYTQQHRYYCGVDLHARSLYVCVLDQAGAVQVHQNLRASPEEFLQLIAPYRQDIAVAAECMFSWYWLADLCEREGIPFVLGHALYMKAIPGGKAKNDRIDAHKIAALLRGGMIPMAYVYPAHMRATRDLLRRRMHLMRKRAELLSHIQNTTSQYNLPAFEKSIAYGSNRAGLPDHFDNPFVRKSIEADLVLIDHYDRLLKELELYILRAARQHDPNALYRLRTVPGIGKILSLVILYEIHDIRRFPTVQDFASYARLVKCAHESAGKRTGTSGKNIGNAHLKWAFSEAAVLSLRQNPAAQAWLKRVASKHGKPKALSILAHKLGRTVYYLLLRDEVFDMQRFLAA

SEQ ID NO: 334267 - protein, 413 aa, unidentified
MTDANKSSANQVLIAIDIAKQSHDAVIAWPSGRTKAVKIANSLAGYERLISCADTDPHSLCVAFEPTADYHRNIAYWLQAHGVRCCLVSSLACARAREMLFKTWDKHDRKDAHVILYLMQQGLMQPFYDPLVAETMDIQELSNTYHQISLARTRCQHSLVNHYLTLYFPEMERYLHNSRSEWFCRLLLRYPTPRAITRYKPAAFVKHAWDVVGRKVNKQRFLEELHETAASSIGLPVDPTGLAVRTFKLQLERYLTLSLQRSELEKTADNILLQRDDYRLLRTLPGVGPVIALMIIAESGDLKRFRHYRQYLNFCGFNLSAVQSGQQQGRYQLSKRGNARLRYAYWLAAVSATRQRENSFRYKYERYIRNDPDNADLKRKARVAVATKMARVAHALVKQNTNYRGFYEFGHGT

SEQ ID NO: 334268 - protein, 387 aa, unidentified
MSEMFNPHAPATAYDHNTTIVAVLELSGKNWLLGAVAPGLSRRMKRSFEARNVEAVVGALERAKEESAKAGFRVARIVVGFESGRDGFWIARALQQRGIEVYVMHAASIAVERRGKRAKTDRLDVDLLLTTLIGWLRGEPGRCTMAPIPSEEEEDLREAGRRRETLVHARLKVENQIASLLIRHGIEGFKPRLKNAETRLCELRTFDGRSLPANTMNSLRLLLAQHRLLSAQLKEIEEARQRVVNVAKPDRLQRMIQALAHVVGVGVETATVLVHEVFSRSFKDRRALGAFVGLTGTPYNSGSSKTEQGISKNGNARVRRMLSQLAWRWLGHQPESALAQWFNARLGGAKGRMKKVLIVALMRKLVIALWRLAETGEVPIGARLAAR

SEQ ID NO: 334269 - protein, 427 aa, unidentified
MSTLFVGIDVSSKTNSVYAMDFEENKYLSTSFGNNQPGADELVNRIVACMQKHKHLDTLLIVLESTSVYSVHISNFLASSEVLMPYKPYVFCVNPKATANYRKSYIGMEKTDPTDAYLIADFGRVGRTKKLEPWRGGLFIALKRLTRHRMHLSECITREKTYMVSNLYLKFSELQLLEGDDKPFGNLYGATSSAILTEFLSPQEIINMPEEDLLAFLAQKSRNRISDLSKTSELLRKAARDSYRLDKCMYEPLSISLASSFNCIQAYQKEIRLIEQAIDKCIKGMNANALLILQSIPGIGPVWASGILSEIGDITAFHSSDALAKYAGLYWPKGDSGDFISEDNQMSKAGNPYLRYYLGEAANSVRKHIPEYADFYARKYAEVCKHQHKRALALTSRKLVRLVFGLLAKNQLYTGEKLDTEYNTWSN

SEQ ID NO: 334270 - protein, 360 aa, unidentified
MEITEGANSPFVIGGVDTHKDLHVAAVVDEHDRIVASQSFATTRQGYKQILAWMRSFGLVRRVGVEATGTYGAGLLRYLQKAGVEVLEVTTPDKADRRKRGKNDDLDAQNAAHAAFAGKRTVTPKSRDGMIEALRVLKACRKTAVAARRVALQMIHNTVVCAPDDLRDQLRRLTRMELIRTLAAWRPDMTDFCNVASAYRITLRSLARRYLELHDEIGDFDRMIGAIVDELAPNLVAQHSIGHESAAQLLLTAGDNSERLHSEASFAALCGVSPVPASSGKTTRHRLNRGGDRAANSALHIIAIGRLRTDRRTKAYVAKRIAEGHSKLEAIRCIKRYIAREVFSLINQRRRETNRLPLAA

SEQ ID NO: 334271 - protein, 446 aa, unidentified
MDVVFLRCAGLDVHKKSITACRIVPDPTGQEAEGIAELRTFGTMTLELLALADWLTEASITHVAMESTGEYWTPVYNLLEGTFTVFLVNAAHVKNVPGRKTDKADARWLAKLMRFGLLQASFIPPKGQRDVRDLTRYRTKLVQERVREVNRVQGVLERANIKLASVVSDIMGVSGRAMLEALIAGKADPATMADLAKRRMRSKLPLLEQALTGVVRDHHRQLLAMQLAHIDFLDEQIDALNNTIETALSALSADAPLSPPPPPRAAASSALPLPVSTPLTFTRAVELLDTIPGVDQRGAEVIVTEIGIDMSRFETAPRLAAWAGVAPGNDESAGKQRSGKTRKGNRSLRAILTQLAHAAVRTKGTYFSALYQRLAARRGKQRAIIAVAHSMMRSVFHMLSRNEAYRELGANYFDERRRHYTVDRLARRIEHLGYRVSLEPVVAPVV

SEQ ID NO: 334272 - protein, 364 aa, unidentified
MKIVGCDLHARQQSIAMVDTETGEFTEKRLMHEGNAVRDFYASLEGPVVVGIEATGAMQWFLELLEELGIKCRVGHPAKIRAAETRKQKHDRRDAEVILDLLVMKDRFPDIWMPSTEQRDLRTLLRDRHQWVKMRTRLQHTLQAIALNHALREGRALWTAAGQGALQGLALPPYTDQRRDELLSLYTQLEKRIQQLDKQVETEAQQRPRARRLLTHPGVGPVTALATEVFLGDPTRFATANQVASYVGMIPCEHSSGKKQRLGKLTKEGNSLLRYLWVEATLHAVIKDAELKRFYRRKLIQKGMGKARVAAARKLGIRLWIMLRDEIDYEEFCRRGKLPQKGKAHAGMPDFNSGPARVVTGSTE

SEQ ID NO: 334273 - protein, 397 aa, unidentified
MIAVGIDVSKSKSTVAILNGDGSIRAKPFDVHHVADELQALVDYIKRTSEPPTILMEPTSHYHYPLLKAFMEAELPVCLINPYQMKKYGDTELRKAKTDKRDSLRIAQYALEKSYSLIPYTPQDQKYEDLRFLSRQYSQRISTLTVAKVQLLSLLDETMPGITTILPLKSRDPDNCVLLRFIKRFKSFDVIRKMGKTRFLDSYQVLVQKTKDRFAGSKGLAIYELVLNSVTTRGENPLSAMTQDQCVDLVSTSQKAADEINLQMRIIAETMPEYKVLRSMAGVGDRLGPIILGEIGDIRRFHSGKALNAYAGNDAPPYQSGQFESRNRHISKRGNPALRKACFEVMQALKLTKPQDDPVYLFLLKKEQEGKPYNVAKMAAVNKFLRIYYARAMELYK

SEQ ID NO: 334274 - protein, 343 aa, unidentified
MQKVATVGLDLAKSVFQIHAIDCDGLIVTRRALRRSQVLEFFRKLSPCVVGLEACASAHYWARKIAALGHMVKMIPPIYVKAYVKRSKTDAADAEAICEAVTRPTMRFVPIKTADQQATGMVLKTRDLLIRQRSQTANAFRSHMSELGIITAAGMVSLAKLAQMMRDPDNIVVPDAARYALMEMIEQIDALTERIERLDRDILARVKKDEAARRLMTIPGVGALIAATVRTVVQDAHGFKTGRDFSAWIGLTPRAHSSGGKERLGAISKRGNQQLRTLLIVGATSILKLGERGVKQPVWLAGLMARKPFKLVAVALANKTARTIWALLVKGGIYRKAVLPTPI

SEQ ID NO: 334275 - protein, 389 aa, unidentified
MRLLRCRILNQLMSENGMDRPCSRPASEHACVGQQKEHHAMPKSNTAVVTIGIDPGKNTLHLVGLDARGAIVLRERVARARIVSRLANVPPCLIGIEVGMGTHYVTRELLALGHDVRQVPPVYAKPFRQTHKNDFRDAHAIAEAVQRPTTRCVPPKTDEQLDLQALHRVRYRLVGQRTAIINQIRCFLLEHGIAVRQRLHWLRQALPDILAQRADVLSPRMVRILEDLAQDWRRLDDRIQAVSGEIEALSKTTEPCRHLMTIPGIGPIISSAVVAAIGDGTAFTRGRDFAAWLGLVPKQISTGDRTILGRITKRGNRYLRMLFMQAARVVLLRPRNWMKHSYGPWLAAAAQRLHHNVLATALANKLARIAWSVLAQHRVYEARLSPAAV

SEQ ID NO: 334276 - protein, 480 aa, unidentified
MEATQQQKQKKGVKRPVQRGWHEMNRKQRREMTRRIQAEDLSLEVMHPEAAGIDIGNESHYAAVPSSRDSQPVRCFGCTTVELRKMAAWLKQCGIRTVALQSTGVYWIPVYEVLEEAGLEVFLVNARDTKNLPGRKSDVQESQWLMKLHAYGLLRNSFRPPQEIRTMRTYRRQRNDLVQSAGRHIQRIQKALTQMNIQWANVLSDVSGMTGQAIIKAILAGERDPWKLAGFRDKRVKATEEEIARGLEGNWQDDLLFLLKQEQDSYEFCQKQIAECDARLEQYLQQRPDRSHGANLPEEKRKGRLQKKAKNPQFDLRTHLFRMTGADLTQIDGIDVRTAATVISEVGWDMSKRENEDHFVSWLRLCPDNRTSGDKIIGKGRLPTNNRLTVALRMAASTLRESDTYLGAQFRRLRSRLEGPVAVKAMAAKLARLVYRMLRYGMQFVDRGALFYEARHRQHQINFLRRKAVKLGFQLVACAN

SEQ ID NO: 334277 - protein, 356 aa, unidentified
MTQETPSRSGHVVIGVDTHKHIHVAAVMDTIGGILATLTIATDTAGFKQLLAWAESFGKVISFGIEGTGSYGAGLTSFLRRQGHKVVEVSRPDRRLRRLNGKSDTLDAENAARAVLAGFATATPKTMDGAVEMIRQLKVAHDTAVKQKAATMVTLKAMLVHAPEQLRIETARKTQRTLARYCAAFRPRGLESPEDANRHALRSLAKRWLLLDEESKELTSMIEELVLQRAPHLLDEFGIGVDTAAEILIVAGDNPERIKSEAAFAKLAGISPIPAGSGITSGKHRINHGGHRQLNAAIYRTVIVRMRFHQPTIDYVARRTAEGKSKRDIIRCLKRYVIRELYHLVKVNPRTGEIVS

SEQ ID NO: 334278 - protein, 365 aa, unidentified
MPSVTPPAGLIHLGMDTSKNTIVAAVLMPGEQIPAVDRIFNDEAAIRRLVGRFPDRGLLRACYEAGPGGYDLYRLLASMGVACDVVAPSLIPKGGSDKVKTDKRDSFRLARLHRAGELTPIRVPSPAEEAVRDLARVRAAVLADRKRAQQRLTAMLMRHGRVWRNTYWTGPHRAWVAAQSFPEPALATALAHYRAALDTRESELACIEAELAPWARREPLAAAAGRLCCYRGIAELNGLTLAAEVVDWRRFASARAFMGFTGLVPAEYSSGQRTWRGHITKAGSGPVRTALIEAAWAYRFSPAVGVTLRRRQQGAAPDTIARSWKAQRRLHGKYRRMVTGGKAAPEAVTAVARELAGFVWAEMTS

SEQ ID NO: 334279 - protein, 351 aa, unidentified
MNIKHYIGFDVHKKSINYCVKTADGKILEEGKLRATHQVLREWAQKRTEPWHGAMEATLFSSWIYDVLKPFAAELQMGNPSMMKAIGAAKKKNDKLDARKIADLVRCNLLPVCYVAPPELRDLRRLLRYRNLVVGQAVQMKNRMSGLLMEVGAEYSKQRLHGAKYFSELLDQLEEVPESVKDLLRLSRGALETFAATQRQLLDRLQKDPLLVKRVNLLKSIRGVGEVTALTWALEICDPRRFPSIGDAESYCGLTSALKSSADKQQRGPISKQRNAHLQTVLIEAAKLAPRWNRQLAELHERELQRGDRNRATLAVARKLVAYLLAVDKSGQRFEVRNPPARETKEVKQVA

SEQ ID NO: 334280 - protein, 261 aa, unidentified
MTRIICGVDVASKSLQARIGQQGAAGSFPNNPEGVAMLAAFCHAHQVELVAMEATGGYEQQAFAQLSEHGLPTAILNPRAVRQFAQSMGRLEKTDAIDAGMIAFYAEVKQCPPLCLAPRTQRHLRALVTRLRQLTEVRTAQLNQQRLIAEPVVQASFDDLLSLLARQIRDLEQKIAAPIAADPLWCELNHAFRSIKGVADRTVARLMAEMPEIGTLSNKTISKLAGVAPLAADSGKHQGKRSERLGCRCCSGNVPIGESSS

SEQ ID NO: 334281 - protein, 430 aa, unidentified
MKSNTQNAKIKAITETTLVLGIDVGSETHYARAFDYRGIEYSKKPFKFSNDKAGFVTFKAWVLDIKEKHGKDKVVPGMEPTGHYWFNLGKFLQDNEMKPVLVNPHHVKKSKELDDNNPTKNDRKNPKVIAGLVREGRYMIPYLPDGVYADLRTASNMRFQLQAELTRIQNRISRWFNIYFPEYKTVYGHPNAKSGMLILKVAPLPEDILTLGIDGVNQIWRDAKVRAVGKARAKTLIEAAEHSVGSKEGEISARMEIRMLLEDYESGNSRLQEVLALIEELVKQIPMAEKLLEIKGVGIKTVSGFLAEVGDIRRFNNPKELQKLAGLALVENSSGKHKGETTISRRGRKRLRYLLFEVAMSLVSKNPEFRELHSYYTTRKLNPLKKMQSLMAVAAKLLRVFFAMLTKGVDYDPKKLVGDIKRPAVYLQVA

SEQ ID NO: 334282 - protein, 418 aa, unidentified
MNVKARRTKKQVNVENQAINLLSKEELNKKIEVVEKELRSYTWRELETNGKFAKNDKLSFITDDMLIVGCDIGSENHYIRAIDVRGRELSRGAFEFSNTSEGFENAKAWVLALAAKHDKKQIVLGLEPTGHYWFALAAWMISNGISVVQVNPYAVKQSKEIEDNSQLKDDRKDPKLIANLVKDGNYGMPYLPEKVYADMRRLSMFRDQLTEDRIRNINRLHRELKIYFPEYMDAFGKIDGAFTLEVLKVSAIPSDITALGAEGIKNIWYNVKLRGRGYSRANEIVSYAEKSVGLTDGIDAGREAVKWYAEQILKLVACSSGKHKGQTKISHRGRKRLRYWLFQAAKSAVSHADEFKQLHEYYTTRTNNPLKKMQSLVVIACKILRVIYTILKTGTTYDPQKLLEDIKRPTASHAPMAA

SEQ ID NO: 334283 - protein, 424 aa, unidentified
MNLTQNDRLNQVTADTLVVGVDIGSATHFARGFDWRGYEFSKRAFRFNNTKVGFLTFIRWVEEMMKKTEKTKIIVGCEPTGCYWLTFQKFLRDRDILLVTVNPYSVKKCKELDDNSPEKSDLKDPKTIAGLVREGRYSTPYLPEGVYAEIREAQVCRDQIMKQHVRLSNQIQGWLQKYFPEYLECYKDFDTASGMMVLEHAPLPEDIIKLGAGGINGLWRNAKLRGAGIKRAKTLVEAARGSVGLSGGEAARLEIWFLINDYQTKTKQLERLDEFLAKEILKVPHVEKLLAIKGVGLSTVIGFVADVGDIGRFTDAKQVQKLAGLEITKASSGKKKGRPCISKRGRRRLRRTMYESARSLISWNEAFSEVFMYYRYRTRNPLGGMQAKIAVACKAIRVFYTILKKGCDFDAEKLQRDIIRPEAV

SEQ ID NO: 334284 - protein, 291 aa, unidentified
MKQNILHIGLDVDDTQYHGAAFNKDTGEVCDFKCRPTLKGLLNQLDKLAGYFPGCVIRLCYEASYVGYCLQRDLISHGVHCDVVSPSSIPSPRGKAVKTDRIDAGYLAQFYANDLLTIVQPPDAEQEQDRDFLRSRQKLMQQQTQLRKHMQAVLRRSGLHYKAETGNKSHWTKHHYCWLARTIDGLSGSLKVNLELLLRQLKGLNQILTEYGHQIEELANSPRYQKAVQSLTCYKGIKNIFALTMITEIGDVKRFPHPRKRVSWIGMDIREYSSGGKYNRFGITKHGTVRI

SEQ ID NO: 334285 - protein, 382 aa, unidentified
MRFDTTPHPFYCGIDLHARTMYVCILDQAGETRLHRTMPAPPEALRKAIAPSHAQIVLAAACMFPWDWLADLCAAHGIPCVLGHALSMKAIHGGKAKNDKIDAQKIAALLRGGLLPQAYVYPAERRATRDLLRRRMHLARQRGALLAHVQHTNSQDTLPAIGKKIASKATRDGVAERWADPAVHKSIDVDLALITYDEALLRDVALSLVTTAKDHDAHTLYLLQTVPGIGKSLSLVLRYEIHDIARFPRGQDVASYCRLITGARASAGKRSGPSGAPIGNAHLKWAFSEAAVFFLRDNPAAPTLRSRLEQKHGKGKALTILAHTLARAVYDRWKRQTACALQQCLRAEGRGVGARNASLDNQGMHLIRNAQPTVKTGVVARP

SEQ ID NO: 334286 - protein, 357 aa, unidentified
MRSSGSDPGMLGQGKRRMTVMEHFAGLDVSLETTTICVIDDEGGVVFEGSVATDADAIAAALTPHAPGCVGLEAGPMSEWRHTGLARHGLDAVLMETRQVRAALRASQVKTDRRDARGIAQLLRMGWFRPVHVKTGCARERRVLLGARDTLVRRTRDLDNSVRGLLRGFGLRPPRLLRERWSDTVRQLIAAHPMLMAAINPILAARDKLAEELALLDKLVRDQARDDAVCRRLMTVPGVGAIVALSYVVAVDDPARFAKSRAVGPALGLTPSRYQSGETDRPGAITKAGDARARVALFEAAHVMMTRVIRWFPLKAWAMRVAARRGAKRAKVALARRLAVILHRMWVDGTDFQAQPA

SEQ ID NO: 334287 - protein, 410 aa, unidentified
MLYKVAGIDVHKKVLMVVVTDAAAEELEFESRRFGTTASEREHLVGWLQERGVQEIVMESTAQYWKPMWLDLEPHFAKLHLAQAHSNRAPKGRKHDFADAQRLTRRQIAGELILSFVPDAEQRSWRTITRAKVQLVRDRVRLQNQLEALLEETRIKLSSVISELLGSSGRRILRALAEGESDPAELAKRGDFRLKCSQEVLTDALRGQCQPLHRQMLKLFLERLDLLDRQSQQLDQMAAGAMQRYEDAVIRLAAVPGFGPDSAQQTIAEVGAQAKSFDSPARFASWTGLCPGREESAEHNHSSRSPKGNKFLRRILTQAAQAAVKKKGSHFQNVFRRWLPRLGYQAAIWAIAHKLARLVWKILHDRIHYIERGQDHPSVNHRRARKMLRVLRSMGYKVEISPLNPQPIQG

SEQ ID NO: 334288 - protein, 453 aa, unidentified
MGAQAGKGRSLSLECIEANAAGIDVGATEIYVAVPPDRDAQPVRCFATFTGDLREMAAWLVRCSIRTVAMESTGVYWIPPYEVLEEAGLRVCLVNSQHVRHVPGRKSDVSDCQWLQYLHSVGLLKPSFRPDAAICALRSLSRHRASLVESAAVHIQHMQKSLTQMNLQIHHVLSDITGISGMAIVEGIVAGQRDPSQLASLCHAKVHADRQTVIKSLTGNYRPEHLFTLKQSLAAYRNYQHLLAECDQEIERLTGSISGKLPPGGPAPHSSRQKRRKNQFHFDMGAELHRLFGVDLTAVPGINALTAHAVLSEVGPDLSRFPSAAAFANWLALCPNNNKSGGRILSSKTRPTNSRLSHALRVAAQTLARSRSHLGNFYRSMRARLGAPQAITATAHKLARILYHLLTTRSAYDETVFAGQEQKHNLRLHKRLLKQAKLLGLQLVPITTAEACS

SEQ ID NO: 334289 - protein, 386 aa, unidentified
MRQANDLSRSLAAFDQPTTLIAVIEMSQSSWLVAGIVPGLERHPLKKLAVDEGSLLRLLQRWRDQAIRAGCRIERITVAFEAGRDGFWLARWLRAHDIEGYVIHPTSVAVSREHRRAKTDRLDTELLKRAFLGWLRGEADHCNMAAIPTIEEEDGRRPHRERESLVAERTRIVNRMKGCLARLGIRGFKPTLQRAPKLLSTLRTPEGTPLPPNALAEMGRDLARLHFVEGQIKEIEAARLERLEQAPTEKSHAMVRLLVRVIGVGIETADMLVREVLSRNLRDRRAVARYAGLTGAPDESGSKRREKGLARAGNARVRRGMIQLAWRFLMFQKESALAQWYRSRTVDARQGTRKSLIVAMARKLLIELWRFVTTGETLAGVEMRPA

SEQ ID NO: 334290 - protein, 329 aa, unidentified
MKRKSFIGIDISKKTIDICLYTPGSTNPKKFFKTENSLKGFKLFIRELKTVKTKLKETFVCLEYCGVYGLELGFFLEGKIEYCFCNPLHIKRSLGLTRGKSDKLDSFKIARFNYLFRDELSPMSMPSECMLRLKSLMAERSRMTKSIVIDKQVLTDLQKTLGVNAKQRAENRLKMLQADRKAIDKEILKLIESEDCISTNYKLLISIIGISLVNATMMILCTNNFEGITNPRSYACYCGVAPFEHTSGTSIKGRTRVSPYANKKVKANLTNAARSAVQHDPEINIYYKRKRAEGKDHGTVMNAVKFKIITRAFAVVKRGTPYVKLRQAG

SEQ ID NO: 334291 - protein, 312 aa, unidentified
MTNLSDFFIGIDVSKDVLEVAVAPTRERMSFANEEDGIFLLTEFIKPFCPRLIVLEATGGLEKAAVCGLAAQGLPVVVVNPRQVRDFAKSKGILAKTDKIDAEVIAQFAELIRPEVRPLKTEEAQRLEALLSRRRQILQMLTAEKNRLQSAPVWTRKDIQKHIQWLEKNLDTFNQDLDRMVKQSPIWRAKGEILRSAKGVGPVLAVTLISQLPELGTMNRKKIAALVGVAPLNRDSGKFRGRRTIWGGRSDIRSVLLMATRIAIRFNPVIRAFYERLEKAGKARKVAETACMRKFLSILNAMMKKQARWQAA

SEQ ID NO: 334292 - protein, 360 aa, unidentified
MLYLAIDQHRKQLTVNLRNEQGDVLLKRQVSTEWPRVRSFLEEVRKTSVPEGGFVVILEVCGFNDWLVKLLAEYGCRETILIQPEKRSKKKTDRRDAYALGELLWVNRQRLLAGKKVQGIRRIQLPTDREAEDRQLTVVRQRMGQQRTRTINRIKHLLRKHNLEQQQPAKGLDTQRTRKWLATLPLGPIDRLEMDLLLAQWNLWDEQLAKLELEIEKRQAESMTAAVLATIPGCAAYGSLALASRIGPIERFPRPASLANYWGLTPGCRNSGEATDRLGSITKQGSAMARFVLGHMVLHVLRRDGRMKAWHGRIKRRRGSKIARVAVMRRLATIIWHMVKHNEPYAVGGPPRRKLSAQAA

SEQ ID NO: 334293 - protein, 417 aa, unidentified
MQSARTTLPEEPPGGVTGGIDWARDDHAVSIVDARGGEIARRTVEHSAAGLRELVAVLAGAGAGEAAIERPDGPVIDALLGAGITVVVISPNQVKNLRGRYGSAGNKDDRFDAFVLADTLRTDRARLRPLTPDSPATVALRRACRARKDLVSHRVAVANQLRGHLRNVFPGAAGLFADLDSPVSLTFLARFDTQDRADWLTPARLGKWLASIGYSGHTDPAEMHARLTAAPRGATGDDGLASACITHALHAVLVTLTGQIKVLSAQIASQLAAHADRHVFTSLPRSGTVRAARLLAEIGDCRARFPTPEALACLAGAAPSTRQSGKMRAVSFRWSCDKQLRDAVTDFAGDSRRASPWADDLYQRARGRGHDHPHAVRILARAWLFVIWHCWQDETAYDPARHRALQTLLKQDQRAAA

SEQ ID NO: 334294 - protein, 393 aa, unidentified
MSFFVGVDVSKEKFDACCIDEQGEKLFSLTCSMNREGFEKFIGRLPKDKSSFLVGMESTASYHIPLFAYLAAQDYRVVVINPLLINGFSKRSLRKTKTDKKDALTIAQFILQEKAILSVKAPDDLIAELKDLARRREKLADHMTSLKGDMKRILSVTFPELEYVTGVFTKATLRLLTEYPSAHAIRGANSLAIAAVFNKGRGNRPRVTVKALMDAATSSVGVASPAKELTLRHEASLLIHVEEQMKETTKVLMNTLNERIKQDTDILCSMKGIGENTAMNFLIEMGGAVEIYENDKKLIAASGLDPSTYESGKYAGKSRISKRGNRHLRRVIWLMATRVIINNDLFKSYFKKRKQDGLPYKKAVLATAHKLIRTIFVMLSRKTYFVEGGIKYS

SEQ ID NO: 334295 - protein, 367 aa, unidentified
MKHYIGCDAHKKYSVFAAVDEGGHVTFAKKVEHDRKIFRSFLETLPPASPIAIESTGNWYWLVDEMEKAGHKPSLVHAAKAKLMMGQINKTDKLDAQGLATLARNGTLPVVWIPPGELRDQRELPRMRMVLVSMRTKLKNRIHATLAKYGIMVDGEVSDLFGGRGRRLLEKVLSQLPSETTHSVQEQLQLLDQIEQSITQAEKRIHKVIKEDHTMQLLCTIPGVGPILAIVIALEVGDVNRFSGAEKLASYAGKVPRVNSTGGKTYYGKVRPDVNRYLKWAFTEAANVIVLQQHRMPDCHVLHLYWRVRKHKGHAKAITAVGRHLTEATYWMLKNDVPYQEPRAKQPVSSTPGQARRSHEFKEEFVH

SEQ ID NO: 334296 - protein, 343 aa, unidentified
MYYIGLDIHKKTISYCVKDASGQIHREGKIGSTRCELDSWIKTLPQPRMIAMEATIFTGWIYDHLLPHAEKVKVANPLMLRAIAAAKRKNDRIDSNKIADCLRCDFLPECYMASTAIRDRRRTLRYRNLVLKQMTQMKNRISGLLMETGVSYNKQRLHKLGYFMELMSCNEEVNESIRPLLKLSRETVVRSQRLDYALVHSLERDPLLAERLKRLRTIPGVGPITALTWALEIGDVSRFQSVKQAVSYCGLCSAERSSADKLVRMPISKQRNKHIQQVLVEAAKLAPRYSQELALVYERERQRGNKNRATLAVARKMVAYMLAVERRKQDFVPAEEFGGTAAA

SEQ ID NO: 334297 - protein, 405 aa, unidentified
MKIIALDVHRTFAQVAILENGKIRDAGRLELEREHILKFAERLNVEDEVVLEATVNTKAIVRLLSPFVSRVVISNPLLVRAIAWAKVKTDKIDASVLAKLHASGFLPEVWMPDEETERLRRVVAERVQLVSQMTRLKNRIHSVLHANLIPPYNASLFTKRGRKWLEEQPVAHDQRRVILRHAGELDRLGLELKQIDEDLAQTALQEPRVKQLMTITGVNMIVALSVLAAIGDIGRFSSPEKLVSYFGLNPRVRQSGDKAAYHGRITKQGRSHARAMLVEAAWSVSRTPGPLRAFFRRIREKRGNQVAAVATARKLTVVIWHMLSKGEEYIWSRPALLDWKLRKLELTAGYPSHRGGRTKGSAADYSLKSVRDREREAVGHAEEVYRRFVIKWKQKSPMAKPVAPQ

SEQ ID NO: 334298 - protein, 423 aa, unidentified
MEVMHQWVAGLDVHKETVVSCVRLMTGRKPARECRTFATTTEGLLALLAWLTASRVTHVAMEATGVYWTPVWKILSAGDFTLIVANAAHIKQVPGRKTDINDAMWIADLLARGLIKASFVPEEEIQELRSLMRTRKQLVREQTRHVQRLEKTLEEANIKLGTVISDLMGASGRRMIEAMIAGERDPHRLAGLAERTIKASPKALYDALHGRLREQHRFVLQLHLQQWDAIDAAIRQIDQRVAEQIKRMDAEAADRQPPFRELIPGLCAIPGVSFLSATAILAEIGRDMSRFPTAGHLISWAGLCPGQNQSAGKRKSSRLRRGAPWLKTMLVQCAWAAKRAKNSYYSAQFHRLRSRRGPQKAICAVAASILTAIYHMLKSGLPYRDLGVDYFDRRSPEAKAKRLVTQLAKLGFAAQLQPLAEAA

SEQ ID NO: 334299 - protein, 407 aa, unidentified
MRQYIGIDIAKHEHVAASRYENGEAHGKAFPFANDEEGFSSLLGRLGELGADQENCLVVMESTGHYWMALWEFLYLHGFDIAVVNPVLTDAFRKADTLRKTKTDEVDAFLIAEYARFKNLGPTRVSVEDAEGLKRLTRYRHHLVKERTALKNRLTSVADLAFPELAGLFSDGNHCATAQAILREFGSAEKVAKTDIRTLTRVVRRASRGRFGRAKADEVKAAARRSVGTSFAVDALAFEAAHIVELVAHLDKEIGRLEDEIARLVDPEVGGLLQTIPGIGPTCAAVIAAEVGDPDRFDEPKKLMAYAGMDSSKSQSGKRDGDQQHMSKRGSALLRDALMTAADKARQHDPYFGDYYDSLVARGKHHYVAVSGCARKLCGVILAVLRERRPYEPRPSIQSRQEHPSEA

SEQ ID NO: 334300 - protein, 349 aa, unidentified
MLADELDYVIGVDTHRDQHAFAVVAAGTGAVVAQTVVETSARGYATALRFAARNAGGARVWAVEGAGHYGANLSRFLADRGETVLEAGRQPRGERRLRGKDDALDAIRAARSMLASEALTLPRAGEHQEALRVLLLARRSAVDVRRVALVQLRSLIVTAPEQLREELRRLPLGQLLRRCSRLRRSDSRPVDQRAIVLTLRSLARRIEAATSEADELEREILQHVRALAPDLLNEPGVGPIVAAQLIVTWSLRDRLRSEACFARLAGVAPLPASSGQTIRHRLSRGGDRQLNRALHTVILHRRQHDPTTRDYIARRVAEGKTPRDATRILKRYLARHLYRVMQNAPLAMT

SEQ ID NO: 334301 - protein, 400 aa, unidentified
MLLFFEVITMIFVGIDVAKDTHYAAVSDDSGAVLVKPFAFQNNAEGFCLLLKKLSEFDRSKLLIGLESTGIYSENLICFLYESGFRLAVINPIQTATLRKTAIRKTKTDKVDTMLIIKSLMVNSYRLYSQRDADSLKLRTLCRFRQNLKKSKARLKIQLAGYVNLVFPEFGKFFKSGIHIAASYALLKKYSSPKEIAALRTSTLCTLLSKASHGRFGKDTAEALKSLALSSVGVKNPYISIQIAQTIAQIELLEQQIKDLNSAIEEAMESINSVLMTVPGIGAVNAACILGEIGDIKRFSKPCKLLAYAGLDPTVRQSGQFTAKSTRMSKRGSALLRFALINSAWQLTLNDTTFKAYYDLKRSQGLNHYGALGHVAHKLTRVIFKLLTSDTPFNPAKLVA

SEQ ID NO: 334302 - protein, 338 aa, unidentified
MKTHIGVDLHQRFCYLTAVDANGKVYKQAQVINEGAALRAWLRELPQPRQVVVEACGFWPAFERAVRPEAERVVMVHPLRVKAIASARLKNDRVDSKMLAHLSRADLLPEAWMADEQTQQLRKLTRLRIALTRQRATAKNQLQAVLHQEGFISPVTDVFGKQGRLWLGKLELSVAGRMVVDTWLQVVNQLDGMIEQQKRALEQMAEQDARARWLQTVPGIGAYSAMVILAEVGNITRFDNKRALASYAGLTPSLRESAGKRKRGGIGHHGSATLRWIMLQVAQVAARHSSSARAWIAELRKRKPAQVAKIALARKLLTAVWAMLRHGVCFEESVFAGS

SEQ ID NO: 334303 - protein, 429 aa, unidentified
MNYNTQNAKIASITEKTLIVGIDVGSETHYARAFNWRNYEYSKKPFAFSNDETGFAAFKEWMNDIAEKHGMEVIIPGMKPTGHYWLNLGAYLQEQGMKPVHVNPHHVKKSKELDDNNPSKNDRKDPKTIAGLVNEGRFSYPYIPTGIYAEIRNLSNLRIQTQEEITRIKNRMARWFSIYFPEIKDVYRNPDAVSGLMVIKQAPLPCDIKELGVDGVNKIWRDARLKGAGIKRATTLVTAAEHSIGNTEAPRSARKEIRNLLNDYEIYKNRMDELMEEIKETLSEIPYIDKLMEINGIGIKTVSCVIAEVGDIGRFDNPKQVQKLAGYAIVADSSGKHTGESRISHRGRKRLRYALYEAAISVIGKNKEFKEIHSYYRTREKNPLKKMQSVIAVACKLIRIFYTILTKGVDYDGQRMLADIVRPEMQLAA

SEQ ID NO: 334304 - protein, 364 aa, unidentified
MKRKVYVGMDVHKETIRIACLTSNTKEIVKEQQIKHNEVQIKKFVNKLKSEWNEIHSCYEAGVTGYPLYRNLKSLGVNCILVAPGKIPRQSSDKIKTDKRDAIKLAKLLRSGELESIHVPSEEDEAVRDYLRSRDSLRLDLGRNRQRLMKFLLRKGITYSATKYWTVSHNKWLNNLQFNNEILQETFNDYYSRVRVQEENLKAMDKRIQEIAESEPYREKVGILRCFRGVDYLTAMFLLCEVCDFKRFKTAGSFMSFLGLVPGEYSSGSKRKQTGITKTGSPRLRRILTEAAWQHRFPGTGSKIVTARRSGQPALVVALAEKASLRLHKKFRNLQQRGKTPQVMITAVSRELSGFLWAAMNLVA

SEQ ID NO: 334305 - protein, 318 aa, unidentified
MKLVGIDIGKNSHHFCVMDKETGELNVTPSSFSNNKEGFDFLINSLKPYSKKSILLGMEDTGHYHVALLKFLLSNGYTVALINPKTTDFTRKMEGGITKNDKLDTITICNVLDTPERKKQYRITKVDRFDLYEQRQLTRHHHNLKEELNIYCNRLQKSIDLVFPEFNTLFSSKYGIVYMNLLKTFGSAEAIASTDIRTIRKCFEIKGRGGRISLTPEKLKECAKNSIGISSEVETIQIKHLVSQITLIKEQIAEIDKKIEEFSIKNNSPILSIPGISHFSGTSILAELGDIGNYSKPSQIIKFVGVAPYHYESSQYIA

SEQ ID NO: 334306 - protein, 315 aa, unidentified
MSQMVVIAGIDVSKDKLDIHVLPSNQTFVVGRDRRGLTSLVRRLRQAGVEQVALEASGGYERIVIEALEAAGFVVHLLNPARVRAFAEAIGILAKTDPIDARLIALYCQHFPDKGLTRRPEQARKLGEFLNMRAMLLKVAGEIRNSLEHVREPGLKALADTLSADIAVKLKDVDGRIAKVIADDGATIRKARIIRSFTGAGPVLTSSLLARVPELGSVTRHAAARLSGIAPTDRQSGRSQRRSSIEGGRDQLRPVLHMAALAAMRSNSIIKAFAQKLSAAGKPKQLVIAACARKMVVILNAMLRDDTEWKYAKAA

SEQ ID NO: 334307 - protein, 363 aa, unidentified
MHSIRDTELSSHEGTRCQFNGSKAVIKLGIDVHQDFYVVVMQEGGTNPKPPQRLRKEAFLHWAAKLKSQGGEVHAVYEACGFGFGLQRQLSAFGIHCYVVCPQKLDEHNRRIKTDSLDAKALCLKLDRFVQGNRDALALVRVPSEKEEQLRAIHRQREQLVKARKQLEAQGRSLMVNHGVEPVKSWWKSRTFAALQVASWLKELLRNSQPILVALQEKIRALTVELQNAADPDQARGLGAMSSVIIDREIGNWHRFNNRRQVGSYTGLCPGEYSSGNTRLQSCVTKHGNPRLRAALVELAWRLVRFQPNYKPVLKWRETLRQGALSTGAARKKAIVAVARQLAVDLWRIRTGRVSAESLGLSN

SEQ ID NO: 334308 - protein, 407 aa, unidentified
MLFVGDDWAQDHHDVYLMDEAGARLAARRLPEGLAGIGQLHELIANHAEDPAEVIIGIETDRGLWVGALAAGGYQVYAINPMAVARYRDRHRVSGAKSDGADAKLLADLVRTDRHNHRALDGDSPQAEAVKVLARAHQSLIWTRARQASMLRSALREYYPAALRAFPNLGDRDRDRDALAVLGRAPTPEQGARLSLSKIAAALKAGGRKRNIDERAREIQAMMRTEHLGAPETLTAAFAATTRATVNILLELTDQISDLETTLADHFEKHPDADIYRSLPGLGVILGARVLGEFGDDPNRFTNAKCRKNYAGTSPLTIASGKKKAVLARHVRNPHLYDALDRWAFATLLCSPGARSYYDQHRANGDTHHQALRALANRLVGILHGCLRHHALYDEHTAWDHRIPTAA

SEQ ID NO: 334309 - protein, 358 aa, unidentified
MQRNKKTFKGQNIYIGIDVHKKNWQVAVITESGYTERLSTAADAKALFKFLKSHYPDGNYRAVYESGFSGFATYYALSELGVSCVVAHAADIPSSQYELTMKSDRIDAEKLARALRAGLVRGIYVRPKDNLDDRGVLRIRKTIQIQVGGYKTRIKHLLHSNGVELPERFSRSGTHWSRAFIAWLREDVRLLSDTRRSLDLLLLQVETLRANLLEATRRVRALSMTDRYREDCALLMGIPGIGLTVAMTILTEVCDIGRFGNERQFASYLGLVPTSHSSGERVSHGEMTFRGNKHIGPLLVEASWVLIVRDRELGRMYTEYRWRMAGQKAIIKIARKLSNIIFAVLKTRKAYEPYRRDA

SEQ ID NO: 334310 - protein, 427 aa, unidentified
MKPQRPPSHDFAASIGLDWANAKHDICLQATGSSTCEQAVLEHRPESIDEWARNLRQRFKGKPVALALELDKGPIVSALRKYDFLVLFPVNPTTLAKYREAFSPSGAKDDPTDAELVLELLLTHPERFKPLNPQSAQMRTLEQLVEQRRVLVDDQTRITNRLTDALKQYFPQPLQWFENKNTRVFCDFLCRWPTLKAVQLARRSTLERFFSEHNVHYRDVIERRILAIQQATPLTTDEGVVAPNSLLVRALVVQLRAALEATEMFNQAIAKRAPAHPDFDIFDSFPAAGPVFAPRLLVAFGEQRERYADAAEAQKYSGVAPVTKRSGNSTWVHWRWKCPTFIRQTFVEWSALTIPRSFWARAYYEQQRHKGNSHQAAVRALAFKWLRILYRCWHDRTPYDEATYLRALQKRGSPLIHNLAQSSPQNV

SEQ ID NO: 334311 - protein, 320 aa, unidentified
MQTPSAMLNIGADIGKDEIVVACAEERFSPRKIANRRAELLVWLKGLPAGSRIGMESTGGYHELLAEAAHQLGFIVFVLNPKDTRHYAKAMGLRGKTDRVDARLIARLIEREHEKLHPWVMPTAEQRQIDRMIKRRAKVSGIRAALSQSLKGLKGFAAELKVLNHRLDKLLARIDARIKALIDANDNRKQDYTRLRQIAGVGPVVGGSLVNTLERVPFKKGDAFVAFTGLDPRPNESGHHIGRRRLSKRGPAELRRLLYLAAMAAAKTKAWKPVYEHYRAKGLSRTAVLVILARRIARIAWSIYTHKTDFDPQRLTAGLT

SEQ ID NO: 334312 - protein, 388 aa, unidentified
MIYVGIDIAKLNHFASAISSDGEELIKPFKFTNDNDGFQLLISKLDPLDKDSLIIGLESTAHYSDNLVRYLVAKNYKVCVLNPIKTSTMRKDNIRKTKTDKVDTFIICKTLMMQESLRFVTFYDLDLMDLKALGRFRQKTIKQRTRLKIQLTSYVDEIFPELQYFFKSGLHQKSVYALLKEAPTPEAVASMHMTHLAHLLKVNSHGHFNKEVAQQLRVLAQKSVGASDSSLSIQVTHTIQQIELLDSQLERVEAEMTEIMKFNDSVIMTIPGIGYINGGMILGEIGDIHRFSSPNKLLAYAGLDPSVYQSGNFQAKKTRMSKRGSKVLRYALVNAAHNVVKNNATFKAYYEAKMAEGRTHYNALGHCAGKLVRIIWKMMTDNVEFNLD

SEQ ID NO: 334313 - protein, 353 aa, unidentified
MKVYIGVDLHVRTQTVCWCDTTTGEQQERLLDHERDDVRSFYAQFVAPAVVGVEGSGYSLWFHRLMEETGHQLVVGDAQAIRQFARRRQKNDRRDAQLLLELLLHGDFPVVHVPSPASRDVLALLRYRHRLVRMRTMLRNGLQAVALSHQLRLGPRLFTARGRQQLAVLPLQGAYAAQRQHSLALLESLEERVQAIEEELEMRAQQDARVMRLRTHPGVGLLTGLAVVHALDPVQRFDRARRVAAYCGLDPKEHSSGDSQRFGHISKQGNRLLRFLLVEAAHTAIGKDEPLRRFYFRIESRKNSAVALVAVARKLVLRLYCMLREEIDYDEFRRRGRDARRARVSHSSVARRD

SEQ ID NO: 334314 - protein, 403 aa, unidentified
MQHVIAFDVSMGKSYMVIYNAQKQCIFESEINHSKPDFEELRKRIDQLMNENKKSPHIVFEATGVYSRQLERFMQDNKFEYFLLNPLEAKLQCDSLRIHKTDRSDAHQLALTHFTASRREKTGTDNLFYQLKSLSRFYSELDDELSLIRSRMHKVIQLTFPELEQIFTTKSDLFLNFVQLFPHPDFVQNLSKTVMKNQIRKNTNKNISISIAGKKAMEVLEAARYSYPAVRQDDVLCEQLKSYAKRYQELLYQKEQCITKMVRLAESRTEYPIILSFPGIGPNTAIRLLAEIGDITRFENNKQLNAFAGIDIRRFQSGKTFFKDKINKRGNKHLRKLLFLIIQNMIKLRRYGQNHIVEYYDKLKTQPYNKCHKVASIACVNKLLKLLFYLITHNIHYDYRLTA

SEQ ID NO: 334315 - protein, 412 aa, unidentified
MTQPSSPSPLDPSSFRYVVGIDIGSQSCSFCALKPDKSSVIKPTDFANTAAGFAVLLENLQQLGASPSQILVGLEATSRYGDNLYHLLLKRGYALCLLHPRQTHQFAQQRGLRAKTDKLDASTIARVLLSGEARAGYVPTEVVATYRELVRLQAQLSDEAARYKNEIHALLVVLFPEFTQVFVDPSRPTALALLKLYPSPQAIVAAGVQRVASKLHELSPHHYGRRTAERLVGLAQQSVSSGLAISARSTSLRILCDQLEHTQANLAQLEEEIDKLLSTDPKAKGLCSVPEFGPKTVAVLRAELGDVNRFHRRDQVVAYAGLDIEVKESGKWKGKAMLSKRGSGRLRRTLYMAAVRCVRLEGSPFGAYYHRLVARGMKKVMALVAVMRKMLVVATHLVKTEEMYDPTKVSSL

SEQ ID NO: 334316 - protein, 401 aa, unidentified
MNAIGIDVSKGKSTVAIMRPYGEIVASPFEISHTEDDFKKLSSLIQNLHGESRIIMEYTGRYYEPLANYLYNAGLRVSVVNAILIHNYSNSSIRKVKTDKKDAIKIANYGLDCWLDLPEYIPEEELRQALKVYHRQFTQYAKVKVVLVNNLIALSDQTFPGVDNLFGKTPRQDGHQKWIDFIKSYWHKDCITKKSLKAFDTSYKKWCSKNGYHYQANKVTDIYQLASESVASMPYNTNTELIITETANELISLIDTLERLRKEMNRIASQLPEYPAVLSLHGVGTTLGPQLIAEIGDVRRFHNRKALIAYAGIDSSPYQSGTIDIKSRGISKRGSASLRKTLFTVMDCILRHKHTDEPVYQFLDKKRAEGKHYYVYMIAGCNKFLRIYYARVSEYLNSLEK

SEQ ID NO: 334317 - protein, 339 aa, unidentified
MSEHNLISVDLAKNVFQLCAMTDRMNIVFNRQLKRKDLARFMATQKPVEVVMEACYSSHYWGRCFAAMGHQVRLLPAQHVAPFVRGNKSDHNDAVAIAEAAHRPNILPVPIKNLEQSDIQSLHRMRERYVTHRTGLINQTRGLLSEYGVVAPQGHRAFTRLLREVSQPEYEDLSVCLKEQLSSIADEYHYQSKRIDEITRTLSDIAHHHPLCRILLSIPGIGPINATAIYSAIGNGSQFKNGREFAVWLGLTPKQASSGDKMSSGGITKRGNRYLRKQPVHGARAVLSRSKNKSDRLSRWTQQLVARRGVAKASVALAARIARLSWVLLQKQEPYQPKD

SEQ ID NO: 334318 - protein, 450 aa, unidentified
MNRSRAYKRTDVKRVNLTALRERTLEFGNAGVTVGLDIGKSEIVACLRWPHGEFERPWSIRNPDQIPACMDVLQLVKSAGDSLTVGMESTGYGEAIRRGLTEQGIEVHRVSGKATYDYHEIFDGVPSQHDGKDAAVIAELTAFGKGRPWPWQADSELLALVKHQVFRAEAYRSQQTQWSGRLEGLLARHWPELTNLLKLESPTLLRMIEHYRSPARVAADAEAAQRLAGWGGPKLQESKIRQVIESARLTQGVPTSDAESLWLGEVACDSLAAYRQIQSAKREISALLAGDPSWSRYTPIGAGTLGAIWAHAGDPRDYDSGGALLKGLGLNLKERSSGRRQGQVAISKRGSSEARRWIFFWALRAVQREEVSPWYAEFTQVGRKASEHGQQEARRMKGVVAVMRKLVRGLRCAMIHEEDFDYSKLFADQPVKKKRRRQRRSRHGRSDGLS

SEQ ID NO: 334319 - protein, 341 aa, unidentified
MQITTIGLDIAKNVFQVHGIDATEKVVVRKQFRRGQLVKFFEALAPCLIGMEACATAHYWARELTKLGHQVRLMPAKDVKAYVKRNKNDAADAEAICEAVRRPTMRFVAVKSAEQQGRLMQHRVRDLLMRQRTQLINALRAHLAELGIAAAQGREGIKELLAIIAQNGDSRLPVDAHASLIVLGAQLQAVQTMIGSIEKRIVSQHRSNEESKRLETIPGIGVIGATAIAATVPDPKVFRSGRDFAAWIGIVPREDSTGGKQKLGPISKRGDQYLRRILVVGACAVLKQARQQPEKYPWLTQLLARRPFKVVAVALANKMARVAWALLAKGGTYRAPQLKAA

SEQ ID NO: 334320 - protein, 365 aa, unidentified
MTKARSLVGLDVHAAKIVAAVLDAETGELQRFAMGGDSAGAAGFCAGLPRPVRVAYEAGPTGYGLARELQARRVECVVAAPSKIPRAAGDRVKTDRRDAELLARLLLAGKLHAVRVPGDEEEALRDLVRAREATRVDLMRCRHRLSKLLLRHDVRFDDGNAWTERHRQWLAMVELPWPAAQATLLDARGAIDAVAHRRDALEREILGLLPSSPWATQIGRLRCLRGIDTLTAVGLCAEIRDFERFARAEQLMSYVGLVPSESSTGQQRRLGAITKTGSGHARRLLVEAAWHYRARPNIGRGLSDRQELQPPAAIAIAWSAQRRLHRTWTRLESRNKRRTIIAVAAARELTGFCWAITQIEGEPPA

SEQ ID NO: 334321 - protein, 343 aa, unidentified
MNITTIGIDLAKTVFQVHGVDERGKVVLRKALKRAELVKLFSTLPACLVGMEACGGAHYWARRLIAMGHTVKLMAPQFVKPYVKTNKNDARDAEAICEAVSRPNMRFVPVKDVEQQTVLALHRARQGFVVERTAQANQMRGLLYELGIVIPKGIRYIDKQLPQILEDAENGLPEISRALFARLFAHFEQLGNQVKELESQIKAWHKQSAASARIESIPGIGALTASALVASIGDAKTFKSGRQLAAWLGLVPRQDSSGGKERLLGISKRGDVYLRTLLIHGARAVLFHRMRQAEHQDGWLMRLRARRNPNVAAVALANKNARVVWALLAHGREYCAAPAAAVA

SEQ ID NO: 334322 - protein, 338 aa, unidentified
MQTYAGIDLHSSNNYVGIIDETDKRLYGKRLPNRLDNVLMALEPFRDSLEALVVESTFNWYWLVDGLQEHGYAVHLANPSAIQQYEGLKHTDDVWDAFWLAHMYRLGILPEGYIYPKEHRAVRDLLRRRLLFVRHSTSHILSLQSMISRNLGFKMSNNEIRKLKSEDIDGLFACPNLVFMANNSLSAIKFLKKISLDIEKEVKSQVKMRKEFEMLLTIPGVGNILGLTIMLEVGDIGRFAKVGDYSSYSRCVESKRLSNGKKKGENNKKNGNKYLAWAYVEAAQFARRYCVKAQSFYQSKEAKTKPVVAIKALSNKLSKASYYIMRDQVAFDEEKLFG

SEQ ID NO: 334323 - protein, 334 aa, unidentified
MSNVTTVGIDLAKNAFSVHGVDANGRVLLRRSVSRGRLVQLIAQLPPCLVGMEACSGAHEWARQFGIYGHTVRLMAPKFVAPYRKSGKNDGNDAEAICEAVSRPNMRFVPIKSREQQAILCLHRARQGHIEERTGAINRIRGLLSEFGVVLPQKAIEVRRGAAMACEALPDMAASVIRELLDHVRHLEECIKHFETLIDSHANTDERAQRISALSGIGPMTSSAVVATVADAREFRNGRQFAAWLGLVPRQYSTGGKTRLGHITGRGDPYLRTLLVMGARSVLQNASRRKDRLARWALSVRERRGYHRAGVAIAAKHARILWALLAKDEPLQLA

SEQ ID NO: 334324 - protein, 318 aa, unidentified
MSQGYDKYVGIDVAKESLDVSGLTADSPSQFENTAAGRAKLLSLLPQAGACLLVAEATGGYERELVAEVVAAGHHIAVVNPRQVRDFAKAIGLLAKTDRIDAGVIARFGEATRPTPQGFSEQQEQLRELIVRRRQLVDHRTAEKNRCEQAHSTLVRNSVRKSIEGIDKDLKRIDRAIIQLVESNDDWRGRYERLKSVPGVGAQTAATLMAELPELGRLNRQQVAALVGVAPFNRDSGQFRGRRTIWGGRATVRSGLYMAALSAKKHNPVIRAFAARLLAKGKPPKVVLTACMRKLLVILNAMLRSDEMWGPRLATLAP

SEQ ID NO: 334325 - protein, 339 aa, unidentified
MKYTPVGVDIAKYLMQIHFVDEYTGEIIDKQLRRRDFLTFFSNRDPCLIGMEACGGAHYWARELKKLGHEVHLLQAKFVKAFRIGNKNDVMDARAIWMAVQQPGKPVAIKNEEQQTLLSVHRMRTQLVKFRTAQINALHGLLLEFGETVHKGRASLDKAIPEVLERLRITLSPFLISLIEEQYYRLSELDKEIDGLEKQLTEWANQHADCQRIMKIPGVGVLIATAAIATMGDPTAFRSGREFSACLGLVPRQTGTGGRVKLLGISKRGDAYLRTLFIHGARVATLCTKTPPQWVSELKKRRPVSVAIVGMANKLARTVWALIAHQREYEKDYVSVRPY

SEQ ID NO: 334326 - protein, 434 aa, unidentified
MERVAAVDVAKGSGMVCTRVPHPARPGKRQTRVWEVEATTGAVMELADHLAAGRIGKVTLESTSDYWRIWFYLLEAAGLEVQLVNARDVTNVPGRPKSDKLDCVWQAKLTERGMLRPSFVPPAEIRALRDYTRLRTDLTRERTRHWSRLEKLLEDALIKVTSVASKIGSLSVRDMLEALIAGQRDPEVLAGLARGKMRAKHDRLVEALTGRFDDHHAELARVLLDQIDALTVHIDKITGRVEELIQAIPGSWGVDADGVTGPGAGLGPGAPVLPAVARLDQVTGIGAPAAQVIIAEVGLEMSVFPTAGHLVSWAKLSPRTIQSGAKNRPGRTGKGNPYLKGVLGEAAAAAGRTATFLGERYRRIARRRGKLRALVAVARAILVIVWHLLADPAARFCELGPGYYASRIDTDRKTRNHVRQLEALGYAVTLAHAA

SEQ ID NO: 334327 - protein, 352 aa, unidentified
MARTTKFHSVTTTIGIDMGKNTLHMVGLDSNGAIVLREKVSRGRIGSRLANLPPCLIGIEAGMATHYVARELAALGHNVKQVPPAYARPFRQGHKNDFRDAHAVAEAVQRPTTRFVPAKTNEQLDLQALHRVRSRLVSERTAVINQIRGFLLEHGIIVRQGQRFLRHLLPDILAKRTDVLSPRMVRIISDLVGDWRQLDERIETMTDEIETLAKSDDSCRRVMTVPGIGPLISSAMVAAIGNGTAFAKGRDYSAWLGLVPRQMSTGDRTILGRITKHGNGYLRMLFMQAARVVLLRPTNWSKHGFGAWLVRAAQRLHPNVLAAALANKLARIAWTVLVQERNYEARVTRAAA

SEQ ID NO: 334328 - protein, 345 aa, unidentified
MPIVGGLDIHRKQLTFDYLDTVTGEVRRGQIAPADRAHLRGWLARFAGRDDVAFALEGCTGWRYVAEELAAAGVAAHVAEPADTAFARGRKRHAKTDKTDSRHLRVLLEQGRLPECWIPPAQILECRALLEAYHDLRREHTAWIERIHAVFFHQGAPRLGEGALRTDRGLAALREAAVTHLSPAGQLQVATALDMLAATEARMDTLRQQLLHAARHLAGAKALQARLYGVGPLAGLAMTCWLGGAGRFSSSRKAVRFAGLDVTVYSSDGKRAPGHLSRQGPEILRWVAYEAGKTHARAGAPGHDYYAAVKDRQDGKIAALAQARKLIRQACHILAELGDDALTAA

SEQ ID NO: 334329 - protein, 405 aa, unidentified
MNAVGIDVSKGKSTIAIMRSFGEVVASPFDVAHTESELNNLANLIKKLKGETKVVMEATSHYYEPIAEYLKERGIFVSVVNPVLIHEFGGNTLRKPKTDPIDSVKIASYALTYWLELKEYVSQEGLRKSLKMLNRQYQQISKVRTTLNNNLISLIDRTFPGINKLFTSPIRDKDGHEKWVDFVLRFPHKDSVAKLAPGAFKKKYQSWCKENGYRYCESKATEIHSFSRECVSSVSQNNTMDLLITQAVSMVNSALESCHALQEEMYKTASQLPEFETVINMYGVGKYLAPQLMAEIGDPRRFHNRKAITAYFGYDSENRDSGMKKTSSNPITKKGSGALRRTLFIVMFALIQGKPKDNPVYDFLLRKKSEGKHYFTYMNAAANKFLRIYYAQVKEILNLKEATLE

SEQ ID NO: 334330 - protein, 311 aa, unidentified
MTVHNVVGIDVAKDKVDVCFLESGESLTVKEEEYDNLVERLVEYAPDLVVLEATGGYEKKLTVRFADAGLPFFVVNPTRVRAYAKALGILAKTDDIDAYVIARFGQDAKLEQRPRSSGQDDEMQCFLARRRQLVSMCVSERNRLKQSGIPAIRSDIKEHIAQLMKQLEQVDAKLDAAIRENPVWSEREELLSSVPGVGPQTTRVLLFELPELGELGRGQLASLVGVAPMNRDSGQFRGERHIFGGRSYVRCALYMACLTAIRVNPPIRVYYKRLRESGKKPKVAIVACMRKLLIVMNTMIKNKTKFNPNFS

SEQ ID NO: 334331 - protein, 320 aa, unidentified
MTYIGIDVSKDSFVAAYPAKSGYATKTFKNTSSGVHQFIQSLPAECHCVMEATGNYSMLLLYLLQQANIIVSMENPQKIKHFARAMLSTTKTDDIDAKLIAMYGEKMEPAPYKIPSESIMLLKQKRTVLRQLKKQLTILLNLQHSLSVLPKQDPTAKVATEKTIKFLRKQISKLEEEITHLSNKEFKRQMDLLTSIKGIGKTLASALIVATGGFAYFSNAKQISRFLGLCPTYQQSGTSVNFKGHINRNGDTYLRSQLYIAAVSSIKFNAACKETFKRLKDKGKSGKVAVIAVANKLIRQAFAVVTNNRPYVDGYVSALP

SEQ ID NO: 334332 - protein, 347 aa, unidentified
MTEAYDGRQVVGIDLHRQRSVIVRMTEDGRKLETVRITNSPAALRAVIARAGKNPKVVIEATYGWYWAVDVLETAGAEVHLAHPLGVKAYSYRRVKNDERDAADLADLLRMDRLPEAWIAPPEIRELRELTRYRHKLVKARTSVKDQVHGVLAKLGIPVTHSDIFGVHGQAWLDELKLPQPYAGKVASLRQLAGGLTAEIGLLEQVLGDLLAGHEGYAAIQQLPGIGPVLAAVIAAEIGDIRRFPGPGQLASWAGLTPRHYESDTKVIRGHITKQGSRMLRWAVTEAIQRQPAGSRPRQVKDGIIARRGKEAKNIAKVAAARELLTLVFYGMRDGHVRRALQRGQAA

SEQ ID NO: 334333 - protein, 339 aa, unidentified
MHATTIAVDLAKSVFQVSLANQANRVIDRKRLTRSQFERFISQYPPTNVIMEACATANYWSQYAQAHGHSTKLLHAFYVRPYVRRNKTDAADADALLRANRDPELLPIPTKQPEQQALQSLHRCRQQLIETRTARINFVRGVLAEFGISLPRGVSGIGNKLSARVEELPTMVTPSLIEFITEISELKIRISRIDKQLEIIARQNDVALHLLTIPGIGVTTATAMVGCVPDIHLFKKARQFSAWLGITPREHSSGSKRKLGAISKQGNNYLRTLLIHGARSAMLQAHRLAAKDPDSLSELQHWVLALETHRPRNVATVALANKMARIIWVTWTQERDYQR

SEQ ID NO: 334334 - protein, 331 aa, unidentified
MNFKEFIGIDISKLTFDVRIHSNQIASVFENNKSGFEKMVKWVSKNSPFKKGEMLFGLEHTGIYSLPISIFLSEGKYFFSLISGLEIKRSLGIQRGKNDKIDAKRIAEYVSQKRDKIKPSVLPFKIILKLRRLLSLRERLVKQRAGFIKDKKENKRFLKQSENKMLFDVIDKMILQFDKQIKNIEDEFDCIIKSDELINKQYYLITSIKGVGKQTALTIIAYTNCFTLFDNWRKFASYSGTAPFSYRSGTSIKGKAKVSHLANKKIKTLLNMCARSAIVYNQEIKLYYQKRKNNGDNGMSAINIIRNKLISRIFAVVKRGTPYVNICNYAA

SEQ ID NO: 334335 - protein, 468 aa, unidentified
MSKNKGRKSQGRANKAQAKLDTLGLVHPHAAGIDIGSREIWGAIPPDRAEETVRCFGTFTPDLHALADWLVENQIDTVAMESTGVYWIPLFELLEARGIRVFLVNARHVKHVPGRKSDIIDCQWLQKLHSLGLLTGSFRPDAEMVSLRTYLRHRAELIQHRAPHILHMQKALQQMNLQLHHVLSDITGVTGLQILRAIVAGERDPQVLASFRQPGCKADEATIVKALTGSWRDEYLFSLKQSLELFDFFTAQINACDTEIEDHFAAVKPRWDAPEALPPLPPLKPNSRTKNKPAQSTRQHLFRIVGIDLVAVEGISASLAQTILSEIGSDMSKWPDVKHFASWLGLAPHNDISGGKVLRSRTLKTDNRAGQAFRQAAASVTRSNSAFGAFYRRKRVQLGPAQALVATAHKIARTVYFMLKYKVPFEDIGAEGYETQQRERELVYLQRKAAKLGFNLLPKEQTLEPTAA

SEQ ID NO: 334336 - protein, 347 aa, unidentified
MRFYNTQHQFYCGIDLHARSMYVCIVSHDGELLVHRNMKAAPEPFLKAIAPYRDGLVVAVECIFTWYWLADLCAQEHIPFVLGHALYMKAIHGGKAKNDKIDSQKIATLLRGGMVPKAYVYPAEMRATRDLLRRRTHLMRKRAELLAHVQNTNSQYNLPEIGKKIAYKANREGVAERFDDPAVQKTIAVDLALITYYDQMLSDLELFILKTAKQHDAQTLYLLQTVPGIGKILSLVLLYDIHQIDRFPRVQDFASYCRLVKCAKESAGKRLGTSGNKIGNAHLKWAFSEAATLFLRGNEAGQKYLARLEKKHDKGKALSILAHKLARTVYFRLKRKTAFDLEQFLRT

SEQ ID NO: 334337 - protein, 406 aa, unidentified
MAAMMIGIDPHKGSHTAVAIDESEQPLGELRVRSSSTQVVELRSWAKRWPERIWAVEGAGGLGYLVAQQLLAAGERVVDIQPKLGARVRLLATGATNKNDPNDARSVAIAALRSTMLVEVVPEDHATVLKLWAKRARDLGRLRTQVVCRLHAVLAELTPGGFPGSISAAQATTLLEKIEPQGAIELARHELAHEFLADLTRIDEQMRQTKKRITVAVAASGTTVTEIYGVGPFVAAVVIGYVRDVSRFSDRDHFAAYNGTAPIEVSSGNRKVHRLSRRGNRRINHAIHIAAVTQIRHRDSEGRTYYDKKITEGKSGKEALRSLKRRISDALFTHLQADARAVTGRTTEAGPGGQMGNDSVASATGLHPNTPVLRPSHSRTQPKAMTRPAPPPSRRSPAVKKVRQAS

SEQ ID NO: 334338 - protein, 413 aa, unidentified
MSDKVAGIDVHKKVLMVVVLDRARVDAKPERRRFSTLPGELQRLAAWLREQGVEEAVMESTAQYWRSVWLELEPHMSLHLAQAFSNRAPRGRKHDFKDAERLARRFIAQELILSFVPEGEQRVWRSLTRMKLQTVRDRVRLHGQIECLLEEMRIKLSVVVTDLFGASGLRILHALAQGETDAKSLASLGDERLHCSEEQLIEAMTGRSHALHRQMLALQLERLGQLDEQVATINTLIAQAMKSHQDAVIRLAEVPGFGVDSAQQVIAEVGPTAATFASAAEFSSWVGTCPGKEESAAENRSSRSAKGNKYMRRILNQAAHAAAKAKGTSFQAVFRRLLPRLGYQSAIWAIAHRLCRLVWKILHQGVSYIEKGTALEPKLLIYRAKYLARQLRKFGYDLNVTATYSASTITLTS

SEQ ID NO: 334339 - protein, 340 aa, unidentified
MEAIAVIGIDLAKSVFQVHGVDAQGQVVVRKRLSRAKLLPFFAKLPRCLIGMETCASANYWARELMVLGHEVRLMPPQYVKPYVKRSKNDVSDAEAICEAVTRPTMRFVGVKSPEQQSVLVLHRTRSILTRQRTQIGNAIRAHLAEFGIVAPVGRQGLDRLIAVIGDEGDHRVPIPARRCLAMLVQQHRLVLAHLLDTDRAIRADSRASELGRRLQEIPGVGPLVASALVATVPDPHVFKTGRGLSAWLGLVPRQNSSGGKERLGGITKAGDTYLRKMLFVGAMAVIRHAERYGTRRPWLTKLLGRRSPRVAAIALANRIGRTAWALMTSGERYREPVVA

SEQ ID NO: 334340 - protein, 348 aa, unidentified
MAIIGGLDLHRQQITFDYLSTDTGEIRTGQLRPATREAFRAWLAKSFQGRDDVMLAVEGCTGWRFVVEEMQRAGVEPHLAEPADTATLRGRKSRAKTDKADARLLRELLCQKRLPESWIPPQNVLEVRTLARLYLALMDERRAWLQRIHAQLYHQGVPPVASLLTFEGRKAIEAAQLSPTGRQMVETALVTIAALDQQIDPLRAQLKSIGRRQPGARALMAIYGIGALCGVIIWAELGDCRRFHRSDQAVRFAGLDVTVWSTDGRRPPGWLSHQGSPQLRWSLFEAAKAAARSQSPDYDYYQKVRERKGGKNPTLSVARKLLRHCYHILRELGDEAWAPLALPAEKVA

SEQ ID NO: 334341 - protein, 370 aa, unidentified
MSVRRILAKTINTDLEYEAIGIDLAKNCVSVALLTTDGEVVCIDRLDYSELEKSAQVLCPTTFAMEPCTEMNYLVQKLEAWGHRCLVIGGKNVQNYVENHYSGQKTDLNDAQALAFLAQDTQLRPIKAKDMEQQKYASLTTLREQYIKQYRQTIVSLKGICQAWGLNISKGISGKARLKDLIENHAAFPEELKESLVDMVTHAQTAQKALNKITKTLEELAKNDKLCQLIRTIPGLGLICSCRLRATIGDIKRFKNPKDFPAYYGLVPRSIATGHNEKKGRITHRGDKTMRSLMVQGAGSVINMATRGKLKSKQLTKWILKKQKEKMPWGKLVCAVAAKLLRIVRAVLISSKPYNPQIAGVAKCSLPKGT

SEQ ID NO: 334342 - protein, 417 aa, unidentified
MDVLVERCAGLDVHRDTVVATVRVPAEDGARNRRAQHTRTFATTTAGITALGDWLAEHEVTRSGMESTGVYWKPVYYLLEDQLEVWLINAEHLHNVPGRKTDVADSAWIAQLIEHGLVRPSFVPPPPIRRLRDLTRYRTAVVQERTREIQRLEKVLEDAGIKLSTVASHTLGKSSRAMIEALIAGERDPQVLADLALARMRNKIPQLRQALLGRFTDHHAFVCRTMLERIDTAENTINKLTGRIEQEIAPFHQTVTRLMTIPGVSARIAQILVAETGADMTRFATAAHLASWAGMCPGHHESAGKHHGGATRKGDSWLRGALGEAATAAARTKNTYLQARYRRIAARRGTKRAVVAVGHTILTSAWHMITAEIDYADLGADYYQRHQDRRAATIRLVGKLTQLGYRVTLDDAATVAT

SEQ ID NO: 334343 - protein, 433 aa, unidentified
MTAAPYDLVIGLDRADQKADLCLLETATGQRRSVTIDTAPEALWEWLAQLRQQHPEARVGICLEQPAVHLVSFLEAYEWITLHPINPITLQKYREAFVTSRAKDDTKDAEFLADLLLNHHAQLPVWTPQDGATRAVQQLVAHRRAVVDERTALCNRLIALLKQYFPQALTLCGEDLWRPLATAFLLKWPSLGAVQKAKPATLKAFYYLHGSRSQTVIEERLALLPKAVPVMEETAVIASFVLRVQLLARELQAVGRTIAEFDRQIAAAYAAHPDHGIFASLPGAGPVLGPRLLASLGADRERFGASAAQLQCYTGIAPVTKRSGGSERIHRRYCCPKFQRQSFHEYAKESILWSRWAGAFYLQQRSKGCAHHTAVRALAFKWQRVIWRCWQDRRPYEEAHYEAALRQAGSPVVALFDRVELGKSPWKNPAKKN

SEQ ID NO: 334344 - protein, 416 aa, unidentified
MSEAPNSSPFERYLALDAHKHYVVVGGVNAQLEIVLRAGRMDVEQYPQWAKENLTARDCLVIEASTNTWDLYDITAAVAGKVVVAHPMAVKLIANARVKTDTKDVFRLAHLLVAGLIPEVWVPPVPVRELRGLIAHRRRLIKMRTMTRNRLHSLAHRHNLILPEGGAFVDKNQAWWKDLSLSEVEKLRLEQDLAMLEFLGPKVQAVDTELARLSSSEPWKEAVPYLMQLPGFGLIVSMTILSAIGDIQRFSNSKQLVGYSGLNASLHQSGQANYSGRITKQGRKELRFALVEAAWTAVKTNPYWREQYQKLAHRMTDNKAIVAIARRLLVTAWHVLTERATDRRADPDMIASKLMAWSWKLTDAQRSGLTSRQFVRYGLMRLKIGQEITRIKRRNNRPIASEDEVLELLSDLNLSI

SEQ ID NO: 334345 - protein, 346 aa, unidentified
MRNITTIGVDLAKNLFQVHGVDERGKVVLRRALKRAEMSSFFARLVPCLIGMEACGGAHFWARKLSELGHTVRLMAPQFVKPYVKTNKSDARDAEAICEAVARPNMRFVPIKTVEQQALLAVHRVRQAFVSARTAQSNQLRGLLSEFGIVMPKGTAVLETRMPQILEDAENGLPGISRELFARLYAHFKELSGQVDELERQIKAWHRESAVSQRLEAIPGIGPLSASALAASIGDARVFKNGRQFAAWLGLVPRQCSSGGKERLLGISKRGDSYLRTLLIHGARSVLLRLKRRTDQGAVWLARLVARRSPNVAAVALANKNARVIWALLAHGRDYQADYMATPATA

SEQ ID NO: 334346 - protein, 343 aa, unidentified
MERYVGLDVSLKQTSICVVNQAGSIVQGGVVDSDPEAIAAFVRSKAPGTVRIGLETGPTTTWLWTELKRLGLPVICIDARHAKAVLKMQINKSDRNDAAGIARIMQTGWFKEVRVKDLDSHSVKALLASRALLVKIKRDLENQVRGLLKNLGLVIGRAKFNIFAVRAEELIEDRPELVAAVRPLLEARKAIEQQIDDLDCKVLKLARHDVEARRFMTVPGVGPITALCFKATIDDPTRFRRSRSVGAYIGLTARRHASGEIDWSGRISKCGDAMLRMYLFEAAGVLLTRVPKWSALKAWGTRLAKRNGLRKAKVAIARKLAVILHRMWVDGTEFNWSTKKAAA

SEQ ID NO: 334347 - protein, 329 aa, unidentified
MDVHKKMSYYSMVDRQGTEVKKGRFPTTREGLNEFANTLPEGAKVAIEASTSGIFVYEYLDGKRIEVHLAHPVYVKPFAKKHIKTDKVDARVLAQLLRMDYLPESYVPGEDMRDLRTIVRHRASLVRLRTSIKNKVHALLRIEGVQPPKVSDLFGRRGMKFLKEVELQESRRTALDDYLEVLGILGKKIKEVEGILREKAEVTEEAMWLMSIVGIGFHNALLALSEIGEIARFSKPKSFVSYAGLAPKVEQSGDYTRYGHINKHSNGFLRWALIQSTRAAVHSATPNRFQRIYNRLKARRGEKVAIVATARHMAESVYWILTKRVSYKE

SEQ ID NO: 334348 - protein, 332 aa, unidentified
MQKDFYIGVDISKKTIDVAIYKKEKSNKVSVCEKFPNSSDGFKEMKRWLCKCGVSLKNALFCMEATGHYTYDLCLFLEQQEVSYSVQSPLHLKRSFGLTHGKNDKADAYRIASYAYLHREDIKLSQLATNSIRKLKALMAERKSLVVEIARCKAQLKEVGSHSSSPGTTKRTKELLEFLETQVLDIEKDMAQTIDSDAELKNNYQLLLTISGIGIVNAVNTIVATHNFKMFDNARQYASYIGVAPFEHTSGTSVRGKTHVEPGAKMLKADLTGAVRTCINHDKEIQKYYERKIEKGKSYGVVANAIKFKLLLRMFAVIKRGTPFVKKADHLI

SEQ ID NO: 334349 - protein, 485 aa, unidentified
MAKKRKMSTFERLQGGKLNRTQRKELQQRLQAADPGLTVVHPDAAGIDVGNASHFVAVPAGRDPYPVREFGSWTADLHRMAEWLKCCGIGTVAIQSTGVYWIALQEILEEHGIEVYLVNARGTRNLPGRKSDVQECQWLMKLHTYGLLRNSFRPPEEIRAVRTVWRLRDRLVQDAGRAIQQIQKALTTMNIRLANAIRDVSGVTGMAIIGAILRGERDPRVLAQLRDARVKASEEEVARCLEGHWREEGLFELEQVVQCYDFYQGRIAACDQQLKGYMAALPDRAVTSEPTVAEVPEGPRGPRKVKKRRAKHSRNQPTSFDIEAELRRSFGVDLTQIDGIKAMTAQVILAEIGPDFSAFPSEGNFASWLELTPRRDITGGRVIRQKARKSNNRVADALRMAAESLWHSDSYLGARYRRLRGRMEGEKAIKAMAHYLARLVYRLVTRGQQYVDRGAAYYEGQRAQRDLIRLQRKAAELGLKLVPAA

SEQ ID NO: 334350 - protein, 408 aa, unidentified
MNSVGIDVSKGKSMVAALRPFGEVAIVPREVTHTQSNLERLGYDIIGLGEDTWAVMEATGRYHEPVASALHDLGISVCVLNPIVIKQSGAGSVRKVKSDKKDALKIAKYGLDNWTLLRQYTPTDAVRQLLKLFSRQYNLYMKTSVALQNNLISLLDKTFPGANKLFDSPTRADGHQKWVDFTADFWHCDCLTCISEKTFTERYQKWCKRKGYLFSASKAEDVYISSAGHIITLPKNDNTKLLITSATTELTATRKVLMTVKAEVIRLAHNLPEYSIVQAMYGVGEITGAQLMAELGDVRRFDNRRAIVAFAGIDPEVNQSGAYQRESNSASKRGSPHLRKTLFQVVNTHLKKSPTNEPVYQFLDKKRTEGKPYYVYMTAAANKFLRIYYARVKEYLNENCPEQEPLKL

SEQ ID NO: 334351 - protein, 409 aa, unidentified
MSETIATRFVALDIHKHYAVIAAVDKDIQVVLKPRRVSYDRLPQWAQQHLRPTDQVVIEATTNAWHVYDMLAPLVAEVKVANPIRVVQIARARVKTDARDALILARLLAGKLIPEVWVPPQPVRDLRRLVSQRHKLVKAHTQIVNRLHSVSHRHHLGHPKGKRFRKDRLPWLDDLSELERWQVELDLQTKDHLETQIQTLTDRLAALSHKGPWAEQAMLLMQIPGFGLVTVMTVLAAIGEISRFPSPKHLVSYAGLAPGVHQSGVKERSKPITKEGRKDLRWAMVEVARRAVKSHPLWQRRFQELTRRKHPNDAVVVIAHRLLEIVWHILTNGEPYRHSSPELIAYKFLSWAYRLDEKQRRGMTPAQFARYYLMRLGIGDDLQRVAIHPKYPRKLAPPEEVRPWLEETS

SEQ ID NO: 334352 - protein, 338 aa, unidentified
MIHVGVDLHQRFCYMTALETRGKLLQSGAVNNERLALKRYFRQFRGQAVEVAVEACGFWPAFREVVEPEVKRLVLVHPQRVKAIASAKLKNDRVDSATLAHLLRCDLLPESWKADRDTQARRQQVRLRATLVRQRTRLKNQVHAVLHQQGQHSPVTDGFGKRGRQWLGQVKLPEKARQTLAVCLRMIDYYTQEIEEQNRQLSVEALKVARARWLMTIPGIGVYSAMLLLAEIGNIERFADKAGLCSYAGLVPRVRESAGKAARGGITRQGSPYLRWIMVEAAQVATRCSPAAKAYFERLRKKKHAHVARVALARKLLSAVHALLRDGVGFEESEFAAV

SEQ ID NO: 334353 - protein, 413 aa, unidentified
MDVFCGIDWAEDHHDIALVNRDGQLLARRRISDDAAGLAALLELLAEHGDSADDPIPVAIETPRGLLTACLRATGRKVYPINPMAVARYRDRRSVAGRKSDHGDAVVLANILRTDAHAHRPLPADSELAQAIAVLARAQQDAVWARTGAHNKLRSHLREYYPAFLAAVANARGGITRPEARAILAAAPTPAAAATLTRTQLRALLRKSGRRRGIDAEATRLREAFRAPQMRQLPLVDEAMGRQALALLRQLDAACQAADDLEQATVESFNQHPDAEIITSFPGLGPLTGAPVLAETGDDRSRFADAKGLKAYAGAAPITRASGKTTAVLHRTVKNQRLAAAGYIWAFAALTASPGARAHYDRRKADGDRHAAAQRNLFGRLLNCLHHCLATGQHYDEATAFPTATQATPAKAA

SEQ ID NO: 334354 - protein, 403 aa, unidentified
MNSVGIDISKGRSTVAVMRPFGEVVISPFEVRHTGSELSKLAKQLKSLGGETRVVMEATGNYHASVAKLLHDAGLYVSVVNAKLVHGYGNNDLRRVKTDRKDAVKLANYGLDRWLTLPRYVPEEDTRLLLKNCYRQYRQYSKVQTVLKNNLISLLDTVFPNVNRLFNSPVRADGSEKWVDFVAEFWHCECICERSEKAFVSKYQKWCKKHGYNFGEEKACAIYAEASGHIGVMPKSETTKLLVEQAVSQLRATSAALAALKHEMQSLASMLPEYPVVMDMFGVGPTLGPQLIAEIGDVRRFYSKKALVAYAGLDAPPNDSGDVTGRHKSMSKVGASSLRRTLFLVMSIYLQNAPLDEPVYQFMDRKRAEGKPYRVYMMASANKFLRIYYATVKAYLESLEHTA

SEQ ID NO: 334355 - protein, 394 aa, unidentified
MTIQTQGSVQTQVLELVPRAYEVFGGLDVDHHSISATFADHGKLMKSLRLPYSAPQLLNYVRKHFPGQRLAFVYEAGPTGFGLYDELVAAGHVCLVVAPPMVPTAPGNRVKTNRLDSRKLSTALRGGELKSIHVPAPKYRELRHLVQLRDTHVGQLTATKCRIKALLLYEGLPFPSDEGKQKQWSQRVVNELLELPCSESVRFKLDQLIGTLHFNFNSAAAAQKQIRHFCQKDPELRQSLAWLKSLPGIGEIIATHLVARLGDPELITNVRQIAGFLGLVSSEHSTGDKQNRGEITRAGDSRLRNKLIQSAWVAIRQDPELREFYNRVYQRHPKKVAARKAIVAVTRKLTTRIYAVLKEQRPFVLREVSAAPLTTEETAGHRGRLDGQQNEPSR

SEQ ID NO: 334356 - protein, 313 aa, unidentified
MSEHYVGVDVSKEYLDVASSDGTSWRVGNDEAGHQELVSRFGAVPPALVLMEATGGLERALAVQLSAAGVALRIVNARHVRHFAKATGRLAKTDRLDAQALVHFAQTLKPEPRAIQPEQTLALQALIVRRRQLVEMLTMERNRLRTAHRGVRKDLQSSIRWLEKRLAGVDDDIDRALRACGVWREKVELLESVPGIARVISVSLLASLPELGQLNRRQISALAGVAPFNRDSGRWQGRRSIYGGRPLVRSALYMAALVGARHNPVLRNFYQRLRGAGKPAKVALTACMRKLLVILNTMLKNGQRWGDHVQLQA

SEQ ID NO: 334357 - protein, 391 aa, unidentified
MSMYFIGIDISKYKHDCCIISAADQKVVSKVTIKNNKAGFNELLTIIHSLANPADIRIGFESTAHYALNLELFLENSLLTFMEVNPVLISEYKKSKTLRRTKTDSVDCESIARWLMTVEYKPHSKGFYHAYSLKSLTRLRDRLVRQRSFYLVKITNVLDHTFPEFKPFFHERLSKTALYLLENYGSAEKIARMNSASYEKLRSISRGKFSPQQFIRLKELAANTVGVNNSIFDVELNSLLTLYKSLVDEIKTLESEINRLVDEVHPHYMSIPGIGPISAAIIYAEYGDISNFSSPNQMLAFAGIEPSVHESGTEAYNGKMVKHGSSQLRYVLINCCLPLIRFDVTFATYYARKRSENKPHRVAITHVAKKLVRVIYALESQDIDFDPKKLR

SEQ ID NO: 334358 - protein, 331 aa, unidentified
MNAHVGIDISARSSAMGWRQNGKAAGNGDIQHTPKGRKAAIEKLLRLKPLSVVMEATGIYYLDLAIELHAAGLPVSVINPKSFHNFAGLMLQNSKTDQIDAQLLAEYGERMGPRLWVPPTADQMMLRAIGRHINRLIGHRTRAKNELHALHATETSIALLIEDEKDAITALNTRIERLKQAARDAIAKCPDLSLQFRCMMAAPGVGEASAIAALAELTTLPVTLRSAQVSRHAGLDVRLTQSGTSVNRPGRMSKCGNAYLRAAMFMPALTAIRCDPYVKAFYEALVGRGKKKMQAIGAVMRKYLTGLWACMRAGEDFDTAKLFSKIHLLKA

SEQ ID NO: 334359 - protein, 422 aa, unidentified
MSLSKVFYKCCCGIDVHRSIIKANLRRVGIKGKKNLNEVRKFGTMTRDLLALGDWLKEAGCTHIAIESTGVFWKPVFNILGEDFKIILVNARHYRGVPGHKTDAKDCSWLCELLQHGLLKASFIPPQPIRELRDLTRQRRVLIQDKSSVVNRIHKVLQDANIKLSSVITDIMGKSGVDMLERLIKGEIDAVKIAECARGKMKAKKDQLVYALEGRLTENNRFLLSKHFKQIKFLDEMIEEFDNQIDKHIRAQGEDFCQLVEIVTTLRGTEKRSAEDVLAEIGVDMNQFPNEEQLSSWAGICPGNNETGGKRKSGKITKGSKWLRAALGEMAWAASRTKGTYLSAHYKRIARRRGKKRAIIALAHTMLVIIYHMIKNRLSYNELGETYFNKMDKEKLKNTMVKRLEKLGYKVDLTIAEEQKAA

SEQ ID NO: 334360 - protein, 456 aa, unidentified
MMAKQKTGRPPAIETVNIGAAAVDIGSREHMAAVNPDVTDTPVRAFGTFTHDLHDLADWLKSHGATSVAMESTGVYWIPAYEILEQHGFEVILVNARYAKNVPGRKTDVSDASWLRQLHSYGLLRGSFRPSAQIATLRAYLRQRERLVEYAAAHIQHMQKALMEMNLQLHHVVSDITGVTGMKIIRAIVDGERDLDVLASYRDVRCKASIETIKAALNGNDRPEHVFALTQSLELYDFYQAKMLECDRHLEATLAALAADTEHDPSKLPRPRTKTKQVSTPSFNVRAALFGVLGVDLTQIHGMGPSLSLKLVGECGTDLRAWPSAKHFTSWLCLAPGNKISGGKVLSSRTRRSSSRAAALLRLAAVTIGRSDTALGAFYRRLAARAGKAKAVTATARKIAVLFYNTLRHGMTYQDPGASHYEERYRNRVLGNLKRRAKSFGYDLQELPPEADMAVS

SEQ ID NO: 334361 - protein, 347 aa, unidentified
MNFYNHTHPYYCGIDLHARSLYVCIIDQAGETRVHKEIPANPGKLKQLLEPFIDNVVVGVECMHCWYWVSDFCETLGVNFILGHALYMKAIHGGKAKNDRIDSYKIACLMRGGNFPLAYVYPKEMRATRDLLRRRMKIVRHGANLKAHVANATSQYNLPPNKVNLKNLDAREQLRSAFPDQVVQRNVDLDMVLLDCYAKELSKIEWFLEQQAKQHNPVHLHLLKSISGIGRILSLTIIYEVGDIHRFESVQKFASYSRLVKCKAESAGKSYGTQGNKIGNAHLKWAFSEAAVLFLRGNKKAQRYLQRLQRRMSKAKAISVLAHKLGRCVYFMLKNETVFNESKFLSS

SEQ ID NO: 334362 - protein, 364 aa, unidentified
MDPPLKDGVIMRQHRISIFKKRRRSMKDIKILGVDIAKDVFQLWGIDEWGEVIYTRRVKRAQYVSTVASLKVGCVVMEACGGANHWYRTFMGMGIPTQLISPQHVKPYVKSNKNDRNDAQAIAEAASRASMRFVRGKTVEQQDVQALLKIRDRLVKSRTALINEIRGLLQEYGLTMARGAKRFYEELPLILASEAVGLTPRMKRVLNCLYTELLNRDEAIGDYEEELKAVAKANEDCQRVQSIPGVGYLTALSVYASVGDIHQFHRSRQLSAFIGLVPRQHSSGNKEVLLGISKRGNVMLRTLLIHGARALLRHVKNKTDKKSLWLKALIERRGMNRACVALANKNAPIIWALLTRQETYRCGA

SEQ ID NO: 334363 - protein, 415 aa, unidentified
MSGKREIACGVDVHNKFIVATILSSDGLRVQDRFDTNLEDLLKFKYWLKENGCHKVALESTGNYWLPIYNVLDGSVNFILANAYQIKHIPGRKTDTLDSEWIAEICLKNLISPSRIFPRDRRELRSLTRARESLMKVRTKIKNQVTHELEAACIKLSSVLSDVFGKSGRHIVDGLLNGMDLEKILESIPSGRVKAIKEEIRGTIQANLSSLQIFLLQSHLDTIDAITKQIAKIDSKISYLISSRKEDLRIALSMPGMGFISASTILAEIGDFRDFSSPEKLAAYCGLVPSVYQSAGKMINGHITKHGSPHIRSMIIEVAHAIIRTKRNSRLKRFFLKIKARRGTKIGVVALARKVLCILYHLLISQETYQDDLLSKPRSSKYSNLQSTSMSLDEMIRTIINAGYEVRKNECLESG

SEQ ID NO: 334364 - protein, 341 aa, unidentified
MENIALIGIDLGKNSFHIHCQDHRGKAVYRKKFTRPKLIEFLATCPATTIAMEACGGSHFMARKLEELGHFPKLISPQFVRPFVKSNKNDFVDAEAICEAASRPSMRFVQPRTESQQAMRALHRVRESLVQDKVKTTNQMHAFLLEFGISVPRGAAVISRLSTLLEDSSLPLYLSQLLLKLQQHYHYLVEQIKDLESQLKRKLDEDEVGQRLLSIPCVGTLTASTISTEIGDGKQYASSRDFAAATGLVPRQYSTGGRTTLLGISKRGNKKIRTLLVQCARVFIQKLEHQSGKLADWVRELLCRKSNFVVTCALANKLARIAWASGFANTDIDDTNGPPAC

SEQ ID NO: 334365 - protein, 339 aa, unidentified
MRMFAGLDVGFKRTSVCVVEETGKIVWRGVVDTHPEMIAAALHRWRGELAKVGLESGSMSPWLARALGALGFAVVCMDARRAADAIKSRRVKSDKADAYALAEMLRTGWYSAVHVKSEASHRLKALLGSRELVRAKRALGNQVRGVLRPFGIRLPSRQGTKKLSTAAHHAVRHDAMLNASVTALLEALAAIEAQIARLDQQLRELARRSPVCWRLMSVPGVGPIVALAFVATIEDVGRFRRMRDIGPYLSLTPKRYQSGETDVVLGISRQGDAMARHYLYEAANVLLTTVRSPSALKSWGLKVLKRRGPKRARVAVARKLAALLGRIWKDETHFDAATA

SEQ ID NO: 334366 - protein, 337 aa, unidentified
MVYVGVDLHRKSSHVAVLADDGELLASRRIASQPDEFLRVFGELEEEPVGVAFEATYGWGWFADLLSEVGIPAHVAHPLATKAISSARVKNDRVDAKTLAHLLRTDLLPEAWAAPPEVRDARKLGRTRVSLARISSRLKCQTHALLADEAITPPVSDVFGPGGRRFLQDVRLRPIPQARLEANLRLIDLLGPEIAQADRELRELFRGDPRVARLVPIPGIGFMTAAVVIAEVWDVTRFPSPQHLSSWAGLTPTERSSAEHTRRGHISKQGSRWLRWAMVESASRPHLNDPVLRGFRDRIARRRGGKIAKVALARRLLTLCYYALRDEGGCRAYPVAR

SEQ ID NO: 334367 - protein, 341 aa, unidentified
MVYVGIDIAKDKHDCFIVNSDGEVLFDVFTIQNSMAGFEDLLFKIKTSSKNLNKVKVGLEATGHYSCNILGFLKNKGLPTIVINPLYTSAYRKSLSLRKTKTDKVDARTIASMIMSDVSLKPYSDKLYYNEDLKSLTRYRFDKVSARAKLKQSIARLVNILFPELEKLVSTLHVKTVYALLWEFPGAHQISSANLKHLTNLLNTASKGRWGREKADEIREVARKSISAYLPAKSLELKHTIKLIGELTSEIDEIEAEIKNIMDAIASPILTVPGIGYSVGAMIVAEIGDFSRFDSPDKILAFAGCSPTTYQSGQLYSSHAKMEKRGSRYLRWALINAAKFV

SEQ ID NO: 334368 - protein, 446 aa, unidentified
MTTLAGVMVLVPSVSCLPEPSDQRLPSPFPYTKALTAMTTDIDFSAKPVAGVDTHTDTHTVATVTATGRHLATETFPTTRAGYTHLTEFLNKHGIGTVGVEGTNSFGAGLTRHLIDRGYTVVEVLRPKRSIRRRDGKSDPVDALAAARQVLSGEGLSTPKDSTGPVESLRALQITRKQLVSTTTTLITTIKSLLVTAPDDIRTRYGTMTNHTLVNALVYCRPSPDLSDPRNGVLTSLKILATTYRALRVQCDELEARIAALVSMINPHVSNIVGCGALVSADLLISIGDNPERIHSEAALAHLCGVAPLPASSGRTNRHRLNRGGDRRANSALYRIALVRMRYDQRTKAYVARRTAEGLSKKETIRCLKRAIIREVYRVICTKRSTPQPRDLRRDELKELRIAKQLTQVYVAQHLGCAPARISDIETGKRPLTELASAYEKFLKTA

SEQ ID NO: 334369 - protein, 370 aa, unidentified
MAKRSMFVGMDVHKESIDVSLAEEGRDGEVRRYGVIPGDLEAVAKVVRALRAPSRRLRFVYEAGPCGFGIHRYLTTHGEDCVVVNPSSMPKRSGDRIKTDRRDGDALARLHRAGELTAIYIPTADDEALRDLVRAREDAVGLSTQAKHRLKAFLLRQGRRYPGRVGWTRPYRRWLADLSFPLAPQHIALQEYRDTIDETERRVERLTDQLRQLTPAWRWAPVVEALQALRGVSFVTAVGLVTEVGDIRRFTHPRELMAYLGLVPSEYSSGPSVRRGGITKAGNPHARRLLAEAAWAYQGVPRIGRQMLYRQEALPKVVCDIAWKAQLRLTSRFRKLVARGKAKPKVATAIARELTGFIWAIAREVPAPPA

SEQ ID NO: 334370 - protein, 430 aa, unidentified
MDLIDLTSMPPARDEQAIAYNWYVGIDWGSQQHQVCVLDRDRHVVGERVVDHDGSSLAQLATWLWALSAGQPQRVAVAIEVPRGAIVEGLIERGFHVFAINPKQLARFRDRHTMSGAKDDRRDAFVLADSVRTDQPSFRRLHLDEPQLLLLRELSRAEETLLEEFRRSANRLRDQLHRFYPQMLHLCSGADESWLWDLIDLAPTPAHAALLSKEQIQRVLKAHRLRRVKATEVLTCLQASALPVAPGAAEAAQVHCAFLLPCLRVLAEQLRSCAQQGEALLKTLAEEPDETGGPSDVAVVQSLPGVGRKITAWLFAEAAQPLTERDYQVLRTQGGVAPVTKQSGKRRQVVMRRGCNPRLRHALYHMARVATQRDAYFGGVYEALRAKGQRHGQALRNIGDRLLRILIAMLHNRTCYDATRSRREPVVQMG

SEQ ID NO: 334371 - protein, 340 aa, unidentified
MDITTLGIDIAKSVFQFHGVDADGAVVVQKKLRRGAVLGFLGKVGPCLIGIEACATSHYWAREIAALGHEVRVIPPAYVKPYVKRQKNDAADAEAICEAVTRPSMRFVPVKTVGQQSVLVLHRARDLLICQRTMILNAIRGHLAEFGIIAAQGPRQVMGLIARLRDEGDASLPEIARSALLALGVHLETLAGEIHALEHQLMVWHRADATSQRLETIPGVGLITATALAASVPDPSVFKSGRQFAAFLGLVPRQNSSGGKDRLGRISKMGDRYLRKLLVVGATSVIRRAGSNPTKTGAWVRSLMERKPARVVTVAMANKTARIAWAVLTHGEVYRASPIA

SEQ ID NO: 334372 - protein, 373 aa, unidentified
MICAAVERCAGIDVGKTFLAVCVMTGPLDGEARTQKRHVGTIMAELEALRDWLKQEGVTHVVMESTGSYWKPVFNVLEESFHVYLANPQEVKNRKGHKTDDKDGWWLAHLLRHAMIHPSFIPPRPLRELRDLTRRRKRLLSNASAEKNRIQKVLEDANVKLGSVLSDVFGVSGQLMLEALLGGKAQPADIAQCAKRRAQRKIPEIRQALEGHQMSDHHRQMIRYSLKHLEFLEEQIGDLDLAIASQIKAAGLLQQWELLQTLPGIQERSAATILAETGGNMEQFPTAQDLSSWAGVCPGNNRSAGKNKSSHTTGGNPWLRDALTECAWAAAAKKNCFLKEKFWRITVKLYTVPPPVASTHSTWPRHRRQCQRG

SEQ ID NO: 334373 - protein, 323 aa, unidentified
MILYSLGIDVSKESFNVALLGGQHTFQDQFSNTAAGFGKLVRWLKKQKVTEVHACMEATGRYWMELALFLHEHSHQVSVVNPKLIKKHGEATMQRNKTDSQDALTIADYCAKQRHELWKPPSAAFSQLQALVRHVQALKKDRTREKNRRQSGISSPEVLAAIEAHIEFLDQQIDELKQRIGEHFDQHPKLKADKELLLSIPGIGETTAAVFLAEVPDVRLFTQADQLAAYAGLTPGQRQSGTSLKGPGRLVKWGNARLRAALFMPALSAHVSNPIIAALRERLLLRGKPKMTVVIAVMRKLVHLCYGVLKTGKPFDPNHVQLA

SEQ ID NO: 334374 - protein, 316 aa, unidentified
MSLNNRVALGIDVSKSSLDVFHTRANKHHTFPNSAVGIAQALSWLRTLDDIDIAIVEASGGYEMPVWQAFCRAGVPTARINPKRARDFARALGLLAKTDRIDAQVLGLFGATLDVESDQPKSEELREMEAWLIRRHQLVEMRVAETNRRRMMPKAVQKRVDLHIKQLQREIDRIDEYLVETIQKTSQWREKLELLDGLKGVGNNTRAWLVAGLPELGRLNRRQIAALVGVAPISHDSGNFRGKRRIYGGRSDVRTALYMATLSAVRHEPRLKAFYARLLAAGKPKKVALVATMRKLLTIINAIFRSGTPYLIPQSS

SEQ ID NO: 334375 - protein, 309 aa, unidentified
MKQSVVYIGIDVAKAHLDVAWAGTFRRLPNERSGHAALVRWIKQSATPVQLICEASGGYEQALLESLEKSEVKVTLVQAVRVRQYARAAGILAKTDRIDAKVLAAFGSAMQPQPTSPLSAEQKRLRQYEAQRRHLSRILVAEENRLAQLSCTELRTLSRSLISKIKTQIKTLDRGISELIAQDQTLCVKAQKLTAISGVGVRTAALLLAQMPELGQLNRRQAAALAGLAPFNHDSGSVRGKRAIFGGRPALRSGLYMAALSAARFNPILSSFYQRLRAKGKPHKLALTAVMRKLLLALNQTLKPLPCST

SEQ ID NO: 334376 - protein, 261 aa, unidentified
MYNCIGLDVSKKLIAVYIPINKVNLEIENNSKAFKALYSKLKKLYKKEIDSLVFIFEPTGSYSFALTKFCKDKNIKCFLINPKQFSNHAKALGQRNKTDEVDSIVLSKSLHLARDNEIKVPYINEEAESIKELMGYYKFTSKQKTKTSNHLEALSAKDGSSFVIKELKKSMKNLKNTQEDILNQVMNIIEKNEDLLVKYNNIKTLSGIGKVGAIVLLHLFIKYPKANQRQIVALSGLDPIVKESGTSVHKKPKISKAGSKL

SEQ ID NO: 334377 - protein, 386 aa, unidentified
MTHSTNILPRSVDYDQTLVLAIELSNKSWVLAAQVPGLSQTKAKRTIDPDKNGLLAAIDGYRTRAAAAGRSVKRVITSYEAGWCGFWLARWLMAHGIEVHVVQPSSVPVDRRMRRGKSDGIDAELLLRTSLAWLRGEPRVCSMVPIPDEADEDARRSVRERSELVSERVGLVNRIGAILATLGADDYNPLLQSRRRRLTELRTGLGDPIPPNALAKIMRLLTRLELVLAQIVELELERDAVARTDAPDQASKMIQQLISLRGIGVQSATVLVREAFVRRFANGKALGSYAGLTSTPYSSGGIDREQGIGKAGNRRLRTVMVELAWLWQRYQPGTAQVTWFRERVGSTGRRVRKVMLVALARKLLIALWRFVIDGVMPEGAVTKPSI

SEQ ID NO: 334378 - protein, 347 aa, unidentified
MRFYTKQHKHYCGIDLHTNKMYLCILDRHGETVFHRNIKTSPEHFLNAIKPYRDDLVVSAECMFTWYWLADLCEDEGIPFILGHALYMRAIHGGKSKNDKIDSMKIAALLKGGLMPQAYTYPRKMRATRDLMRRRNHFMRKRAELFAHTQNTASQYNHQEPLGRIAKPKNREGTVERFVLPCVQKSIEANLEMIATYDQVISGLERYIIKSAKNHDPVSYALLKTIHGVGRIIALGLLYEIEDIARFPRVQDFVSYCRLVKCAKESNGKKYGTGGKKIGNAHLRWAFSEAAQLFLKGNEEGQKYLQKITNRHGKGKALSILAHKLGRAVYYMLKNKKAFDMDKFLTA

SEQ ID NO: 334379 - protein, 389 aa, unidentified
MEVMVKRCAGIDVHKKTITVCTLVGSLNRSKPKKQTKEFDTTTRDLQACAQWLESLNITTVLMESTGQYWRPVWNILEPYGFKMILANAQHIKQVPGRKTDMRDAQWIAELGRCGLVSGSYVPERDIQDLRQLTRHRSSLKEDLTRRKNQVHDILQRSNIKLSSYLSDIFGATGQRLLSLFINGEVINEQLIEETISKRVHASPRQLFEAMNGSLTTINRQLLQLELATIRRLTDEIKECEQLIEEHLQPYEDLYLRLLEISGISQTTAQVVIAEVGPTVEAFETVERLASWAGLCPGSYESAGIQYGSKTTRGNRYLKAALCRAGLTAGRSNHQEFRAIYFKFSERKQKGKGVVALAHKLLRIVYMLIKTGETYTPWQQKKTPATAIA

SEQ ID NO: 334380 - protein, 346 aa, unidentified
MEYIALDVHKRYTWARVENAHGDRLTEQRVLHQRGAIQAFVQQWPAGSPVAVETVGNWYWVVDEIEAGGGQPQLVNARLAKLMCGSVNKSDQLDAKGLNRSQRTGTLPTVWIPSGVVRDARELPRTRMVFSRQRTQLKNRVLATVAKYGLTVEGGSDAFGKRGRTILTTLQAQLPPQTQEAVACLLAQLEQVEETLTRLARQMRAVFAPCPHTAWLKTLPGVGDLLAVVIWTEIGTMARFRRAEALASYSGLVRREHSSGGKVRFGAVRRDVNHYLKWAFVEAANSAVLNRTRCGYTHISQLYDRLAARRGHGKAKVAVARHLAEASFWMLTKGEPYRAPTSSTPR

SEQ ID NO: 334381 - protein, 337 aa, unidentified
MATSTAMRMVGIDVSAGWIDVERAAADEPVAVRRVANTAAGHRAVGRWLTQGGRDARVVLEATGVYSWDIALALQRTARVEVMVLNPRVSKDFAGACGQRASTDATAARRLREYAARMPFVPWVPPSAAALELRALMRRVAAVVEMRTQEHNRWHALQATAALPAAVRTEVRTHIQSLGRQIARLERAARTVVQSAPALQARYDRLRSIPGVGVRSALGLLAELAVLPPTLTARQWVAQAGLDPRPVRSGSSVHPPVRISKRGNVHLRRVLFMPALVAVRRSPAVQRLATQLTAQGKAPLQVLVAVMRKLLHAIYGMLKANTDFDGERFRRSALAPT

SEQ ID NO: 334382 - protein, 390 aa, unidentified
MDVLYQSCAGIDVHQANIVVCILHGPLTSTRPKREMATFDTTTKGLRACHDFLSQFHVEAVGMESTGVYWRPVWHALCDDFELILAQPAHMKAIPGQKTDKKDAHWIAKLTRIGLLPRSFVPDETIQELRELTRQRKHYVESRNRETNRIHKILQSGGIKLTTYIEDIMGLSGRNLLQLLVDGTPITPRIVHQSVYTSLKKKVPQLLEALDGYFSDHHRFMLKQSLEIYDFYQKQIELLEERMNVYLSQYEKHVEILDSIPGIDVITASVIISEVGVDMSQFPTAGHLASWAGLCPGNNESAGKKRSTKIRHGNSYLKKCLCQAAFAVKKQKGSPLADRFYQIQSRRGSQKATIALAHQLLKIAYILLKEQITYPEFLAQKKTTRDELVA

SEQ ID NO: 334383 - protein, 340 aa, unidentified
MNNQRKNYIGIDVSKLWFDSALLSVENHVKQSIIKERFENTQNGLKLFGKWLKKHGVTFDSETLVLIENTGVYHRHIESYCAIKKLRLHIGNAARIKWSLGITRGKHDKTDSERLCKYAYKESGDLIDTLPAYPLFSHLKDLMTARTKLLGQFNSIKVHLNELKQFNSKELQASLEMGYEGAKLGIKESIRAIEKQIQELIKEDQTVNENYNLLLTIPGIGHLTAVYLICYTNNFTMKISGKQLASYAGVVPFGFQSGSSIKGRFKVHKMANKDLKKLLHLCALSIIKYNPEFNNYYNRKKEEGKHSLSVINAIKNKILLRVVAVINKKEPYVEQMKIAA

SEQ ID NO: 334384 - protein, 388 aa, unidentified
MYYVGIDIAKYKHDCFIFTSEGEIVLESFTFENTREGFSKLKLILDALDHSQKIKTGLEATGIYGKNLKLFLSSIGYDFDELNPLQVKRFTNALSNRKTKTDKIDASQIARFVSTGASRTYVYSSYHTEALKQLTRARNSLIDERSKHQTVLTGILDVEFPEFKGFFNNKFTDTALYLLNKYKTVKRISKLSHNDCVLLHNKSRVISTSRFEELRESAKNTCGHHFDYNDSLISANLQIIKCLNNEIDKIEKEINSIMSTINSPVVSIPGISAISATSIIGEFGDFSRFDNAKQLCAFCGVEPSIYQSGTSYHEGKMVKHGSSNLRRTLFNVVPYIIMHNETFKTFYDKKSSEGKAYRVAQSHVVKKLLRVIFTLEMTGSTFTPSKLY

SEQ ID NO: 334385 - protein, 349 aa, unidentified
MKKSITPAAGAHDVTVVGIDLAKNVFAVHGIDVSGKPCLVRPNVRRDQLLDLLAQLPPCVIGMEACSGAHHLARTLVQFGHTPKLMAPKFVTPYRMQGSRGKNDANDAAAICEAVTRPNMRFVPVKTVDAQVTLTVHRVRSGFVEERTATINRLRGLMSEFGVVLPLKTSTVRRQARLASEVLPTWVQRVVEDLLGHVTILDQRIDEYDAQIKQIAVADEASKKLMQLDGIGPITATALAASVGNGHDFKNGRQLAAWLGLVPGMHGSGGKTRLGRITKAGDHYLRSLLVMGARSLLSLAASKGDALSRWAITLQARVGYRKAVVAIAAKNARLAWAVLAKGDKFKPIT

SEQ ID NO: 334386 - protein, 348 aa, unidentified
MSESYEGRQIVGIDLHRRRSVLVRMTETGERLETVRISNDPEYLREVMTRAGEAPEVVLEACYGWYWAADTLAELGATVHLAHPLGVKMFSYRRVKNDERDAADLADLLRMGRLPEAWIAPPATRELRGWVRHRAKLVGLRSNLKCQVHGILAGAGITVPMSDLFGASGQHLLATASLTTESRSRIDSLQRLITALDFEVELFAKLVAGRLRTHPGYQAIQLIPGVGPVLAAVFIAEIGDITRFRQPEQLASWAGLTPKHHESDTTVHRGRITKQGSRLVRWAAIEAVQRLPGHTRIGQVRDRVAARRGRNIGVVAAARELTELVFYGLRDHHVRALAAHTPRTPVSA

SEQ ID NO: 334387 - protein, 376 aa, unidentified
MGHHSEAFIGIDTSKLKNAIAIAEGGRDGEMRYLGEIDTTDAATRKLIRKLAAKYAKLTFCYEAGPTGYGLYRLITSLGHECSVVAPSLIPRKAGDHVKTNRRDAQSLARNLRAGELTAVWVPDERHEAMRDLSRARESAVDDLKSKRQQILSLLLRLGLHYPGKKTWGKSHRNWLASQTIGQREQRIVIEELLGAERQAQDRVDRLEQAIREAVPEWSLAEVVTALMSVRGIDLVAAVTILAELGDLSRFISPRELMAYLGLVPSERSTGDNVKRGGITKAGNRRARRILVEASWSYRYPPRIGRDKQAKVDAAPEPVRAIAWKAQTRLSSRFRMLSKKGKRPTIVATAIARELCGFIWAIHRAVTSPGLTTASH

SEQ ID NO: 334388 - protein, 471 aa, unidentified
MSCFRGAIQNRLRKEDFMKKQDSYNYYVGIDCAQNKHDFAMKNNQDKFLIKRGHFSNTLQGYEKFLNTVLSKCLNKDKILFGMEVTGIYGTNLYERLKSDGYHVVMISPDSVKNYRDYKRLNKTDKIDSGCIAELLLNGDAQIVHVAKNGYTDLKAYIRRRNALKVTCTQETNRFLAKVCLYFPDLLKVFPSGRATLKAIFSIYPTPYSIIEADFDELVSVLQKASKNKFGVDKANELIHAARNSIVVRKSISDGELYNIHSLIDSIDSLESEIRNLEKIIDSKAEEFPAYHVLLTLTGCGKITAATIVAEIGDISRFHKASQIVSLAGLYGDNSKSGSSVNKRGKISKKGSRYLRHAIYMVAEFARRNNPVFKAYFTRKKNGDRTKHTLAVNAVANKLCKVIYSLMKNQSTYIIQYRDLVKLSESTQNEFFQNAETDFSAKTRRKKYLYEDEYGELHEFVFKSIKTALIE

SEQ ID NO: 334389 - protein, 491 aa, unidentified
MRKRKTYATANGEGMPIDTLDLADGEIIQPLYPYGVGIDCHRSFIEVCVFVRTSDSIRKYENTYSTDWKTLGDARAWVQTIIRIKSSPAIDPEVLRYTIESTSTYHMPIIKAWGGNPCVVNPLLASPTRRKTDKLDARLMAYQSMTGLWPASFIADSEVQAFRLLMKQRQDAGRAAVAITNRINNFLLRFGHTIGATGSVRGYTARAIIEDMCRDDFEYTDGKYAGLIEGDYICPAGLPDDVKTLISGMWEEFDRQKAIEAEYHKRALDKAKGMMWQTQGGEIKGDALIKNLMTVPSVGEITALIWLAEVVTPLRFNVKEKLIAFCGCDPSLKISAGKVTSQTRRGGNSRLHYQLVKVAGSCINRHREPFGQWGYALQQRHAKGGYKKACGAVARRIATAMYFIHLNGETFSYDKYIFHKIDVPDISLEEMQFSTRTRNIFSSYNLATSQAITSLFIKGELHRMRGIGKKSIAEVDGWIQSNKLKRRGVSS

SEQ ID NO: 334390 - protein, 402 aa, unidentified
MNCVGIDVSKGKSMITVMRPFGEVVVSPFEVRHTANELSELAGLLKSLDGETRVVMESTGNYHAPVAWLLHDAGLYVSVVNAMLVHDYGNNSLRRAKTDKKDAIKLANYGLDHWLTLPRYVPEEDTRLMLKACYRQYQQYSKVQTMLKNNLISLLDTTFPDANRLFTSPPRDDGREKWIDFVATFWHRECVCDLSEKAFAAKYQKWCKKCGYNFSEGKALDIYAAARGHFGVMPKTDTAKLLVEQAISQLRATSSALAALKQEMQSLAASLPEYPVVMEMFGVGPTLGPQLMAEIGDVRRFHSKKALVAFAGIDAPPYQSGQIDVRSRSISKRGSASLRRTLFLVMGVLLQCAPMDEPVYQFMNKKRSEGKPYRVYMMASANKFLRIYYASVKAYLDSLQHN

SEQ ID NO: 334391 - protein, 409 aa, unidentified
MRDKVGGLDVHRDSVVACTRVAPPIGEVEVVKARFPTTQTGLAELTAFLMDAGVSTVAMEATGIYWRTVYYALEGLFEELWLCNAAHVKNVPGRKSDLSDAEWLADVAAHGMVRPSFVPPPEIRELRELTRYRKTQVDDRAKEIQRLEKCLQDAGVKLTSVASSVWSASSRAMIEAMIAGERDSVVLADMAKGRMRGKIDRLEVALEGNFGAHHALLCRQIVDHLDFLDRSIATLSAEICARLVPFEPQVALLTSIPGISATTAEVIVAETGADMSRFPTAGHLCAWAGVAPASHESAGKKRPAGTRKGSPWLRRTLIEAARAAARTKGSYYSALYARIARRRGPNKAAVAVAHSMLETAWHLLSTGALYQDPGADYFERRHDPAVEAKRLQRRIEALGFAVTITEKAA

SEQ ID NO: 334392 - protein, 347 aa, unidentified
MNNSLAAFDPCGIEVSSGILVVALRRQDRDEPLREFPNTPAGHQAVLRFLERSARPVRVCMESTGLYGLDLALALHQADVAVMVANPRAVRHFAQALLQRSKNDQLDATVLCEFAARMPFQAWRAPSAAALQLVAVARRLEALTDLMAAEKNRRHAASLSAALPALVRRDIERSIQTQQRAIDRLTRAAQEFILADAELARRYELLLSIPGFGATSAVHTLAELTLLPAGMGVRQWVASAGLDPREYTSGTSVHKKVRISKAGNKHLRRGLYMPALVAVRHDPHVRAYYEHLLARGKIKMQALVATMRKLLHAIYGMFKHDQLFDGAKVYASSAAVLAPALSNSEVA

SEQ ID NO: 334393 - protein, 406 aa, unidentified
MYYLGIDVSKTSSRCIVLRDDGSKLKSFSVHNDHESYHELTDRLTALGCEQSNLLIGMEATGPFWENLYTFLTNKKFQVILLNPYHTSKFREALAKKAKTDDIDALVVAQLLRTGEYVQSQVADEDIQTLRELVSTRYEFVKQRKNYQRKVYSLLAVVFPEFANTAIKNPFSLASSAILKRFPTALHLAQAKPKQIEKLVRSIQGNNFNINEIEQLITTATKSIYQGRVREARATTMRMLLEHIELFTNSIEELEMNIHQILSPPSYTTGSDSFTGSNLLTIPGVGEKTVAAVLSYLGNSGQSFETSTKAVGYIGFFPRIFESGQTKRENRICKRGPKLLRAALYMAAVASLKHNKELQTLYHRKLSQGKTEKQALICVAKKLLQIMLAMLKSGEPYNPALVFVPN

SEQ ID NO: 334394 - protein, 349 aa, unidentified
MLFTGLDLHRSFSYVTTMTDKGRIVGQRKLPSNGEVVEFLKAFDESMEVAIEATPSWYWLYDQLEEEGFDVKLSHPLKTKAIAYAKVKTDKVDSATLAHLLRSDLLPLSYVPEKPVRLTRELLRYRASLVKVQTGIKNKIHAILAKNNVSHSYSDLFGKAGMAFLQLVPLPENYRIALEGYVSVLEAVRREIRVASRRVQQLAQEDPDAMLLMTVPGVGYYSALLIRSEIGDVKRFPSAKQLCSYAGLVPSTYASGNTCYHGHITKQGSRWLRWILIEAAIHAVKRPGPLRRFYHKVERKKGGKVAKVATARKLLEWMYHILKDGKTFHEIENAVEVLSRGKPVNFAGL

SEQ ID NO: 334395 - protein, 403 aa, unidentified
MNNVAGIDVSKGKSMVSILRPFGEVVAKPFSVGHTGSELKELADYLKSLDGETRVVMESTGNYHAPVAWLLHDAGLYVSVVNAMLVHDYGNNSLRRAKTDKKDAVKLANYGLDHWLTLPRYIPEEDTRLMLKICYRQYQQYSKVQTMLKNNLISLLDTTFPDANRLFTSPPRADGSEKWVDFVATFWHCECVCGLSKKAFTAKYQKWCRKHGYNFSEDKALDIYASACRHFGVIPKTDTAKLLVEQAISQLQTTSSALAALKQEMQSLAASLPEYPVVMGMFGVGPTLGPQLLAEIGDVRRFHSKKALVAFAGIDAPPYQSGQIDVRSRSISKRGSASLRRTLFLVMSVILQCAPIDEPVYQFMDKKRSEGKPYRVYMMASANKFLRIYYASVKAYLESLEHD

SEQ ID NO: 334396 - protein, 341 aa, unidentified
MNNYAGIDVSLECSSVCVVDANGKILREARVASEPEALISWFRSLGFGLERIGLEAGPLSQWLFAAMREAGLAVELLETRHVRKAFEAMPVKSDRNDARGIAQLMRLGWFRPVHCKSISAQETRTLLTARKLVQSKLHDVENSLRGILRGFGLKVGKTTERQFAGRIEELVVGHPHLQVITRALLSVRAVLRKEFAAFEKQTRKMAQSDPRTRLLMSTPAVGPIVALTYASAIDDPSRFKSSKQAGAHFGLTPKKHQSGETDYTGRISKIGDASVRTALYEAANVMLTKPVKGCSQLKSWAMRIARRAGMSKAKVALARKLAVIMHRMLADGKPFNAVAAA

SEQ ID NO: 334397 - protein, 388 aa, unidentified
MEVQTVDTLPPVAADHDPVRCLLAIELSKKSWIVAITTALSDKISRYTLDGCDWKGLLELMERVRTRVAREVGRPVEMISCYEAGYDGFWLHRLLERQGVRSHVIDPASVQVDRRARRAKTDHIDAKRLLRSLMAYLRGEPKVWSVLRVPSVAEEDDRRLHRERDRLIAERGQHVNRIKGLCAIHGIYDYEPMRRDRMLRLEQLHTGDGRELPPRLKAEIARELQRLELILGMLKEIETERDAVALTENVSAHTNAKKIQNLVKLKAIGAEIATVLTGEVFYRPFNNRHQVASYVGLTPSPFQSGPKCRDQGISKAGNPKARSTMIELAWLWLRHQPDSPLSIWFQERVGTLKGRIRRITIVAVARKLLIALWRYLETGMVPTGAVLN

SEQ ID NO: 334398 - protein, 346 aa, unidentified
MKHSVGLDVSVKETAICIVDEAGKVVREGKIATEPQAIIAFLSSAGVEYARIGLEAGPLSQWLVNGLSEAGLPVICVETRHMKAVLKAQQVNKSDRNDARGIAQMMRVGLYKPVHVKTLASQQKRMLLTSRKLLRDKLQDMENELRGTLRNFGLKVGVVSPGHFEARIKELVAGQPPLEMIVVPLLTVRRVVREQLAKLDKMVLDQVRDDKLCRRLMTVPGVGPIVALTFRATVDQAQRFARSKTVGAHFGLAPRRFQSGERDYDGRVSKCGDAMMRTALYEAAQVLLTRTQTWSWLKAWGMQVARRRGAKKAIVALARRLAIVMHRMWVDGTEFLWRKEADTAAT

SEQ ID NO: 334399 - protein, 424 aa, unidentified
MNNTQNKKIAQVSDGTLVIGVDVGSNTHYARAIMARGYEVSKKPFDFENTRDGFDRFVSWANHLAVVYQLKKIIVAIEPTGHYWFNLADYLKAYDVTLVMVAPQHVKHSKEMDDNTQMKNDQKDPLVIARLVAEGRYMIPYIPEDVYAELRSAFNRRCDLVEALTRNTNRMIRWFDMYFPEYRTVYGKADAISGLLILKRAPLPSDILKLGVDGISRIWREAKLRGAGINRARKLVAAAESSIGLKGGEAIRQELWQYMEAHELFKKQLGDIMQMIDGLIAKIPGADRLLKVPGAGIVTVAGFLSEVGDISRFTDPKQIQKLAGLAVVENSSGKRKGKPGISRRGRSRLRLVLFQLAMTTVKSNNEMKAYHQYYTTRKENPLKKMQSLMAIAGKMTRIFYGILKNGTEYNPAIVMKDFKKEVAV

SEQ ID NO: 334400 - protein, 370 aa, unidentified
MSYCPVAGIDVSKRFSDMCILSPDNKIFAQEKIYHDETSINRANALLQKAERLFFSKPVIVMESTSHYHLILFQFFSEHGYDVIVVNPLQSNSMKDFSIRKRKTDRVDAFKLAMMYRTKTLRPSQIPQTATRALRQLCRHRAELLNDVSSYKNRLTALLDQTFPGYDKVFSDVGGVTSCAVLVRFPTPTILLVEEESELVEVIAAASKSGYSFAKKKAGLLISAAQKAQTLGIHSCADATLIVCTIQMLRTLSESVLQIEAAIDHLLAQIKEMRSNVSLLQSIPGIGSHSAALLLGEIGDISLFKKPKQLAAYFGLDPTERQSGSFRGTKNKLSKRGSPYARAALHMGVVNAICKHGKDSAANPVLLSYY

SEQ ID NO: 334401 - protein, 427 aa, unidentified
MKYQVAAIDVHKKMLAVVVADVAGEGEYQFERRKFGTTPEQLHVLAQRMIQQEVEEIVMESTAQYWKPVWGALERLWKPARQQREGATKMSGKLHLCQAKSNRGQRGRKSDFLDAERLVKRLVAQKLVLSLVPDAEQRLWRTVTRRKYQLTRDKVRLHNQLESLLEEAHIKLSSFVSDLLGLSARRMLKALVEGATDPAAIAALADGRLRATPAQLRDALGASTQLHGVYRRLLKMMLEDLKQLEEQMEQLDGEMATLLEDHQEVVQRLAEVPGLGVSSAVQIIAEVGPQAEVFNSAKELSSWVGVCPGSEESAGESQSTRSPKGNRNMRRLLNQAAQAAVKMKGSIFEVTFRKLVPRLGYKAAIWAIAHRLCRLLWILLRKGVRYQEHGPAVSAKSQRARTTKMIKELRKLGYRIESGPLPAGAVA

SEQ ID NO: 334402 - protein, 323 aa, unidentified
MSQPNLQCMGIDVAKLSLDIATTDTIEPFTVGNDEDGFAVITDKLKHTKINLILMEATGGLEAAIACKLQSEGYDVVVINPRQARDFARSMGYLAKTDKLDAAMLAQLALVIDRHPDRSRYIRHLPDEARAVLATMVVRRRQLNHMLVAERNRLYPSHPQSRKSIDNIIDALQNELDRINEQMKQHMTAFFQEQARLIGSVKGVGDITVASLIAELPEQGKLNRREISALTGVAPLNRDSGKMRGKRATFGGRAGVRATLNMAALVATQFNPAIKLFYQRLLAAGKPKKLALVACMRKLITILNTMLRKGEEWNASFQSQVIS

SEQ ID NO: 334403 - protein, 430 aa, unidentified
MTDEPLYRDRVCGTGIGKAQMVATIRVPSDRDLARRMAETRSFGTTRREVLALADWLRCWQVPAVVMEATGGYWKGPFCRLEAEGFECVLADAKQVKNLPGRRKRDPADSRWLAACFERGAITACFVATPEFRIIRLHTRYRRDLTEERTREKQRAEKLLESAAIKISSVLTDLHGVTGRDIMDHLIGGERNPKVLAQLARAAARRKISQLEEALDGAEFFTAEHAALLAKVLARIDRLSADIEDLTEVIERLLAPYEEQLAQAESMPGWGRRAAQDAVAETGVDMTRFRTGAHLSSWAGRAPLDHQSGKRAGRAKAKKGNRYLGAITGETAVAAGRTQTREGARHRRLARRRGKAKACVATGNTQLKVYHKLLSNPGMRHQDLGPDYYERQRDIRRQIAHHVGKLGSLGFEVTLCRIPEPDGPGQTQAA

SEQ ID NO: 334404 - protein, 349 aa, unidentified
MNMVGGLDLHRRQITYDVLDVDSGEIWRGRLWQPDRSRFRRWLEHEVGARAQGGSVALAVEGCTGWRYVVEEISAVGFTPFLAEPADTQAARGRKHRAKTDRTDAQLLRELLQAGELPESWIPPDDVLEWRERVRLYKSLVDQRTLWCQRIHAVLYHHGVTIPEGAIRTEKTRSMLADGNLRISPAGRERIDVGYKMIDAADREALPLKHALQHFGTRQPACRALVDAQYGIGGLLAVVLWTELGDCRRFSRSEQVVRHSGLDVTVDSSDRRRAGGHLSRQGPETLRWALYEAAKNSSHGRSPDHGYYAKVKERHDGKIAAISVARQFARRSYHVLRAVDPNAVYAIPA

SEQ ID NO: 334405 - protein, 429 aa, unidentified
MSYRIAGIDVHKKMLAVVVSDVEIESEYQFERRMFSSNPEQLRSLAAWLVEQKAEEIVMESTAQYWKPVWETLERYWKPLCEKREGARRRSGTLHLAQALSNRGRRGRKRDFVDAERLVKRLVARELTLSFVPDTEQRLWRTVTRKKYQLRRDVVRLNNQLESLLEEAHIKLSSLVSDLLGVSARRMLKALADGETNPAALAALAHERLRATPEQLCDALGACTELNPVYRRLLKMTLEHLQILEQQIGQLDQELATLLHPHQDAVERLAEVPGFAVDSAQQIIAEVGPAAATFPSEKCLSSWVGACPGEEESAGVNYSHRSPKGNRHMRRLLNQTANAAVKAKGSIFEIIYRRCVPRLGHNQAIGVIAHRQCRLIWLILHQGTRYEERGPAVTKRSRYQRTWRMIRQLRNLGYRIELPNPQASQAQAQ

SEQ ID NO: 334406 - protein, 387 aa, unidentified
MPQPNDLSRSLVALDQNSTIIAVIEMSQSSWLVAGMLPGIERQPRKKLEPSPERLLALLQRWRDEAVRAGSTITRIALAFEAGRDGFWLARWLEARGVEAHVIHASSIAVSREHRRAKTDRLDTELLKRGFLGWLRGERGHCSMARVPTIAEEDAKRPNRERDCLVGERTRIVNRIKSTLARLGIRNFKPTLRKAAERLATVHTPEGTPLPPNTLAELQRDMARLGVVVSQIRQIEEARQKRLEQQHETGPHAMVRLLARIVGVGVETADMLVHEVLSRPMRDRRAVARYAGLTGSPDESGAQRREQGLARAGNARVRRGMIQLAWRFLMFQKESALALWYRARTTDSRRGTRKTMIVALARKLIIALWRFVTTGEPLEGVILRPAS

SEQ ID NO: 334407 - protein, 420 aa, unidentified
MNLPVVNPRCCALDLHKKSITACLLITEADGRVHKQIRTFGTFTRDLRALQRWLQEHGVTHVAMESTGVLWKSLFNLFEGLFDLQLVNAQHVKQVPGRKSDVRDCEWLAVLLRHGLLGKSNVPERWQRELRELTRYRTSLVEEHSAELNRIEKTLEGAGIKLAAVVSTLATQSARDMLEQLAAGESDPQKLAELARGRLRQKLADLELALEGQMGAHQRFLLRQQLDHLVSLEGLIAALSAEIAQRLAPHEAVLQLLETIPGVGRRIAEQLVAEIGLDMSRYPTDGHLVSWAAMCPGQHESGGKKKRAPVRKGNRWLRSTLIEAARAAARTKASYSEAQYRRLAARRGSRRAAVAVGHSILVASYHVIREGVPYQELGGQYYDERDREGVTRRSVKRLEALGYEVILRPREVVAAEPVAA

SEQ ID NO: 334408 - protein, 418 aa, unidentified
MIDDVQWFVGIDWATQSHRACLLDVEGRHVSERDFAHDGAGLTELRDWLLERTKAAPGQIAVAIETPHGPVVEMLLDHAFRVFAINPKQLDRFRDRFTVAGAKDDSRDARVLGSAVRTDPHAFRRLVVDDPVVIELREWSRMADELQQERTRLANRVRQQLWRYYPQATELTDDVADDWFLALWQQVPTPATAAKVSEKTITRILKDHRIRRLDATTVLKTLRKTPLFVAPGTTEAACAHIRSLAARLHLVNQQIKEAHRALDELCAKLEAATENPSGQIREQHDVTILRSWPGIGRIVLATLLTEAAEPLRARDYHALRALAGTAPVTRRSGKQCFVIRRLACNKRLQNAVHHWSRTAIQHDAAARRRYDALRRRGHGHARALRTVGDRLLYALCTTLKRHTTYDPNCQTAQITASL

SEQ ID NO: 334409 - protein, 355 aa, unidentified
MGKITRVGADLAKRVIQVHAVDAAGQRVTGRALARDKFLAWCAQLPPGCLVAMEASSSAHHWARKLIAMGLDARIIAAHLVAPYRMQGKGGKNDANDAAAICEAASRPQMHFVPVKSVEQQSMLCVHRLREGFKTERTACINRIRGLLAEFGLVFAQKPAVLRQALPDVIEDALNELGTLARLALQRAWAQWQEIDAHLTWCDERIAAHLKDNEQVRQAERLIGVGPVTASAVVATVGDFKQFKNGAQFGAWLGLTPRQNSSGGKSSLGSITKRGDTYLRTLLIQGAKSAVMTAHRRDDPISKWAHQLREKSGWQKAAVALANKNARILWAVFVRGGPFDARHISVKPGCASTAA

SEQ ID NO: 334410 - protein, 360 aa, unidentified
MARAGKKPRARRVAGGVDTHQDTHHAAVELMNGSRIAGAEFPATARGYEQLLAWLRSFGRLHAVGVEGTGSYGAGLARYLAGQDVTVIEVSRPDRRQRRAKGKSDPLDAYAAADAVLAGRATALPKGGDGIAGPVRVVHLARAGAVKARTAAVNELKALLVTAPAVLREQLAGLGTAKLAAACARLRPGPDAGDPVTGTKLALRSLARRWQALDAEVKDHDARLTALITRARPDLLQIRGAGPETAAQLLITCGDNPHRLRSEAAFAALCGVCPVPASPGKTRRHRLSRGGDRQANRALYFTALSRLASCPRTRAYAARRAGEGLSGREILRCLKRYIARELFKTLTRPDTRKKAMQPAA

SEQ ID NO: 334411 - protein, 422 aa, unidentified
MLEPTQDHEQIIERVAALDIGKAELACCVRVPDPNASGKRLQEVVTYSTMTRSLLGMADRLRQLGVTRVVMEATGDYWKPVFYILEAAGFETWLVSARDVKHLPGRPKTDKLDSVWLCKVTERQMLRPSFVPPPAIRVLRDLTRYRVDLVGVRTAEKQRVEKLLEDAQIKLSVVASDIFGISGRAMMAALIAGERDPKVLAQMARARMRAKISQLEEAFHGRFSAHHAFLLAKMLARIDAITDDITDVEAQIEAQIAPFADAADRVDGIPGVGAIGARVVLAEIGLDMTRFPTAAHLASWARFAPTVSESAGKKKGRNATGHGNPYLARVLGEAAVAAGKTDTFLGERYRRIARRRGKKRAIVAVGRSILITIWHLLSDPQAEFVDLGPDHYDTRGGPQRSIRNHVRHLEALGYKVTLQPAA

SEQ ID NO: 334412 - protein, 412 aa, unidentified
MLKVINPVVCGLDVHKDSVKACLLKAIDSQRYQDTIKTFTTMTSDLERLKAWLLDEGCNKAVMESSGKHWIPVHNILEDSVSIVFANARHVKNLPGRKTDTNDARWLAKLLALGLVEGSFIPSKYIRELRDLTRRRQKLIYMRSSERSRLLDVLRTSNIMLSSVASDVFGVSGMSMLNALISDNKEQSHNAEDIANLAKRKLRQKIPQLVEALNGVLDKHKKDLIKEILEHLEFIDSQIFKLEQMIDEKCEPYNDFVNIIDSHPGIDKTSAQAILAEIGPDMKAFHSEDHLASWCGLTPGSNESAGKKKSTRTKEGNNYIKTILCQCAHAAANIKNTYIAARHWSIKAKRGPQKAAVATARKMITTIYHMVCNNTYYCEAGPDVYKEARSKNKTRSMIKSLHALGLEVIEKV

SEQ ID NO: 334413 - protein, 414 aa, unidentified
MIDERRWYAGVDWASESHHVFLTDENGRRIGEKIFRHSGEGLAEMAVWLSSTSGGVPAQIHIAIEVPHGPVVETLIERGFKVHAINPKQMDRFRDRFMLAGAKDDSRDAEVMASALRTDLRCFRPLAVADPVVIELREWSRIADDLGAERNRLTNRMREQLWRYFPAMLDLESDLGAEWLLDLWEIAPTPHKAIRVREATVAKVLKRNRIRRFDAAHVLDVLRKPPVQVAAGTTEAAAAHIKTLTARIRLVNHQLGEAHRQLDALTARLIPSEETGPGQRKQHDVEILASLPGVGRIVLATLLAEAFDALQRRDYAALRSLTGVAPVTKRSGKSCIVVRRQACHDRLANAMYHWARVAVQRDPRSRSKYAALRSRGHSHGRALRSIADRLLNVACAMLKTGTTFNPSLATEKSP

SEQ ID NO: 334414 - protein, 320 aa, unidentified
MSVSSVVAGIDVAKAHVDVDVVGAEFEPRRFDNEAEGHSAIAAALKALDVDLVVMEATGGYETSLACALQGAGLAVAVVNPKQPRKFAEAMGYLAKTDRIDARVLAEFGQTLARRADFSRFLRPVDDVDQQWLAALVTRRRQLVAMMTSERQRLQITPKKLHPSIEAIIKAIKAQLDDVEGQMVGHVKEHFGQLDAILQSVTGIGPVASATLIAELPELGKLNRRQIASLVGVAPFAKDSGTTKGRRRVQGGRFDIRRVLYMATLTAAFRNPVFKAYYQRLTAAGKLPKVALVACMRKLLTTLNAMVKAGSTWNPEHQGA

SEQ ID NO: 334415 - protein, 356 aa, unidentified
MQITTVGLDIAKLVFQVHGVDAEGNVVMRRRLSRGQVRHFFAALSPCLVGIEACGTAHYWARELQALGHDVRLMPAHYVKPYVKRQKNDAADAEAICEAVTRPSMRFVPVKTPQAQALALIHRIRTQFVGQRTAMLNALRAGLAEFGIIAAQGLRGASELLEIAAAGDERIPISLGGIYTMMVDAIRTVEARLGELDRQIAAAAKGNDACRRLSTIPGIGPVTSSTIVALAGDVSRFSSGRDFAAWIGLTPRQNSTGGKSRLGRITKAGDQTLRTLFVLGAFAIIKQARITPAKASPWLLSLMGRRPAMVVAVALANKMARIAWAILTRGGSYRTAATAEKAIPAQSHLAGARGGA

SEQ ID NO: 334416 - protein, 410 aa, unidentified
MGLYCGIDWATDHHDIAVVDDDGRVVARGRVGNDAAGFAQALTLLAEAGDAAKQPIPVGIETDRGLWVAALRETGRVIYPINPLAASRYRARYALSGAKSDATDAVLLANIVRIDADAHRPLPADTELAQTIRVLARAQQDAVWARQQIANQIRDLLGEFYPAALVAFAELPSGGLARADARTILAAAPTPAQAAKLTPARLRRLLVKAGRRRELDRDVARLRQAFTDTYLHQPPMVENAMGIQLGALLRQLDAACVAVDELAQAAIAHFEQHPDAAIITSFPGLGNLAGARVLAEIGDDRTRFAEARGLKAFAGSAPITRASGKKTVVTHRHIKNRRLAAVGAIWALASLRSSPGARRHYDARRAAGDWNRQAQRHLFNKFLGQLHHCLHTGQLYNEHRAFPPPLPLAA

SEQ ID NO: 334417 - protein, 347 aa, unidentified
MKFYTQTHTHYCGIDLHARNLYVCILGQEGAVLVHKNIKASPDALMKLVAPYREDLVIGVECMFSWYWVADLCRDQGIAFVLGHALYMRAIHGGKAKNDKIDSHKIAVLMRGGMFPEAYVYPREMRGTRDLMRRRMHLMRKRSELLAHIHNTNSQYNLPEIQKNLRYAFNREDIPERFDDPSVRKSIELDLNLIDFYDKQLAKVEWHIQKHATACDQHSLMLLRTVPGIGKILSLVMLYEIHTIERFPTVQDFASYCRLIKCKKESAGKSYGTSGKKIGNAYLKWAFSEAAVLFLRGNPDAQAWLEQMANKHNKARALTILAHKLGRAVYFMLQRKTVFDQERFLNG

SEQ ID NO: 334418 - protein, 348 aa, unidentified
MESVAGLDVGVKHSSLCVVRRDGRSMKPVSRHRTVTTPTAIGEWLAMQGVGRVGLEAGAQSAWLARELGQQGLEVTVMETRRQRAFGSYSKIKTDERDARLIGEALATGLYTKVHVRSTWSQEVRALLGARLQVKRQAQQSRQFIRGQLRAVGIELGRVSGKKWLAAAEAAVAEHDGPLGLALKVLLASCRALAEQVALLDKEIRRLARQDAACRRMMTAPGAGLLTSLALRASLDNAERFQRSAEVGPYLGLTPARWQSGALDRRGGITKQGDSLVRAYLYEAAVALLERQKRDCPLRRWGLQQQTRLGKRRTRVAVARKLAVLMHKLWRSGQSFDWNRGMEAPQTH

SEQ ID NO: 334419 - protein, 436 aa, unidentified
MGVFGSIVKPLVPPMPHVGTVRSHGRVDSDLLSGRVELFHQLSLETTMDIVADRTEEPTAIRTDLGAIFVSMELSRSNWLITSLAPGNGAKMSKHVVHAGDVAGLLERFAQLREKAQARAGRRFPIIVIQEAGLDGFWVHRVLQAEAIESYIVDPASIATSRRRRRAKTDKLDGETLVRTLLAYKRGEPRVCAMVQAPSREEEDRRHITRERKTLTQERVQHVNRIKGLLFAQGISGYEPLRRDRRQWLEELRTGDGRALPTYLKAQIGRELDRLELLLEQIKAVEAERDTLLSNEVRGAMMPAAAMLLDIKGVAPECAAVLWSEGLFRHFDNRRQVAAYAGLAPTPWQSGSVDHEQGVSKSGNPRLRTTMIQLAWLWLRHQPGSELSRWFHERVERNGGRLRKTTIVALARKLLVALWKYVTAGVVIEGAAMKAA

SEQ ID NO: 334420 - protein, 333 aa, unidentified
MNKTIVRCGVDIAKHVFAIHGVNVNEQVVLKRNISRNKVLELFVQLPPCIVGIESCGGSHYWSRELTKLGHDVKLISVKNVIPYRRKLKNDANDAEAICEAISRPRMGFVASKSESQQAVLMAHRVRTKSVANRTSLINQLHGHLLEFGIVVVGGRAKLKLEAYEIIEQATLPPLAIDMLRELLEALKIEEERSADLDKKIANWVRHDHVAKELCKLDGVGTLTASAVVATAGNAKVFKNGRQFAAWLGLVPRQYSSGGKNKLGRITKQGDKYLRCLLIHGARTVMLQSSRGKGDHQEWIEKMRERKPDNVVAVAYAAKQARMLWAVMTKAAA

SEQ ID NO: 334421 - protein, 453 aa, unidentified
MAKQKKEAKRKGSRNRPIPVINPTAAGIDVGAREVYVAVPQARDPEPVRTFATFTPDLIQLAGWLVACGVTTVAMEATSVYWMPLFTILEERGIEVCLVNARHLRRVPGRKTDVLDCEWLQYLHSVGLLRGSFHPSEAVAAVRTVLRHKASLVQMGSSHVQHMHKALTQMNLQIHHVISDITGVTGLAILDAILAGERRPEVLAGLRHRTIKADEDTLAKALTGTWRREHLFTLRQSLGAYRHYQAQIQQCDEELHQLLGSFGSRVDPDEDPLPPAPGRRREPLGLDLRTEFYRIFGTDLTAIPGIEIHTIQTLFAECGRDLSAFPTAGDFASWLGLCPDNRITGGKVISTKTRKVNNPAANALRLAAQSLHRSPSVLGDYYRRMRYRQGPAKATTSTAHKLARVLYTLVTTRRFYDETVLAQHEHQTRARKTRRLKTQAAALGFDLVPVEAA

SEQ ID NO: 334422 - protein, 286 aa, unidentified
MEKVYIGVDISKDSLDVAIHGVKNLMRVSNDQAGIQKVIRLAKKRDAMLVCFEATGGYEMPLYIALSEADIPVAPVNPRQIRDFARSMGRLAKTDTIDARVIAHFAATAPELKSRPISDTQILKEMVNRRIQLVEMITMESNRLRSAGKDLRAGIEAHIAWLKQQLEAIDGNLRSHIEQNPVYQEKDALLQSTPGIGPAVSAALVAQLPELGNLNRRQIAALVGVAPLNRDSGISRGKRIVWGGRGRVRAALYMATLAATRFNPIIRGFYERLLMAGKAKKVALTA

SEQ ID NO: 334423 - protein, 383 aa, unidentified
MNKTYYIGLDVHKETTAIAHTHSLSRAKPTYYRECGGSNRAVERNLKRLARELGVKFTDLKVCYEAGPTGFVLARRLIQLGVDCVICSPSKTERKPNDKIKTDKKDAAKVAREFRNGDITVVRIPPSLDEAVRDVCRARTDAVDDLKRAKQRLKSFLLRNGYNYKGKADWGPSHMGYLRDLTMPNEALKIVVEEYVLAIDSAQLRADRLKLHLKGLLDDWEWKPVVLALMACKGFQEVAAMTVIAELGDLRRFKHPRQLMAFVGLVPSEHSTGSSRRQGSITKCGNTHARWMLVEAAQHARRTPKVSGELTLRQQGQPHQVKELSWRMQNRLHKKYVRLRIRGKQESKCIVAVAREMLGFIWELQNKCGLDMPEPTTNTFKND

SEQ ID NO: 334424 - protein, 312 aa, unidentified
MTEHCYCGIDVAKERLDVQVLPHRQRFSVDNNATGWAELIARLHALPIPAVGIEPSGGYERGIIRTLLAAGLSVRRINPSKLRQFARARGILAKNDRLDAQLIAEYVSIMPTRIVQRAATAERLAEVVTMRRQLCDEHVTIENQAAHVEDAILRRLNKRRLARLKADIHLLDKRMAEIVAADAILAQRYELLTSMRGVGPTLAFTLIALLPELGQMSRKQIAALVGLAPYDFDSGKLKGHRCIYGGRMPVRNVLYMAALSAARYNPILKIFHNRLAATNKKPKVIIVAVMRKMITNLNAMVRDNAAWQPRAA

SEQ ID NO: 334425 - protein, 350 aa, unidentified
MIIIGADYHPGFQQIAFVDTDTGELQERRLEHREEAETFYRGLAQPGRTVRVGMEASGHARWFERLLAELQFELWIGDAAEIRTKRVRKQKTDRQDAQLILQLLLEERFPRVWVPSGENRDLRQLLWHRHRMVQARTRIMNQLQAVALNEGLRCKKRLWRDSGRKQLESFLLAPWASRRRHDLLELLDRLSPTIAELTQAIEQEVEKCPEAQRLRTHPGVGALTALAFVLIIGRTDRFRCGKQIACYLGLVPVEESSGERRRLGHITKQGNSLLRFLLVEAAQVTVRSDQEWRSKFFHLALRRGRKIAKVAMARRLAVRLYWMWRKGWDYEQLKKFGSHAGQPGHRHGVH

SEQ ID NO: 334426 - protein, 322 aa, unidentified
MAKHTTICAGIDTGKRKLDVAIEGRRELLQVDNTAEGHKVLLAWLRQRRVKRVGIEASGGYEQPVVAELRRKRFVVVVFQPAQVRAYAKFHLQRAKNDKIDAALIAACTAAVRKIHAAPDPRLLPFAEQLTMIDQINEDTARLKNRIESCRNARINKLWQEDIARLEMREKAELKTLVASIRKHPDLAKRLELINSVDGIGLPTAVAILVRLPEIGRITREQAVALAGLAPYDDDSGGQAGVRHIEGGRKRLRRALYTASLAASFRWNRQLIQLYQRLTAAGKEHKRALVACARKMLIFANTVVARGTPWCDEPPVGSLSVS

SEQ ID NO: 334427 - protein, 322 aa, unidentified
MTNPAPVFVGIDVAKDSLDVVATSDSEIRRFPNNPEGWSELARRLLELDPERVLLEATGGFERQVAMALATARLPVSVVNARQVRQFARATGRLAKTDAIDARVLAQFAEAVPSSQRLPPDEATHQLQALVLRRVQLIEMLKAEKNRLRLAASCVRHSLEESIRTLQTWIAEVEQAILEHIGSNPLWQEKGQRLRSAPGVGPVLTATLLAGLPELGRLNRWQVAALVGVAPLNQDSGQFRGKRRVWGGRSQVRTALYMSTLAATRHNPVIRAFYQRLLQAGKPPKVALTACMRKHLTTLNALLRDASTWQYRPASLASQDSC

SEQ ID NO: 334428 - protein, 339 aa, unidentified
MKTYAGIDLHSSNNYIVVIDENDKRLFEKRLPNTLEAIATALEQFKKTLTGVVVESTYNWYWLVDGLKDIGYNMHLANPAAIQQYSGLKHADDKWDSFWLAHIFRLGILPEGYIYPKEFRAVRDLLRRRLLYVKQRTTHILSLQSMITRNLGLRMSGNAIKKLKAEDAEELFTDSYLVFTAQQNIKTIEFLKNIIKDIEKKVLKVAELAPEFIKLKTFPGIGKILGLTIMLEVGDIKRFSKVGDYSSYCRCVKSERISNGKKKGENNKKNGNKYLSWAYVEAANFAIRFSPKAQRFYQRKKAKRNGIVAIKALSNKIARASYYVMRDQVDYDAEYLFRK

SEQ ID NO: 334429 - protein, 385 aa, unidentified
MAPPRMPEAVIGLDVGKSSHWACVATRDGEILLSAPVANREDDLDSLFGRFPDALVVVDQSRNIGALALARARAAGMSAAYLPGLAAHGAARLFAGDAKTDERDAMVIAKTALGIPDALLPVGDPGPTIAAARALAAQRNFLTCENTRNKNRLRSILLESCPAFEALVDLSDGPQLRLMASLGGAWSVADAGPRRAAALTRGAARGKIEALVRSTASSTRPDASVVAAEDRAVRLLARRISENSAEIEAITAEISALLEGDDTYRCLLTVPGIGPKTASELAISIDIEDFPSHDRLASYCGLAPRNRQSGTSISSVTASRQGNKRLKNLLIFSCNCLTRTEGRWGDYYTRCRERGMPHGKALKALARKRLKVIYAVMRDRVPYAA

SEQ ID NO: 334430 - protein, 317 aa, unidentified
MEKVYVGIDISKDRLDVAIYASKKRWQFANDAAGIKDLCNVLAKFRPNLIAFEATGGYEMALFVALDEAGLPAAPTNPRQVRDFARSMGKLAKTDTIDARMIAQFAASNPEIKPKHIADTRELREIVTRRNQLLEMLNAETNRLRHAGQLRRVRIEAHISWLRQEINTTDRELRDAIKKDPVWNDKDQILRSAPGVGPALSATLLSGLPELGTINRKKIAALVGVAPLNRDSGKVHGRRSVWGGRGSVRVVLYMATLVAVHHNPVIGRFYERLCTAGKNKKMALVACMRKLLTILNSMIKYHTSWNQRVSLVLGPCS

SEQ ID NO: 334431 - protein, 311 aa, unidentified
MIEQVNFHQVVSRGCGIDVHQKMVVVTIDGVGIKKVTREYGTFTSSLKELRDWLLSEGITHVAMESTGVYWKPVYHILEPCGMTIWIVNARHIKYVPGHKTDKNDSAWLCKLLLAGLLKPSYIPPREQRELRDMTRYRKKLIQSVAANKNRLNRILEDCNVKLSSVMSHTGGVVATKLIDKLISGSVVTMADIDEVYHCKLNASKEDLFEACNGYLTEHHIFMLQTIRSDISSTEATISRIDKRIKELLSPYDNVLKLLKEIPGLNDKSIEDLVAEIGLDMNVFPSDKHLCSWVGIAPGNNESAGKKKADV

SEQ ID NO: 334432 - protein, 388 aa, unidentified
MIYVGVDIAKLNHFVSAISSDGEIIIEPFKFTNDNDGFQLLISKLESFDKNSLIIGLESTAHYGDNLVRYLVAGNYKVCVLNPIKTSTMRKNNVRKTKTDKVDTYIICKTLMMQDSLRFVTYYDLDLMDLKALGRFRQKSIKQRTRLKIQLTSYVDEVFPELQYFFKSGLHQKSVYALLKEAPTPEAIASMHMTHPAHLLKVNSHGHFDKEMAQQLRVLAQKSVGASDSALSIQITHTIEQIELLDSQLERVEAAMTDIMKFNDSVIMTIPGIGYINGGMILGEIGDIHRFSSPNKLLAYAGLDPSVYQSGNFQAKKTRMSKRGSKVLRYALVNAAHNVVKNNATFKAYYDAKMAEGRTHYNALGHCAGKLVRVIWKMLTDEVEFNLE

SEQ ID NO: 334433 - protein, 342 aa, unidentified
MAHFAGLDVSVAETSICIVDEHGKIARERKVPTEPEEIIAALAGSGHVCERIGLEAGPLSQWLYGELAEAGLPVICIETRHIRAVLEAQVNKTDRNDARGIAQMMRVGLFRPVHVKTLQSQQRRMLLTTRKLLQSKMLDLENDLRGTLKNFGFKVGKIGAASFEARVRELVDGYPVLRAMVIPVLVARAALREQFKVLHALLLRLVRYDRACRLLMTAPGVGPVAAMTFRATVDVPARFKKSKAVGAHFGLTPRKHQSGEMDRTGRISKRGDRMVRTALFEAAQAVMIRLTRWCTLKAWGMKIARKRGLRRAIVAVARRLGVILHRMWASGTAYRWGQPATA

SEQ ID NO: 334434 - protein, 578 aa, unidentified
MNPNHVAPSLTPIGVGFDTARYGHHVTFLREDLQPATTPCEVTESREGYQLLEQKFQLLARRIPNVLFCIRIDAAGQYATNLETFLRQLPFPKTISVGEPARNQKYRQAIFPKCKSDPAESHCAGRFALREDPKPAPEVPAELIILREIASRLEAQTRQSTRLANQLHNLMARVFPELATIASDFQAQWLLRLLDQYPTPCQLARARASSLTAIPYLTADKAHKLQTAACTSVGSFRGTVAEELVHMLVGQLRRSGQEQDHLRHLLVKVRQALPQSNQIDTIPGIGAGTAAVLTAKMISIDRFETPDQLVGYFGIFPEKDASGLDKDGKPKPGCHTHMSKKGNDLARKYLWNAAKVACQHNPAVRALYRRLRARGRRGDVALGHCMRKLLHLVWAVWKSGKAFDPNHYPWEPASAPPGNAEAAGHNQGASPERKVVTAADSTVSSEAPVVNEPSPAAPENSLDSAAADNGWLDFALLREQVTMEQVLAHLNWLSCLRGSGPQRRGPCPVHGTPADRTRSFSVHLQKNAFQCFHPPCASHGNVIDLWAAVHRLPLRQAAHHLIDTFNLRTTRGTEKRNP

SEQ ID NO: 334435 - protein, 337 aa, unidentified
MNTANAIVGIDVSKKTLDVALLVDGKVKRSKTLDNTAPGHRQLLDWLDKAKLAKDALHVCMEATGVYYEAVALALHEAGVRVSVVNPGCVKGFGQGENLRNKNDGVDAALIARYGAAMSPAPWSPPPLEQRQLRAWSSRVQALKDIRQQEQNRLEAHGVTGMKDVANNVTEHIVWLDNEIKRLEGGINDHIDRHPDLKRDAALLTSIPGVAAATTAKILGQVGDIRRFDSAKTFAAYLGVTPKQRSSGTSLKGRTIISRVGSTSLRAALYMPSVVALHHNPIVMRFAARLLANGMPKKAVVCAVMHKLAHIIYGVIHTGKPFDPNYLAKGLAIQDGI

SEQ ID NO: 334436 - protein, 360 aa, unidentified
MKGNVNQQMRAEPTSESTIGLDLGDRWSRYCVIDCRGAVAKEDRVRTNPEILKETFRAVLTSKIVIEAGTHSPWVSRLLEQLGHRVIVANARKVRLIYQSDRKNDRLDAQMLAKLGRVDVSLLAPVQHRSLETQNDLAAIRGRDALVSARVQMINAVRGLVKSMGGRLPASTTAAFASKVASLIPPSLKQALAPLLNSIQHLSEQIRRCDRHVEDLAQKKYPQTKLLQQVKGVGPLISLAYVLTLDDPARFQKSRMVGSYLGLQPKQNQSGESSPQLGITKSGNGFLRRMLVQAAQYILGPLASDSRLRRWGLELSRRGGKNSKKRAVIAVARKLAVLLHKLWVSGEVYEPLYGIEAAAA

SEQ ID NO: 334437 - protein, 355 aa, unidentified
MNAIKYIGMDVHMATISIAVLDAQGKLMMEVTIATQAGALLDFIHGLSGTLQVTFEEGTSAHWLYTLLEPQVAKVVVCDPRQNPRRLGEKKSDRLDARKLAEWLRLGTLKPVYHSNSLVPALKELARSYRTLVSDTARVMNRLKALYRARGIRCAGTRVYSPRFRDQWREQLREPGARGRADLLYKQLDSLLPLRQEARGAMLAESRKHPAQKILCSIPALGPVRVALLLALLQTPYRFRGKRQLWTYAGLALVTRTSADYQMVDGQVTRSRKAALVLGLNANHNHTLKGLFKDAAASALAHPGPFKDFYATRVAQGMKPELARLTLARKIAALALTLWKKGECFNAEHVKEQAA

SEQ ID NO: 334438 - protein, 325 aa, unidentified
MIDVDLIYVGIDVSKANLDVCVGAMGSVSRLNNDEAGRDALCRMLKPLKVGLVVLEATGGYEFACAAALQSAGVPVAIINPRQARDFARAMGRLAKTDRIDAQGLAHLAQVWSARPDAAHLVKRLPDAQQQRLAALVSRRRQLVQMRTMEGNHLGVAHRSAHKSIKAVIKSLETQIRRIEADLAAHLKLHHADVSKLLSNVKGIGAATVAILMAELPELGTLTGRQVSALAGVAPYNHDSGRLKGKRCISGGRATLRTALYMATLAATRFNPLIRTFYQRLLAAGKPKKVALVACMRKLLTILNAIVKSGSPWNENLHTQEAKNA

SEQ ID NO: 334439 - protein, 352 aa, unidentified
MRQYMGCDGHKKYSIFGSINEAGRYGPQVRVNHQREVFQGFLKTLPAGSSIALESMGSWYWMVDEMESAGHQPILVHPRKAKMMMGQTNKTDKLDTNGLALLNRNGTLPKVWIPPKEIRDQRELPRMRMTLVSIRTKLKNRIHAALGKYNIQIEEVSDMFGVEGRRLLNERSKQLPPETKHSVDEQLKVLDEVQERIEDAEKRIRQVVEDTPEMQLLKTLPGVGPILSIVVALEIGKVERFGRPEQLASYSGTVPRIHSSGGKTRFGRTCPDVNRYLKWAFIEAANVIVMQQSRMPEHHAVRLYQRLRSGKGHGKAIVAVARHLAEAAYWVLTKKEAYREPLRKNLVLSTQG

SEQ ID NO: 334440 - protein, 341 aa, unidentified
MKQEMSVLGIDIAKHVLHAVGMDERGKIVLRKRLSRHDLMPFLAKLPPVLIGIEACGGAHDWARRFREHGHEVKLMAPQFVKPYVKSNKNDSRDAEAIAEAVTRPTMRFVPTKDVDQQDIQALHRVRERLIGERTALVNEVHGLLHEYGIVIPKGVAKFRPAVVGKLESEKDKLTSLSQEMFWKLVEEFAGLEKQLVYDQEKLEALAATHPECQRLMTIPGIGPLTATALVAAVSDASAFKNGRQFAAWLGLVPRQHSTGGKERLLGISKRGDSYLRKLLIHGARATLRWVGRKTDRRSQWIRQLSERRGKNRTAVAVANKNARIVWALLTSHQVYEPAKG

SEQ ID NO: 334441 - protein, 374 aa, unidentified
MKGTRFIGLDVHADSIAVAVAEPNGEVRSLGVIPHDPEAVRKLVRKLGPPETLRACYEAGPCGYPLYWQLTQLGVGCIVVAPTLVPVKAGDRIKTDRRDAMKLARSFRSGDLTPVWVPDAAHEALRDVVRAREAAKRDQLRARHRLQKFLLRHGRRAPAGTKAWTQGFHRWIRGLHFEHPAQEATYLDYVAEVDHAAERIARLERAIDAAVATAPPAMRTVIDALQALRGVRKVTAATIVAEVGPLARFDRPRQLMAYCGVVSREDSSGGRTRRGAITKTGNAHLRRVVIEAAWAYQHRPAIGPTLRQRQRDLPAAVTAIAWKAQHRLHGRYRRLLGRGKVKPQVVTAVGRELLGFIWAIGVEVAPPAMTATAA

SEQ ID NO: 334442 - protein, 418 aa, unidentified
MFKIFRKNCCGLDVHKTWIYACIGITDANSRTEYFQARFSAFSKGLQELSHWLDKYNCKEVCMESAGKFWIPVFNILEKTCLVTLAHPKYTKPQKGNKTDRKDAKWICDLFMCDMIKPSFIPPPAIRHLRDLVRYRGKLTNMLTGEKNRAQNCLTVSNLKLDDVFADVFGKSARSITEYILAHPGEPFDVAQFVDRRCKSPLSEIQAAVDGAVSPEQAVKLRQCLDHIDQLRLLRQRLEQEILRICEPFADILQLLRTVPGLGNDPMTAIAVLSETGGDMSVFPTAKNLCSWAGCCPRNDQSGAKVKSSRISRAGSYLKPLLVQVANALIHSRKHPEFAERYRRIKARRGHKKAIIAVCKMLLTAIWNILSKLVPYSPAGFLSTSHDLPPSKSLTVAQGLSLLRRRGFILTDDPLSAP

SEQ ID NO: 334443 - protein, 429 aa, unidentified
MTRISAGVDVSKNRSTVCIIDQDGKFIMRPFLVWHSTEELDFLADTLKRLNGEVRVIMESTSVYQYPIALQLKERGLFISIVNAYEMKQFANIDFRGGKTDKKDSRTIASYGISYWDKLVEWQIPKDTYFNLDLLNRTYMNAKKHRQIILQELQHYIDCAMPGMDKELHSLNLNTKKDFMLDFVEKFWHRDEIVNMTEAEFTEVFTAWAKKKGYRPVEGKAAKIYAIAKSCIPYYPANPTVKTILQCIVDKLSGVNRTLVTIVTQMIEEAKKLPEYQIVREMPGVGDPLAARFFGSAGDIRRFKNSKALVAYAGIDSPPDESGDFSSTHRHITKKGSKVFRDTGYEIMMALRAQKRTWEKVRKNPEVYDYMLKKEAEGKPRKVAKIAALNKFLRIVYARIKELYDNMALAERAKAKTRSKTKAKTKATA

SEQ ID NO: 334444 - protein, 351 aa, unidentified
MKLEHTARPKLFIGIDIHKRSWKIHCSTDISGGKTFSMSPSPEGLKNYVEKYFGDHQVNTAYEAGCCGYHAHRNFESYGWRSLVVNPADVHRKGKEKQTKTDRIDAQLIARELKDGRLDSIHIPNMEREQLRSLFRRRNDLVKDYRRVKSLIKSQLLYFGIVVPAEFDNSHWSHGFRNWLDALRFEYSPARATLDSRMRQFRFVDQDLRDVSTQLRRFCKVYYKKDYNLLRSIPGIGGIVACGILCELGDLRRFRSLKHLSGYVGLAPGIYQSGDTLRSTGMTRRAHRLIRSYFIEASWQAIRTDPVMQAYYRKHLGKNVKSIIVKVAHKLLSRTLAVIKTETPYVVGVVE

SEQ ID NO: 334445 - protein, 346 aa, unidentified
MDHVIRIGMDTSKHIFQLHGVNAAEQPVLRKRLRRKEVAGFFAKLSPTVVGIEACGGAHDWARVLGGLGHEVKLIAPQLVKPYVKRGKNDAADAEALCEAMSRPTMRFVPVKTAEQQAALMLAGMRERLVARRTQLGNAIRGYAAEFGLVAAKGTGKIEPLLARIAADESVPPLARELFAIQAKEHAQLRAELQRIEAKLMAWHRYDACSRRLAQIPGVGPIGATMLVMKTPDPGAFPSGRQFAAWLGLTPKDHSTAGKTRLGAITRAGDEALRSLLVVGATAVIQQVRRGRGHPSPWLVALVARKPPKLAAVALANKIARTAWKLMVTGESYQSRRAPPALVRAA

SEQ ID NO: 334446 - protein, 315 aa, unidentified
MHAPRTFMVGIDVSKAHLDVAVEGKRTVVRFDNDAAGRAALAAAVAGAELVVVEATGGYEMASVRVLMAADSPVAVVNPRQIRDFARASGRLAKTDQVDARVILHFARAMRPAQIPHIDDGRIALAALVTRRRQLIDMAVAEKNRLEHAPQAVAVLIGETLAALKAQLARVDAAIALAIEAEPDMAARRDLLLTVPGIGEVGAAVLIAELPELGGIDDKKLAALVGVAPMAHDSGAWRGQRHIAGGRATVRCALYMATLSAIRCSPAIKAFYKRLRDAGKPPKVALVAAMRKLIIMINTILKRHTPWSEPQQHGC

SEQ ID NO: 334447 - protein, 350 aa, unidentified
MDIHNKKTMYVVMDEQGNIIDRGSVDTSKESYMGLLVGKKIPSDTQVAFESGEKMYWANSILIELGMRPVVVSAQEVRAKARRPNQKSDHRDAFEICDGLRRGIYTSIVYVPTPELQNLRKILSRRQHFVKECTRQRNAAKFLIRNLGLNLHKKLCISTTAGWEQLLNMKEVETIAAYLTMHYQLWKMANQFVNDLEKEMDEASKPFKELLELLQTMPGVGPITSTAFVTALGDASRFRTAAEVASYIGLVPSTYDSGEKQRHGHITKNGPAHLRSLLCEAAHHAGKPSHPMNASWRKHMVKSGYKKAITAIAHRMARILFAMWKHQEAFDPNRLQSSKPTKTYRIKNAA

SEQ ID NO: 334448 - protein, 346 aa, unidentified
MEHYVGLDVSLKLTAICIVNELGKIVREGAVASNPEAIAAFVKSHAPHVARIGLETGATSTWLWTELSVMGLPVICIDARHAKAALRMQINKSDRNDAVGIARIMQCGWYKEVRVKDLDSHAVKGLLVSRALLVKIKRDLENQIRGLLKNLGLVIGRAKMNVFAVRAAELVEDRPQLAAAVEPLLKTREAVELQIADLDRKALRLTRNDVQVRRFMTVPGVGAITALCFLATIDDPTRFKRSRSVGAYLGLTTRRYASGEIDWTGRISKCGDKMLRSYLYEAANVLLTRVAKWSVLKAWGIRVTKRSGLRKAKVAVARKLSVILHRMWVDGTEFNWSAKEVAAQSA

SEQ ID NO: 334449 - protein, 455 aa, unidentified
MNYKQNEKINQVKESTLVVGIDIGSTTQYARAFDWRGIELGKVFTFSNSREGFESFKAWMQHLQDKYKKLDAIVGIEPTGHYWFDLGAYLEDEGILLVMVNPYAVKQTKELDDNSQSKNDRKDPKVIAKLVTEGRYSAPYTPDGVYADLRIMVANRKRLIREMTQIKNRFARWFAIYFPEYTDVFGDYEAQSSMLLLKKVCTPEAIVELGAEKINQIWRDAKLRAVGMKRATTLCETAKRSIGLKKGSSAARYEMKLLLEDYEYKKAQLDAVMEEIEKLCRKIPESEQMLAIKGIGVITVAGFLAEVGDVRRFESPRQIQKLAGLSLRENSSGKHKGQTTISKRGRSKLRAVLFNAAIPLIAKNPEFKSLHEYYTTRANNPLKKKQSVIAISCKLIRVFYAILAKGVTYDAQNYSFIEIFQICKGRLQDKFILCVLGYSSSQVIGHKVFRNSTIK

SEQ ID NO: 334450 - protein, 391 aa, unidentified
MINIGIDVGKLKHCAAVLDDKTGEVLINPFFFDNNLEGFELFYSKVKQFIRRKHSVGMEDTGHYMINLTNFLLEKKFTVKYINPRSTSLRRKELGITAKNDKKDSLLIAEMLSEKKFWRSVSKSSLETAKLREITRLYHQLQEQQNQDMNRLQRALDIVFPEVNKLSWTRYSKAYMQFLATYSSASSIAGEDIRNLRKALKTEGRGRQCKVTAEEIKELSEHSVGDDNIAVELEVKSVIAIINTRNEQIRVLEKKIEEFSRQLNSPIISIPGISHITGMTILAEIGDIKDFPEAAKLISYAGMEPLVHQSGNYDAAHMPISKHGSRYLRKALYQAVFTVCKYDPTFQAYYTKKRNQGKSHRCAQGHCVRKLLRVIYKILSTDILFDSELIH

SEQ ID NO: 334451 - protein, 421 aa, unidentified
MVMEEITEEPGALTERVAALDIGKASLTACIRVPHEDKPGARRQEVRTYATVTRALLELRDWLVCQGVTLVVMEATSAYWKPPFYLLEDDITCQVVNARDVKNVPGRPKTDKLDAVWLAKLAERGMLRPSFIPPRPQRQLRDLTRYRRTLTHERTREKQRTEKLLEDAQVKLSSVISDIFGKSGRDMLDALIAGQRNPYALAALARGTMRAKTSVLQEALTGHFTDHHGFLLAMMLSRIDALTAQIGTLTARIEQAIAPFAHQVAQLDEIPGIGIIAAQDLIAETGADMSRFPTPAHLVSWARFAPKARQSAGRSKAATTGKGNPWLGGTLGESAAAAARTSTFLASRYKRIVKRRGKQRALVAVGNSLLTIAWHLLSDPGARFADLGPTWHDRLTPQRRKRQLIAELERLSGMKVTLEAA

SEQ ID NO: 334452 - protein, 391 aa, unidentified
MECPMPQLNDQSRSHTALRQDCTLIAVLEMSQSAWLVAGLVPGIERPPLKKIEPGEAVLLRLLRRWQEEATKAGYPITRITLAFEAGRDGFWLARWLRARGIEAHVIHPTSVAVSREHRRAKTDRLDTALLKRAFLGWLRGERGHCSLAEIPTLEEEDAKRPTREREGLVRERTRLVNRIKGALARLGIRGFKPTLRQAPERLSALRLPEGAPLPPNTLAELRRDMARLRFVLDQIREIEAARLDQLEQHPETGAHTMVRWLARILGVGIETADMLVHEVLSRNLRDRRAVARYAGLTGAPDESGGRRREKGLAKAGNARVRRGMIPLAWRFLRFQPNSALTRWYRARTADARGATRKTMIVALARKLLIALWRLVRSGEPLEGVVLRPAA

SEQ ID NO: 334453 - protein, 333 aa, unidentified
MVKYIGMDAHSSSCTFSVSDAKGCEIDNVTMETNGKLIKSYLRSIEGCKKLTFEECELSRWLFGIISPEVDELIICNPVANRDYKKAKTDKLDARKPAKLLRGGFLSPVFHDGSDRERFRSLMSSYQDIVDEGIRIKNRYKSLFRKNGQRIKGTKLYNDDNLLEGLSRNEDRFIGGHMYGLLAKLEQSRQAYIKEIGLYSKKFKELKYLKTIPGIGDIRAAKIVSQVVNPHRFATKYKYYSYCGLVRHKRISAERNYGTAKIWGNRVLKCVYKMAGHDALKGNNRLLDLYNALRKRGVSDDNAYNAVCRKIAAISLSIWKHSKRYDEQMIRAI

SEQ ID NO: 334454 - protein, 399 aa, unidentified
MSYKTLFVGIDVSKFKHDIAIVNEQKQFVARPFVIKDDRDGYQQLIQKLDELMQRYDTQRFYIGLESTGDYWKNIYYFLKQQPQPYIVTVINPVQTNAHAKTELRRASTDAVNARDIALFMAEKQPRASFDRAPILDNIKDLDRQIYQLKKQQTMSVNKLRIELTKVAPEIEKNVSNIQGKQILALLAELPTAELIANSSFQRLATIRYGKNNWALSAPFIDKVKALSQQSIAYKTGLGAGYAVQSLVRCIWQFQREIQWLKSQSVALYQSVTDQESLLATIPGIARETAILLEAYIGDVHRFPNVKKFVAYFGMNPTVCTSGTSKRSSYLQKKGNALVRHKLFMAVLCMIRREIDPIHSYYKRLVDAGKPKLVAIGAAMRKLLVAIYYMLSKNKPFEN

SEQ ID NO: 334455 - protein, 354 aa, unidentified
MVAHTHPFVIGVDAHARNHALAILACPTGEVLDEGQFPATGAGLQRAVDWVARRTGGDLDTLWVVEGVGTYGARLARAAADAGYSVAEAARMNARANRGVGKSDPLDACRIAQAVLPLDVAQLRRPRTDDGVRAAVRVLIASRDHISVERTAAINALTALLRVAELGVDARRALTGGQIALVAAWRTREEALATRVARAEAVRLAKRVLAADQEIASNAKQMTALLNSSPARKLLDQPGIGPVTAAVTLAAWSHPGRVRSEAAFASLAGVNPIPASSGNTVRHRINRGGDRRLNRALHMAVVTRMRMDPATRAYVEKRTAEGRTLREIRRCLKRYLARQIYRHLNAASDTLLAA

SEQ ID NO: 334456 - protein, 350 aa, unidentified
MRILAIDLGKFKSVTCMLDTNSGEIRFQRIGSDRWFLRTVFEVERPDVVVFEACSMAGWVYDLCSECGLPAKVANTSAEAWKFKHLKRKTDRDDAERLARLEAMGELPTVRMPPVPVRERRSLIVFRQSLMSRRVAVQNQIRSVYLGQGLNAPRGHSAWTIVGVTEMRQHARAIKDCPTGEMWRGQLHELLEELDGLWERLDTVEQKLDELAEADEATKLIETTRGVGRRTAEVVAVYLDDAKRFSSGREVSAYAGLVPRQFQSGELDRRGRITRRGPSLLRKMLVEVAWCMLRYNAWARGIVARISRGQRTRKKQAVVALARKLLVRLWAMLRDGVPWRDPVAEPVATG

SEQ ID NO: 334457 - protein, 418 aa, unidentified
MNVKTRRTKKQVNVENQAINLLSKEELNKKIEVVEKELRSYTWRELETNGKFAKNDKLSFITDDMLIVGCDIGSENHYIRAIDVRGRELSRGAFEFSNTSEGFENAKAWVMALAAKHDKKQIVLGLEPTGHYWFALAAWMISNGISVVRVNPYAVKQSKEIEDNSQLKDDRKDPQLIANLVKDGNYGMPYFPEKVYADMRRLSMFRDQLTEDRIRNINRLHRELKIYFPEYMDAFGKIDGAFTLEVLKVSAIPSDITALGAEGIKNIWHNEKLRGRGYSRANEIVSYAEKSVGLTDGIDAGREAVKWYAEQILKLVACSSGKHKGQTKISHRGRKRLRYWLFQAAKSAVSHADEFKQLHEYYTTRTNNPLKKMQSLVVIACKILRVIYTILKTGTTYDPQKLLKDIKRPTASQAPMAA

SEQ ID NO: 334458 - protein, 351 aa, unidentified
MNATTVAVDLAKNVFELALANAQWKVLERARLTRGQFERWFYNRKVDLVVMEACGSAHHWARRFKARGIEVRLLPAQYVRAYVKRNKTDAADCLALLEAGRAQDIQPVAVKSVEQQALQALHRTRSGWMSTRTRRINTLRGFCREFGLVVPEGAATGLAQIARYLADERSGLPGMLRPSMRLVLEEIRLMEARIGQLEQTLSALAKESPACQMLLSVPGIGLLTSTAMVAAVADPRSFPSGRRYSSFLGLTPREYSSGNTRHLGRISKRGDRYIRMLLTHGARSILRAATVARRAGRQIDRLKTWALAVQARTNHNKAACALANKLARIAWAVWVKHERYRAEPAPATPSL

SEQ ID NO: 334459 - protein, 359 aa, unidentified
MLKYALGIDVSKKDIHICLSVIDAKQQVKVKASSKFANNEQGFNNLLVWISRHKKESDIPLVNVIEATGVYYEACALFLFKTGLDVAVVLPNKAKKYLQALGLRTKNDKIDAAGLARMGAEQCLELWQPMDEFFYTLRAMTRHHQSLQELKTNINNQLHADEHSIYSNKTVIKQLKKLITTIEKQIAETDKRIHDHLCSNDKVAEKLDHIIDIKGLGYLTVAVVLAETNGFALFKSASQLVRYSGYDVIESQSGEHRGKTKISKKGNSHIRRAMHMPALNVVRYDAGNFKAFFERIFARHHKKMKAYVAVQKKLLVLIYTLWKKNEAFKPNAKITTSRNEETVPSFALTEGQLNEVAPA

SEQ ID NO: 334460 - protein, 428 aa, unidentified
MDEKKENSWEQHRFYMGLDWAKEYHEIVVVDRNGRIVLDIRIKHTAEGWHRLREKLVDLAGPDLSVAAATIETNRGPAVERLLELECAVYPLNPKAAQRYRDRKAPSGGKTDHLDALSFADALRTDGHSWRQLKPEDPKIQELRLLCRDEINLIEQRTALVNQLQEALHEYYPAASEAFDDWTVPAPWAFVERFPTPQALKKAGKRCWEKFLHTHRLYRPETYQKRLDVFARATEFCGSPAVTNAKSMLAVSLTKQLRLLQQQLKVYRNRIEKLFQENPDHDLFGSLPGVGDKLGPRLLSECGDDRDRFDDHQALQCYAGTAPVSFQSGQIHKVKFRRACNKNLRTAVHLWANLSRKKCSWAQIYYQQKRLEGKSHACALRCLGQRWLKILWKIWQTKKPYDEQMHMRNQIKHGSWVLALTPAADTVR

SEQ ID NO: 334461 - protein, 368 aa, unidentified
MQTIDTKPALYIALDLGSTKWTLALSDGRRRRPRQRTVPAHDLPTLFAEVERARKQFELEAETRIVSCFEAGRDGFWLHRVLLERGWQNVVIDPGSIARPRKKQAKSDRLDAHKLMDCLQRHDRGESVWSVVRVPPAEVEDVRRVERERERLKRERGALRSRFFSVLAVIGVPKESRVLAVDIDSLRDATGRAVPPHARAELRRLQARLALVEEQRRELEHERDEAVREVPRVRKVYEMLVAVRGIGALSAFVLATESFGWREFDNTRQVGASVGLAPTPHLSDRTGFERGISKASRPQLRSLMVQLAWLWLRYQPDSPLSRWFVERFAGAGGRAKRIGIVALARKLYVTLWKYVTWGLVPDGMQVAA

SEQ ID NO: 334462 - protein, 360 aa, unidentified
MRYSTIVGIDTHARKNSVCALDTKTGEITQATLSADPDQLVSWIEKGGFAKPVHCVYESGPTGFGLARALVEAGVPCTVAAASKLPRRTDKQKNDKRDAQWLARMAAAGSVRAVYIPTPEQESLCHLSRLRDEAARDLKRARQRVASFLLLTRTSYTLTKKRWTKRFYEWSAAYEFPCEGDTFAFRSKVNAALRCEERLREIEDEMERAAAGSPDVSKAMERLLCIHGIGKVTAFALVCEVYDFHRFSKGSAFASFVGLVPSESSSGAKEARGPIAKTGNSHLRRLLMEAAGCYSNRVKAVKLEDGRIPEAVRAKVEKCASRLKKRRERLRERKVPANKAKVAVARELCEWIYYIMVVPA

SEQ ID NO: 334463 - protein, 368 aa, unidentified
MLYVAIDQHAKQITVVIRNDQGEDVLKRQVSTRREKIEQFFDSVVALDCEFMAILESCGFNDWLLEELRNRKCREIVLIHPEKPSKKKTDRRDARKLCDLLWLNRERLAAGKPVHGLRRIYIATKGEKDDRQITSLRQGLGRRRTRVLNKIQRILHRYNLMWDYPTKSFQTVAGKNWLKKLSVPEIDRFELDLLLEEWTSIEVQIKQVDAKIVERASRREPGKVLNATQILMTAPGVSFYSGLGLSTRIGPVERFPRPRSLANYFGLTPSSKNSGESKDRLGSITKEGSRFARFLLGQLVLHFLKQDPKMREWYRRIKLRRGSKIARVAVMRRITTIFWHMLKHQEGYTIGGPPPRLRDQSADRCSAA

SEQ ID NO: 334464 - protein, 354 aa, unidentified
MRFYIQSPDEVPHRFYCGVDLHARSMYLCILDQAGTIRFHQNLAADPATFCQAIAPYRDGLVVACECMFAWYWLADLCRADGIAFVLGHALYMKAIHGGKTKNDKIDSHKIATLLRGGTLAQAYVYPAGMRETRDLLRRRSFLVRQRGLLIAHIQNEASQYNLPAFAKKLTYATNREELQVAERFADPSVKLSIQTDLALIDALDDRLATLERPLQRHAKIDDADLYQRLLSIPGVGKILALILLYEIHDINRFAAVGNFLSYARLVRGSHESAGKKKGAPGKKIGNAHLKWAFGEAACLLLRHSARAKVWMKRQEKKHGKAKALAILAAKLGRTVYHLWRKRTVFDETRVFAS

SEQ ID NO: 334465 - protein, 359 aa, unidentified
MIAAWLQLQTCSYGTERRPAMQYCGLDLGKKSSNFCIVNEKRAVLREGKVRNRVDELARLFGKLPSMKIAIEASTKAFWMADRLRDMGHEPIVVDPGRTKAIGAARIKHDKLDARVLAEICAADLLAEIDQPTEEQRLARMPVVARDGLVRARVKLVQMVRSMLDSEGIELKRCALNVFVDRVSDLWDELPEEMAQAIKPALTAIHMLTDQIADCDSRIAESITRDPDAQLLMTAPGVGPIVAACFLMAVRDPSRFHSGRDVGSYLGLVPSLYQSGETHRRGRITKHGNRQARWALSMAANVLLSVVKKPSALRQWGLEVAVRRGRKTAVVAVARKLAAVLWSMWKNRKPFEPRLAAAV

SEQ ID NO: 334466 - protein, 339 aa, unidentified
MNSIAVGVDIAKQVFQVHYIDQETGEVVNKPIKRAKFLEHFANRAKCLIGMEACGGAHHWARQLMQLGHEVRLMPAEFVKAFNIRNKNDAADAKAIWLAVQQPGKPVAVKTEMQQAMLALHRMREQLVKFRTMQINGLRGLLTEYGEVMSRGREKLNGEIAAVLGRLAQRLPAALIDTLREQWNGLARLDEQIAEIERRMREWKKEDRAVKAISEIPGGGLLTATAAVAMMGDAKAFKSGREFAAWAGLVPKQTGSGGKVNFHGISKRGDTYLRTLLIHGARSVLSHSKDPGPWVEQIKKRRPTNVIVVALANKIARTIWAVLAHDRQYQKSYASVKPA

SEQ ID NO: 334467 - protein, 360 aa, unidentified
MQAKVNNNSFNDQSFYVGIDYHKKSWKVTILGEQYEHKTMSQNPDADILAAYLKKNFPGGNYYAVYEAGFSGFESCRKLNQLGVNCMVIHAADVPTTRKEKLQKTDKADSRKLARCLRSNEFEAIHIPDRNLEADRALVRQRFRLVKDISRTKNRVKSLLFQFGIDIPERFTSAQTRHWSKVYINWLKELSIQEQSLRLTLDNHIHIGEILRKELLLANRQVRNLTQIDTYRNNYKLLISIPGVGIMTAITFLVQIGDIKRFNRLDELCNYIGLVPKMYGSGEKMITGKMIKRGRKELKIMLIEASWDAIRKDPALMLKFNELTKRMNKNKAIIRIARKLLSRIRFVLNHQQEYELGLVE

SEQ ID NO: 334468 - protein, 303 aa, unidentified
MHQSSTLYVGMDVHKESITVAYVAKDHEAEVISLGTFGTRQCDIDTLIRKLQSKAQHLVFVYEAGPCGYWLYRYLTKKDYVCWVVAPSLMPKKAGDRVKTDRRDARQLARLMRSGDLTPVYVPAVDDAAIRDLSRAREDTLRDLQAAKLRLKAFLLRHAIRSTGRANWSPAHLRWLSEVVCPTPAQQIVFQEYVQTVTEQSERLGRLELEIHEQVKTWRLAPVVEALQALRGVQCTVAVTTVAELGDLTRFENPRQLMNYLGLTPSEYSSGARRQQGSITKTGNTHARRALVRTYLRFSMYFA

SEQ ID NO: 334469 - protein, 414 aa, unidentified
MVMTDRVALVGVDWGDKKHAFEVRGADGKRREGWIEHQPADIHEWVAGLREEYPNGKIAVAVEQSRGPFMYALSRYEFLELLVVHPSQTAAFRGVVRPSGAKSDPIDANLVCDFVEKHGDQVRTWSSADPITRELLLLVEWRRKLVGNWTSCRQQLQDTLKQYFPQALGWAGELDSPMALDFLEKWPTLDALQRSRPSTVRSFYTKHGSRSVERIEKRLAEMASATPLHSDLALIAALSTMVGTLVALVRTTVEQIRVVEHRIEQLWRTHPDRAIFDSLPGAGPVFAPRLAVALGTDRARWTAETLQIFSGIAPVTVSSGSSKWVHSRWQCPKFLRQTFHEFASSSIPHCEWAASFYQQQRARGKGHHAAVRALAFRWIRVIVRCWKDRLPYDDALYMNRLKVAHSPITQHLSA

SEQ ID NO: 334470 - protein, 442 aa, unidentified
MPKCVAAQSLPLSNDEGRVVMKLTYPICCGVDVHKTFLVATIIKTDGLVLKYHKKRFSTFSRDLLAFKQWLLDNNCKDVCMESTGKYWIPVWNILEDVVHVVVANPKWVSAVKGNKDDTKDSRWIGDLFRMGLVPGSFVPNKKIRVLREFTRYRYKLISMRSSERNRFQNAFTVCNSTLDAVLSDMFGKSATAIQNYLLDTDVVNPAYCASLLQRTAKKKSADVMAAVEGFKMSAEQKERVRIIQEHFSDINARVARLDAEINKMVSEYESQISLLCTIPGVDRNLAITIISEIGTDMSEFGSSKRLCRWAGLTPGNNESAGKKKSVRITRAGVYLKPALVQAAHAAVKSTKSVYFKSKYERISKRRGKKRAIIAIARMILTTVFAMLKTGEVFNPCDLQKYDMPEQLKRKQIVSSAKDAVKFLVSLGVLQEDTVSLAALTG

SEQ ID NO: 334471 - protein, 411 aa, unidentified
MEGLNPLHKVVAGIDVHRMLHVITVLVENEDGTLTKHQQSFGGFKRDMKAMVLWLLKLGVELVVMESTGIYWKSAYSHLERAGLFAMVVNAHFIKHVPGRKTDMCDSEWLAVLARFGLVRGSFIPPKDLRELRLVSRYRRKLSGMLASETNRLHKTLDDAGIKLGAVVSDIKGVSAREMVAGLINGTSIYDLLDMARGRLKNKRDDLAASLEGELSPRHLFILAELHEHIVLLEQKLAKIDTYLIAAMQPYQWAFNLLQTIPGIDAIASAMILIEIGDDMSQFGDADRLASWAALCPGNNESAGKRKSGKTRKGNAIVRYILCECANAARNTKSSLAAKYRSLMARKSHKKAIVAIAHKLIRIIYFMLSRCEPYRDPVVDYEAMSAQKNAPRWIKALKKIGKLPITKPALA

SEQ ID NO: 334472 - protein, 362 aa, unidentified
MLQSTTIIAFDHHAATTVAAVLSPGHRTPALHVLSSDVSTIQRFVARVQRQGPVACCYEAGPCGFELQRALTAHRMPCEVIAPALIPRRAGDRIKTDRRDAGQLAVLHRAGALTAIHIPSDQEEAARDLLRCREDIRADLLRARHRLSKFLLRHGRRFTATKKAWSKRHDAWLRAQMWPLPALDQTHRAYLRAVDEAGARLATVEQDLRALLDLEPLRARVVRLRCFRGIDDLTALTIAAELGDPRRFATAPSLMAYVGLVPSEHSSGAKRAQGGITKTGNAHLRRVLVESAWHYRHHPFVSATVRARQRGAPTDVIARAWTAQQRLHRRYARFAARGKRKQLIVTAVARELTGFVWAALTQ

SEQ ID NO: 334473 - protein, 364 aa, unidentified
MPSIALERSDVIVGVDTHKDEHVAFAIDGLGGVLDDPRFFPANPAGYADMLAWASGLGELHAFGVEGCGSYGSGLARFLRRHEHVVREVARPPRKGERRMSGKSDAIDAEHAARVLLSGSGSVTPKLADGQIEAIRLVKIARDTAVTGHSRAIITLKAVLVTASDELRVGLEPLTNHKLALACAALDTDGDIADPEVAMRNTLACLALRWLALHEEIKIHTARLKALTQAAAPELLDRFGIGFDSAAEMLVTAGDNTDRIHSEAAFAKLCGACPIPAGSGKTSGRHRLNRGGNRQANAALYRIVIVRMRWHPPTIAYVQRRTEQGLTKKEIIRCLKRFVAREIYNLLPEPSTSNPVPNHPPETT

SEQ ID NO: 334474 - protein, 436 aa, unidentified
MTKLRKIIENAAGIDIGSQKVFVAIEESPVKSFETFTSSYNELVKYLKEHHITHVAMEATGVYWITLYDVLEQSGFDVYLVNPADSKNLPGRKTDVQDCQWIKELFSMGLLRKSFVPKDFIRELRCYTRLREDKIQTAAMHINHMQKAMTQMNIRLPEVLSQIHGSSGMAMIEAILKGERDEKKLLSLCHTSLKKSKSDKITEALKGNYKQEYLFELQIAYDGYKFYQNQIASCDKKIEILLKQVTHDKEYDKQKIKEHRIKPIRHNKPMVLDLHENLLKLNKVNATSLPGITDYTFLRLTAELGTDLSQWPSEKNFTSWLGLSPGKHQSGKINKRSKKKSVTRAGQIFKQAAQTILLSKKIALGDFARRLRAKRGPAIAIKATARKLAELYYKLFMKGLDYVEQGLKFYQDKQKEKLMHFLKKKAQELNLQLVEI

SEQ ID NO: 334475 - protein, 410 aa, unidentified
MRAVGRSIGLDVHRDFCEVAIAEDGSVRSAGRVETTPEALELFARSLGREDRVVLEVTGGAWEVARILESHVERVIVVSPDDTGIRQARAKTDRLDARTLARLLAAGELDAVWMPDERTRVLRRRLARREQLVRSRSRAKNEVHAVLMRRLQGRPPVSDLFGVKGRKWLGVLELPVEEAETVESALRHIEFLDQEIAAVERLIAREALQSAEVRRLMTVPGVNVICAATFLAAIGDIRRFRSSRQLVAYLGLDPKVRQSGTEPARSGRISKRGSASVRWALVEAAGSVVRQPGPLHAFYERIRARRGHGKAVVAAARKLAVLFWCLLTRSEDYAHQQPSLTAKKLRLLEIRAGAPTLKGTNTGLFATRERMRKAERELAQQAEASYKRMVSDWQATATKKTGASVTPGRA

SEQ ID NO: 334476 - protein, 421 aa, unidentified
MKPEKVDYAAWIGIDWGSEHHAVCLQAAGSSRLEACSLEQKPELLHAWFLNLVARFGRGAKIAVAIEQSKGAVINFLLGLDFVHIFRVHPLSLKNYRKALYPSGAKDDPVDAELILQFVRQHQDTIQPWVPDDVDSRLLLRLVEGRRKTVNKRVRLTNELTQLLREYFPQALDWAGELDRVMACDFLRKWPTLQKLQKSKGETVRQFYRDHGSRNGELIDQRIEKISSALPLTTDKAIVESSVLMVDTIVLQLHTVIEAIARFDQKIAMVYKRQPDADIFASFPGAGPVLEPRLLAAMGTDRNRFSCAQEVAEYSGIAPVTERSGKKEWIHRRLACCRFIKQSFHEYAGQTVTYCVWAGAYYKSKRAAGMAHHAALRALAYKWIRILYRCWKDHVAYDEQKYMQSLKRRRPAWLAFLPAGA

SEQ ID NO: 334477 - protein, 321 aa, unidentified
MNNLEDKKKRVSGIDVSKLELVVRCSWDAILRRYPNTASGIRKLLRVLKQGGVELVVCEHTGKYESMLVAALHSEKLLVHCAHSKATHHFAKARKISGKSDPIDAETILQYGLCMELKPDEPPRPELLALKELAARRNDLNEMLVMEKNRLQAPGISPSMKREIKSFIRGLEAHIARNEKAMAKLIKETESLQKPIKILTKEYGVGLISAAMIYAAMPELGTLTRQTAGSLAGLAPIIRESGKYQGQRRIGGGRAMARNALYMVAMTAIRKRGSILQSFYATLKKTGKCRMVALTAVMRKLIVRFNTLLKELYREPQVQLA

SEQ ID NO: 334478 - protein, 364 aa, unidentified
MHYVDNTELSSHEETRCQFNGGTGAIKLGIDVHQDFYVVVEQVGGSNPKPPQRFRKEAFLHWATRLKQKSGAQVHAVYEACGFGFALQRELSALGIHCYVVCPQKLDERNKRVKTDGLDAKALCLKLDRFVQGSRDALAIVRMPSEEEEQARALHRQREQLVKARKQLEAQGRSLMVNHGLEPVQNWWKPRTFAALPAPQWMKELLANSQPILVALQQKIAALTVQLQSAAAPDQPRGLGKMTSVVIDREIGDWKRFNNRRQIASYTGLCPGEYSSGNTRLQSCVTKHGNPRLRAALVELAWRLVRFQPDYKPIVKWRATLTKGALATGAARKKAIVAVARQLAVDLWRIKTGRLSAEELGLIN

SEQ ID NO: 334479 - protein, 412 aa, unidentified
MDVVYERCCGLDVHKRTVVACLLTPGEQGAPQKEVRTFGTMTTDVLALAEWLAGAGCTHVAMEGTGVYWLPIWNLLEDRFTLLLVNARHVKAVPGRKTDVKDAEWLADLLRYGLLRGSFVPNREQRELRELTRYRTSLLRERAAEANRLQKTLEAANLKLASVVTDITGKSGRAMLQALIAGETEPTQLAALAEGRLRQKIPQLEQALVGQFGSHQRFLVAQQLDHLDFLDERIAQVSAEIASRTQPLAATVAQLDTIPGVGQRTAEVLVAEIGTDMERFPTADHLASWAGMCPGNHQSAGQQRSGKTRKGSPWLRAALAEAAQAAGRTKGSALQTQYRRLAARRGKQRATVAVGHTILRIVYHLLDDPTGVYDERGTHDRAERDRQALERDLVRRLQRLGNMVVLHPVAVT

SEQ ID NO: 334480 - protein, 312 aa, unidentified
MNRVICGVDVSKDWLDASIRPSGTFERFGNDAAGIGALADLCRTENVELVVMEASGGYERTAFLLLWEMGIACALANPRHVRRFAEAMGFLEKTDRIDAAMIAHYAEARHLSALPPPKAAQMRLSALMARLSQVTSDLTVQRQRRSATRDQQSVESLNEVIALLVRQSRTLEGEIASMIDDDPLWACLNQAFRSIKGVANRTVARLMAELPEIGRISNKAIAKLAGLAPIANDSGKRSGHRPVRGGRSGPRAILFLVGAIAARHDPHLAAFQQRLQSAGKPKMVIRIALARKLLVILNAKARDARREFEYAT

SEQ ID NO: 334481 - protein, 307 aa, unidentified
MATDIGIDVSKHTLDWCPGPSGKIEQTRNEPRCIASLVQRVIAVEPERIIVESTGGYERKLVLKLAEANLPVIVVNPRRVRSFGEGMGMLAKTDAIDAKLLALYGEKVQPPIRPILQGRDRLLADLVARRRQLIATVVSEKNRRETAARPVQRSIAAVLRVLEREIKRIDQQIDQSIEEDADRSELSELLQTAPGIGPGVTRTLLVDLPELGHLGRREIAALVGVAPFAKDSGQYRGRRSIRGGRASVRTALYLAAMTASRFNPKMREVYQRLRDSGKPPKLAFIAVARKLLIALNAIARERRAWQP

SEQ ID NO: 334482 - protein, 416 aa, unidentified
MKIVRPICCGMDVHKNIIVATIGITNKKTRITEYIQETFSTLNPDLLNLKQWLINHKCFDACMESTGKYWIPIFNILEDEINIYLTHPKYVKAIKGKKTDKKDSKWICDLFKHDLIKFSFIPPKEIRALREISRYRYKLVGMRSSERNRYQNCMTVSNIGIGSVFSDPFGKSAQAIMKEVLESDIIEDEKILKCIHGSCKNKDKILDSIKHCNIETDQRFKMNESMTHMEELQVHINNCEIEIMKRAAPMFDRFMHITQLPGISTLSAILIISEIGVDMKQFESDKQLACWAGLAPANNESANKKKSVRISKAGQYLKPLLVQCALGAIKDKEGYFGIKYSRIKKRRGHKKAIIAIARMMLVSIYHMILTGGIFNPSDYESFKNPKPPIKQQVLTEESAIEFLKKSGFDVSKLTKP

SEQ ID NO: 334483 - protein, 383 aa, unidentified
MSTATTPGNEYSVEGAKLLMALELGQKWWKVAFGKGFDERARIRTVKAGNTKALMVQVVAAKRKLGLPEQAAVESCYEAGREGFWLHRFLLSEGVVNHVIDSASIEKSRRVRQAKTDRLDAAGLINLLVRHVLGDKKALRVINVPSVEDEDARRLHRELETLKKERTRSSNRILGLLMLHGVRLDGVRGDFANRFAKIRLWDGSRLPPGIRGQILREHQRMLALQEQVGELEAYRREAIRTAESEVLKKVADLHRIKAIGDNGSWTLVMEFFGWRRFRNVKELGALSGLAPTPYQSGEGNREQGISKAGNRHVRRMMIQLAWGWLRWQPDSELTKWFLRRFARGGKRARKVGIVALARKLAVILHSIWRSGDPFRWSEHPAVA

SEQ ID NO: 334484 - protein, 355 aa, unidentified
MTSVKYIGLDVHKESISICVRNSVGKVVMESVIETKASTILQFIDGLRGDLRITFEEGTWAAWLYDLLKPRVSGVEVCNPRKNALLKDGSKSDRIDANKLSEQLYMNNIKSVYHGEHGLRTLKELARSYLTISKDLTRVMNRLKALYRSWAIPCAGKEVYAPRHRAEWLGKISESGVRRRAELYYQQLDALCLLRQEVRRDLLLEVKKHKAWKLLRQIPGIGPIRAAVLMAVVQTPHRFRTKRQLWNYSGLGLETHDSGEYRAVKGQLQRAKKQATVRGLNEDHNHDLKDIFKGAAMRASTAAGPLHDFYENLLAKGRKPTMARLTLARKIAAITLIVWKKEVRFDANYLKLQAA

SEQ ID NO: 334485 - protein, 346 aa, unidentified
MMIIGCDFHPSWQQVSWLDTETGETGEQKLVHASGDAQRFYEQLAGPVLIGMEATGNSQWFIELIEDLGHEIWIGDAAQIRASYVRKQKTDKRDADHIRKLVVEGRFPRLWAPDREQRDLRQLVLHRHKLVMIRSRVKNELQHLSLNKGMQKKRSLWSQAGQKLLRELPLKPWAACRREDLLGLLAMLDEQIGKLDRAVQQAAEENPQSRLLMTQPGVGPNTALAYVLTIGDVSRFPRGKQVASYLGLIPREESSGGRQRLGAITKQGNRMLRSLLVEAAQIAVRYDPQFRREYLHRCHQKPKAVAKVAAARKLAVRLYWMLRTHVAYPEIVRIESSPRVALVGAS

SEQ ID NO: 334486 - protein, 317 aa, unidentified
MMQPPELFIGIDVSKTRLDGAARPTGLTFQQPNDPQGIAAVVALLTPLQPAVIVLEATGGFEVPLAAALAGAGLAVAVVNPRQARDFARATGQLAKNDTIDAAVLAHFAQAIRPPSRPLPDAAVRALQALLGRRRQLLEMLTMEQNRLGSCADAAVRTDLETHIGWLSGRLLQADQDIQQAIERSPAWLAKEDLLRSIPGIGRVSSRTLLAALPELGTLSNREAAALAGLAPYADDSGQRRGTRHVQGGRSAVRSVLYMAALSAARYNPALRAFKERLVRAGKKAKVILTAVARKLVVLANAVLRTGRRWDPALTTT

SEQ ID NO: 334487 - protein, 319 aa, unidentified
MIPTPVFVGLDVAKATLDVALRPSGEQWSVSNDEAGVAALVDRLRPLSPALVVCEATGGFERAAIAMLAAAGLPVVVANPRQIRDFARATGQLAKTDQIDAAILALFAERVRPTPRPLPDEAAQLLDALLTRRRQLLEMLVAEKNRLGFAPRPLHKGIQQHIRWLERQLDDVTQDLADQIERSPVWRAKDDLLQSVPGVGPIVSAVLLAELPELGALTHKQLATLAGVAPLARDSGTRRGKRMVWGGRAGVRTALYLAALCGRRWNPQLRRFYDRLLAAGKPKKVALIACARKLLTILNAMLRDTTRWEAPAPASQHSC

SEQ ID NO: 334488 - protein, 416 aa, unidentified
MKSAPSTLPEEPPNSVTSGIDWARDDHAVAVVDGRGRLVARETVEHSNTGLRTLLGLLAEHGAAEVAIERPDGPVIDALLEAGLTVVVISPNQVKNLRGRYGSAGNKDDRFDAFVLADTLRTDRVRLRPLTPDDETTLALRRACRARKDLVAHRVGLANQLREHLKRVFPGAVALFADIDSPISLAFLTRFDCQDRADWLSPRRLAAWLASAGYCGRVDPAVLHQRLTAAPRGAAGDHGTAEARITRALLAVLTSLVQQIKTISAQIAEQLALHADAHIFTSLPRAGQVRAARLLAEIGDCRARFPTPESLACLAGVAPSTRQSGKIRAVGFRWACDKQLRDAVTDFAGDSRRANPWAADLYNRARARGHDHPHAVRILARAWLYIIWHCWQNNTTYNPANHRALQRLIKDQQQAP

SEQ ID NO: 334489 - protein, 403 aa, unidentified
MEVLYPRCSGLDVHKDSVVACVRCVSPPGHQEVRSFQTTTTGLLALADWLTSHGCTHVAMEATGVYWKPVWHVLEGDFELVLANAQHIRNVPGRKTDVNDATWIADLLAHGLIRSSFVPPARIQELRDLTRTRKQLVREISQHSLRIQKVLEDANIKVASVLSDILGRSGRAMLAAIIAGENSPERLADLAQGTARKKTAELVEALRGRVTDHHREMLTLHLDLIEALESALQKVDAAVGKALAPIQARAQLLTTMPGVSDIVAQVVVAEIGVDMSRFPSARHAVSWAGLCPRNDESAGKRRSTRVRKSGTWLKTTLVTAAWAAVRVKDSYLRVQFLRIKSRRGPKKAILAVAASMLTAAYYMLRDGVEYRDLGPSHFDRHDRAKTIHRLVKRLKDLGYGVEL

SEQ ID NO: 334490 - protein, 412 aa, unidentified
MVREKLLYVGMDLHKAGHTAVLVNCWNEHLKTITVENKPSDFIKLWQKVQRVAQRHDLEPVYGLENAYGYGRSLAVWLIERGAVVKDINPALAYDQRKSAPIMQKNDEYDAYAVATVLINQLHKLPDAKPEDAYWTLSQLVSRRGILVKEGIRLKNGLHDHICVAYPSYHRFFSAIDGKTAMYFWKTYPSPGHLKGKSADELHSEFQTIVRGARKDRAAFILDCIRADGETLRDYQESRDFITRSYARCLENQKEEISFIEAEIKRMLEHFPYKLTTIPGVQTVTAAKLIAGIGDISRFRNANKLARYCGVAPVTFSSSGKGKEVSTRQGNRMVNGVFYFMAVTMVSLSPGTRKPFQPIFREYFERKISQGKTPSQALVCIMRRLVTIVYGMMKNKTEYRPFEPNEQTPENP

SEQ ID NO: 334491 - protein, 318 aa, unidentified
MSQPNQQCIGIDVAKLSLDIAGTTEFSPLSASNDEDGFMSILNVLKEWEISLVLMEATGGLEASVACCLQAAGYEVVVINPRQARDFARSMGYLAKTDKLDAAMLAQLAQIIDRHPDRSRYIRALPDEARAVLTAMVIRRRQLNNMLVAERNRRYPSHPQSRKSIDNIINALESELDHISQEMKQHVKVFLMKQAELIGSVKGVGEVTVASLIAELPELGKLNRREISALTGVAPLNRDSGKMRGRRTTFGGRAGVRATLYMAALVATQFNPAIKMFYQRLLTVGKPKKLALVACMRKLITILNTMVRKGEKWDASFR

SEQ ID NO: 334492 - protein, 311 aa, unidentified
MTQIVCGVDVSKRRLDAHVVPCGAFESFDNDADGIAALAGFCRRHGVQLVAMEATGGYERTPFSLLWEAGIACGMTNPRSVRRYAEAMGILEKTDRIDAGVIARFAIAKELRPTNPPTPRQQRLNALVARLRQVTDDLAVQKRRRGSAINEEMVSSLDQVIALLKRQARALEGEIGSLIDDDPLWARLDAALRIKGVANRTVARLLAELPEIGLYANKAVVKLVGLAPLAHDSGAKTGKRHIRGGRAGIRSILFLVADIVRRYDQSLADFHRKLTQAGKPKMVVRIALARKLLVRLNAKAREAREQYALAT

SEQ ID NO: 334493 - protein, 339 aa, unidentified
MFYSGIDQHKLFSYITTVDSDGIIIKEAKLNNNNFDILNYFSSLGKEHIATVETTGGWYWINDLLSSQGIDLKLAHAKYVKAIAYAKVKTDKVDSHILAQLLRLNFIPEAYKISDDIRTLRDTLRARLRLSVKRTSCINFMHRMLEKFNISDPALLNDFYKLQYQQFDIQAKLLKEQMLTLEKSIYPSLIPNQDIQRLLWIPGIGKMNAFTILLEVGDINRFESEKNFFSYCRLTPSARNSGGRVKQKSSSKDGNRYLKIVFSDAAVHALQYYPVIKRYHNSKLRKKKKQVAKAIISKEIARIVYYVLKYKSDFNNKFKGIELEHKKSVQWPRITSPDV

SEQ ID NO: 334494 - protein, 376 aa, unidentified
MENDSTLYVGLDVHKDSITVAYAIGMGDVELLGKIGTMQIDVDRLCKRLLAKSKRICIVYEAGPCGYGLYRRLVEKGFDCMVCAPSLIPRKPGERVKTDRRDAIKLVRSLRAGDLSAVHVPTVEDEAFRDLARAWSAAREDLKAARCRLKSFLLSHGVHYLGRPDWGATHRRWLSTFSFDSAWQQLAFDEHRRTIEDRLAQCERLEVALREAVANWRFYPAVLALQAMRGIQFTSAVGLASELGDLSRFEHPRQLMAWLGVTPSEHSSGGKRRQGSITKTGNSYARKMLVESAWSYRHPARVSIDIQRRHEGIPKPIIDRAWDAQLRLCRRYRKLVARGKSAQVAIIAVARELAGFIWDIGRLGMSLASPQCSQPA

SEQ ID NO: 334495 - protein, 414 aa, unidentified
MLLLDSSEVESTAADGVFIGLDWGNSHHQLCILDAAGRMVHQGKFAHDIAGARGLTERLHRHGPVQGIAIERSEGLLVETLQQQGHRLFCVSPKMSARARERYRLAPSKSDAFDAFVLADSLRHEHRHWRPLAAPSSLLAELRALTRDRERLIWNQRDVENQLRAVVLAFHPGVLHLFSSLDRDITLAFLRDYPTPAHAGRVGVARMAAFCARHGYSGRTRPELLVERLRANLLSASAGTTAGKAFTAALFVEQLELLNTQVRAITKRIRERLAEHPDAAIFLSFPGMGEVTAAIMLAEMGEDRARFPTAGVLLAETGTAPVTRSSGRSRTVKFRYAANKRMRHAIDWWAFVAVRENDWAHEAYWQARARGQLHNRAVRGVGARWTRILWRCWTDHTIYDPALHLKGPPASITA

SEQ ID NO: 334496 - protein, 349 aa, unidentified
MLADELDYVVGVDTHRDRHALAVVAAPSGGVVAQRSVRASVRGYAEAVRFADEFAPGARVWAVEGAGHYGVGLVRYLSLHGETVLEGGRGPRNERRLRGKDDPLDAVRAARATLASDRRALPRTGERREALRLLLIARRSAVEVRRRALVQLRSVIVTAPDPLRDQLRALPERRLLERCSRFRRSSSSPVDELAAKLVLRTLARRIEAATAEAEQLEREILGHVRVLAPRLLDEPGIGPIVAADLIVAWSHRGRVRSEAAFARLAGVAPVPASSGQTVRHRLSRGGDRQLNRAMHTIVLHRRQHDAATRAYVERRVAEGKSRREATRLLKRYLARHLFRLLQQTEPLMT

SEQ ID NO: 334497 - protein, 477 aa, unidentified
MLDGVQLLQAMNADGARHVPDGAPTSFVPARWRPYLKHARAAGEENLYKHYSELCVLFALQGALRSGEIWVQGSRRYANAASYLIPTEDWPAKRQDVLELTGMPGSFAERLQMIDMALHGWLSAHRVTHVAMEATGVYWQPVWHILEEDFELTLCNARHVKNVPGRKTDVSDAQWLCQLMEAGLLRGSFVPPKPQRRLRTLTRYRKTQIAERQREANRLHKALEDTGIKLDCVATDILGKSGRAMLDALVAGTTDPEVLADLALGKLRSKIPALRDALQGRFEPLHALLIGSILAHLDFLDEHISGLSAAIEEQIAPFAAARDLLMSIPGVGQRTAEVVIGEIGVDMTCFPSAGHLASWAGQCPGNDQSAGKRRSGRTRKGSKNVNLALKDAAMAATRTNGSYLQALYRRKRTALGHGRAIGAVKHSMICACWHMLTTGQLYDDLGGDYYARRDPERQTRRLVAQLQRLGHTVTLQR

SEQ ID NO: 334498 - protein, 388 aa, unidentified
MVIDVAGRVLLSRRVVNDEAALLELIATVLRVADGADVVWATDLNGGGAALLIALLAERGQQLLYIPDRIIHHAAATYRGDGKTDAKDARIIADQARMRTDLQPVRGGDQISTDLRLLTARRTDLIFDRVRAINRLRATMLEYFPALEAAFDYSKKAPLILVAGYQTPDGIRRIGASRLAAWLKKRGARNPAAFATKAVDAANAQHTTLFTQAMGARLVARLAEQIQAIDADIAQLDEEIATQFEQHPDAPILLSMPGFGVVSAATSLANTGGGDLSAFETVDRLASVAGLAPAPRDSGRTNGNHHRPRRFNRRLMRTCYLAALSSLKNSPASRTFYDRKRAEGKSHKQAVIALARRRMNTLWAMLRDRTSYQEATTPQSTSAPPIAA

SEQ ID NO: 334499 - protein, 385 aa, unidentified
MKKDSIAQGSLNKPRHRQASKGRVKEIKRSAIAGIPEQTVGLDIGDKTSRYLVLDSEGGVKTERSVATTKKGMSQVFAKMPCSRIAMEVGTHSPWLSRLLQSYGHEVIVANARRVRLISHSSRKDDKMDAQLLARLARVEPALLYPIRHRGERAQQHLAMIKARAALVEGRTGLVNSARGLTKSFGDRLGKCDADQMGVAKLEGLPAGLQAALEPLLASVEEMTEKIQGYDKQLAEIARKEYPETALLEQVTGVGVLIALTFILTLDDGDRFQRSRDVGCFLGLRPKRHESGASQPQLGISKEGDVYLRKLLVQGAHCILSRRGPDTDLKRWGLKLAGQGDKNAKKRALVAVARKLAILLHHLWVTGEVYEPLRNSQAAPAKAVA

SEQ ID NO: 334500 - protein, 365 aa, unidentified
MKIIYWIGIDDHADKWTIAQYRGDEERPSKEFELVPDEKGYRRLLSHLKGLDGEVRIVYEAGPCGYELYRRLTKAGYKCQVAAPALTPRKPGERVKTNRRDAGKLGRYLRGNDLTFVVVPDDDRESLRDLIRSRESTMKDVGRMRKQIIHLLLRYGHRYREGQAWTLRFWSWLKKIELAGAHSRFVLDEMISELEHRISKLDRYDEQIELAAQKPEYQPYLAALRTLRGINTLSAMTVLSEMGDLRRFCTAQQLMAAVGVVPSEYSTGDKTNRFAITKTGNAHVRRVMVEAGWQYQRRPTLGRTIKARRKDQPKEIVEIAEKCEKRLNSKFHRLTSRNKKSTVAVVAVARELLGFVWAIGQIAHP

SEQ ID NO: 334501 - protein, 396 aa, unidentified
MLQENEGTISTQDQPTGSDIFVSVEMSRSKWVVGIHTPLADKIGLHTMACGDVEALMALIDRARVKLVASGSNSPAAMICYEAGYEGFWLYRRLIALGIRVVVIDPASLLVDRRAKRAKTDRIDARAMVRALMAWARGERQVLREVRVPTVEQDDARRGLRERQRLVKERTGHGNRIKGLLKTQGIMDFDPRAADAPARLDAIVTGDGRPLAPCLKREIVRELERLALVMRQIDQVETERDAVVQACDAGAGTDALAAEPEREAAMIGELNRLKGIGMNDATILVREAFWRDFRNQREVGGWSGLAPSPWASGSVLRDQGITKAGPPMLRAHMIQMSWRWLLWQPDSGLAQWFRKRTEGATGRMRRIMVVALARKLLIALWRYATTGMVPHGAIVT

SEQ ID NO: 334502 - protein, 325 aa, unidentified
MQGREKGVALMSEEKQQVFIGIDVSKKELEVALRPMGNRSVFSNNEEGIAFLVDFVRSCSPMLVVLEATGGLETGAVGALAAQGCPVVVINPRQARDFAKATGKLAKTDSIDAHVLAHFAEAVRPEVRGLKDIETQNLEALNTRRRQIVEMLTAEKNRLLMAPSWTRGDIRSHIDWLEKCLSRVNKDMNKLLKKSPVWREKDEILQSTPGVGPVLSVTLLADLPELGKLNSKQIAALVGVAPLNRDSGTFRGRRAIWGGRASVRSILYMSAMSAIRFNPIIKEFYQRLRSAGKIHKVAVTACMRKLLVILNAMIRNGHCWNAACP

SEQ ID NO: 334503 - protein, 407 aa, unidentified
MNAVGIDVSKGKSMVAALRPMGEVALAPREFPHTDVGLEQMAYAIINLGEDTKVLMEATGRYHEPVAAALHEHGIFVSVLNPLYVKQSGGGSIRKVKTDKADAMKIAKYALDNWVKLQEYTPMDAIRQQLKLYSRQYDLYMKTNVALQNNLISLTDKVYPGVNELFSSPERPDGHQKWVDYVMTFWHRDCLCRISPEEFTERYRKWCKRKGYNFSPDKAFDVYVSSCEPYTTLPRNSNTKMLITTAARQLTAARAATAALRQEMICLAQQLPEYETVRAMYGVGDVTAAQLIAEIGDVRRFAHRSSLVAFAGVDPAVNQSGKHAVQSNPATKRGSPHLRKILYQVVCTYLKKSPANEPVYQFLDRKRAEGKPYFVYMTAAQNKFLRIYYARVKECLTAAGCEPPGQE

SEQ ID NO: 334504 - protein, 385 aa, unidentified
MKHTVPPSREGEQREEAQSMRSFIGCDAHRKYSVFVAMDEQGRTTAPMRVEHERKQLRLFLRHIPPGTDVAVEATGSWYWLVDEIEAAGLAPHLAHPFAAKQMAGRGGKKTDSVDARCLATLLRNGTLPETWIPDAANRDLRNLLRTRLAMREYQTGIKNRMVAAINCYGLRDQEDDGDLFHGKGRVRLSVYTGRLPKHTREAVIRQWSLVDELEQQIEELEQQIKIELKPIAAAQHLKTLPGVGSILGATIYLEIGAVNRFASAQRLASYSGLVPVVHASGGRVFYGPTSNRSNPYLRWAFVEAANLASARRKTHPQRHVSRLYERLRPGKGHQKAVVAVARHLAESAWWILTKLQDYREPQPAVAAVSSSQKRVSALLQSSPQ

SEQ ID NO: 334505 - protein, 310 aa, unidentified
MNKSAGIDVSKQSLECGLLPEGPAFSVNNDENGIIDLVERLKRFGPERVVLEASGGFETAAASAIAAAGLPVAVVNARQVRDFARAKGLLAKTDRLDAQLLAQFAAAVCPPLRALRDEQQQALAELLTRRRQLVAMRAQEATRLQQASAPLRPQIKQHIGWLDERIEELDVDLRAQLRSSEAWKIKENLLRSVPGVGRVTCTTLLIALPELGHLSHKQIAALVGVAPFARDSGKHRGKRAIWGGRAQIRCVLYMATLTAIRCNSVLKRFRQRLQAAGKPFKVVIVACMRKLLIILNAMLRDNQPWTPSPA

SEQ ID NO: 334506 - protein, 312 aa, unidentified
MTEHCYGGIDVSKDRLDVMVLPDRKSFSVDNNAAGYSELVKRLRGLSIAAIGIEPSGGYERAVIRALLAADLSVRRINPNKLRQFGRARGVLAKNDRLDARLIAEYVAIMPTRVVQRDPATEQLAEVVTMRRQLCDEHVAVENQTAHLEDAMLRRLNKRRLARLAADILLLDRRMAQIIASNANLTRRYELLTSMQGVGPTLAFTLVALLPELGQMSRKQIAALVGLAPYDFDSGRLKGHRCIYGGRLPVRNVLYMAALSACRYNPALKVFYHRLAATNKKPKVIIVAVMRKMITTLNAMLRDNVAWQPKSA

SEQ ID NO: 334507 - protein, 426 aa, unidentified
MSEVDSVRQEPQFAAFVGIDWADQKHVWCLQAVDSKKRESGELEHTPEAVEAWVGQLCQRFPNRPIAMAVEQSRGALVFMLSKYEPLHLFPVPSTMAANMREALYPSGVKDDPRDADLLLDLLLQHRDKLRRLSPDTEATRRVQNLVEERRKLVDEKTAQINRLTSHLKIYLPQILDWFEHLDTELVCALLERWPTLEELQRVPPAKLRTFFRKHRCRDQQLIEHRIVAIRETIPAIRDRAVIEAKSAVVKVIVQLIRSLVEGIADLDEKIEEAAAVHPDFFIFESLPGAGAVMAPRLLAAFGSQRERYGNAGEVQSYTGIAPVTEKSGKKKWIHFRWGCPKFLRQSFHEWAGHSIAYSVWARSYYQQQRSKGQNHHAAVRALAFKWIRVVFRCWKNGVAYDESKYLASLARRGSPLAVAATAKTL

SEQ ID NO: 334508 - protein, 318 aa, unidentified
MLIHYIDIAKRNFVIAVSSLSKTKTETNNPKGIAHTIEYLKKHKVALVVTESTGGLEIPAAKAIRRAGIAVIIANPRQTHQFAQSQPLTKTDAKDAKMPAFFAQMTAQKEDSQTMPYHPPTEVEEVLEALVNRRNQLVDMRTAEKNRLHQVHETQVGSVKQLIAHFDRLIDELDKQIDDHTHTHFDGKAQVAEQIKGIGSITTATLMAMLPELGRLSHKRIASLVGIAPHPRESGETKFKSRCFGGRSAVLKALYMATVAATRFEPLIRDFYQRLPSEGKPYKVAVTACMRKLLTISNARMRDYFAENDTAENGIRTA

SEQ ID NO: 334509 - protein, 308 aa, unidentified
MEAQRKALSFKGQNIYIGIDVHLKSWSVTLMSEATQLKRFSQSPDPDALYAHLVRNYPEAEYHSVYEAGFCGFWIHYRLVGLGIHNIVVNPSDVPTTTSEKLRKTDAVDSAKLARSLRSGELKGIYVPGSESLETRSLIRLRDSITKDQTRLKNRIKSHLRYLGIEIPEEFSGPGRCWNRRFVVWLKGAETGTAYGRQTLDFLVRQYEALRGQRLEMLRAVRALSRTERFEKPLENLMTVPGIGQLTGMSLLSEIDDIRRFKSADQLAAFIGMIPMCHSSGEREGVGDITVRRSGGSGPSLSKPHGWR

SEQ ID NO: 334510 - protein, 338 aa, unidentified
MRLYAGIDLHANNSYLAVIDETDELVEAKRLPNDIESVRRVLEPYRENLAGIAVESTFNWYWLVDGLEESGYKVHLVNTLAAQQYKGLKYTDDKTDARWLAHMLRLGILPTGWICPREKRAVRDLLRRRSQLVRQKTANRLGLRNVLERSGAKRLSGNALKRVSENDLTEWIEDPNVRLSMQASLAVIDTVSEQIERIEKTVAEHAVLDDSYRLLTSIKGIGATLASTIQYETGDIGRFSAVSNYVSYCRLVRAERNSNQRVKGLGLRKNGNAYLSWAFHEAAHFAVRFQPDARRWYEKKRSRTCPLVAIRALAHKLARAAYFMMRDQVPYEPKRLFG

SEQ ID NO: 334511 - protein, 400 aa, unidentified
MSTSHKRIWVGVDAGKGHHWAVAVDAAGETLFSTKVINDEAQILTLIETARERADEVRWAVDISGRASTLLLALLVANGQRAVYVPGRTVNRMSGAYRGEAKTDAKDAKVIADQARMRRDFAPLETPPELVSTLQLLTNHRADLIADRVRLINRLRDMLVGICPALERAFDYSAAKGPVVMLTEYQTPAALRRIGVKRLTTWLERRKVRGASDVAAKAVEAAQSQQTALPGEKRAAKLVCDLAHQLLALDERIKDNDREIRETFRTDDRAEIIESMPGMGPILGAEFVAIVGDLGGYKDAGRLASHAGLAPVARDSGRRTGNYHRPKRYNRRLRHIFYMSAQTSMMRPGPSRDYYLKKRSEGLLHTQALLSLARRRVDVLWAMLRDKRLFTSAPPVTQAA

SEQ ID NO: 334512 - protein, 340 aa, unidentified
MRTTYVGMDIHKNFIQAAAMDEQGNILREQKFKTTDVEIKRFVESLKAQKIQAAIESTCTWYHVYQALDSLGVQTTLVNVRRTKVIAESKIKTDPLDAKNIAHCLRTGFIATAYIPPKPVMEQRNILRHRLSIRKELTRYKNKIHAILLMNGIYQPFSDVFGVGGKQFLKTVKLPDSARYNLDSYLHIVETLTHEKTQISKKIETLCKNNQQAMLLTSIPGISYYSAMTILTETGDITRFPNPKKLCNYAGLVPRTIQSGNHLYHGRILKECNQHLKWILNQDVHSHIRHCPNSPITKLYHRVEQKKGANKATVAASRKLLTCIWHMLMKNETFEYSNDD

SEQ ID NO: 334513 - protein, 337 aa, unidentified
MNLTTVGIDLAKNVFSLHGVDAHGKTVLRKTVSRARLLEVMANLPRCVVGMEACTGAHHWARQLTALGFDARIIAPRFVIPYRKSGKNDGNDAEAICEATARPAMRFVPVKSAEQQAILCLHRIRQALVAERTAQINQVRGLMAEFGLIMPKGRYPAQHHIPDLLEDAANGLPGLARRLLHDVWQRILHLNQQILAYDREIEQLAKASATAQRLMAIPGIGAITATALVASIGMPQQFKNGRQLAAWLGLTPRQYSTGGKTRLGRITKQGDKYLRTLLIHGTRAVLAALRDKRDKTSCWLRELIARRGYKRAAVALAAKNARIVWAILTTGQEYRTA

SEQ ID NO: 334514 - protein, 344 aa, unidentified
MQIARIGLDLAKYVFEIHGVDCHGKTILCKTLRRHAVSAFFANLPPCLVGMEASNGAHFWAKAISELGHDVRLISPQFVTPYVKSNKNDRNDAEAICEAVGRPNMRFVPVKSAEQLAVQAVHRIRSRLVADRVRLVNQVRGLLAEHGIVVAKDIGNLRRALARIVGDNDDQALNPLVCALMAELREELIELDARIAGYDRKIRELYRNSEICQRLGKVEGIGPVTATALIAAVGDRSSFKNGRQFAAWLGLVPKQRSSGGRARLFGISKRGDRYLRTLLIHGARSALGRVREKQDPRSLWLGKMRQRRHPNIVAVALANKNARIAWSLLTSDSVYDARLSVRAA

SEQ ID NO: 334515 - protein, 350 aa, unidentified
MLIIGVDFHSRFQQIAMVDMETGELVERRLDHRDGEVEKFYAGLQKPVRVGMEATGYAQWFERMLAKLGHELWIGDAAEIRAAMVRKQKTDARDALHILDLLLANRFPRIWIPSPAERDLRQLLRHRHKMVCLRTSVRNQLHALAMGQGVYRRRKLWGAGGRTELEALGLDPWASRRRQELLELLERLDPSLAELDRAVAKEAEQRPAARCLMEQPGVGPVTALMFVLTIGPVERFRRSKQVVSYLGLNPRESSSGGRQRLGAISKQGNSMARFLLVEAAQTAVRYDEELRRDYQRLKFRRGTAVAKVAIARKLAMRLYWKLRKLSSPAPPARMQGSSEHPVVGASLSRN

SEQ ID NO: 334516 - protein, 424 aa, unidentified
MQNTAARKRKQVPEAYLVVGVDPHKKRHAGVAITQDFTTQAKFKFDNTREGMELMLDRAKVEMLKTGCRGVIFAIETGGHYWRNIAYYLDERGIPFRFINQYTLKRRREGKDINRRKNDYRDSEVAAQLLCTGEFVESVIPQGVYAELRTSHNAYQRLVKERTRITNLVKGLLDALFPEFTQVFKDPCGQTALSVLSTCPIPRVIAGMTEVEFVATIEARHKGRRLMRKKLRALHYLAKTSIGIDAGARSVSSEISFLVDKLRLIRRHICIMEGTLVRLVDETEEGKYLLSIRGLNYIAVAGLLAELGCFKLYRSAKQMIKMAGSNPTESESAGKKSSKTPMSKQGRPLLRYCAWTSVIPMLRFNPDFRAWAKQRRERPAHANPLSGREIVGAALNRLLRLAFALVKNQTYYQDVKPVMTPVVV

SEQ ID NO: 334517 - protein, 367 aa, unidentified
MTCERSTLVNSEKYIGLDVHQATISVAVMDSRGKLVMESILETKATTILDFLAGLRGTLAVTFEEGTWAAWLYDLLKPHVAKLVVCNPRKNALLKHGNKSDKIDAHKLADLLRLNDLEPVYHGETGVRMLRELARSYLTIVKDLSRVMNRLKALYRSWAIPCAGRDVYYTHHRSEWLGKIPEAGTRRRAEQLYQQLDMLQHLRQQARGELLTESRKHAITAKLRNIPSLGPIRSALAVALIQTPHRFRTKRQLWAYSGLALETRTSGEHCYVHGQLRRSKKQISIRGLNQDHNHDLKGLFKAAATRASVQPGPFQDFYQRSLTKGIKPTMARLTLARKIAAITLSMWKKGENFDAEKLKSQPLERLR

SEQ ID NO: 334518 - protein, 424 aa, unidentified
MSRKKSVAAGLQALYARACGLDVHKKLVVACVRILNSQDGTVQSTLRKFGTMTADLLELRHWLAELGVSHVAMESTGVYWQPVFNLLEGHFEVWVVNAQHIKKVPGRKTDVKDAEWIAQLLQCGLLRPSFVPDRQQRELRDLTRHLTKLVQQRNAVDNRIQKVLETANIKLGSVASDVLGVSGRKMIEGLLTGEKDVTVLADLAQHKLRHKIPELQRALQGELTEHHRFLLRELLGQYDFLEKEIARVSERLGAVAPPSFRAAVEQLDAIAGVGERGARALLAETGIDMSRFPTHKHFASWAGRCPGNHESAGKRKSGKTPAANRHLDAVLTEIAHAAVRKKDSYFKAQYHRLAGRRGKKRAIGAIKHSLLITVYFMLRDKKPYKDLGSDYFNKLNPQQRIGYHVRRLQELGQKVELSPMADAA

SEQ ID NO: 334519 - protein, 364 aa, unidentified
MKRKVYVGMDVHKETIQIAYLTSNSKEILKEQQIKHNEVQIKKFIKKLKTEWNEIYCCYEAGVTGYPLYRYLKSLRVNCILVAPGKIPRQNTDKIKTDKRDAIKLARLMRSGELESIHVPSEEDEAVRDYLRSRDSLRLDLGRNRQRLMKFLLRKDIKYSTTKYWTVSHYKWLNNLHFNNEILQETFNDYYSRVRVQEENLKSMDKKIQEIAESEPYREKVGILRCFRGVDYLTAMFLLCEVNDFKRFKTAGSFMSFLGLVPGEYSSGSKRKQTGITKTGSPRLRRILTEAAWQHRFPGTGSKIITARRSGQPALVVALSEKASLRLHKKFRNLQLRGKTPQVMITAVSRELSGFLWAAMNLVA

SEQ ID NO: 334520 - protein, 343 aa, unidentified
MGEYIGLDVSLKDTAISIREDGKRIWRGKCASDPKLLAQMIRKHAPHAKRVVFETGPLSTWFYHALTAEGVPAICIDARHAQKVLDETLNKTDANDADGLAQLAEAGFYKAVRVKAFDSMLTRTLVAARNQLLSISTQLSNQIRGLMKTFGLILPKGTGRVFDSNVREFLAGNDGLARIILPLLEAWRDIRKRAADLDHQLLAAARQSQETKLLMTIPGIGAVTAVSYIAAVEDPGNFKTSRSVGAWLGLTTRRYQSGEVDYDGHISRRGDNDLRRLLFEAATVILTRTSARSESSIKTWGVKLRERVGFKRAAVAVARKLAVVMHSMLKTRQVFDASAGTPA

SEQ ID NO: 334521 - protein, 345 aa, unidentified
MSNVPVFVGLDYHQDSIQVCVLNQQGDVLLNRSAKNDCREVGRIVQPLGVVERVGIEACCGAADFGEELVQELGWNVSLGHPAYIARIKSSPDKTDFSDSRLLADLTRVGYLPRVWLPPANIRELRQLVNHRQRLVDHTRSLKLQVGAVLREQRVKIDRDRGSRWSKAWTLSVRDNERLSKHARWIVNALLEEISHTVGKIAQTAERLGEATLDDPVIKRLKEQPGIGEVTAWVLRAYIGRFDRFKTAKQLSRYCGMSPCNTSSGNKTADSGLIDGCNKLLRMTVVQAAHRLMRTVERWSRLAASLEKRGKPTCVIVGAVGNRWLRNLHHAMKHQPTERDPVAMK

SEQ ID NO: 334522 - protein, 349 aa, unidentified
MLVDEVDYVVGVDTHRDEHALAVVAAAAGGIVAQRPVRATNRGYAEAVRFAEQHAPAVRVWAIEGAGHYGAGLARYLSGRGETVLEAGRGPGNERRLHGKDDPADAIRAARAVLASETLALPRSGQRREALRLLLVARRGAVDVRRQALVQLRAVIVTAPDQLRQELRGLPVQRLVQRCSRFRRSSLRAPDQLATRLVLRSLAHRAQSATAEAAELEAGILAHVRALAPQFLSEPGVGPIVAAQLIIAWSHPGRVRSEAAFARLAGVAPIPASSGQTVRHRLSRGGDRQLNRALHTVILHRRQHDRATKAYIARRVSEGKSPRDATRLLKRYLARHLYRLLEHGTPIAA

SEQ ID NO: 334523 - protein, 320 aa, unidentified
MMTQNDLVVVGIDVAKDKVDACIRRFKLRQTFPNNPQGRRKLIVWLRKYQVGKAVMEASGGYERQWRNVLHNAGIEVRIVDPRRVRSFAQSAGRLAKNDPIDAEMIAWFAETFSQATGQIPDAAREELAGLAKARKALMDVKIRLQAQNEHAAPEPARKAHARILKSLAAEIDKLEAAISAKVKATPEFAERAEIIQSVPGLAQTTSAILIAGMPELGQVSDEVAAALVGLAPYDDDSGKRRGERHIKGGRRWVRNALYMPCLGAATQNNPVLRVFYQRLIAKGKEPKVALVACMRKLIIILNTMLARRQKWNPGRHAMA

SEQ ID NO: 334524 - protein, 363 aa, unidentified
MEKSIRWVGLDVHADSIAIAELDEDTKEVRTSEVDPSPKAIAKRFKRMAVGVDLRVCYEAGGCGFELYRQLASLGIECVVIAPSLVPKKPGDHVKTDRRDAIRLARALRAGELTPVYVPTHEQEGARDLVRARDDVRKDRITARHRLSSFLLRRGHRYSGATRWTGKHREWLAELRFTEATAQKAFEHYRAAVEYLDLRLKALDAEIAALAQSKAWKARVERLSSLRGIATLSAMILLTELIELRRFEHPRKLMSYVGLVPSEHSSGAKQQRGRITKAGNSQVRRILVESAWTYKRASASAAIKKQWATQPPEVVRIAHTASARLSKRYARLAARGKPQKAVVAVARELAGFVWALEQLPLAS

SEQ ID NO: 334525 - protein, 355 aa, unidentified
MNQEKYIGMDVHDASISVAVKNAQGRLLMECVLETKAATILEFIQGLRGTLALTFEEGTLAAWLHDLLKPHVSRLVVCDPRKNALMRDGNQNDRADACNLAELLRTNQVHAVYHEKHGIRTLKELGRSYLALTQDSTRVMNRIKSVYRSWAIPCAGTNVYSRRHGGEWLAKLVEPGVRMRAEHLYQELDSLEPLRQAARRELLRESRKHAAVKLLRQIPAIGPIRSALLVVLLQTPHRFRTKRPLWAYSGFAVQTYDSGEYRFVRGKRQRNRERITVRGLNRNHNHDLKNLLKGAAVSAMERPGPLQDFYVALVEKGMRPSMARLTLARKIAAIILIMWKKGVSFDPKQLQRQAA

SEQ ID NO: 334526 - protein, 350 aa, unidentified
MLIIGCDYHPGFQQIAFVDSESGEVGERRLSHREEAEQFYRELKQRNLAVRVGMESSGHSRWFERLLHELGFELWIGDAAEIRTKRVRKQKTDRQDAQLLLRLMLEDRFPRIWVPDAANRDMRQLLWHRHRLVQMRTRVMNQLHVVALNEGLRRKKALWRPAGRAELESIVLAPWASRRRQDLLNLLDQLTPKIQELTRALEEEVEKRPVTRRLMTHPGVGPLTALAYELVIGTPERFHCGKPIASYLGLVPEEKSSGDRRRLGHISKQGNVLLRFLLVEAAQVTVRSHPEWRHKFFHLAQRRGRKIAKVAMARKLAVHLYWMWRQGCDYGPWQKLGSHAGEPGNLHGVQ

SEQ ID NO: 334527 - protein, 316 aa, unidentified
MGGQGIYVGVDVSKARLDVAVRPSGEGFAEANAKPAVSRLVKRLKALDCTRVVVEATGGYETIIVAALYAAGVPVVVVNPRWVRNFAKGMGWLEKTDRIDAKLLALYAERAELKVQQLPDEATRELAELCARRIDVLEMMETERNRLEHASSAVRRAINSHIDYLRKQLKRIEHDIDGAVRGSELWRHKDELMDSVPGVGPTLRACMLAWLPELGQLNRGEAGKLVGVAPLPDDSGTVRGVRRIFGGRAPLRKVLYMATMGAMLHNPHLRAYYDGLRARGKLHKVALVATMRKLLLILNAIIKTDTPWSESCLENA

SEQ ID NO: 334528 - protein, 416 aa, unidentified
MSVALPQALFFTGIDWASAEHAVCVLDAAGKITARFTIKHSAEGIASLVRRLARYGDPAGLPVAIERPSGRLAGLLLEAGHPVVPVSPNAIKTWREGEVLSGAKSDAGDAAVIAGYLRLRYHRLAPAAPYCDETRALRAAVRTREDLVQMRVAATNQLSALLEAHWPGARAVFADVESPISLEFLTRYPTPAAARHLGHKRMAAFLVKHGYSGRRPAAQLLARLHGAPAGTAGRALTEALQDAVLAVVAVLRALNGAVKDLDRSVAAHLGEHPDGPVFTSLPRPGQINAAQMLAEWGDCRPAYDGPDCVAALAGVTPVTKQSGKYRGVEFRWACNKRFRRAVTTFADNSRHASPWAAQIYAEARAAGKDHPHATRILARAWIRVIWPCWVNGVPYDPARHRAAAALAGQTPSQPAA

SEQ ID NO: 334529 - protein, 395 aa, unidentified
MFYCGIDIAKYKHEATVIDQAGAAVLESISFANSKEGCEKLLALFQRLDISKEDLLIGMEATGHYWLSVYGYLLEQGFEVKVINPIQSEAFRKMYIRQTKNDRKDSFIIAQIMRFGQFSATNLAEEVIVAMRQLSRYRLALVDACGDCKRRVIALLDQVFPEYDSLFSDTFGVTSKEVLSQYPTPEDMLTVSTRKLTTLLEKASHGRFGKEKAEQLKAAAASSFGVNFAKDAFAFQIRQLIEQLEFLEGQVAELEEQISSLLKQTGSFITTIPGIGDTLGAIILSEIGDIHRFDAPNKLVAFAGLDVRVTQSGEFTGTRQKISKRGSPYLRRGIWLAASRAAFCDPILSEYYQGLRARGKHHLTAIGAVSRKLCNTIYTILKENRPWQPVPPKGK

SEQ ID NO: 334530 - protein, 411 aa, unidentified
MEVLYERCCGIDVHKRIVVACLKCGKKQELREFGTTTEELRSLTEWLSNNDCQMIAMESTGSYWKPLYNIFELSALDAMVVNARDMRNVPGRKTDVKDAEWIADLLQHGLLRASYIPTREQRELRELSRYRKSLIEERARELNRLQKMLEGGNIKLANVVSNINGRSARNLLTHMLKHDTSLTREEVSAMVHGRLRHKVEAIMKALDGFLTPLQKQLMLKVVDHIDDMTKRIGEMDDMMNQYLTEYHEAIQKLDEIPGIGRQSAETILAETGLDMSRFPTAKHFSSWAGLAPGNNESAKKRRHGRTTKGNVTLKTTLIQCAKAAVKKADSFLSAQYQRLVVRRGANRATVAVAHTMLIAIYHILKNNVPFSDLGANYYNQFNTQSKVNHYLKKLRQLGWKPDTATIPAAAI

SEQ ID NO: 334531 - protein, 430 aa, unidentified
MEEVDEQELHVERVAALDLGKAALEACVRVPHETKPGRRLQEVRGYATTTRALLGLADWLHSWGVTRVVMESTSAYWKGVFYLLEAEGFDCWLVNARDVKNVPGRPKTDKADAVWLAKVAERGMCRPSLVQPRPIRQLRDLTRYRRALIQDRTREMQRVEKLLEDAQIKLSSVASDIFGVSGRAMLEALIGGQRDPKVLAQLARRRLRVKIAALEEALRGFFTDHHAVILRMMLDNIDRLSEQIAALDATIEQAIAPFAAQVAQLDEVTGVGVTAAQELIAEVGGDMGCFPSAAHLVSWAKFCPQVHESAGRKKPKGRGKGNPWLAGTLGNIVATAARTDSFLGARYRRIAKRRGKQKAMVAVGNSVLVIVYHLLSDPEARFTDLGAEHHEARIDKQRRARNLAAQLQAVTGQRIVIRDGKAVIVQPEAA

SEQ ID NO: 334532 - protein, 311 aa, unidentified
MTRNHIGVDLSKDVLDVFDPCRGETRIVNQPKAIARWAARLGPDDFVVFEATSGCDRAVRAVLEAAGRDFVRLNPLHAWHFARSLNLPKTDRVDARMLARLGVERQPDPDPGSDPARAALRALSQRRDQLKRMQTQEKNRLSAASLPRVARDIRAELGNLARRIARIDKAIAEHIAGHPALAEDARLLRTIPSIGPVATTEVLAHLPEAGHVDRREVASLAGLAPRAHESGKYKGRRSLGDGRRHLRRALYMAALSALRHAGFLSGFVARMKADRKPAKVILMAVARRLLVIANAILRSRTPFQPQVSNAA

SEQ ID NO: 334533 - protein, 346 aa, unidentified
MSEIKIWFGIDVSKSTFDSSVFVSGSKMDISSIPKSSFRRTREGVEQFKEWANEQIISLNFPSGSNYGAVMEATGSYSLALVSLLMEICPKCSPAIADPKSVHAFGKSLRIRNKIDKADAAVLAIYGAERKPEKYKVAAVEYSTLKELARQRKSLVEMLTAANLKAKEETKVKIINNVRNEVIRNLKKSIDKIELAIKKHVNENQSLKEQVAILTSIPGVGLTIAAVMIGELGDIRRFSSSKKISAFAGVSPRIYESGTSVKGKTRMCKEGQGRLRQALYLTAISSTRGNNGFARFYAMLVIKGKSKMSALGAVMRKMICVMRRLIIDKSLYNDSLVTPIMEGGNC

SEQ ID NO: 334534 - protein, 415 aa, unidentified
MKEEEKSSHCRYVALDIHKHYSVVAGVDRDGQEILPPCRVEHLDLENWLPKHLLRTDRVVIESTTNAWHVYDLLEPLVAEVLVANPIKVKQIACARVKTDKKDTLILARLLAANLVPTVWVPPKHVRELRQLISQRRRLVGMHTQVVNRMHSVSHRHHLGHPKGKRFQEKDMGWRESLGKMERFQLDLDLETKKYLKMQIDQITKELGSMSHQEPWASQMMYLMQIPGFGVVTGMTVLAAIGDIARFETPKALASYSGLTPGVEQSGVKLRGKSITKEGRREFRWAMVEVAQRAVKADPHWKRLFSELERRMHRNQAIVAVARHLLMVVWYVLSQGKSYRHYSDERIAYKYYTWSWQLDEAQRKGLTRPQFVRYYLMRLGVGADLQRVALDPKHPHRLASESEILEMMTDLQPPG

SEQ ID NO: 334535 - protein, 374 aa, unidentified
MRDYSEAFVAFDTSKSRNAVAIAEGGRRGEVRFIGEIENSAAATAKLVRKLADSHGRLTFCYEAGPTGYGLYRQIVSLGHDCIVVAPSLIPQKPGDRVKTNRRDAVGLAKLLRAGELTPVWVPDPRHEAMRDLTRGRGAAVEDLRRKRQQVSAFLLRQGLSYAGKKAWTKAHMSWLAGQKLEYPEQRIAFEEMLLAVRQAQERIERLEEAIRVAVPEWSLAEVVTGLMALRGLDLISATAFLAEIGDLSRFRTPRELMAYLGLVPSEHSTGDKVKRGPITKAGNRRARRTLVECSWSYQHPPRIGKKKQEKVAAAPPAVREIAWKAQCRLKGRYRMLIRKGKLKTVAVTAIARELAAFIWAINREIATARAAAI

SEQ ID NO: 334536 - protein, 373 aa, unidentified
MPRYSTAFGMDVHLRSTTVCALDAETGEAVTRRFRGNPWGEVAEWMSGFPGPSLAAYESGYLGFAPQRELSGLGVDCVVAAVSRVPRSAADLSSKNDRNDAARMAKAILSHDVTPVWVPSPEIEGLRDLAGAHDAATARLAAAKQRLLAFLARRGYAYGGTTPAGNPRRYWTYDFLRWLDKVRPADDGGIRALAALRSEVEAAAETRDDLLAEYRAAVAAGPLSAEVEALQSIKGCGFALAAAFASEVGDFSRFRSGRQVTAYFGLAPKQRSSADSVRLGGISGAGNALVRRLAVEGSWSYVQASHQPKLMPKGSGVPLEVRMHGRKGSERLLRRREEMLARGMPAAKANAATAAELVRWLWALGMMCREGAE

SEQ ID NO: 334537 - protein, 401 aa, unidentified
MSKSIFGTSISNDTIQTKTKDIKFIVGLDVHKKTTAITVVNKSAEKIVFKRQRLLNKDVIQTIEQFEGDKLVGMEGAYGWKWVNEALKDLSDISFVLLDARKTSGWIKTTGVKSDKLDSEVLAYVLLHGNLNALSVYIPSKEAQENMKLLEIRDKLVSQKTQVVNQLKSITENYGTNPFTGEIKEKSPTIQLIENNLLDQLNFLKIQIKNVENQMNRISDNDEIIKILTSIPGIGFVSSFAFRWKVDNISRFKDSKHLSSYFGLTVRQHQSGDKMIKGKISKAGNSIVRKLFVQGAQCIFNQKLLTVRWYFLNMMKEEEINQGKSRDKHIRLKHKNKKIIAVARKNMVFAYTCWKKNEYFNLDKYIQHKKDLSIKLENQIPYISSSDQYKKASNFGFVIVS

SEQ ID NO: 334538 - protein, 405 aa, unidentified
MWYVGLDWADTHHDVEVPYLAGKRVGVRRFAHSHDGLNELQAFLLGIAASPEDLACIVETNHGLLITFLLEAGIPVYPVNPKTANQLRKAAGAKTDQMDAHLLAKLGRLELAELRRLEPDSALVQELKTLTRDQDALIQTQTRLVNQLTACLKEYYPAALQLFAKGKPRSTLVFLQTYPTPQAAQAASLAELTATLRAGKHPNPTKAAPKIFAELHRPQLVASEVMVRAKSRLLLSLVKQLLVVIEEIESLDKAIRPLFLRHDDQELWRSLPRAGKHLAPRRLSEWGDDRGRYADAASVQTLAGTAPVPFQSGHYAKAHKRFACVKPLRNVLYQFAWQSTRQEPWALAYYQRKRARCGKSHSMAVRALANVWVRIIYRMWQSKTNYQTVTFEAARLAHAPRQHVA

SEQ ID NO: 334539 - protein, 357 aa, unidentified
MGKSIIDTSSVTRVGLDLAKRVFRIHAVDATGSVVIARSVNRRTLLKFFDSLPRCVVAMEACSSAHHWGRQLLELGFAVRLIPPAHVKPYVRRNKNDAADAAAICEAAGRPGQRFVPVRSVENQAELMRHRARELMVGQRTAALNALRGHLSEIGVVAAQGVPNAYALKALVDGGVDENGEIVVPDCVRLALAPLIRQIDALDEAIEAIDRTLEASARTDETARRLMTIPGIGPVTAMALLATIQDFAAFSSGREFAAFLGLTPREHSTGGKPRLGRITKMGDRYLRKLLVVGACSALAARKGHNDALRRWASGMLERKTVKYKFKLTAVALANKLARIVYALATKGGHYDDRPVAA

SEQ ID NO: 334540 - protein, 360 aa, unidentified
MRTKVNENLFNGQSFYVGIDTHKKSWTVSIFGEQYEHKTMSQNPDPAILASYLKRNFPGGDYHAVYEAGFSGFGACRELRELGVNCIVAHPADVPTSTKEKLQKTDPVDSRKLARSLRSLEFEGIHIPEPKLEADRALVRQRFRVVKDLSRTKNRVKSLLFQFGIDIPERFSSAQTRHWSKEFINWLKALSIQEESLKQTIDNYVQIGESQRSNLLVLNRQVRALSQTESYRGNYLLLIRIPGIGVTTAMHILTQLGDIRRFERLDDLCNYVGLVPKMHGSGEKMKTGKMIKRGRKELKIMLIEASWEAVRKDPALMAKFNELSLRMNKNKAIIRIARKMLSRIRYVLSHHEEYQMGVVC

SEQ ID NO: 334541 - protein, 317 aa, unidentified
MALHLTFVGIDVSKDWLDLWLAPLKRFERTSNDAAGWAAVIALVKPLGIEAGVVVAFEATGGYEQGLRKALLEAGFDVRRLNPLRVRLYAKSLGRNAKNDRIDARVIARYAEAAGTTPEILDPAREHLAELVSHRRRLVDERVAVGNQTATLRSVHLQAQNRKRRALIERQIEETDTLILEAIGHVPSLLAKVELLKTLKGVKDITAMALVALLPELGRITRRAVAALVGLAPFDHDSGKLKGTRSIAGGRTAVRTALYMAARAAARSKSPLGDFYKRLIAAGKTPKVATVALMRKMLVTLNAMTRDNQAWKHAKAC

SEQ ID NO: 334542 - protein, 423 aa, unidentified
MNQLALQDSVSVAAFVALDWGDRKHAGRLSTDGQTSESFELEQSAEVLDLWVAGLRKRFGGAPIAVALEQSKGALIYALLKYDLFRLYPVNPKQLARFREALTPSGAKDDPADAALLLELLLKHRDHLRLWRPDDATTRLIGQLAEDRRHLVESRTRLVNALKSRLKQYFPLALEVLGELDTELACRFLLRWATLAELQKEPFEAIATFYRASHCHHPQLIVQRLEKIAAATPLVTDSAVLQSGRMMVQSLAAQLLSLIEPIENYDRELAELMDQHADAEIFRSFPGAGAAMAPRLLAAFGTDRSRLTDADQVQTYSGIAPVLVRSGSTGHVRRRWACNRFLRQTFHEFAGHSLGQSAWAKAYYDQMRARGVKHHAAVRSLAFKWIRILFRCWQKRTLYNEVHYFQQLYKKQSPLLKAMASAR

SEQ ID NO: 334543 - protein, 322 aa, unidentified
MSVSVLGIDIAKQKFDVALLVDGKTKHKSCRNSVEGFETLMLWLEKQGIRKVHACLEATGNYGEDLAIYLHEAGHIVSIVNPARIKGFAQSELLRTKTDKLDAALIARFCLAMKPGAWIPPPPEIRSLRALVRRVDSLIDMRSQEKNRISTAHESVISLIKEHIAYLDQEIEKIRRQIADLIGQNPHLKQRKELLDSIPGIGKATIPHILAELDDLEKFNHVRQMVAFIGLAPRETLSGSSIKGKPRLCKIGHARLRKALYMPALVSIQCNPVMIAFYNRLKEKGKNGKVIVCAIMRKLVHVIFGVLKSGKKYDPNYKPASA

SEQ ID NO: 334544 - protein, 368 aa, unidentified
MLKQSHYKIGCDAHKHYSLFAVLDHRGRPVEQTRVNHEPGAIRAFVSRFPPGTPVALETVGNWYWIVDEIEQAGCVPLLAHAQMAKKMMGHVHKTDKLDAQGLAILQHLGSLPTVWIAPGEIRDERELPRTRMALSKVRTALKNRMHSTLAKYALSLGTQSDIYAPKWRPQLIELVRSLPDETRRCMEQELELLDQVQEQIHRLEARILERVQMTPTIQLIQSVPGPAEILSIVIDREVGSIDRFPSPHHFASYSGLVPKVMASGGKTHYGKMIKAANNYLKWAFIEAANVIVRQQHHPRWRQKYVVALFERTRQRKGHAVAVGAVARYLAEATYWVLKKGEPYREPVPQHPAGRKSAVSVKQGQVRT

SEQ ID NO: 334545 - protein, 411 aa, unidentified
MDVIHRCCCGLDVHKDSVTACVLWAEPGGGGRSEKRKFSTFTRDLLELSDWLRQCGVTHVMMESTGVYWKPVWHILEGQFELLLANAQHVKAIPGHKTDVRDAGWLAELLQHGLLRSSFVPPEPIQGLRDLTRYRVNLAQECNRVANRIQKVLEDANLKLASVATDPLGASGRAMLKAIIAGEQDAEKLAEMARGLLRRKIPQLQLALQGRVSEHHRFLLKELLEHLEFIESKMLRLEQEIAERLRPFEDTVRRLCTVPGIDRVSAWGIISEIGLDMSQFPDAQHLASWAGLCPGNWESAGKRKSGRIRKASPWLRRHLCQCAWAVSTKKNSYLAALFRRLARKGVKVASIAVAHALLVIAYHILKAPVEYRDLGADYFDKLHPGRLKKKLVKRLEGLGFQVTLEPRTLPA

SEQ ID NO: 334546 - protein, 317 aa, unidentified
MNTIQPAVHIGVDVGKFQLDFHCHESAEHFSVSNNATGIRQALKQLSAGSIQCMVVEATGRHEQSLVQAAQRHNLPIVIAQPISIRRFAGALGILAKTDQLDSQVIAHYAALIQPPVRELPDKTTRQLKDLSVRRKQVIGMLTMEKNRLQVMPAFLRADIRRSIATLKRQLRKLDEHIHQLSLSVEAWRKRREVMQSMPAVGTVLATTLISDLPELGALNQKQIAALVGVAPMNRDSGKMRGKRRIRGGRAQVRTVLFMATMCAVQHNPVIRAFYRRLLAKGKHKKVALVACMRKMLILLNAMVRDETCWEEMKAAA

SEQ ID NO: 334547 - protein, 435 aa, unidentified
MIDRILPGIAALDLGATKIFAATANVPVQVFGTFTSELRALIQWLREHQVRAVAMEATGVYWISVHDQFQAAGFQVTLFHGAHARNLPGRKSDVSDCQWHAMLHSHGLLHACFIPAEPIRQLRSFYRLREDHLSMAGAHVAHMQRALDLMNVRLHHVLSQIHGVSGLRVIEAILAGQREPAALAALCEKQILKKKKAEVLASLEGDWQEHHLFALRQALEAYRFYQQQMAACDAQIATLLERLNAGLPGQQPKAGQKVKVVRHNAPQIANLHGQLLTLAGGRDATLLPGISPLGWMKLTGEVGADLSAFRDEHHFAAWAGLVPQRHQSGRRNRRAPRPKTKVGQIFREAAMSIAKSRNLALGGFYRRIKGRRGAAVAIVATARKLAVLFYRAMTRGLQYVEHGLAQYEANCRAQSERHLRKLATRLGFTLQPKTA

SEQ ID NO: 334548 - protein, 343 aa, unidentified
MESIYYIGLDVHKKSIAYCIKTVTGGIVCQGMVKAERRALRKWLVDLPGSWAGAMEATMFTGWIYDFLKPYAVELKVAHPAMLKAITSAKKKNDRADAEKLTDLLRVNLLPECIMMSEELRELRRILRYRNMIVRTASKMKNKISGLLMEVGAVYDKRKLHGKRYFGQLLERVEDVPDSVKDLLKLSRSNLELFVAIQKKLLKVLREDSLISKRVELLQSISGVGEIMALTWVLEIGDPGRFSNSRQAISYCGLCSAQRESAGKEHRGPISKQRNKYLQSMLIEAANIAPQWNPQLAMLKEKELTRGNGNRATLAVARKLVKYMLAVDRRGEPFIAEKETLVA

SEQ ID NO: 334549 - protein, 345 aa, unidentified
MSIVGGLDIHRKQLTFDYVDTDTGELRRGQLAPADRRHLAAWLGRFDDRETTFAVEACTGWRYVVEELRRAGAVVQLAEPADTAAARGRKRRAKTDRSDSKLLRELAVGGRVPQCWIPPFEVLEYRALLECYHDLRREHTGWVQRLHAACFHQGVAVLGTGTISTDDGRVRLRRIAAAELSPAGQAQIAVGLSMLEAIEVHLDELRRQLVGIARHQLGAKTLTDRLYGIGPITALALCCWLGGGDHRFRSSRQAVRFTGLDVTVYSSDGKRSPGHLSRQGPPVLRWCVYEAGKTHARTSAPDHDYYTGVKDRIDGKRAALSEARKLVRQAHHILAELGDTAFDAA

SEQ ID NO: 334550 - protein, 335 aa, unidentified
MSKLYVGLDYHQSGVQVCVLDAKGRILSNGTFANEWQRIVEAVQRHGSDVEAAIEACTGAANLADELLQHSGWSVNLAHPGYVARIKQSPDKTDFSDARLLADLVRVGYLPKVWLAPESLRELRRVVRYRQQLVNERRSIKLRVSALLREARLKGPDRPWTKAWLKWLEEARLPAQSRWIASRLVIKLTGLAEEIQLVEKRLESLIADDSTTQKLLELDGIGLVTAVTLRAEIGVFNRFRTGKQLARFCGVTPRNASSGQRQADAGLIRAGNRELRRTVIQTAHRLMNLDDRWSRFKAQLQDRGKPYCVIVAAVSNRWLRWLYHQMQHSMTELAV

SEQ ID NO: 334551 - protein, 402 aa, unidentified
MNAVGIDVSKGKSMVAIMRPFGEIVSTPFEIKHTSSDINSLVKLIKSIEGESRIVMEHTGRYYEVLAHQLSEANLFVSAINPKLIKDFDNDSLRKVKTDKADSVKIARYALDKWQNLKQYSVMDELRNQLKTMNRQFGFYMKHKTAMKNNLIGILDQTYPGVNTYFDSPARSDGSQKWVDFASTYWHVDCVRKMSLNAFIDHYQNWCKRKKYNFSQSKAEEIYGKAKELVPVLPKDDITKLIIKQAVNQLNSASTTVESLRTLMNETASKLPEYPIVMAMKGVGASLGPQLMAEIGDVSRFTHKGAITAFAGVDPGVNESGSYEQKSVPTSKRGSSDLRKTLFQVMDVLIKTHPQDDPVYQFIDKKRAQGKPYYVYMTAGANKFLRIYYGRVKEYLSSLPES

SEQ ID NO: 334552 - protein, 355 aa, unidentified
MVVAIESHQGALDTQITTIGLDIAKNVFQVHGIDATEKVVVRKQLRRGQVLAFFKALAPCLIGMEACATAHYWARELTKLGHQVRLMPAKDVKAYVKRNKNDAADAEAICEAVRRPTMRFVPVKSAEQQARLMQHRARDLLMRQRTQLINALRAHLAELGIAAAQGREGIKELLAIVAQDGDTRLPVDAHASLIVLAAQLQAVQTMIGSIEKRIVAQHRSSEENKRLQTIPGIGVLGASTIVAVVPDPKVFRSGRDFAAWIGIVPREDSTGGKQKLGPISKQGDRYLRRILVVGACAVLRRARQQPEKYPWLTQLLARRPFKVVAVALANKMARIAWALLAKGGTYRAPALAAAA

SEQ ID NO: 334553 - protein, 367 aa, unidentified
MKKISTVAVKQSKNISGKKLTIGLDLGDRSSWYCVLDESGAVLLEQKLSTTPKAMREVFGTMPRCRIALETGMHSPWVNRLLSELGHEVIVAHARNVRLIGESRKKDDRLDARTLARLARIDPQLLCPVKQRSARAQADLTVIRARAGLVRSRTALINTARGLTKSYGERLRGCNPRNLNPEKAQQLSPELQSALEPLLAAIESLSERIHEYNQQIEKIARESYPQAARLEQVKGVGTLIALTYLLTLEDPHRFRKSRDVGCYVGLQPGRRNSGKSEPQLHISKEGDPYLRTLLVQGAHHILGPFGADSDLRRWGLKLAERGGKNGKKRAVIATARKLAILLHRLWVSGEAYEPLRNSHQSAMPAAA

SEQ ID NO: 334554 - protein, 348 aa, unidentified
MKSYVGIDLHARNNYLGIIDRKDKRLFGKRLSNSMDKIKLALKPFRKGLTGIVVESTYNWYWLVDGLKEAGYKVHLANPSAIKQYEGLKHTDDRWDSFWLAHMLRLGILPEGYIYPKQQRPVRDLLRRRLLFVQQRTAHILSLQSMITRHLGMNLSGNEIKKMKEDTVDHLFDEPTLILTAQSHISTINFLKRKIRDIEKAVLSQMSLKPEFEILTSIPGIGNILALTIMLELDDINRFKKAENYASYSRCVKSERLSDDKKKGSGNRKNGNKYLAWAYVEAAHFIVRYCPEANRFYQRKKAKVNGALATKALANKLARASYYMLRDQVAFDKDRLFRNQCGSGREPT

SEQ ID NO: 334555 - protein, 414 aa, unidentified
MSKAKKRIIVNYQGIIVGIDIGKDQHVVVALAPDGRFSKTVKIHNSREGYEDLLCRIIQWKKEYTADEVMVGMESTGHYWEVPARWLAAKGIQVVQVNALHTKRAKEIENNSPGKTDPKDARIIAQLVRYGKYLSYILPEGSVAELRELVRIRQHLVTELTEKRNYLRRLLDSVFPEIFSVFKKSWGKTFLHLLHEYPLPEDMISAGLSTVTARLKERCRNIMAKKLQNVYVLTWTTVGVPVAHGAYRIGITNTVERIMDLQEKKSEVEKQMESLLVEIPEAAFLLSVKGIGPISVAVILGETGGLSRYAHAEEIIKLAGLNLFEISSGKHKGKVRISKRGRPLLRHILFLLATIQAKKGMPLYREYDKLIERNMASMKALIALSRKLVRVLFALVRDKRFYSYEEPVLLKMAA

SEQ ID NO: 334556 - protein, 449 aa, unidentified
MPQPILAVGVDPAKRLHRAVAVLFPDEVVLDVELPNAFDAVANLDLRLCELANQHGADLVYGLEDHRRYGRLFCQVLTERGRDVRVVNPLWTNRQRAFYGQDKDDAIDGRSIAAVVLRRHLQLPLASDFGEVAQAIREAERSLQDLSKVRTQLGNRLHLQLSDTYTAAYEEYFGKLKSPLALRFFRRFPLPQDLVGHNVEMLASLLLDLAGGKVEPHKGGNRLIAMRSKAQAILETSGAMRASPRTLALELKAELIRQLCDELLANHDRIIRLERMLREQLLPATKQTITTIIGISTILAATIIGETGSITRFRSPAAFAVYNGTAPARNSTGGRDRHKARRDCNHRLKRAFYLAARAAVLHDPIAKAYHQSCKSRGLSYVEALKRVARRMSDVVYALLKSGKAYDRSIIEHAIERRREQAAHAARSHAKQSLVHSRPRKSNSPLSQRK

SEQ ID NO: 334557 - protein, 355 aa, unidentified
MTSTKYIGMDVHKESISIAVMNASGKIVMECVIETKASMILQFFDGLRGDLQVTFEEGTSAAWLYGLLKPHVTKLLVCDPRKNASMREGSQSDRIDARQLAELLRLNHLNPVYHGEHGLRSLKELVRSYLTITKDLGRVMSRVKAIYRSWAIPCTGKQVYAPRHRAEWLGKIGELGVRRRAEFYYQQLDALRALRQQVRRDLLAESKKHQTWKRLCQIPSIGPIRAAALLGILQTPHRFRTKRQLWTYSGFGIETHSSADHRSVDGQLQRAKKQISIRGLNRNCNHDLKNLFKGAAIVASSKPGPFQEFYTALLTKGLRPEMARLTLARKIATIVLIVWKRGACFDAQHLKPQTA

SEQ ID NO: 334558 - protein, 415 aa, unidentified
MSNTKLFAGIDVSKKSNQCCLLDHRGEVIEQVNVANNVTGAHELEAILEKHAQKLESRELKVATEATSLYDFHILEFLAESEILACHNLKLYRFNPRSVKAFKASLKLMNKTDPEDAYAIAEYLRFRGKKAEEYRASMEHLPLQRLTRFRWHLVQQLVRERNYFLSQLFLKFSAFGKKEPFSDTFGATASSVIEEFMTPDAIVNASDEELIQFVVKHGRNRFPDPEEIVTKLKYVARESYRLRPALAENVHRILCLSLANIRTLKATLKEIDQTIHKQLSAFSITLTSVKGIGDVYAAGIFAEIGDINCFPSEAQVARYAGLVWKRHQSGNFQAQKTRLDKRSNAYLRYYLVEAADSLRRHNPEYRAYYQKKYAEVTEHQHKRALVLTARKLVRLVDALLRTNRLYQPKTPVESA

SEQ ID NO: 334559 - protein, 428 aa, unidentified
MKQENGSRLEEFRQFRKEVRGSGEYLLVGIDVAKDNHHAFFGTATGKTLLRRLVFENSLAGFRKLLGQAEAMKVQEGLKKVVFGMEPTGNYHKPLGEHLIRCGQGVVLVSGVAAHENRRTLDGRWDTNDTRDAANVADLMSQGKCLFYEFPVGELQELRDLLSLKRRLKREEHGYRVRIRNHLVAKYFPELDRYYEQSESTALAVVHWCLDPSEIAGMEYEEFVQRVSSDRVRSSQGKRLQTIWKMAVDSVGCEVGSAVEFEAKVMVEGLKQIRQRIEEVKEKIQEICSQFPEYEFLLSIPGFGPDVSSKVLGAIGDPFRFQNGRQVLKMAGLDLSAERSGKTSQSAVPVISKKGKADLRYALYQAAFIASIRDRHFIVYFTNQLRGREREPGIKTKMRVKLAAKLLIIAWTLMKKKEPFNPDYLSLE

SEQ ID NO: 334560 - protein, 376 aa, unidentified
MEKDIRHVGLDVDSERLVVGVAEARGEVRSLGSIPYTSEGVRGLVKKLGPASRLRICYEAGPHGYGLYWELTALGVHCDVVAPTLVPVKSGDRVKTNRRDAEKLARCYRSGDLTPVWVPDAEHEALRDLVRAREAAKKDQLRARHRLGKFLLRHGLRAAAGVKNWTLKHLLWVRTLHFEHPAQEATFLDYLHEVEHAAERVARLEKAIDQAVEGLPQEMKAMVAGLQALRGIKQVSAVTIVAEVGPLSRFERPKQLMGYSGMVSSEDSTGNRVRRFGITKTGNAHLRRVAGEAAWAYQYRPAMSAALKKRQEGLSEEVKEIAWKAQHRLCTRYRRLLARGKIKQQVTTAVGRELLGFIWAIGVQVEKEQQRRSRAA

SEQ ID NO: 334561 - protein, 431 aa, unidentified
MQYAPAVLPDEPANGLTCGIDWARDDHAVSILDRHGRQVHRSTVEHSAAGLRELVAVLARTGVSEVAIERPDGPVVNALLDAGITVVVISPNQLKNLRGRYGSAGNKDDRFDAFVLADTLRTDRARLRPLVPDSAATAALRATCRARKDLVIHRVAVANQLREHLNRVFPGAVGLFADLDSAISLKFLARFDRQERADWLTPIRLGAWLKSAHYTGRTDPAILHVRLIAAPRGATGQEGTAHAHITGALVATLTSLVEQITVLSEQIEQQLAAHADAHIFISLPRSGTVRAARLLAEIGDCRARFPTPEALMCLAGVAPSTRQSGKMRSVGFRWACDKQLRDAVCDFANGSRHANPWAADVYDRARARKHDHPTPYASWPAPGSTSFGTVGRPTPPTTPPNTKPFRPYKITPDLDGGGIRFSRTTFPCLSS

SEQ ID NO: 334562 - protein, 402 aa, unidentified
MNEGKQEEREEKVLQGAAGRVIGLDMHPDSFTAAALEGQSAMDAQVLWVHDHQPQERLEQWLQRHVDPLDLIVIEASGNTFHTVKRIRACGRNAVVLEPLRASQVRKAYCTTDKISAVKLARVYFSGLAVEVWTPDETTRERREVLHAHRRAVQDTTRGRNRIRSWMNQFGIRRRKGLKLAHQSGRQWVMEQREWTPTQRLLIEQMFHDLWQAEARRKTLRQVMAEEVASAPELLKLNRLFGVHVIAAYALAAVIGDIHRFRTPRKLAAYLGFSPNTSRSGLGKHDGGSSPWGCGEVRRILIQAAKSILRYQSDSPVHRWGLALACRRGRNLAAFAVARKLVTAVWYLLKGFFSPLTEPTPLLRRKLEELGDEIGQKRLAALGYKNSGVFRDERLAILIGTT

SEQ ID NO: 334563 - protein, 489 aa, unidentified
MIKSVGIDLSRTGRHQVRILDEQARPCDSLSFENTLEGLETMEKHIFPDGANPTIVFEPTGLAWLPMAIYLRARHPGCHLVKARLQKVAALRRYLRSYVKSDRIDGVTLAKMPFIDSEQLDEVYLPPAEFHALQRLTRQRERLLKSITVRKNRIGSIIDGYLPGLQRVFSDQWSRHARAFYHRRLNPFTVVHDGQDALNSFLGNVEAKGALSESYRVYQACQDLAEFYERSRPAGMVNEQFFDDLQEEIACELRLMEAEEAEADRVSRRIEELYHRLHPNDHLRTIPGVGERTAPVFLATVGDPHRFRSQSAFANWTGVVPGAKQSSEVEGKGLRMTKAGPVMIKRALYQAGDIARQYDPQLAYLYYREMVHHGKTHLQAVGAVMSHLGARILTVLRENRPYELRDAQGKPISKEKARKLILSEYKVPEGIRQQRRRRNPKKRTLSKRVKGEGRFGIPRTTEAATAPQSGCAPTFPNMSVYVTGAEKSR

SEQ ID NO: 334564 - protein, 349 aa, unidentified
MRFYTKQHQFYCGIDLHADAMYVCILDATGEIVEHRNLPTRPKAFLRLIKPYRDGLVVGCECMFTWYWLADLCADEGIDFVLGHALYMRAIHGGKAKNDKIDSHKIAVLLRGGSFPLAYTYPKPMRATRDLLRRRNHLARKRGELFSHIQNTATQYNLSEPLGCIAKPSERGDLLKKFPDPIVRRMVEVDLLTIEHYEALLGSLERELEKVATGHDPVSLSLLKSIPGVGKILGMVMLYEIEDIARFPREQDFASYCRLVKPAKQSNGKNYGHSGKKIGNAHLRWAFGEAVVLMLKGNKPAQALKQKLASRHGKGKALAILAHRLGRAVYYMLKNQEPFDQERFLRKAA

SEQ ID NO: 334565 - protein, 425 aa, unidentified
MKITQTALKIKGNFAMDVSVDVHKDTLNFFFETKGKEYVDECSNRTTVIQKKLKAYHEVALEHGTKTLRIICEPTGEYQNKMFRIARKMGFLTCFVNAESVSKFRIVETNDNGKTDTKDPRVIRTLGQLNKTIKHRILDDDYLTLRKLNKVLDEVDDIKKEIRCRVSKLLVELFCDYSFEKDFLYGSSGKALVDKYRCNPYRIVKVGYRRFSTYMKKTVPRIRQTTLKRLWDDAQSSALNEQPEEYIEVIEIQLKQLMEDYWRHEARSDAVIERMIEVLNNLREKDPNIPKATKGVINDKHIARLLGETGPLDDFVNWRMLMRYAGLNIRMRQSGKFSGQNKITKKGRPLLRKVLQRIVFPLVRQNWLYGPYYHRKKEIDKMPGNKIITCVSRHFLKKFYGWYKSGEAFNQQRFFSCETQYKKAA

SEQ ID NO: 334566 - protein, 345 aa, unidentified
MTESKIVAFDLAKRIVQACVIDGTGAVIAEERMGPERVLSFTARHPHATVALEACGGAHHWGRALERQGHRVLLLPPQRVKSYGDPACKDDRRDARAIAEAASRSYLRPVPVKSEGQQALQSLDRVAALLARQRTQTVNALHGHLSEFGITLPKGPHLLKRRFTELEASPRWRELPEELRAAMGELFAAFLALEDRLSVLKARLAKGAKQSKLGHLLLEIPGIGPMTAVSLEAAIGDDPGRFSSGRQFAAWLGLTPRVSASGERRQLARITKRGSARLRSLLVVCAQAMLRQYRQGRHGDPLACWARHLLARKRWNVAVVALANKLARIVWKVASSGAAYQARTA

SEQ ID NO: 334567 - protein, 375 aa, unidentified
MEGAPMLDTTTFVGLDVHARSIKAVSLDVMTGEVRAATFGYDAGAVAEWVRSVDPEARCVYESGVTGFDLQKRLSGLGVDCVVGAVSKMIKPSADRRRKNDRNDAEFLARMLSVGNVVEVWVPDDECEAARDLTRALEDARDDLSRSKQRLSKFLLRHGLVFDERTPTGRRKGNWTRAHWSWIESIRFAERADNDVLAYYVDAVRRAAEEKARLEGLVEAEARKPRWRKRVDSLRCLKGVDTASAADLVFEAGEFSRFRNARSFAAWVGLTPSEHSSGESDRRGAITKAGNKHLRKTLVEAAWHYLTCSGRPKDLAKGQAPDRGARRHAAKGVRRLVERREALLARGVHGNKANVATARELACWVWAVGLMAEEA

SEQ ID NO: 334568 - protein, 369 aa, unidentified
MGDRITYVGLDVHKADIVVAVAEGGLRGEVREYGRIVNRPAALERLARKLGHDGVKLRFCYEAGPCGYGIQRQLSALGHECVVVAPSLIPKRAGDRIKTDRRDAANLARLDRAGELRPVWVPDAGHEAMRDLVRARLDAVQALRRARQQLSGFLLRQGCHYGRPAWTKLHRRWLAALKFEQPVHHVVLEDYIAAVEAAEVRCDRLTAQIEVMLPDWSLAPLVAALQTMRGIALVNAASLAAELGDLSRFANPRQLMAYLGLVPSEHSSGVSIKRGGLTKAGNGTARRLLIEAAWCYRFPARVSRELRLRQEAQPIPIREIAWKGQLRLCARYRKLGRTGKPATVVTAAIARELAGFVWAIARQVAIPAG

SEQ ID NO: 334569 - protein, 342 aa, unidentified
MQITTIGIDIAKNVFQVHGIDAKEKVVARKQLRRSRVITFFKALPPCLIGMEACATAHYWARELTKLGHEVRLMPAKDVKAYVKRNKNDAADAEAICEAVRRPTMRFVRIKSAEQQGQLMQHRTRDVLIRQRTQIINALRAHLAELGIVAAQGDKGVKELLAIVTDEQDTRLPIDARASVIVLAAQLEALESVIGAIEKRIKMQHRSSEASQRVETIPGIGVIGATAIVATVADPTIFRSGRDFAAWIGLVPRQDSTGGKPKLGPISKQGDRYLRRILVVGAIAVLRRAQENPGKYPWLTQLLARRPFKVVAVALANKMARMAWALLAHGGTYRAPELAETA

SEQ ID NO: 334570 - protein, 463 aa, unidentified
MKKTTKSSKIKPAPLSLLNPKCAGIDVGASELFVCIAKNPSEQEVRSFPTFTADLKRMVLWLKENGVKSVAMESTGVYWIVPYEMLEAAGFEVLLVNARFFKSVPGRKTDVQDCQWIQQLHSYGLLRGSFRPSNEIIELRTYVRQRSRLFETAGMQVQLMHKALIQMNIQLNHVISDITGVTGLKIIQAILQGTRNPETLANLSVGNCRKNREIIAKALEGNFRKEHLFALEQAYEAYEFFHRQIHNCEEAIERLLSSIQAATPPSSFSSDNDKNSSETSSSTKRACKTQANRSPYYFNAPAEIKKVTVADLTTIPGIDANTAMKILSEIGTDTSQWANAKAFASWLGLSPGNKISGGKVLSSKTKPSDNRAAQALRMAASSLYRSKTAIGAFFRRMRAKLGAPKAITAAAHKLARILYRMLTEGTNYREIGENYYEQQYQARVVASLSRRAAELGYALTPVQ

SEQ ID NO: 334571 - protein, 313 aa, unidentified
MSEQYVGIDVSKERLDIATSEGREFHLGNDEAAHRQLCELLAAEAPRLIVMEASGGLERTAAAELAASGLAIRVVNARQVRDFAKASGRLAKTDRLDAKVLVAFAQAMKLEPREVVSEELQELQALIMRRRQLIEMLVMEKNRLRLARREIKHGLKKHIEWLEQQVREADQDLGIALRKNGVWQEKVELLASVPGIAQLTALKLLASLPELGTLNRRQISALAGVAPFNRDSGRWSGKRCIYGGRALARAALYMAALVGVRHNAVLKAFYQRLRAAGKPAKVALVACMRKLLTIINSMIRHRQPWSPKLLEMA

SEQ ID NO: 334572 - protein, 391 aa, unidentified
METAYDGRQIVGMDLHRRRSVLVRMTEDGRRLGMARITNSPQELRREIARAGTSPRVVLEATFGWYWAADTLAAAGAEVHLAHPLGVKAFTYRRVKNDERDAADLADLLRMGRLPEAWIAPAEVRELRELTRYRHKLVHLRTSCKDQVHGVLAKLGIPVTCTDIFGTAGSAWLDGLGLPQPYAGKVTSLRHLTGELATEIIMLSAVIADLLAHHRGYQVIQQLPGIGPVLAAVIIAETGDVTRFKNAAQLCSWAGLTPRHRESDTKVTRGHVTKQGSRMLRWALIEAIQRVPGDSVIGTVKNGIIARRGKEAKNIAKVAAARRLLTLVFYGLRDGQIRCLSSTPRRPAAGDPGPAGGMNSFPWPAARREVAFVSAPPPSPGGAGAVLIDPA

SEQ ID NO: 334573 - protein, 367 aa, unidentified
MEAIYYGIDLHSTQLTNHLIKNEEGKSIERKNEKIYVNQIKSKLLPNLTKDTHVCIEASCCTFKFAEMIRNHVKQVYVINPLDFKSLYCSGKKTDKIDAKKLANRLKYYVESEDKDEDFPLVYIPESHVIKMRKLFSVYKLVTGNMVSLKNRLHSILKSNMIFYKREHLFKVIEEQFKGDELDDVDKFQIEILLEEISRLDDKIKMIKNKILEIGYKHFEDEIKLLISIKGISDFTACAIMSDIGKIERFANSKKLSSYLRSTSKVDSSNNVVKIGKRNKKGRKLSFELIIQGLNHIINSTPKFQRFYETKSKGKNKNVVRSAIVRKVIVAIFFMLRNKEIYNDYDKKNYETKLKDFEKKKKIFFLN

SEQ ID NO: 334574 - protein, 344 aa, unidentified
MNISRVGVDIAKSVFHVHGVDRHEKPQWRGKYTRAKWLEAVCRRVPQGATIGMEACAAAHDWARELQARGYHVKLIAAQFVKPYVKTNKNDRADAEAICEALGRPTMRFVAVKTVDQQDSQATHRIREELISQRTAKANQIRGLIGEYGFIAPTGIQQLRRALPLWLEDATNGLSDRFRRLLADLADDLRYLDERVAQLTSAIETHANTDPVAKRLMTLRGIGPITASALSGVLGDGAIYKRGRDFAASLGLTPRQHSTGGRERLLGISKRGNSYLRKLLVHGARAVLRYAVKKDDGLSQWIKHLAVRKHRNVAIVALANKTARMAWAVTRYEVPYNPELSAAA

SEQ ID NO: 334575 - protein, 394 aa, unidentified
MKLVGIDVGKNSHHFCVMDKETGEFNVTPTSFSNNKEGFDFLINSLKPYSKKSILIGMEDTGHYHVALLKFLLSNGYPVALINPKTTDLTRKMEGGITKNDKLDTITICDVLDTPERKKQYRITKVDRFDLYEKRQLTRHHHNLKEELNVYCNRLQKSIDLVFPEFNTLFSSKYSIVYMNLLKTFGSAEAIASTDIRTIRKCFEIKGRGNRISLTPEKLKECAKNSIGISSEVETIQIKHLVSQITLIKEQIAEIDKKIEEFSITNNSPILSIPEISHFSGTSILAELGDIGNYSKPSQIIKFAGVAPYHYESSQYNAQHTGITKKGSKYLRKTLYQIILTVINNNPVFKKYYRLKISQGKGHRCAQGHCIRKLLRIIYHLLETGQSFDPALLR

SEQ ID NO: 334576 - protein, 362 aa, unidentified
MILGVDTHLDFHVAVAVDHLGRRLGESSVPATAKGYGMLLNWAEAFGPVRCAGVEGTSSYGAGLARHLRTNGIEVLEVESPKRRRRSSRRNLEKSDSSDAEAAARAVLAGEASGVPKSGDGQVEMIRALRAARRSAIKTRTQAANQLQGMRVTAPEQLRRRLRGLSTKELVSVAARFRLADGPRDVTTATKFALRSVARRYETLSKEIFELEAHLDRLVAQAAPGLVALAGIGTDNAAALLIVAGDDPQRLGSEASFASLCGVAPIEASSGKVVRHRLNRGGNREANRALYMICLARMRRDRRTQEYVARCTAEGKSKREIIRCLKRYVAREVYRVLVSCGAHSLPTGTKAELHIASGSSAA

SEQ ID NO: 334577 - protein, 411 aa, unidentified
MVAVGIDVAKGKSKVAVVGEGKKVIQKPFDVLHSKPEMLKLAENLRQYGDEAHVVMEHTGVYYKVVAETLHKEGIRVSVVNPVLINQFGNNTLRKVKTDKKDSMKIARYALENRDELYDYESGEDIRDALKSFVKQFNFESKTLIAHKNNLNALLERVFPGIDGFFNSPVKSNGHQKWVDFVIAFWHNDCVSCLSELKFIEKYRKFCKKNRYIFSEETAKAIHAKSRDNLTTMPKNDTTMLLVQGTAKRVLRLSEDVELLRAKMIELAKQLPEYETVLAIYGVGDTLAAQLIGEVGDVRRFQSKRSLVAFAGVDPDKNESGKMVSISGSVSRRGDSLLRKTVFQVVECYLKNSPADEPVYQFLDKKRSEGKQFFVYMTAACNKFLRVYYARVMECMNALQSSSSVKSLHSA

SEQ ID NO: 334578 - protein, 413 aa, unidentified
MDVVHPRCAGIDISKKDAKVGVRIQGSGGQRTVMTVTTWGSMTNQILGLREHLLAEQVTRVVMEATGDYWRPFYYLLEDDLTVELVNARDVRNVPGRKTDVSDAAWLADLGAHGLVRASFVPPEPIRVLRDLTRTRTVITRERSRETQRLEKLLEDAGVKLSSVATDITGMSGRLMLDALIAGRSDPAGLAELAKGRMRSKIPTLTEALTGHFTAHHAFLAQLFLDRIDAHTADIDTLSARIETLMEPFLPARELLESIPGFSQRVAEVFIAETGADMSVFPTAGHLASWAGTSPGSHESAGRSKSTKTRPGNRYLKGALRVAALAASRSKHTYFSAKYRRIASRRGPMKAIVAVEHAMLIAAWNMLTNGDFYRDPGVDYFTRRVPTKTKARAIAQLEALGYHVDLQPLAATA

SEQ ID NO: 334579 - protein, 415 aa, unidentified
MTSSPLIAGVDVHRKTNTYCLMTQDGREVVPHFTLGNNRPGAQALIEKVRQVMEADDFTELRLAAEATGWYWFHLFETLQNDPGLRAWPHELFLINPRLTANFKKSYVDLDKSDPIDAYVIADRLRWGRDIQTPYRYDEKLLALRFLTRYRYHVVHQLASEKAYCTAILYLKASEYSNDDKQAFSNLFGAASRAVLQEFASMEEVAAMPFDELVEWLDVHGKRHFSDPAENAKRLQRIARDSYPLPEPLQPAVNLVLSLSLKNISNLEALSKRLETAIVEQMEDIPNTLTTIPGFGLVLAAGIMAEIGGVERFDCNEAKVAKFAGLKWRKSGSAEFQSEETRLTRTGNSYLRYYFCEAAFSVQRCDSEYGAYFQRKFKEVRKHQHKRATVLTARKLVRLVVRLLATNQPYQPRRP

SEQ ID NO: 334580 - protein, 377 aa, unidentified
MTQFPVSTSSEQSIYAALELSKNSWLLAIQVPGRDNPSLHPIRGGNAEGLMAKLDAARERVAQVTGQTPKVTLCYEAGYDGFWLARFLEQRGIECLVMEPASLQVNRRARRVKTDRIDVENLLHTLIAWCRGERHVCSMVVIPSVEEEDLRRSHRERGRLVRERTAHINRIKGLLFGQGIRGINVMKNHKTLAPAELVTGDGRPLPKRLGREITREIERLALVQEQLVETEHERDQAPTPCAATERKRHDLLRLNGIGPTFSAILAREVYYRRFANRRQVASYIGLAPSPYDSGDGRRSQGISKAGNSLVRYSLIQAAWLWLRHQPNSALTLWFHRRTEGESKRMRCVMIVALARKLAIALWRYVETGLIPEGAVVK

SEQ ID NO: 334581 - protein, 345 aa, unidentified
MDQISRIGMDTSKHVFQLHGVNAAEEVVLRKKLRRKEMVAFFEKLAPTVIAIEACGASHHWARLLQSFGHTVKLIPPQLAKPYVKRGKNDAADAEALCEAMSRPTMRFVPVKTAEQQAALMLVSLRDRLIRNRTQLANAIRGHAAEFGLTAAKGMAHLVPLLERIQADESLPPSARELFAIQAKEYEELQTQIGEVDAQLMARHRADECSRRLAKIPGVGPIGAMLLRMKTPAPELFRSGRQFAAWIGLTPKDHSTAGKVRLGVITRAGDEGLRNVLVVGATAVIQQAQRHGRASPWLAALLKRKSPKLAAVALANKTARIAWKLMLTGETYTATPAPAALAGAA

SEQ ID NO: 334582 - protein, 326 aa, unidentified
MEHELHYIGIDTAKEKLDVDVLRPDGRHRTKKFANTTKGHDELVSWLKGHKTDHAHICIEATGTYMEPVAECLYDAGYIVSVINPALGKAFAQSEGLRNKTDTVDARMLAEFCRQKRPAAWEAPHPLERALRALVVRHQALTDMHTQELNRTETAREVQRPSIDAHLLWLEAELKRLEKQIKDLTDDDPDMKHRRKLLESIPGIGEKTSAVLLAYIGLKDRFAHARQFAAFAGLTPRRYESGSSVRGASRMSKAGHVSLRRALYMPAMVATSKTEWGRAFRDRLAANGKKGKVILGAMMRKLAQVAYGVLKSGVPFDASRHNPVAA

SEQ ID NO: 334583 - protein, 337 aa, unidentified
MTDVHILAIDLAKRSFQICATSPGGAVLFNRSVSRAKLEAYLREQAPCIVAMEACATSHFWGRFAQALGHDVRLIPPIYVKPFVKRQKNDAADAAAIAEAAVRPNLHYVAVKSAEHQARAVAFRTHQSFVGQRTQLINALRGHLAEFGLVVAQGPANLKSVVGMIDDGAIDLPDAVRDVARLYLDQIALLTNKIEELHSKLVHSTKVDDAMRRLCTVPGVGPVTAGAIMAFAPDLRTFASGRNFAAWLGLVPRQRSTGGKTRLGSVSKMGQADIRKLLIVGAMSRIRWIVRKGVLPDNWLGHVLGRKPRMVAAVALANKMARMIWAMMTREENYRMA

SEQ ID NO: 334584 - protein, 494 aa, unidentified
MKQLQKHERSFTMKKRNIYQNRSQELLSLFEEAGNSAKVMCVPMDYAKKDHVVMFCNGHGDILRKPFSVKNSPDGVKYLVDQATRSCQRRGIKKNHVFFGGEDANSYVENFVSTLRSKGWVVAAVNAHDAKKQRANLQASTDRLDLMGIATMLLDCRANCCPAQSGIYRNLRTLVRHRRKLVVMSTEVKNRIHGVVDRLFPGFLNEGKTGIVPFTSSSLYLMEDRFSPKQIRRRKREKLIEILKRFGTSKAEKTADKLHQYAAQVLHTPADYVDTLQLSLAQHVKHLRCLQESVNQLEKEIAVNLAQTQGAFLTSVRGIGIVLAAGVTAEIGDPNEQKPLNNLVSYSGIIPRVKQTGGADGKTYTGKVAKRCNRILKDYVVKSALHLGLHGPQDLMADYKRRDASGQHADFGMGRRYLRMAMGLMRTSQIYLPHRLRKADATLHERAGYYLMTWPYLRGKWKKLGALEAAFTKDRPLGLWRQIVQELYEIKLKL

SEQ ID NO: 334585 - protein, 368 aa, unidentified
MKQVTTYVGVDAHKKDLFIAMLMGQEKTPVTWQLANEPNAVRRLVRKLEREAPGPVRVFYEAGPCGYALQRQVTTSRVSCDVIAPALTPRKPGERVKTNRRDARKLVELGRAGLLTAVQPPTPEDEAVRDLARARDDAREDLQRCRHRLGKLLLRRGLHYHGRNWTRAHREWMHGITWTYAAERTVVDDYLLAIDHTEARLLELDARLAEIAETAPYREPVGWLRCFRGIDTLTAMLILAELHDFRRFASAPALMAYLGLVPGEDSSGEKHRRGRITRTGNGLVRRVLVEAAWHYQHRPTIGVALTRRRKGQPGRVIAIADKAQQRLCRRFRKLAAEHKPAPKIAVAIARELAGFLWAALQPVPVPVK

SEQ ID NO: 334586 - protein, 414 aa, unidentified
MEDILECCCGLDIHKESIVACLLKGPIEEGRKPCSEVREFGTQLNDLVALRAWLEEHGCHHVAMESTGIYWQPVYAVLEQALSDEMHLLVVNARHMRNVPGKKTDMRDAEWIATLLRAGLLRGSFVPDQGIRDLRQFTRYRKAIIRDITSQKNRIEKLLQSSGFRLSSFLSEIFGSSGLAIMRQLIEVGLVTSQSLESCLKGRARLKATEILSSLNGILSMPQRKLLKMQLAHLRDLQDNLQEVEEQIRNDFSKFERSIQLLDSIPSIDLTAAYAILAEISNNMGSFPTAQHICAWAGLAPGNNQSAGKKKKQRVTQGNNYLKTMLCEIAWVIASHKDQYLSGWYWRLKQRTDSKRAIVALARKLLVIIYAMLKSDQPYNEQKFLERKNTASQKHIKRMVNELSKLGYAVSLPA

SEQ ID NO: 334587 - protein, 352 aa, unidentified
MSKITITGIDLAKNIFHLHAVDSTGRQVKAIKLSRSRLSEYLHRSEPVTVAMEACASAHHWGRLCQLLGHEVRLISPQFVKPFVKSNKNDRNDARAICEAAQRPDMHFVPVKTVEQQAVLSLHRVREMLIGQRTATINQLRGLLTEFGLTAPAGRRALHNTIPAMLEDLMKISPTFLVSCIRQQWGHIGELDQRIDNVTSQIEMHARQSDVTRRLQTIPGIGPITASALEAYVGNATQFRAGRQLAAWLGLVPRQHSTGGKPVLLGTSKRGDGYLRRLLVHGARAVVAAVRSSPNVQKQDKTIMGWVARKHMNVAVVAMANRNARIAWAVITQKRNFDRNFRDQLANQLAAT

SEQ ID NO: 334588 - protein, 332 aa, unidentified
MHEQKQVLAVGIDVAKAKLDMRIIYTDESYKHCIIQNTEEGIADLANMLADCHGKIVMESTGRYHLLCALMLAETGLDVRVINPLMTKAYSKARIRNTKTDKVDAALLAEMARSDRHLPKSFKPNRTHVQIRQKIGLVSSLEHQIQKLTAILKNYKSFQEQLGGHLSEAEESIGCSLKLLISSKEKLTKELESLIFSDDANRVNRELLISIPGISSYVASLILHSFSKEYEHPKQWIAYIGMDVGLRESGTWHGRGRITKRGSAYLRKRLFSAAWGAVMHNDVFKSYYKILKERGRHHTEALIIISRKILRISFSILKHNKPFSLQYLCSNP

SEQ ID NO: 334589 - protein, 412 aa, unidentified
MDVIVQHPAALDVHKEQVTACVRFPAPDGTRAQDVREFKTTVAGLLVLHDWLKAHGVTQVAMEATGVYWKPVWAVLEDSFDCLLVNARHVKQVPGRKTDVKDAEWLCQLLEAGLLRRSFVPPKPIRQLRNFTRYRKAQIKERQREANRLHKALEDTGIKLGCVATDILGVSGRAMLDALCAGTTDPEVLAELARGRLRAKLPALREALEGRFDAQHALLIGAILAHLDFLDEQIERLSDAIEEQLRPFQPAVDLLRTLGGIEMRTAQNIIAEIGTDMSVFPTAGHCVSWAGQCSGNDQSAGKRRSGRSRKGSKWLNDALKDAAMGAIRTNDSYLQAQYRRLKPRIGHGRALGAVKHSILCAIWHMLSTGELYRDLGGDYFRKRDPERQTRRLVAQLERLGHTVTLQALAEAA

SEQ ID NO: 334590 - protein, 412 aa, unidentified
MQVVHPVCCGIDVHAKMLVACLILANGEKKKRTFSTMTAELLQLRDWLVAVQCTHVAIESTGVYWKPVFNILEDALTVILINPEHAHALRGRKTDVKDAEWLADLLRHGLLQPSFIPPPVIRELRELTRYRESVVREQSSVANRIQKLLESGNLKLGQVASDALGVSGRMILKALAKGESDPRKLAALARGKLKEKSLSLEQALQGRLTVNQRFVLGELLSRWEQLEAADARVTSEIDKYVQVNPKLARARELLDSIPGIGPRVAEVIMAEIGIEMAFVFADAAHLASWAGICPGNKATGGKRLSGRTRKGNTYLRSALVQAAWGASLKKHCYLSSQFQRLVKRLGRKKALVAVGHSLLVIIFHVLQNDQTYTELGGDYFDRRHVEQQRDYYVRRLQMLGLKVTLEELPQAA

SEQ ID NO: 334591 - protein, 374 aa, unidentified
MYCGIDVSKNKSNVCILDNEKNVVNEFEIVHNKEGFEKLEQHLTKDIKIGMEVTGNYSKALYKYFSSRYQVFYIDSFQICNFAKINSPTIKNDKVDARLIALFLALGYKTINPVRIDELKDLYKLYQKTVNQSIKYKCMVKDQVNILFPEIEKYIGARANKSISHLIMKYPTPKDIAQIKVEDIYQILNENLKKKGRVPMEYAQKIKVLAENSIGDSEYPTTCFQYTVKISQFFQEQIKEIAENIERRLMKTPYYKLINEFGYNTISLAALISEVGDIRRFPNHKKFVSYCGLGISQKHSGSSVRKKSVMTKRGNSNLRHLLYILTLVHLRNKTQYANFFQRLKERGKHPRSALIATARKLAIKAYYDMMKCHN

SEQ ID NO: 334592 - protein, 348 aa, unidentified
MQISTIGIDLAKNVFQVHGVDAAENPVLKKQLRRNQVIEFFGKLPPCLVGMEACATSHQWARELKKLGHDVRLMPPSYVKAYVKRGKNDAADAAAICEAVRRPSMRYVPIKSTEQQSALMLHRARDLLIRQRTQLINAIRAHLAELGLVAQKGREGLQQLMRTAADADDEALPSDARFACQAIAAQLQAVQMQIAGLDKRMHQAHRANPASKRLETIPGFGVIVSTAVVATMTDPKAFKTGREFAAWIGLVPRQNSTGGKDRLGSISKQGDRYLRRLLVLGALSVVRRARTRPDKYPWVVAMLGRRPAKVVAVALANKMARIAWAILAKGDTYRAPVHTSSGAIAASA

SEQ ID NO: 334593 - protein, 391 aa, unidentified
MIFVGIDVAKDKHDCFILNSEGTVLADVFTIANNRIGFETLLSRIQSCSQGESKIKVGLEATGHYSYNLLGFLLDSGLATYVINPLHTNLYRKSLSLRRTKTDRIDARTIAMMLMSDVDLKSYSNTAYHNEELKSLTRYRFDKVKERAKLKSSVARLVNILFPELEKLVSSLHIAVVYALLSNYPGASYIANANTEELAETLCTASKGRYTKSKTAEIQVAAGVSIGSKMPAKSMELKHTIALIRELDKEISEVESAIDKITSQMDSPIFTIPGIGRHMSAMILAEVGDFSNFASADKLLAYAGLSPSTYQSGQLQNCYAHMEKRGSRYLRYALFNAAKYVCLWCPTFSAYLEKKRSEGKHYNVAISHAAKKLVRLIFAMQCSGKAFLADY

SEQ ID NO: 334594 - protein, 408 aa, unidentified
MDAIIERCAGLDVHQRTVVACILYGPLDRKPKQLVRTFGTTTRELLSLLDWLTEYEVTHVAMESSGVYWKPVWNILEGDFTLILANAQRIKNVPGRKTDVNDAVWIAQLLRCGLIESSMVPPKDIRRLRDYTRYRRKLLSAATSEKNRIHKVLQDANIKLTTFMSDVFGVSGRALLQALVKGKVLQPHQVQSMVHTHLKKKVPALVEALNGRVDQHHRKMIQYHLNHLDFVEKQIAEIEYEIEQLLIPYREEMGLLNSIPGIDKNAAAAILAETGVDMSKFPTEPQIASWGGVCPGNHESAGKKKSTRTRKSNRTLKAILCQVAHVNARSQNRISAFFHRIRKRRGTLKAVVATAHLILRIIYHILKNRIPYHELGPEYDKAQKPSVHHWVQKIKQQGYEVFVTPING

SEQ ID NO: 334595 - protein, 485 aa, unidentified
MVLGHVGDTGEAVRAAIPFERVSTTTYPSRRGIPILMMEQAMAVRKKVVLELAHPNAAGIDIGSASHYVAVPPDRDDEPVREFKSFTEDMERLADWLKACGVDTVAMESTGVYWIPLFELLDARGFTVFLVNARHVKNVSGRKSDVLDCQWLQQLMSFGLLSGAFRPKDEICALRAVSRQRDMLLSYQARHVQHMQKALTQMNVQLANVISDIVGETGQKIVRAIISGERDGAKLAKMKNVRIRASEADIAKSLRGTWREEHLFALKQAMALFDAYGERLAECDRQLEAMLSALHRDGAGEPGKARRRGRAKNAPGFDVRSHLFAMCGVDLTRIDGIDTTTALKVIAEVGPELSRFKSAKHFASWLGLCPGTKISGGKLLSGATKRTANRAAQALKLAAAALRSSHSALGAYFRRMASRLDRAKAITATAHKLARLIYTMLTKGTEYTDKGQDYYEERYRERVMHHLTKRAKQLGFQLTPIPETV

SEQ ID NO: 334596 - protein, 312 aa, unidentified
MDECIFVGIDVAKDQIDVCLQPADIYRTFPNEKKGFDELQKLLAHQRITLAVMESTGGLEIPVAVSLGCAGIPIAIVNPRQVRDFAKASGRLAKTDRLDASTLAQFGAAIRPAAQPLRGDEHRALAAIMTRRVQIIDMIVSEKTRLSSVPNSEMAKDIKSHIGWLEKRLRKIDQDLGNRVKRTPLWRERDALFQSVPGVGSVVSHTILAHLPELGTLDRRKIAALVGVAPLNWDSGRMRGRRVIWGGRAAVRKALYMAAVASMKWNPIIAAFYKRLRAAGKKPKVAIVACMRKLLTILNSIARSGEAWRSCA

SEQ ID NO: 334597 - protein, 371 aa, unidentified
MNANVSTFVGLDVHKKTIQVALLSPGGDKPEEWQVANEPAAVKRLVRKLKREPSVRCCYEAGPMGYGLRRQLVGEGIECAVIAPSLTPVKPGERIKTDRRDAAKLAHLFRGDLLTVVHAPTEDDESARDLSRCREDVMEDLRRSRHRLGKFLLRRAVRYTLTKHAWGSVHRDWLRGLTFDRPADQTVFDTYLLALEQLEERVHGLDVKLDELAATEPYRRPVAWLRCLCGVDTVTAMALVTELHGFERFHQPRALMAYLGLVPSEHSSGEGKHRGAITKTGNRHVRRLLVEAAWHYRTRAVAGFRLKKRREGQPAPVVALAQRAHQRLSRRYWLLSQRGKPANKVVIAIARELTGFIWALLHPSQVGALNR

SEQ ID NO: 334598 - protein, 403 aa, unidentified
MNSVGIDISKGRSTVAVMRPFGEVVISPFEVRHTGSELSELARRLKSLDGETRVVMEATGNYHAPVAKLLHDAGLYVSVVNAKLVHGYGNNDLRRVKTDRKDAVKLANYGLDRWLSLPKYVPEEDTRLLLKNCYRQYRQYSKVQTLLKNNLISLLDTVFPNANRLFSSPIRGDGSEKWVDFVAEFWHCRCVSEKSERAFTSKYLHWCRKQGYNFSEAKAHTIYAEASGHIGVMPKSETTKLLVEQAVAQLRATSAALAALKHEMQTLASQLPEYPVVMDMFGVGPTLGPQLIAEIGDVRRFYSKKALVAYAGLDAPPNDSGDMTGRHKSMSKIGASSLRRTLFLVMSVYLQNAPLAEPVYQFMDKKRAEGKPYRVYMMASANKFLRIYYATVKAYLESLEHTA

SEQ ID NO: 334599 - protein, 484 aa, unidentified
MSKKKQRYIRGKKEERFKRKIRGIEKEKILGISIDTSKDYHKALIFDFEGRILDGPFEFDIFKEGYENFKKRMRKAIEQTKAKRIFLGLEPTGSYHENLARHLKDDFKEVEFINPSATYANRAQDMLRGLKTDDIDLGAIGDLLMRGKGYEYNLEEEGVYLNLKEQTFWREKKLKMQTRLKNQIKARLNKIYPGMMSKYNDNKPLFSDIWKSRVARGLIRSKLTPAQIKIMKVEELKRKFKKVSCPLSSKWAEKIVEYTKRMLCPKDEILKIEMDLVNRDLNLLEALEREITFVERRMVEEVKKTDSSFLLGKIKGLSDIMIASFAGAVGRISNYNFGKQIFSKSGLSSKVNQSGKRNIKGLSIRRVGSKTLRCILFKMGDSVKKHNPYFALYYSYLTEKKGKPWKKAHIAVTNKLVRVMFAMLRDRADFNPPTAKIDYLEMLFNQRRRKRRQEKKKEKENHSPGPFFGHKDIRTLERAPSPMR

SEQ ID NO: 334600 - protein, 357 aa, unidentified
MTKQPKQPTQTKQLMAGIDLHGNNLVIGIIDQDGQRLKCQKLACDRKLVAAFLAPYKAQLKSLAVESTYNWYWLVDGLQALGYPVKLANPAAIDQYSGIKHADDQNDAYFLADLQRLNILPTGYVYDAQLRPVRDLLRRRMSLVHQRTALLLSFKSLYTRTTGQAMPLGRLKAMTVAEAQTLYEHPANTLIATLQKEHLDQLDQSIEQIEKTVLASARELPCHAPLLTLPGVGRILGMTITMEIGELKRFPSPGDFASYSRTVDSKRMSNGKKKGDNNQKCGNKYLAWAFVEAANFAKRYDAPCRKWFDRKAAKTSTVLATKALACKLAKAAWHVIHDHSVYDPQRMFPGGEPKQTP

SEQ ID NO: 334601 - protein, 476 aa, unidentified
MKNQNIYRNNNYALKETLSNYKPEQLLYIPIEVGKFNHKASIVNFFGDIVVKLFEFPNKKHGLDFFVKKLNFATTSSNAQKIFLGCESCGHYHLNLVHHLKQLNFPIEIINPRDTRKENPNKNSKTDNIDLGAIARVLISNKGGRQIVPEGVYYNLQRAARTRRKFVQRKTSSKNIITGLLDRIFPGLWDKDAPIFSDRWGKASMLLLERYPHPHRIIRLGEQRLARFLRKNNTKLGDETAHKIIDAAKDSLTKPLAELHMDIFALKSHIKCLNLYNETIAQLEQEIACLLVQTPGIYLLSIDGISVIFAGEFTAEVGDINRFAYANQIISFAGSCSKVFESAEYQAQGLHISGRGSKFLRSTLNQVALALNAWCEPFHLYYTNKALQKPDKPGIARIATGNKFVKLAFALMKYEQLYKPRGLLLDEKNYYSNLWSKIIRKLSGFNLTNISQENNYLLKIKKYLEEKYALTLSTKL

SEQ ID NO: 334602 - protein, 331 aa, unidentified
MKETAISVRRDGRRVWRGKCPSDPRLLAEVIRQRAPQAKRVVFETGPLSVWFYHELNAAGLPAICIDARHAKAALDMASNKTDANDADGLAHLAEVGFFREVRVKDYDSMLTRTLVAARTRLVQIAVGLSNQIRGLMKTFGLVVPSSKGGQFEAHVRRLLADHEGLKAVILPVLEAWRSVRIRAADLGRQLLAGARRSRSCQLLMTIPGVGAITATSFVAAIEDPANFKTSRSVGAWLGLTTRRYQSGEVDYDGHISRRGDAHLRGLLYEAATVILTRSQADSSLRAWGLKLREKIGFKRAAVAVARKLAVIMHAMLKSETNFDRSGAAMA

SEQ ID NO: 334603 - protein, 345 aa, unidentified
MKITTVGLDLAKSVFQIHGVDGRGKAVLRKQLKRSEVVQFFANLPPCLIGMEACGSAHYWARKLTALGHEIRLMAPRFVKPYVKTNKNDRNDAEAICEAVARPNMRFVPIKSAEQQALLALHCARSGWVKARTAQVNQIRGLLSEFGIVLPQGITRLRHRLPGILEDGDNGLPGLMRALLSTLQTHLKELDQQIVALEREIVAWHRRNENSRRLERVPGIGPITASALVASIGNAHNFKNGRQLAAWLGLVPAQDSSGGKTKLLGISKHGDVYLRTLLIHGARAVLRHLEHRPAATNSWLARLVARRNRNVAAVALANKNARIAWALLAHQRDFASDYVSTATTH

SEQ ID NO: 334604 - protein, 396 aa, unidentified
MYSLFVGIDVSKDSFSVCGIDGNENVVFSLVAAMDRSGFSECMKVISSHSVDLSDVVVAMESTGSYHMNLLSFLTSQEIRTIVVNPLLIKNFSKLSLRKTKTDKKDAHTIARFLFAQRGSLDQFFAHQYKDLKDIAREREFILKLICSEKNDIRRMLKSTFPELERICDVFGDVMLLFLRKYPSAQLIRDTDPGCIIQAFQHEDKRLRISKSKDEIIKAAQNSIASPHPAIEQLLPGKIDTLLFLNDKLDEVTNMLVQWCESAMKDDLKILTSISGINTKTAAPFLAEMGNYRNYKTYKNFIAFSGLDPSIHESGTFKGMSRLSKRGNSHLRRIIYLMTFCAIRIKGPLKTYFLKRRNEGLPFKKALFATAHKLIRTIFAMLTKRTYYVSGEMITG

SEQ ID NO: 334605 - protein, 337 aa, unidentified
MKTTENKFDTFIGIDVSKLTLDVTILNPRSRKLSHSVFDNSDAGFAKMKNWLSIHHKVGFSRTLFCLEHTGLYTRSIDRFLREREAFVWMESSLHIKKSLGLTRGKNDKIDSQRIAEYAYRFSDKAVIRQHCTAGLQTLRDLLTTCDRLNKSLKSIMVSINELKRADIHQALNLETYQLAAIRGLKTSIKEVEEAMFEAVEKNKQFKMYCEMATSIPGVGKILAIKLIIYTQVFTRFESVRQLACYCGVAPFEHRSGTSINGKTGVSKFANMDLKSTIHLASLSAIQHNPDMKAYYHRKVNEGKSKMSVINAVRNKLLSRIIAVINRQTPYVVLSQA

SEQ ID NO: 334606 - protein, 409 aa, unidentified
MARVFEAVFERVAGLDVHKAQVTACARVAHLAEFSTTVAGLLALADWLKSYGVSHVAMEATGVYWLPVWHILEDDFELTLCNARHVKNVPGRKTDVSDAQWLCQLMEAGLLRGSFVAPKPQRRLRALTRYRKTQVGERQREANRLHKALEDTGIKLDCVATDILGKSGRAMLDAVVAGTTDPAVLADLAKGLLRKKLPALKEALQGRFEPHHALIIGAILSHLDFLDEHIAQLSEAIEAELGPTGQAAVTLAATITGVAQRTAEVMVAEIGTDMSVFPSAGHLASWAGRCPGNDQSAGKRRSGRRRNGSKFLGIGLQEAALAATRVKDSYLQAQYQRLKPRIGHRRALGAVQHSMLVAYWHMFTTGETYRELGGDYYARRDPERLTKRLVARLQSLGHNVTLEPLPQAA

SEQ ID NO: 334607 - protein, 327 aa, unidentified
MSQRERRGKEVFRGGIPSQYHVLRKLLDHFKDCRIKVAYEAGPYGFWLYDRLTEDGIETIVVPPSLIPIESENKVKTDKRDSRKLAKLLEGNMLKRVYVLKEEDRVDRELLRTRRQIGEHRNDVARQIKSKLLFYGIRSPFAPRYGWGRSYLQWLRGLDLPREGLRACFESLIELYEYLSDQLMKMNQRVKELSQSSKYKQRLKLLCSVPGIGTLIGMEILVELQEVERFKRADELASYIGLTPSEFSTGQYVRQGRITRCGNKRVRTCLVESSWILITKDPLMRLKYNRLKSMKGAKRAIIAIARNLIIRIRRILLNNEPYVVGGC

SEQ ID NO: 334608 - protein, 317 aa, unidentified
MSKSSKLNFEGQQIYVGMDVHKKIWSVSIFTDEFEHKTFTQPPEVGTLVNYLKRNFPGAAYKSVYEAGFSGFWIHDRLQEHGVQFLVVNPADVPTKDKERRSKTDRVDCRKLARSLRSGEIEGIYVPCRPKVEDRSLMRTRHGMVKKQTRCKNRIKSILQFYGIQLPEELANSHWSKRFITWIEVIRMERASGNVALKVHLEELNTMRKIIADSTSSIRILANSDEYRQNVRLLKTVPGISTLTAMTLLTELYEISRFKSFDKLCSYVGLIPDTDSSGETERKTGITNRRNPQLRCILIESSWVAVRKVTNASIDSR

SEQ ID NO: 334609 - protein, 372 aa, unidentified
MASIIYVGMDVHTTNFTFCCYTADSDRGFAVAQTEPDYRQVIKYMERVQKQRGEECKFVCGYEAGCLGYSLYHQLTRCGVDCVILAPSTMHQEKGKRIKTDRRDAENIARCLAFSLYSPVYVPTTEDDAVKEYIRMRDDIKADLKRVKQQIIAFTTRHGFAFDGKSYWTQKHLKWLEALVFEHPLYKETLQEYLILYYMLDEKVAVYDTRIEEMSHLEHYEENVQKLCCFRGVAAHTALSLLVEVGDFQRFRSAKHFAAYLGLVPGEHSSSDKQIRTSITKAGNTHLRRLLVEAAQSYNRGAIGKKSAALKARQGGNPAEVIAYADKANERMQRKYYRIAFKSRHNIAKTAIARELACFVWGMMTGNISNAA

SEQ ID NO: 334610 - protein, 386 aa, unidentified
MPQPNDLSRSLAILDQNRTVIAVIEMSQSSWLIGGIVPGIERHPLKKIPVNEEALLQLLQRWRDEAVKAGGTITRIAVAFEAGRDGFWLARWLRARDIEAYVIHPTCVAVSREHRRAKTDRLDTELLKRVFLGWLRGEPDHCSMAAIPTLDEEDARRPNRERENLIGERTRIVNRMQSCLARLGIRAFRPTLRKAADLLASLRTPEGELLPPNTLAEMRRDIARLHFVVEQIKEIEVARRDRLQHAPEGQCSAMVRLLARVIGIGIETADMLVHEVLARNLRDRRAVARYAGLTGSPNESGSRRREKGLARAGNARVRRGMIQLAWRFLMFQKDSALAQWYRARTLDARRGTRKTMIVALARKLLVELWRLVTTGQLPVGVALRAA

SEQ ID NO: 334611 - protein, 252 aa, unidentified
MSTEHFVGIDVSKDKLDVAVYPSNQVFQVDNDPNKLDELLQTLQDLQPLLIVFESTGGYELLAATTLYAAGLPAVIVNARQIRDFAKSVGKLAKTDTIDAQVIAHFACAVRPEVRPFKDKSTQELSALVTRRRQIVDMIVAESNRLTLATKQNQKDIKAHIRWLKKRLLQIDNNIKGQVHKSPVFHKKDKILQSTPGVGPTTAVSLICGLPELGTLNRKKIAALIGLAPLNRDSGRFRGRRMIWGGREQFFI

SEQ ID NO: 334612 - protein, 391 aa, unidentified
MIYIGIDVAKDKHDCFITNSDSEVLFKAFTIFNNLDGFNDLYQKIEAVMDDVTKLKIGLEATGHYSYNLLGYLIDKGLPTYVINPLHTNLYRKSLSLRQTKTDKVDARTIASMLMSDVNLKSYSDTSYHNEELKSLTRYRFDKVKERAKLKTSVSRLVCILFPELEKLVPTLHMASVYALLSEFPSAKHVATAHLTRLTNLLSKSSKGRYGKDTAITFRDSARASIGSNMPAKSLELKHTIKLIQELDSEIDEIENEIKIIMDEINSPILSIPGINYRMGAMIIAEIGDFNRFDSPDKILAYAGFSPSTYQSGQLDGAYAHMEKRGSRYLRYALYNATKYVCHWDPTFAAYLAKKRAEGKHYNVAISHAVKKLVRVIYHLEKTKQQYIKAA

SEQ ID NO: 334613 - protein, 351 aa, unidentified
MKIYVGIDIAKLNHFAAAISSDGEIIIEPFKFTNDADGFQLLVSKLESFDKNSLIIGLESTAHYGDNLVRYLVTELYQVCVLNPIKTCQMRKNNVRKTKTDKVDTYVIAKTLMMQDNLRFVSFFDLDMMDLKALGRFRQKTIKQRTRLKIQLTTYVDQVFPEIQYFFKSGLHQHAVYALLKEAPSPKEIASMHMTHLANLLKVNSHGHFTKEQAKELRVLAQKSVGANDSAISIQITQTIQQIELLDSQLEKIEAEMTDIMKFNDSVIMTIPGIGYINGGMILGEIGDIHRFSNPNKLLAFAGLEPSVYQSDNFQAKTTRMSKRGSRVLSRLAFCQRRTADRGRPGSGSGQ

SEQ ID NO: 334614 - protein, 338 aa, unidentified
MTITTIGVDLAKNSFQLHGVDHTGRTVLRKKLGRSRFLEFFADLPACTIGMEACGGAHHWARELTRLGHTVRLMPPQYVKPYVKRNKHDAADAEACCEAVQRPSMRFIPIKSQEQQSLLMLHRIRDRLLAERTASINAIRGHLAEFGIVAAQGARGLGELRGVIGDVDDHRLPARARALLTYEVEHLQELEAHLEHLDHELVEQARTDEACQRLTGVPGIGPVIATAMVATVGDAKVFRNGRSFAAWIGLTPKQHSSGGKELLLGISRRGDGYLRRQLTHGARSLVKIARGREGKLWAWINGLLARRSFNTTVAAVANKLARIVHAVLSRGEAYRAPA

SEQ ID NO: 334615 - protein, 440 aa, unidentified
MTTPTLPVLDPTAAAIDVGSEQLHVSIAGGRPKVFGTTTGQLHALRDWLKENGVRSVAMEATGIYWLCPYEVLEKAGLTVVMVNGKYVKNLPGRKTDMQDCQWQATLHAHGLLRPGFVPPEHIRRLQDYLRLRSDHITMAASHEQHLQKALERMNLKIHDVISDLTGVSGLKLITAILAGERNPVALLALCDPQIQKKKADRLCQALEGNWKEEHLFALRQAYELWQSYQTKIAECDQAIAKVLEALAGPVDPAAPAPPAATKRGGVNTPQIAGLHGLLWRLCGQKDPTQLPGVADHVLLQLIGEVGTDLGAHWKTAKEFTAWAGLAPGSKQSGKRRGNQKRSRNRAGRLFCVIARSVGRSVDKALGGFYRRLKGRRGGLVANKALARKLAEMFWRLMVHGRDYVEEGLKKYEAKVAQTEQHLLRKLASKYNLVLQPKAA

SEQ ID NO: 334616 - protein, 350 aa, unidentified
MLIIGCDYHPSFQQIACVDADTGELSDHRLGHREEAEAFYRVLRQRNLSVRVGMESSGHSRWFERLLYEVGFELWIGDPAEIQTKRVRKQKTDRQDAQLLLQLLLENRFPRIWVPDAANRDLRQLLWHRHRLVQMRTRVMNQLHVVALNEGLQRKKALWRPAGRKEMESLALAPWAGHRRQDLSELLDQLTPQIQKLTQALELEVEKRAVARRLKTHPGVGPLTALTFELVIGTPDRFHCGKQIASYVGLVPEENSSGNRRRLGHISKQGNVLLRFLLVEAAQVTVRSQAQWRSKFFHLALRRGRKIAKVAMARKLAVHLYWMWRHGWDYSQFKRFGSHAGEPGNLDGGK

SEQ ID NO: 334617 - protein, 327 aa, unidentified
MFYLGIDVAKAKLDCCLLDMTNGKRSTKVVANSRAGLTDLLGWLGKRHTEPSHVHVALEGTGVYHEMAACGLHDAGLSVSVVNPAQVRAFATGMGVRTKNDMVDSHVLARFAMHAQPMRWSPPAPEARILQALMARREALAQDLQRERNRHEKAEITAPTALVLHSILETIEFLERHLASLQREIDDHIAAHPGLKANLMLLQSIPAVGPQVGRTLLAIMHARHFDSAEQLAAYLGLVPVQRQSGSSIQGPSRLSKAGPPKVRATLYMAAVVAKRYNPHIKALCERLAARGKSTMSILGAAMRKLVHLCFGVLKTRQPYRANYVAIA

SEQ ID NO: 334618 - protein, 389 aa, unidentified
MLHDHPSVGPTAILTQFGAIFVSLELSRSKWVLTSLSPGNGEKMSQYSLTAGDIGGLLARFADLKRKAKERTGSDYPIITIHEAGLDGFWVHRVLQNEGIESYVVDAASIATSRRRRRAKTDKIDGEALLRALLAFKRGEPRVCAMVVAPSPEQEDRRRLCRERQTLIAERIIHVNRIKGLLFAQGISDYAPLRRDRRKRLEGLRTGDRRPLPVHLKTQISRELDRLELLLDQIRKVEAEQEALLAAESKAAPEAEPHNAVAMLLAVKGIGEHSAAILWSEGLCRQFSNRRQVAAYAGLAATPWRSGAVMHEQGLSKAGNPQLRTTMVQLAWLWLRHQPQSALACWFRARGERGRKSSIVALARKLLVALWKYVTHGVVIEGAVMKPAA

SEQ ID NO: 334619 - protein, 387 aa, unidentified
MYYVSIDIAKLNHFASVVSADGEVLIKPFKFTNDNDGFCKLLSVLASYERGSLIIGLESTAHYADNLVEFLVSKRYQVCVINPIQTSTMRKNNIRKTKTDKVDTLVIARTLITQPHRFFSHEDIDLMHLKDLGRFRQKNVKERTRLKIELTAYVDRVFPELQYFFKSGLHQKAVYALLKEAPTPELIASMHLTHLTHLLEASSHGHFNKQQARELRILAQKSVSSSDRALSLQVTQSVEQIELLDRQIKDIESQMTEIMLGLDSVIMTIPGIGYINDGMILGEIGDIHRFSKPCQLLAFAGLDPSVYQSGNFNASHTRMSKRGSRVLRYALINAAHNVVKNNATFKAYYDTKMAEGRTHYNALGHCAGKLVRVIFKMLSDDVTFNLE

SEQ ID NO: 334620 - protein, 427 aa, unidentified
MSEEKPLELRVSVDVGYRRHSVAMGLSSGEVLEEFEIEHRPEGFEEFFSRIEKQRKKKNCAVAVAMEGYNGYARPLDSMVRQRGYRLYNLNNLKFARFKEIFPGAAKSDRIDARKGLELFQLRDHLPLAKEVLQEVSGTPQHNEVLKRLTRRRRRLVNERVRVVNNLQADLQAVCPGLLEITSEASNQWFLNFLLSADTLPQLARLRKASLLKIPAVGKKYASLIEAWQKRAHFGAEVEWVSEMIQEDAQRCLDLEEKIKTLETKIQQVATDSKIAKTLLSIPGFGPVCTSELAGEIGTIERFSKEGSLALYLGMSTLDNSSGKYQGTKAPKHVNTRAKAAMMIALDRHRKYVPESQRYYEKKRSEGKRHNQAIRALGRHLCRIIYKMLKEQREYQLRSEKGDTQARVRSRSCVKTRIRRPKASAKS

SEQ ID NO: 334621 - protein, 385 aa, unidentified
MDRTSCSAVSRHTLHCALELSKNSWLLAIQFPDREQPSVYSIEGGDTEKLMAKLTAARDCWAKVIGSLPVITLCYEVGYDAFWLARFLRAHGIECLVIDPGSVQVNRRGRRVKTDRVDVKMLLRTLIAWCRGERHVWSLVRIPSIDEEDLRRSHRERSRLVRERTAHINRIKGLLFAQGIRGIKVKSQCKTLAVDKLLTGDGHRLPPRLACEIARELQRLAMVQEQIAEIEHERDTAPTPCEATERKRQLLLQLKSIGPAISALLSREVYYRQFVNRRQVGSFLGLTPSPYNSGEEERCQGISRAGSGHVRAIMIETAWLWIRHQPKSALTRWFVERTAGQSTRMRKIMIVAVARKLAIALWRYVEHGLVPQGAILNPPTTGKAR

SEQ ID NO: 334622 - protein, 387 aa, unidentified
MTEQRRSYAGECVYVGVDVHKETYTVTCVCHKQIVKTATVQAEPASLAASLRRWFPGATLASAYEAGFSAFVLHRALTQAGISNIVVNPASLAVAANDKVKTDRRDSKRLAVDLADGRLRGIYVPTEEEELARLLPRTRAQLVEHRATLARQIKAKLHQFGLIAPSSRRLLSHRYLREIESWTLPPELRASLQMLAEQWRFVTRQLIEMRRLLREQATAQAAIDKVYRSVPGIGEVVARTLATELGDMTRFANERALFSYTGLTPSEYSSGASVRRGHMSRQGSSRVRHLLVETAWRALPYDAVLQTMFERIAATRGKKRAIVAIARRLIGRIRACFRQGTMYAVGTLASVPRHPWQEAWLKRSHSLVARPHAEQLPTIMNRIEQEE

SEQ ID NO: 334623 - protein, 412 aa, unidentified
MLLFIGDDWAEDHHDIELEDETGRRLAKVRLPEGLEGIARLHALVAQHAPAGWADLPSEEVAARVVVGIETDRGPWATALRAAGYLVFAINPLSSARYRERYSTSGAESDAGDAHVLAEIVRLDRDHHRQIAGDTDLVDAVKVVARAHQTAVWERTRQVLRMRSTLLEYFPAAVEAFEDLSAKDSLLLLARAPSPARVGKLTRSQVVSALRAARRHHIEAKADALLTVLRAPGLRQPTTTEAAYAAVVVGQVGIITALVQITQLEEVVDEHFGRHPAADIHLSQPGLGVVLAARVLGEFGDDKNRFHDVRARKNYSGQSPITRASGKKTIVMARYATNRRLGDALHQQAFSALTASPGARAYYDALKARKIGHHAALRQLANRLVGILHGCLKTGTKYDETIAWQHQNIAAA

SEQ ID NO: 334624 - protein, 414 aa, unidentified
MIDERRWYAGVDWASESHHVFLTDENGRRIGEKIFRHSGEGLAEMAVWLSSTSGGVPAQIHIAIEVPHGPVVETLIERGFKVHAINPKQMDRFRDRFTLAGAKDDSRDAEVMASALRTDLRCFRPLAVADPVVIELREWSRIADDLGAERNRLTNRMREQLWRYFPAMLDLESDLGAEWLLDLWEIAPTPHKAIRVREATVAKVLKRNRIRRFDAAHVLDVLRKPPVQVAAGTTEAAAAHIKTLTARIRLVNHQLGEAHRQLDALTARLIPSEENGPGQRKQHDVEILASLPGVGRIVLATLLAEAFDALQRRDYAALRSLTGVAPVTKRSGKSCIVVRRQACHDRLANAMYHWARVAVQRDPRSRSKYAALRSRGHSHGRALRSIADRLLNVACAMLKTGTTFNPSLAAEKTP

SEQ ID NO: 334625 - protein, 429 aa, unidentified
MNYTQNEKIMQVKNSTLVVGVGIVKNKHAARAFNFRGIEYDKAIFFENNEAGFKKLLHWIRKISEKENKTDVIVGMEPTGHYWFALEEYLRRKTDFLRVVVNPAHVKRIKTLDDNSPTKTDKKDAKVIAKLVVEGRYSVPHMPEKEYADLRVAMSHRERLVKDIIDLSNKVQQLLDKYFPEYKKVFKKWDGKASVAVLKELFLPELILEKTDEEIVEVFRKGANRAVGIKRARKLKKAALNSVGIKEGAEFTQFELRNLLEQYELLNKQKDLLEEKVEKLLESMPEAKYMESVKGVGFMTVAGFIAEVGDVNNYDHPKQIQKLAGLNLKENSSGKHQGQTRITKRGRPKLRALLYRVMMPMLANNLEFKKLHEYYITRRDNPLKKKQSMIALACKLIRIFFALGQKHIMYDGEKLMNDIEKNLSLQEAA

SEQ ID NO: 334626 - protein, 416 aa, unidentified
MEIEHTQCAGLDVHKKTVVAAIIVPDGQGGLRKKVRTFATMTADLLELSDWLLSFGVTHVAMESTGEYWKPIHNILEENFEVLLVNARHIKQVPGRKTDVMDAEWIADLLRHGLLRGSFIPPVGQRELRELTRHRTNFVRERATLVNRVQKTLESANIKLASVASNVMGVSGRAMLEAIVTGTANATEMAGLAKGRLREKREQLDKALEGRVKPHHRFVLSELLCQVDNLDETIARFDAEIEKYCRPFEEAVELLDTIPGVAQRIAEVIVSEIGSDMSRFPTANHLAAWAGVAPGNNESAGKRYSGATRHGDRALTVALVQAAHAAARSRNTYLSAQYHRLAGRRGKKRAIVAVAHSILVISYHIIQRKEPYRDLGGDYFDKQRPEATAKRLLKRLQHLGYDVSHIEQLATSPVAA

SEQ ID NO: 334627 - protein, 355 aa, unidentified
MKSSKYIGMDVHTATISVAVRDAAGKLIMESVIETKASTILQFIRGLRGDLHVTFEEGTWAAWLYDLLKPYVTNVVVCNPRRNALLKEGSRCDRIDARKLAELLRTNLLRPVYHGEKGLRTLKELARAYLTISKDLTRVMNRVKAIYRGWGIPCGGKSVYHPRHREEWLSKITQASVRRRAELFYKQLDALVLLRKQARQELLAEGKKHQAWKWLRSIPSLGPIRVAVLMAIVQTPHRFRSKRPLWKYSGFGVVTHSSADHRYVQGQLERSKKPVSVRGLDPDHNHDLKDLFKGAATHASTRKGPFLEFYEALVAKGMRPEMARLTLARKIAVITLTVWKKGVAFDAKYLKPQTA

SEQ ID NO: 334628 - protein, 347 aa, unidentified
MRFYAGTHKHYCGIDLHARTMYVCVLSREGAVLLHRNLPSNPEIFLVAIAPFREDLVVAVECVFSWYWVADLCAKEGITFVLGHALYMRAIHGAKAKNDRIDSHKTAGLLRGGLLPQAYVYPAEMRASRDLMRRRLHFVRQRGQLLAHIQNTHHQYNLATPGKRITYRSNREGIGEGFSDPSIRESLAADLALVDHFEVVIGDLETSLVHKAKIHDPDSFHRLRSVPGIGKVLALTILYEIHDIQRFKRVGEFASYSRLVKCQRSSAGKVQGTGGAKIGNAYLKWAFSEAAVLFLAKCPEAKKLLTRIERKHGKAKALSILAHKLGRAVYFMLARKQAFDLERFLRS

SEQ ID NO: 334629 - protein, 309 aa, unidentified
MEQQVKFEQVIKCGCGMDVHKKSVVATIRQSDTDLETREFNTYTRSLKSLREWCKTEGVTHVAMESTGIYWRPVFNILEEDFEIILVNARHIKNVPGHKTDKKDSRWISKLLLSGLLKGSFIPPREIRELRDLVRYKKKIVGQIASEKNRVIKTLEDANIKLSSVFSDVNGASASKMITDMLVGKEEVEGLMEHIHGKVQAPRSEIRQALEGTLTDHHRFMLQLIKRSISEKEQLLTVLDEQIEKAAQQYKVELDLLQTIPGVGKDSSVRIISEIGVDMIRFPNEHHLSSWAGMSPGSNESAGKKKVQE

SEQ ID NO: 334630 - protein, 420 aa, unidentified
MNKTKQRKLDRVKGNVLIVGVDASKSKHDAAVRLPQGVILKTFSFNNDLAGFEKLAQEVLRSCERYNLRGAILGIEPTGHYWEALAYWWEEQSGTVELVNPMHTKRAKELEDNSPLKNDKKDGIVVADLVSQGKYFECHLPRGVFAELRNLVFERDRCQNQRTQVINQLHQSVDRLFPEIAAEFSGIRVKTYQRLLRKYPDPKELAAVPVGKLTKKLRKWSRGSVGEEKAQRLIALAGRSVGVKEAASIIAAEVKRLIALLEWIESDSSKLKAQIEQCLERTPGAAMLLSVPSFGPITVAGILANTGNLAEYEHPEEALKLAGLNLFEISSGKHKGRLRISKRGRAQLRKILFMAALRAARRDSPFRQYYQRLLDRGVEKTAALVALMRKLLRISWSLVRNSQMFDVQRVNATEAQKQAA

SEQ ID NO: 334631 - protein, 315 aa, unidentified
MANLTKSKSVVNVGVDVGKHFLDVCIHEKDKYWREDNTLAGIKRILKRLSHYQVERLVMEATGRYEFELAQQAYARKVPVCIVKPLLVRRYAGANDQLAKTDKIDAQIIAEFGAILKPKVTPAKSKNLIAIKDLIARRRQLVSLRTQERNRTGIMGKTLAVSCRRMVRHIDAEVARIEKQLAKHVENQAQWTEKQSLLKTVPGVGDTLVYTLLADLPELGELNNKEISKLVGVAPMNRDSGRMRGKRRIQGGRANIRTVLYMATLSATQCNPVIKAFYKKLVAQGKHKKVALTACMRKFIIILNTMLKNKTEWAF

SEQ ID NO: 334632 - protein, 350 aa, unidentified
MEHVGMDIGLRESQIAILTDAGELLDKRIRTERSRLVQFFGSRAKAKILLEASTESEWIARCLEELGHEVVVADPNYAPMYCHRTRRVKTDRRDAHALAEACRLGAYRPAHRSSDEQQRLKGILAIRDSLVRTRTRWMVLVRSLLRREGIRVPNAGGEVFARRVHDLGLPVHLLAGVAPLLSLLAPLNEQIKSQDQQLAQIAGSNETARRLTTVPGVGAVTAVAFLATLDQVNRFQGAHQVESYLGLVPMEWSSSEVQRKGHITKAGNGRMRWLLVEAAWRVLAGQKGLAAFPLRNWAERIAQRRGRNIAAVALARRLAGILYAVWRDGTDYDALRLEARARSSRSVAAA

SEQ ID NO: 334633 - protein, 343 aa, unidentified
MQVTTFSVDLAKNKFQVHGFSAVGEKIVAKTLPRAKFLAFLSARSERCRVVMEACATSHHWARELRSAGFHPELLPAQHVAALVVGEKNDANDADAIYEAASRPKIRRVAIKSEPQQDLLALHRVRDRLVRSRTALINQIRGLLAERGVVFAPRTGTLKRALPTWLQASSGPLKILTESLLEEWRLLDQRIGHLEIELKAHYRASPACQRIGAVEGIGVITATAIIASVGDARTFHSGRQFSAWIGLTPRERSSGERRYLGGITKRGDAYLRKLLIHGARAAVQAARRKDDARSRWINALRQRRGMNKAVVALANKNARILHALLSRGEDYRPPARERLMARS

SEQ ID NO: 334634 - protein, 338 aa, unidentified
MNNSHIIGIDLGKNSFHLVGHDHAGNQLFKKKLTRQKLLEFLSCHEPIIIAMESCGGSHWLARKCTEFGHTAKLIPPQYVKPYVKTNKNDFIDADAIAEAASRPTMRFSSAKTESAQVISTIRKIRSGYIRERTACMNRIGSILLEFGVSLPKGHASMKGLFQWLADKNQNLPPLIIFELSELHEHYQNLNERIDSQADKVERILADNEQMKQLQSVPGIGPIIASACLSSVGNPNDFKNGRNFAAWIGLVPIQYSTGGKSTLLGISKRGNKELRTLFIHAARSILWRDKSVEKYFGSWLVELKKRKPFNVAVVALANKIARIAWAVLVSKKSFEIRT

SEQ ID NO: 334635 - protein, 345 aa, unidentified
MDHFAGLDVSVKETSVCIVDDTSTIVREVKVSSEPDALLAVLTNPAYQFKRIGLEAGPLSQWLFSALAEAGLPVICVETRHMRAALKAQINKTDRNDARGIAQMMRVGLYRPVHVKTLRSQKLRMLLTHRKLLQTKAIAIENDLRGTLRNFGLKVGVVGAVKFEARIKELVENLPDLAALIEPLLIVRRVLREQIGILHRRLLVVVRADDICRRLMTVPGVGPVVALTYRATVDVPTRFRNSKAVGAVFGLTPAKYQSGEIDRTGGISRCGDEMMRVMLYEAAHIMLVRSTKWSWLKAWAMQIARRRGLKKAVVALARRLAVIMHRIWVDGTEFRWTREQAVAAA

SEQ ID NO: 334636 - protein, 360 aa, unidentified
MRHLSAKLLSDRIGSEWEPSMGEVTTMGLDLAKHVFQVHGVDAEGATVLRKQLRRAQVLAFFSRLPPCLVGLEACATAHYWARELRALGHEVRLMPAQYVKAYIKRNKHDAADAEAICEAVQRPTMRFVPVKTADQQAAVLLHRGRERLVRQRTGLVNALRGHLAEFGVIAPQGLRNVGDLIAIVRADGDTRLPDVARQVLQVLANQIEQIEAAISALERQLLAWHKSNPVSQRLASIPGIGPIIATAIATTVADPNVFRSGREFAAWLGLVPRQNSTGGKIRLGGITKRGNRYLRRLLINGASANLLRSKATKADPWVIGLRRRRPPLVVAVALANKTARIAWAVMLRQKEYQPRAVAA

SEQ ID NO: 334637 - protein, 377 aa, unidentified
MTIVADTHAPVDVLGVTLGVDTHADFHVAAVIDPIGRHLGHTSFDTTVAGFKALLAWANSFGPITLAGVEGTGAYGAGLARFLTAEGVIVLEVDRPDRKTRRDQGKSDPIDAYAAARAAASGRASGTPKTRTGDVEAVRVLRVARTGAVRARAKALTQLKSLIVTAPDALRAQLAGLDGPTLVTTCARLRPARGTAPTPSPFAKRPPRPGRLVDPTAATKRSLASIAQRVQQLDAEIAELDDDLEALLTPLAPTLLELFGVGYDVAGQLLVTAGDNPDRITSEAAFAHLCGVAPIPANSGKNQNNFRLNRGGDRAANAALYRIVLCRLRYDERTRVYVERRTKQGKSKKHIIRCLKRYIAREVYAAIQTDLNPNITP

SEQ ID NO: 334638 - protein, 361 aa, unidentified
MKKPSQHLIAEVPRSAAKVGMTIGIDLGDVWSHYCTLNEYGEVVNRGRFRTTPSGVEKWFTDLPRARIAMEAGTHSIWVSEQLREMGHEVIVANVREVRAISHNNRKSDTVDAEKIARYARVDPEILHPISHRTVAQQEALTLIRARNLIVRLRTAAVNSVRGLAKPCGYRLPASSTLCFAKRCMAVLPPGLAQALGPVLEQIAAMTVKIQQYDRTIKRLTETEYPETQALIQVYGVGQLTALTYVLTLGSKERFRRSRDVGCYLGLRPRRSQSGDRDPQLGITKAGNVYLRSLLVECANHVLGPRGRDSTLRQWGLHLASRGGKQSHNRAIVAVARKLAVLLHRIWVTQEPYIPFYAVAA

SEQ ID NO: 334639 - protein, 339 aa, unidentified
MTTCTTVGLDIAKSSFQVHGIAASGRPTLTKKLRRGKVLEFFANLPACLIGMEACGGAHYWARELAKLGHEVRLMPPQYVRPYVKTNKHDAADAEGCCEAVQRPSMRFVPVKSQTQQSLLMLHRIRDRLVAERTGTISAIRGHMAEFGIVAARRGPGMKELLATISDVDDARLPAMARELLVLQVEHLRAIETRIADLDGRLQQQARSDEAARRLIAIPGIGPVIATAMVATVVDAQIFPNGRSFAAWLGLTPRQHATGGRERLLGISKRGDGYLRRQLMHGARSLVRLAAGRNGRLWTWIDGLVARRPFNVVVAAVANKLARIIWALLSRAETYRAPA

SEQ ID NO: 334640 - protein, 409 aa, unidentified
MEVIYPRCCGLDVHKREVVACVVRTDPDGTVRKEVRAFGTMTPDILALADWLGAQEVSHVAMESTGVYWKPIWNLLEDSFALLLVNARHVKAVPGRKSDVRDCEWLADLLRHGLLSGSFVPDRPQRELRELTRYRTSLVRERTAEANRLQKTLEGANIKLAAVATDILGKSGREILAALVAGETEGTALAQLAHGRLREKMPQLERALVGCVGEHQRFLVAEQVAHIDFLDEAIARVSAEIAERVRPEEEAIARLDTIPGIGPAVAETLLAEIGVDLARFPSAKHLASWAGLCPGNHESAGKRHRGTTRKGSPWLRACLVQAAHAAARTKGTYLAAQYRRLAARRGRAKAAVAVAHSILVIAYHLLTEGTIYRDLGGNYFDDRNRQAVERRLVHRLQGLGYRVSLEPVA

SEQ ID NO: 334641 - protein, 406 aa, unidentified
MNAVGIDVPKGKSTVAVLRSFGEIAVSPIDVPHNPKELSELVTLLKTLEGDTKVVMEYTGNYYLPIALFLRNNGLFVSVINPILVKDYGSKSLTVRKCKTDKKDSLKLAAFALDRWLELPEFNAQSQARLLLNYYNRQYNQYIKLKVMLKNNLISLLDQTFPAANTLFSTPMRKSDGHEKWVDFVLKYPHCEYISKKSLSSFSKSYLSWCRKFGYNFSESKARSVYDFACNCSPSLPFNESSSLLITNAISQLNCINETIASLAKEMNALAATLPEYDVVLSFFGVGSVLGSQLIAEIGDVSRFSNKKALVGLAGLDAPPFQSDTFNSQSRKISKRGSSDLRKTLFQVMSVILQNAPANNSVFQFLDKKRAEGKHFYVYMTAAANKFLRIYFARVTEHLNSLKTAA

SEQ ID NO: 334642 - protein, 384 aa, unidentified
MDANQVMGADAGNIVLAVSLELSAAQWKVALHDGLRERPAVHAVGAPQAGIRLQGVLELIEQHKLKWALPIHVRVVVSYEAGQDGFWILRALSSRGIECYMVDAASIPVERHKRRAKTDRLDAIRLVTNLRAWLHGERDRMRVVRAPSAQDEASRQLIRDRGQLHKEVLQHRERMRKLLVTLGCWDEVDHRSFARRLAAGQLACHDGTPLPDELRERLQRETARLELAEQQLATLERTLEQRLPTPVRERITYLRRLRGVGHIGASRLMLELFWRQFSNRRQLGACVGLVPQPYDSGQSHVDQGISKQGNRRVRTQLVKMAWGWLRYQPDSALARWFNERTQGTGPNRRARRIAIVALARRLVIALWRYLRDGVIPEGARFKPV

SEQ ID NO: 334643 - protein, 327 aa, unidentified
MIKTPAPVYVGMDVAKATLQVHLNGHQFEFKNDSKGHARLSEKLAQLTRPHVICEATGGYERPMVEACHKAKILVSVLNPAHTLAASQAQGKRAKTDPCDAAALTDYGQRFQPAPTAAVAPAVREITELTLWLKQLIDHRAVVKTLAEHHANSFVGQRHEELLAHYQSQIQIVEKEIKERVQAQAPFQQRVDCLTQIQGVGFRTALLTLVFLPELGSMNRGGTAALTGLAPWTRDSGTMKGKRCIGGGRAQVRPVLYMAALSASRCNPVLAPLYQALKKREKPSKVALTAVMRKLVIHMNSELKKLAAKPVNEKPGKSNKTKKSLAK

SEQ ID NO: 334644 - protein, 450 aa, unidentified
MGKGNGSGVTRGDLRRNARIERLRVMVPVTNAVLGVDLGEKKQALALVDRDGRVLARRSPRLTVHELGGVLDWAAERARAGGFAGVTVSCEPTGPRWMVLQELCRRRDLPFVCVQPLVTHVAREQEDLTGDKTDEGDTVLIARLTRQLQCYVPEVLDPAWAELRAAGRDRAAQITRATAARQLIRDHLGLAVPALLAVHSDPLDSPTWLASVQVVLERCGGDLDAVMAMGREAFTAAVAAKLAAWGGKRTGPTAAKVLAALAGAAVLPRMMRAAARRVAGALEDLQHATSRRARLEGQMTALLAELGIDHERICQIPGLTPAGLAAILAETGDLRRYRSSSSVVKHAGMSPARNESGSFHGQAKMSRRGRPALRLAAWRATWAVLRHCDVLAAKHAALTSRDTSPLADGQARVACAASLLRWIWSLTVHGTRWDPRIAAGQLSHHHAMAA

SEQ ID NO: 334645 - protein, 425 aa, unidentified
MEDERNWFVGVDWASETHHVRVSDARGRKLGERAFAHSGEGLAAMATWILEVTGAPPEAVFVAIEVPHGPVVESLMERGFRVHAINPKQLDRFRDRFSPAGAKDDSRDAEVLGDALRTDPRCFRALQPLDPVVVELREGSRMAEDLKQERNRLGNRVRDLLWRFYPQMLGLTDDVAAPWFLDLWRLIPTPEKAARVREATVDRLLKRHRIRRLSAADVFERLRTPAIPLAPGTVSAATAHLAAVAKRLDLVNRQMLVIDEQLDRLTHCLVAAQEGAEGQRPEPCDVTILQSLPGVGRIVLATLLAEAFEAFEALQRRDDRALRCLAGVAPVTKRSGKSRIVLMRQAAHVRLRNAVYHWARVAVQHDPRSQAKYAALRARGHGHGRALRSVADRLIGVACAMLEAQTTFDPNLASQRALNLTKPTC

SEQ ID NO: 334646 - protein, 342 aa, unidentified
MDQVSIIGIDLAKRVFQAHGSAPDGSVVFRKKLSRAQLLLFLAAQPRCTVAMEACATAHGWGREIGELGHEVRLIPPIYVKPFVKRQKNDAADAEAIAEAASRPTMRFVAVKSEDQQARSMIFRTRDLLVRQRTQLINALRGHLAEHGVVAPQGTAHVKRLAEVIGDETAVLPATVREIGRLYLEQIGLLTGRIEELEKKLRTEAGQAEATRRLQTMPGVGPITAVAIESFAPPMETFRRGRDFAAWVGLVPRQNSTGGKQRLGRTAKMGQRDIRRLLIIGAMAVVNSAARHGAPEGSWLERMLAKKPKMLVAIALTNKMARGVWAMMTKQEDYRYPAAVAA

SEQ ID NO: 334647 - protein, 405 aa, unidentified
MGRDFVSELWVGIDAGKRAHHCVAIDAAGSVVLSKRIVNDESALLDLIAAVLATANGDPVVWATDLNTGGPALLLALLEAHGQQVLYIPGRIVHHAAATYRGDGKTDAKDARIIADQARMRRDLGPVRAADQISTDLRLLTSHRTDLIYDRVRMINRLRALLLEYFPALEAAFDYSKKAPLVLLSGFQTAEAIRRMGESRLATWLRKRGCRNSSQMAAKAVAAAHAQDTTLRTQPTGAALVARMAAKITALDLEIAEIDATITERFAAHRDAEILTSMPGFGTVLAATFLANTGGDLSAFGTADRLASVAGVAPAPRDSGRISGNHHRPRRFNRRLMRTCYLAALSSLKSSPSSRRFYDRKRSEGKSHKQALIALARRRIATLWAMLRDRTHYQEPDPVNLAQAA

SEQ ID NO: 334648 - protein, 372 aa, unidentified
MDEGIKVFVALDVHKDSIVIGAAQAGSRVPARQVGRTAHEVNKLLKALAKLGAPSEVHVVYEAGPTGYGLQRALAARGYRCQVIAPSLIPRRAGERIKTDGRDCLKLAESSRSGDLRAVWVPDPAHEAIRDLSRARDDAVTARTQARHQLRSFLLRHDRRYPRKTAWTAAFHRWLATLNFGPDGAQTAFIEYQLAVQAADQRVERLTQALIGSIAGWRFEPVVQALQALRGVAAVSAIGLVAEIGDLARFEHPRKLMGYLGLVPSEHSSGERTARGSITKTGNAHARRLLVEAAWNYRFKPRIGVQAMRRQQTLTSDIQATAWKAQLRLSRRFAALDARGVQRNKVCVAVARELAGFVWAIGRQAMNTTPIH

SEQ ID NO: 334649 - protein, 345 aa, unidentified
MERYIGIDVHRDSTTICVVSATGKRVRREIVETNGQVLVRYLMLLRGTLHVCIEESSWSEWLHEVLSPHVAKLVVYQSQWTPGAKSDAIDAHGLAEKLRLGQVGPGVFKSPHRYRKLREWARVYQALTQDVARAKNRLKSQLQRRGVRCVGTSVYDPRQRDSWLRQLPVSMRPTTQLLGLELDGLVELRTQAEAALLEESHRHRVTKILETAPGLGPIRTALLIATVITPHRFRSKRQFWSYCGFGVVTRSSADWIQTESGWIKARAVQTRGLNRNHNPTLKGIFKGAAITIIHQTQADHPLKEAYARLLDGGTRPPLARLTIARKIAATVLAMWKTEEVYRAGS

SEQ ID NO: 334650 - protein, 374 aa, unidentified
MTTTDAATEARETVYVAIELSKKTWVLGIAHPDRDRPSIHRVSGGNIAELVSRLRVAARNNRRILVCYEAGYDGFWLARELAKMGIECRVLDPASIQVNRRARRVKTDRIDVLALLRALIATDRGERHVCAIVRVPSVEEEDARRSHRERQRLVRERTGHINRIKGLLFAQGIRDIKPKLRRSRIDFAALETAEGHPLPDRLRRELEREYARLSLIATQLREVEKERDTADAQDPVVEQKRQLLVALHGVGATSAAILAREVFARSFANRRQLGSYLGLTPSAYDSGSVTRCQGISKAGNSWARRILIEVAWLWQKHQPASPLSHWYIQKTSGQSSRIRRIMLIALARKLAISLWRYVETGLVPEGVVIARAEA

SEQ ID NO: 334651 - protein, 410 aa, unidentified
MELLHPHCAGLDVHKETVVACIRHMVEGKVTAEVKGFQTTTQELMELSDWLTSQGVTHIAMEATGVYWKPVWHVLSDGEFALVLANAAHVKNVPGRKTDVNDATWLADLMAHGLIRASFVPDEPTQQMRDLLRTRKQFVRERSSQTQRIQKTLEDANIKLDSVIADIVGLSGRRMIKALIAGETAPKALAALAHGRIQATAAELEAALRGRVTAHHRFLLQLHLDHLDAVNAAIERIDKEVDGNLEPFRVAVEMLTTIPGVRNLAAEVMVSEIGIDMSRFKTEGHLISWAGLCPKNDQSAGKRRSTRMKKGAPWLKTTLIQCAWAASRTNGCYLQAQYLRIRSRRGPKKAIGAVAASILTAAYHMLKDGTLYQDLGPSHFDNRDKGKQAKRLVNRLLSLGFAVQITSMAT

SEQ ID NO: 334652 - protein, 320 aa, unidentified
MDDILGIDIAKAKCQVALLRPNAPLRQKSCANTVSGFEQLADWLRRHGVTRVHACLEATGTYGDALATWLHDAGHVVSVVNPAIIHAYARTQLARSKTDRLDAALIARFAATHQPPAWTPPALEIRQLQALVRRLDALQGMRTQEVNRLAAGVVIADVRASIDAVVANLDAQIAHVRQLIRQHLDQQPGLRAQRDLLTTIPGIGEATAATLIAELFDKPYRSARQAAAFAGLVPRLVESGTFRGRSRLSKIGPGRIRKALFLPAVAALRWNPTIRTMRTRLRAAGKEPMVIVGAAMRKLIHLAFGVLKTRRAYDATYAHP

SEQ ID NO: 334653 - protein, 403 aa, unidentified
MTMYKTCGLDVHKDTIFCGVFDGKHHQAVKEFSTLTSSITSLGEYLKSEAIEDVAMESTGIYWIPIWNILEAMGFNLTLVNPYLIKQMPGRKSDVKDAQWIAALLHKGLVRGSLIPCKEIRELRTYSRKYIRLQQRLTSILQEMERNLEMCGIRITSFVSNISGKSVMKVIHALVEGENDPKVLAGYIHGRIVNRHKRETIVESLRGHTTPQHLFQLELSLEEYELLCGQRDRCEEEMSRLCHLHYPKELALLQTIPGISLLSAMIVIAETGADMKAFENSGKFAGWTGLRPRNDESAGKFKSTATTKGNRYLRAILVQVAWAASRTKGSFFKEKFSRLCLRKSRKKALIAIARKMAVLIWNVLYYKEEYNPQKLIVYEPGKVQAKMDYHQKEFKRLENLLKN

SEQ ID NO: 334654 - protein, 384 aa, unidentified
MVSTAPSPVKAPVKSRVKSPVKPPGQAPLDPAAACPGRSPAGSSARSTAPCPAKPPAKPPITTAARLPPTAAILAVDVSKTHLDCFAPPATKGFRILNAPADRARLADLLLDPARGGPPPLVVVEASGGYERSLQADLTARGIPVAVVNPKRVRDFARANGRLAKTDQLDAQAIAEFAQVAKPRPVPPPDEARRMLAELLAYRETIQGEITARRQQTEGYVTPLILRAAEQAIARLKAELAEMDAAIASHIAGTETLAALERRLRTCPGIGPQTAAWLIATLPELGALCSKRIASLAGLAPFARDSGQMKGKRLIWGGRPKVRRALYMAAMSAACHNPTLKPVYEALRARGKPHKLAIVATMRRLLVALNAMVHNNKDWTPQNS

SEQ ID NO: 334655 - protein, 336 aa, unidentified
METKFVHFAGVDVSKQKIDVCVIVNNQRSEIVHNQFEQSKKGFASLKKWLVQVTARQTGKLLICVENTGLYDDALMYYLSDHDLGVSLENAANIKRSVRDHRGKTDKLDARNIALYALNHHDELRLWERPRKQVALLQQMLSERSRLVNALKMLKQAHTEQQVFSWRGRVQSKSYQSGIKGLQKDIEQVEKDVWELVKSDKELLQMFMLIVSIPAVGKITAYHFICYTNEFKQVKSGKQLASYCGVVPFERSSGSSVKGKPRLPHQANKILKKLLHLCAITAIKMKGAFAAYYRRKIEEGKNGLIAINGIRNKLVLTIAAVIRNNEPYNENYIYKP

SEQ ID NO: 334656 - protein, 333 aa, unidentified
MNYVGIDVSYKELVMAVSVKGVFRKTKTFENTSSGHKLIIKQLSKLNGHSQVCIEATGIYHFDLALALSLTKNSDVMVLNPKVSHSFANVLMKRSKTDAIDAEILATYCELMPFESWQCPADELISLRAISRRIAALSKLKSQTKNQLHALTAIKGTPRIVIGHTDDLILVLESQILALRDSALSLILQHEELAEAFRLITSIKGIAEASGIQILSELMFLPRDMNQKQWVAHAGLDPRHFESGSSVSKKPRISKAGNKYIRQALYMPALVATRHEPHIKAYYTHLIDDNRLKKVQAICAVMRKLLHAIHGMFKTGQVFDGSRFYTIKNKVEA

SEQ ID NO: 334657 - protein, 411 aa, unidentified
MNNVAGVDVSKGKSMVSVLRPFGEVVAKPFPVGHTGSELKELANYLKSLAGETRVVMEHTGRYYEPVARFLHEEGIFISAVNPKLIKDYGNNTLRKVKTDKADAQKIARYGLDNWAELRQHTLMDTIRMQLKTLNRQQGLYSKTKTMMKNNLIALLDQIYPDVNDLFDSPVREDGSQKWVDFAATFWHVDCVRTMSLTAFTERYRKWCKQHGYNFSQNRAVEIHAGAKDLIAMLPKAPLTKTMVRQAIDALNAVSKSLERLKLEMRTLAAQLPEHPIVMAMHGVGDSLGPQLMAELGDVTRFTHRNAITAFAGVDPGADQSGTHEAKSTRISKSGPPELRRALFLVMDCLLKTMPQDDPVYQFMDKKRAEGKPYLVYMTAGANKFLRIYYGRVKEYLASLPPEENSGSILP

SEQ ID NO: 334658 - protein, 352 aa, unidentified
MDNVNKIDFTGQPIYVGMDVHKKNWSISIHTEHFEHKTFSQPPEVDKLVNYLHRTFPGATYHSVYEAGFSGFWIHDRLREEGIHCMVVNPADVPTKDKERAGKADPVDCRKLARSLRNGDITGIYVPSRVNVEDRNLVRTRQSMVRKQTRCKNQIKAILFFYGIVIPEDSRWSKRFINWIETIRMEKTSGDLALKAHLAELNHLRQIIANLNRAILALSRTEEYRPDVLLLKTVPGISTLTAMTLLTELYDISRFSSLDKLASYTGLIPDIRSSGETEHTVGITYRRNATLRAILIEASWVAVRKDPAMMMAFNQFALRMKKTNAIVHIARKLLNRIRYVLKNKQRYVPAVI

SEQ ID NO: 334659 - protein, 443 aa, unidentified
METVSDRETIFARCAFLDVHKKTVEATVRLLQGQQVQAETRRWGTMTGQIQALAEWLETQGVTHVGMESTGVFWKPIYNILETRFTVVLTNPGHMKQVPGRKSDVRDSQWGAYLLQYGLLRGSFIPARWQRELRDFTRYRAQLEAERTRVANRLHKHLEDANIKLGSVATDILGMSGRAMIKALMEGEQDAAQLADMAQGKLRTKLPELQLALEGKVTPHHRLMLRLLWKELEAVEELMAEVDRQVQEVTRPYTPQIEQMDPVPGVDRRVAEVVLAEVGPNVDPFPSDQHLSSWAGMCPGNEESAGKRRTGRTTKGNRWLRAALVQAAWAASHTKRSYLGAQYRRLAGRRGKKRALVAVGHSILVILYHLLKDGRPYSDLGRDFFDRMNHDRLIRYYSRRLAELSQKVTVEPLPEVIPGEGMVNVHPLAKAKGMTAGGICNDP

SEQ ID NO: 334660 - protein, 368 aa, unidentified
MIVIGVDAHKRTHTLVALEAVTGSSRGERTIQASDDGVLNGLRFAVALDEDRVWAVEDCRHVTSRLERALLGAGERVIRVPPALTGESRKASRTPGKSDPIDARAVALAAIREGVWTLPTAFLDEHAHEIRVLCDYRNQLMHERNRLINRLRWHLVRIAPKIEAQLGPAALKGPRIRARLARQLGQLPASPELRVAKAQLRRINDITKEQLELFDELTSLVRQHAPQLLEQRSIGTVTAAVIIGRTAGAQRFRSEACFARHAGTAPIPANSGNTVRYRLHRGGDRQLNRAIHIIALGRVAWDPTTRAYIERKQAEGKTKLEAIRCLKRHIARQIWHLLYNNRPVTPTPPPQLTERIKGDAPALMRCIR

SEQ ID NO: 334661 - protein, 411 aa, unidentified
MTQAEYLVRVGIDWASESHQICILDKDGNRTEHPVPHTSAGLMALATELAALNPEDPGRVAVAIEVPRGPVVDTLLERGLHVFALNPKQLDRFRDRHTVAGAKDDRRDAFVLADSLRTDRPAFRRVQLDDPLIVELRELSRLDDDLREELSRLSNRLRAQLHRFCPEPLALCPAADEPWFWALLDRAFPPPRPKPLSIKAVTAVLKVHQIRRLTVDTVHAALQVPPLRVAPGTIEAACTHIALLLPRLRLVHDQRHRTVGARIEKLLAELAKEHGEGEHRDVPLLRSLPGVGRLVAATVLAEASRPLAERDYQTLRAQAGSAPVTRQSGKKATVSMRLACNRRLRNAVYHWARVSVQVDPRCREHYDRLRQGGHAHARALRGVVDRSIGVLVAMLITRTLYDPERRYPKAA

SEQ ID NO: 334662 - protein, 381 aa, unidentified
MKQDNKAKQNRGNEVSVEAPQDTGDLGRRRWKVPRVGLTVGLVVGDKISHYCVLQEEAEGVERGKLKTTPAALQPWLEALPAGTRVVLETGTHSSWISRLIEQAGQEALVAQPRKMPQMYAGKRKNDRRDAEKLARTGRLDPNSMGPIRHRRAEQQADLVVIQARDALVQVRTQLINTVRGLVKGTGERLRGCSAPSFARQVEAQIPQRWRGALLPLVSQIRSWSEQSERYDAEVEKLAQKKYPETELLRQVSGVGPVPWLAFVLTVGDRWRFRHSRDVGPFLGLVPAQDESGESSPQWGISKAGHTYLRRLLVGSAHYILGPFGPDCEWRRWGMKRSERGDKNARKRAKVAVARRLAVLLHKLWVSGEVYEPLPEKRAAA

SEQ ID NO: 334663 - protein, 283 aa, unidentified
MEQIIRIGMDTSKHIFQLHGVDAAERPVLRKRLRRKEMVALFAKLPPTVVGMEACGASHYWARELAKLGHAVRLIAPQHVKPYIKRNKNDGRDAEGLCEAMSRPTMRFVPVKTAEQQAALMLAGVRERLVAGRTQVSNAIRGHAAEFGITAAKGLDKIEPLLAQIAQDESVPALARELFVIQGRGYAQLQAELKAIEAKLRAWHRANADSRRLAKIPGVGPVGATSLVMKTPDPCAFPSGRHFAAWLGLTPKDHSTAGKTRLGKITRAGDERLRSVLVAGRPR

SEQ ID NO: 334664 - protein, 350 aa, unidentified
MIIIGCDYHPGFQQIAFVDGDTGEFQERRLSHREEAEKFYRELAVSGARVRVGMEASGQGRWFERLLAELQMELWMGNAAEIRAKRVRKKKTDREDARHILQLLVEDRFPQIWVPNWENRDVRQLLWHRHRLVQMRTRIMNQLQAVALNEGLRCKKRLWRERGRQQLETFQLAPWASRRRRDLLELLDRLNPTITDLSQALEQEVEKYPAAQRLMTHPGVGALTALAFVLIIGEPERFRCGKQIAAYLGLVPEEDSSGESRRLGHISKQGSGLMRFFLVEAAQVTARSDAEWRRKYFHLAQRRGRKIAKVAMARRLAVRLYWMWRMQWDYQQLKKFGPHAGQLGSGVGVQ

SEQ ID NO: 334665 - protein, 401 aa, unidentified
MPQLWAGIDAGKHHHHVFVIDETGTRRFSRRIPNDEETILEVLAKVNALAEGAPVTWATDLTDGGARLLISVLAAHEQNLLYIPGRTLYHAAKAYTGEGKTDAKDARIIADQARMRRDLKPVSFDDEVAAELRMLTGYRADLVADRTRVINRLRATLLEYFPGLERAFDYARSKAGLLLLTGYQTPAAIREAGEEALTDWLRTRGARAPGKVAGTAIEAANAQHTTVTGQAAGAAIVARLAEEILRLDSDITGIEAQITQKFQDYADAEILLSMPGFGPLLAAEFIAHSGGNPAEVFTSADRLASAAGLAPAPRDSGRISGNHHRPRRYNRRLLRTCYLAAQIAVRCCAVSQAFYQRKRLKGKNHKQAVLALARRRINVIWAMLRDKTEFHTGSVPAPATA

SEQ ID NO: 334666 - protein, 406 aa, unidentified
MNYLGIDVAKATSRYVLLDNDGEKSAKPFTLDNNQQAFTQLLERLKEFNLHPEGLLIGIEATGIWWENLYCFMTEQKFKVIVLNPHQTNKFREALRLKAKTDDIDAYVIAGLLRSGEYAASYIPEETIQILREIVKLRHQLVTNRQSFERQARALLGLLFPEHEKTAIKNPFTVASLAILKAYPTAKHLAEAKPKSIEKIVRSIVGNNFNIAEIKTLIETARNSIYSGRAKDARGMNLNILLTHVETLHNSIAQLDKRIDDILAPQNSDDANSFPGANLLSIPGVGPKTLAAILSVVGSDGSAYPDGKNFVGYIGFFPQIYESGETRRDNIISKRGPNYIRRALYIAAVACLKHNAEFKAFYDNKISQGKKPKQALICVAKKLAHMCLSMLKSGESYNPARVFMPA

SEQ ID NO: 334667 - protein, 353 aa, unidentified
MRTIIAFDSHKHYTFARVENDKGEHPQEFRIEHRRGNIAAFLSRQPPGSPVALETIGNWYWIVEEIERAGMVPHLVHARKAKMMFGCVNKTDKLDAQGLNMLQRAGTLPTVWIPPAEVRDKRELPRTRMVFAVQRTKLKNRIHSVLDKYGLQDAFEDISDIFGGTGRRVIACVLEQLPPHTRYTAELLLEQLDQTEQKIQALEAQMNKLFKETEQHALLKTMPGVGFILAVVILQEVGDIGRFGSAERFASYSGVTPRVQASGGKVRYGRLRPDTNHYLKWAFSEAGNSVAVNRDRFPGRHVSHLYNRIRSRKGHAKAVGAVARHLAEATYWILTKNEGYRERALLEVSPTGA

SEQ ID NO: 334668 - protein, 343 aa, unidentified
MDYYVGLDVSLRQTSICVVNQAGSIVHEGVADSDPEAIASFVRSKAPGTVRIGIETGPTTTWLWTELKRLGLPVICIDARHAKAVLKMQINKSDRNDAAGIARIMQTGWFKEVRVKDLDSHAVKALLASRALLVKIKRDLENQIRGLLKNLGLVIGRAKFNVFAVRAEELIEDRPELVAAVRPLLDARKAIERQVGDLDRKVHKLARHDVQVRRFMTVPGVGPITALCFKATIDDPTRFRRSRSVGAYVGLTTRRHASGEVDWSGRISKCGDAMLRMYLFEAAGVLLTRVPKWSGLKAWGAKLTKRNGLRKAKVAVARKLAVILHRMWIDGTEFDWSTKKAAA

SEQ ID NO: 334669 - protein, 386 aa, unidentified
MSQSSNILLRAINYDHTLVLAIELSNKSWVLAAQVPGLPRTKAQRTIEPNKTALLAAIDGYRARAAALGYSVERVITTYEAGWSGFWLARWLVAQGIEVHVVQPSSVPVDRRMRRAKSDGIDAELLLRTLLAWLRGEPRVCSMVPIPDEADEDARRSVRERTELLSDRVGLTNRIGAVLATLGVGDYNPLLQSRRRRLTELRTGLGEPIPPNALTKIERLLARLELVLAQIAELERKRDEVAAADAPDRAGKMIQQLTSLRGIGVQSATVLVREAFVRNFSNGKALGSYAGLTSTPYSSGGIDREQGIGKAGNRRLRTVMVELAWLWQRYQPGAAQVAWFRDRVGSTGRRIRKVMVVALARKLLIALWRFVIDGVMPEGAVMKPSI

SEQ ID NO: 334670 - protein, 420 aa, unidentified
MTNPYRWFVGVDWGSERHRVVVLDAEGALVASRNVEHTGVAQQQFLQWLAELTENRISEVAVGIEVPRGAMVEGLLERRFAVFAINPKQLDRFRDRYAVSGAKDDDRDAFVLGDSLRTDLHCFHCVTIEDPLILQIRELSRLDDDLQTDAVRLANQLREQLLRYFPSLLALNPAADEPWLWDLLEVAPLPAQAAELGRSRIESVLSARRIRRLSAEQVQTALRTPALTLAPGAALAASRHALLLLPRLRILHVQRRQVAREIASLIEQLPAAIDADGHPVEHRDADLLLSWPGLGIGIAATMLGEASRGLAQRDYHGLRCYGGLAAVTRQSGKKQVVIMRYACNRRLRNAFYHWSRCSLQKDPRSREHYAALRARGHSHGRALRGVADRLLATLIAMLKTRTPYDPKLRGRGRENIPSTP

SEQ ID NO: 334671 - protein, 366 aa, unidentified
MYKDGQVATKLEGDFIMNEQQLYWVGMDVSEARFDVALASPGQHANPETIRRLPVGTFVRDPQGVKAFVQWLRKLLPGSKPLPIRGVMEATGIYSIQLAAMLNKQYPELCPSIANPQQTSAFRDSLGLRNKTDRLDARALAFYGLSHQPDPYVPLSPAQAELRSLSRCRDALDEQRVAHENQLEQKPDSALSRRLLKQLVAKLNRDMQKLEKEMKRVIQSDADLHRDYVLMTSIPGVGFVTAATTLAELGDLRRFASSRQIGATVGVTPSKNDSGKSSPPAHMSKKGNPRVRRILYMAALSASKYNPHLSLVYDRLLAGGKEPMVALGALMRKLIVLMRAIVVSGRAYDPLWKTCPKKKPVAAKIT

SEQ ID NO: 334672 - protein, 391 aa, unidentified
MVCVGIDVAKDKHDCCILDSDGTIRADCITIPNNMDGFKQLLQTIRDCTKRSDKIKVGLEATGHYSYNILGFLLDNDLAVYVMNPLHTNLYRKSLSLRKTKTDRVDARTIATMLLSDVDLKSYTDTAYHNEELKSLTRYRFDKVRERAKLKQSVSRLVTILFPELEKLVPSLHIASVYALLSEYPGAKQISEIHLTKLTNLLATASKGRYGKDKAIQIRDAARTSIGSVMPAKSLELKHTIKLIRELTSEIDEIEVSIQKIMDELNPPILSIPGVGIQSAAMILAEIGDFSNFESPDKILAYAGCSPSTYQSGKLTNCYAHMEKRGSRYLRYALYNATKYVCYWNPVFAEYLAKKRAEGKHYNVALSHATKKLVRLIYALQKSGKAYLTAA

SEQ ID NO: 334673 - protein, 337 aa, unidentified
MKVTLIGIDLAKSIFQVCGVNQAGKRVFNRQVRRARLMGLLVQHPDATIAMEACSGSNYWGRELQQQGFAVKLIPPQHVKPFVKGNKNDRNDAFAITEAARRPDLRGIEPRTLAQTDMIQVHRVLDRMVRQRTALINQIRGFLNEYGIVVSRGKEKLLSAIPDLLEDADNGLTSSSRALLQTLSDEWRQMNEAIDRVEEVLKHQAKTDEAAQRLMKIKGVAVKISTATIAHAGNGHGYQSGRHFAANLGLVPKEHSSGGKQQLAGITKRGNRYLRRLLIQGAWSVIRHADKNDDRMSRWARQLVERRGKHKAAVAVANKMARVMWSMLYHQTEYRAN

SEQ ID NO: 334674 - protein, 436 aa, unidentified
MNSSEVNRKSPTEGIAAWVGLDWADQQHVLCVYEVETGQSEITRLEQKPEAFESWLSQLRQRFGGAKVAIVLEQARGAVIYALLGLDFVVLYPVNPQALANYRKVYTSSGAKSDPADAVLLMEMVRHRPECFRHWKPDDADTRSLQLLTENRRQLVNQKTAFTNQLTNLLKSYYPQALELAGDLDSDQACDFLKRWPTLEALQTARPAQIRKLYLDYGRPRPEQLEQRLEQIRRARPLTQDPAAVLSGSMMVEVLVPQVRSLLRAIEQFDRQISVLFRKHPDRPLFECLPGAGAALAPRLLAAFGADRDRFQSAQEIQQLSGIAPVTEKSGKQYWVHWRWACSKFLRQSFHEFADHSRKWCGWAKALYQQLRRRGQNHHAAVRMLAFKWIRILFHCWKTRTCYDESIYLKSLQKRNPSLWTEIQALPPRVRRQPAA

SEQ ID NO: 334675 - protein, 311 aa, unidentified
MNDTIGIDISKDKLDAYWLSKREHKQFCNDKAGAEAIALWAHEAGVSRVIFESTGIYHRCVETRLAQHGISFARVNPRQARRFCEGAGQLAKTDRADAAMLARMGSLLELKADEPKSEILHDLKQLATARLALIKDRTAARARPAATTHNLLTRQIKHRLKQIERDLSQVAETIDAVVAQEEDLRVRAAILTSIPGIANVTACAILTDMPELGSLSGKQAAKLAGLAPISRQSGKWQGKERIQGGRASVRRAIYLPAVVATRFNPDMKAKYEQLISTGKCKKLALTAVMRKILVMANALLRDGRKWSETRA

SEQ ID NO: 334676 - protein, 450 aa, unidentified
MSPLALDVVTKTGKTPVLGRMLSKYVGRKTSSIENDITKARNHSRQRGNIMRVVFGIDVSKASSEVAILINGEKVHGYTIPNDAIGFNRLLGDLKTVHQPEIVFEATGVYSRRLQAFFEDNSYAYTRLNPLESKKQLDSLRVRKTDKIDAEKLATSQFILNRKPSYVQEALYQELRDLSRFYQNLTEDIVCAKNRLHKVLQVTFPELENILSAPTGEQYWNLVMTFPCNSFVLELDDAALRAIIRQSTSKRISEKRVTYLVDKLTKLANQSYCAVKKTSPMMEEVKYYAGELLRLSEYRQSVLEEMVTLAQPLPEYEILLSIPGIAETTATSIIGELGDIRRFHSANQINAFIGIDLRHYESGDFLAKEHITKRGNPYARKILFKCIHNIASASHTNPCHIADFYDKRKRQSQVTSTKPHTIASIHRLIRTMYYLITHNKLYDYTSTQNR

SEQ ID NO: 334677 - protein, 369 aa, unidentified
MTENTLFVGLDVHKKTVSVAIVDGSARSEVRFYGTIENTPDAIRRLCKKLSKGGRHLHACYEAGPCGYNVQRHLTCIGHRCDVVAPSLIPRKAGDKVKTDRRDAMMLAQTLRAGQLTEVWVPDQAHEAMRDLVRLRSQAMRDLRKTRQHLLSFLLRHERISPFGHWTKMHRRWLGELKFAHPAQHLALEEMLHRIERAEELCERLKQAIGELVPQWSLAPVVQALQALRGVSLITAAVLVAEIGSFQRFDSPRQLMAYLGLNPSEHSSGATVRRGAITKTGNGLARTSLVEAAWTYRYPARITQIIRDRLKALPEPIRAVAWKAQVRLSARYRVLIARGKSAPTAIVAVARELVGFIWAIARMVEPKFT

SEQ ID NO: 334678 - protein, 310 aa, unidentified
MEAIVVGIDVSKNTLDVHVHPSDRAFAVARTAEGLDALIAEIAPLGIHAVAVEATGGFETVVAASLGAAGLPVIVVNPAQVRAFAQALGKRAKTDPIDAAVIARFVEATKPQIRPLADEETRLLASLVTRRRQIIHMIVAEKQRQHQLSSEVLKKSAARLIKALEQKLNVLDIGIDDSVRGSPVWREKEDLLQSVPGVGKVVARSLLAELPELGTLTRRQIASLAGLAPWTRQSGKWRGKSFTGGGRSGVRTVIFMAAMVGARHNRVLKAFHQRLIAAGKPKLVALVAVARKLLTILNAILRDKTPWQTA

SEQ ID NO: 334679 - protein, 481 aa, unidentified
MATTRPSGLNRKQRRELARRLQAADPGLEVMHPHAAGIDVGNSTHYVAVRPDRDPDPVRRFDCFTADLHRLADWLQHCGVTTVALQSTGVYWIPIYEILEARGFEVYLVNARHTKNLPGRKTDVQESQWLLKLHTYGLLRNSFHPSAEIRVVRTYWRQRGDHVRAVSTCIQRMQKVLTQMNIQLANVISDLSGWTGQRIVRAILAGERDPETLAALSHPGIHATHAEIAKSLEGTWQPDLLFVLKQEVDLFDTYQLRIAECDQELERHLKSFADKTPDPPAAPEPSPTLAPSDARAHQHHPKRRRKAGSHAPQFDLGRELHRISGVDLTRIDGIDVGVAQTVISEVGLDMSRWEDEDHFASWLGLCPDNRITGGKVLRRGTRHVINRAATASRLGASTLLRSQSYLGAQYRRFRGKLGAPKAITAMAHKLAVLVYRMLRWGHAYVDKGLQYYEERHRQQQIHLLKKRAAKLGLQIVEPQVA

SEQ ID NO: 334680 - protein, 408 aa, unidentified
MDVFHERCAGIDVHKEVLYICVLIGQGRSFTKFKLKFGTFHHQLMEMRRKLVELGVTHVLMESTGVYWMPVYDALEGFVEIVVGNAQHIMNVPGRKTDESDAEWLAKLLRHGLVKPSFVPERQFRELRQLTRYRRAVVQAQASEQNRVEKHLQIAGVKLSSVASHVFGVSGTNMLNSIAQGTTDPTHLAELALGRLRKKIPQLREAFTGSISKHTQELIATQMEQMKRLECTIAEVELKIDAKISPHAEILARLDQIPGIDLRCATDILAETGIDMSPWATHRQIAAMAGLCPGNYISAGKRLKNRSRQGNPYLKSILVQAATSAINTNGSYYQCKFRRLKQRRGHKRALVAIAHAMLVTIYHMIKKGEPYRELGASFVTEYETGRKKNDLVKQLQKLGYSVSLSEIA

SEQ ID NO: 334681 - protein, 339 aa, unidentified
MWIIGCDFHPSFEQIAFCNTDSGEYGQAKLTHANGAAESFYRKLEGTVRVGIEATGRTAWFERMLYRFGHELWVGDAARIRAAEVRKQKTDRRDAELLLRLMLEERFPRIWIPSEAERDRRQLVLHRHRLVQLRTRVKNQLQSMAIGEGVQRGKRLWSQAGRDQLQKLDLLPYTALRRDDLLQVLSELDGHIAPLDEAVRRQAEQDVTMQRLMTHPGVGPVVASAFVLTLGNAERFHTSKQVVSYLGLAPTEDSSAGHQRLGHISRQGNSLVRTLLVEAAHTAVRSDAEWKRHYLRMAMKRGASIALVAIARKLAVRLYWMWKTNVDYAAIVERGSHLE

SEQ ID NO: 334682 - protein, 411 aa, unidentified
MVKENFIYVGIDLHKETHTAVMIDCYNQKLGEITFPNRPADFPKLVTKVKKCNTDAKEVVYGLENAYGYGRPLAVWLIDKGYFVKDVNTAISHRQAKHRGAMYRKSDSDDAEAIALATLNMLDKLPDACPNDAYWSLGQLVHRRDNIMKQRTRLVNQLHEQLCIAYPSYKQFFNDISRPTALYFWEHYPSRKYLKGKSVEDLRTELVPVSHNRCSTKNCEKILDAVASDKVKNNAYQDARDMVTLSIVSDLQHYDSQLTEVDKMLEQMYKMLGCTLTTIPGVNVITAVKILAEIGDIKRFSNANKLAQFAGIAPLHLSSSGKGKDVATKQGNRRLQVTIYFLAIQMVQVSSKGTPRNPVVRAYYEKRKAERKTSQQALICISRRLISIIYGMLKNGTEYHMPVVENAGENR

SEQ ID NO: 334683 - protein, 406 aa, unidentified
MLLIGVDQGSKKHDVHVMDTAGIPLLQFTIDHTQVGFEYLHHQRAQLNVPSSDCLVALESGYSLLVDYLLDQGYPVYVIPGKAVDRYRDRYRQSRSRSDHSDAQLLGHVLRTDRAMYTPLTVDQPLTYQLRSQVKLLLNLKRTILNMCNQLRNLLWRYYPVAAHLFKRLDQQLSLRFIQSYPTPQAVEQLSYAEFADFCHTHHYYHSKYITRRYAQLLQIPDYSQSATTQAYSQQTQVMVRILLLLIQERKNAQQYLSQLFKQHPDAYIFNSLPGAGAFLAPALLAKFRDCRSRFPTAAVVQAIAGTCPVTIQSGKKRRVRFRRACDHEFRYIITQFARISVRQSPWAAAYFVRVRSHCDKASAAYRRLANRWAVIIWRLWTDRVAYDEALHLRHTFMQRPVESLD

SEQ ID NO: 334684 - protein, 320 aa, unidentified
MKHKVGKDNTVARFIGIDVSKQWLDVATLPERETRRFSNDGAGQEQLGAWLIQLAPELIVMEATGGFETRVATVLAAEGLALAVVNPRHVRDFARAFGILAKTDRIDASVLAAFAEKVHPPVRPLPDEDRRELIDLVDRRRQLVTMRAEEKTRLSQATASARQDIKEHIEWLDERLRRLDIDLTAKLRSSSLWKAKEEILISVPGVGRVTVLTLLARLPELGALNRRAIAALTGVAPFARDSGQHRGRRMIWGGRADVRSVLYMAAVTAARINPVIKSFYLRLKQAGKPAKVALTACMRKLLTILNTMLRTNQSWHAPTT

SEQ ID NO: 334685 - protein, 341 aa, unidentified
MTLVMGMDQHRAQISVEWIDTITGEISRARVAPADRAGVRTFLARFDGCDLEVALEATTGWRFVVEELQRAGADVHLAESAEASALKGRKQRAKTDWADARHLRELLLIGRLPESWIAPAHLLDLRARVRCRHTLVEQRTEWQRRMHSVLYHHGCPNTRKLLTRANREWIAGLKLPDAAREQLTIALEMIDAIDLQVGPLDLSLRAYARKQPGCRTLIDQIYGIGELTSVTILAELGDARRFHNSRDAVRYSGRDITVHQSDTRRSPGHLSRQGPSALRWALYEAAQAARRPSSPDRQYYLTTAERIGGNRACSAIARKLLKRSYHLLRGLGETALEPVAT

SEQ ID NO: 334686 - protein, 338 aa, unidentified
MIVIGVDVHKQSVTAVAADEVGRVVDERTVASGSDELLAWAATLGGERLWALEDCRRLTRWLERQLLAAGEELVRVPPKLMAPERRHGRSRGKSDPIDALAVARAAIREPSLSRPRPDEEPYRDLKLLVDHRDAIVDERRRAHQRLRWHLHQLDPTYEVPLRMLARSLHLERVGRWLARQNQELQVRLARELVSSCRRLNREIAELDQELEQRTAALAPALLDLPGCGAITAAKLLAEIGPVGRFQTDAQLARHSGVAPLEASSGRIQRHRLDRGGNRQLNSALYRIAITQARVHEPARAYLERKRAEGKSRREAIRCLKRLLIRVIYQTLRTSPALT

SEQ ID NO: 334687 - protein, 422 aa, unidentified
MKKIQTKKLKSVNDKTLIATVDIGKGLNMGYARCPDRSEVRPFAFANNRAGFDKFWTRLVEARNAKGLDIVVVGFESTGAYGEPLQHFLKDKPVRLVQVNPMHTKRVKELQGNSPNKTDSKDPKIIADIIELGHALTVVIPEGSAAELRRLTHARERTIKRRSALYNQLQDLVFISFPEFLQVVKDVKTKTARHLLQFYPDPQTIMTLGLEPLGSVIKRISRGKLGPAKAKDLFDAAKTSAGITEGRFSVALEIQATLEAVAACDTFVLRLEEEMSRYLEAIPSGHLLLSMKGIGRITAAGLIGEIVDINSFDTQRELLKHAGFDLFEISSGKLRGSRRISTRGRPLLRKLLFFAALNTVRKGGVMHEHYQRHLKKGMKRVKALVAIARKLLGIIFALVRTGQEYQLNYMELQTHANIAKAA

SEQ ID NO: 334688 - protein, 428 aa, unidentified
MNEVDSIRLEEFRQLKKGIRGSKEHLIVGIDVAKERHHAFFGTATGRTLFKRLVFENTIEGFERLLIQTEALKVQHGLTKTVFGLEPTANYHKPLGEFLIKCAHSVVLVSGVAVKKNRELLDGRWDKHDTKDSANVADLISQGKCLFFEYPPMALRELRSLLSLKRRLKKGEHGLRVRIRNHLLAQYFPEMDRYFARSGSEGLAMVRWCLAPSVIAGLDYEQFAQLVAPQNRTIGQQERLQAIWKIAADSIGCDAGEAVAFEAKVLVEGLEQVREALRATDSKIEDLCLQFPEYSHLLTIPGFGPDVSSKTLAAIGNPFRFNTGAQVLKMAGLDLSANRSGKRSDAATPVLSKKGKADLRYALYQAAFIASSRNRYFIAYYTNKLLGREKERGIKTKMRVKLAAKLLIIAWTLMKKKELFNPDYLNID

SEQ ID NO: 334689 - protein, 427 aa, unidentified
MKNHEVLSTLFVGIDVGSRNNAVCAIDFDETRYLETSVSNNHPGALALAEKLAAIMKDNPVFTRLVIAMESTSCYSTHVATFLSSTDILMPYKPYVYCLNPKTTANYKKSYVSVGSTDPIDAFMIADFARVGRIKTQPWRGAQFLALQRLTRHRLHLVEAITREKTYMLTNVFLKFSELAVSTKDDAPFSNNYGATAAAVLTEFLSPEEIVAMDSSELVEFICKKSKNSFADPHKVAALLKKAAADSYKLDKCLYEPLTISIASSFNCISAFESEVKKLNKAIERAVKGFNTNEYQSMLSIPGIGPVFASGILAEIGSVKAFRSQDAIAKYAGIVWNPDQSGNFSADDLNMSKAGNRYLRYYLLEAANSVKNHAPVYNAFYHKKFGEVTKHQHKRALALTSRKLIRLIFGLLDNNQLYSESAEQITS

SEQ ID NO: 334690 - protein, 346 aa, unidentified
MMIIGCDFHPSWQQIAWLDTESGETGQQKLVHATGDAEQFYRRLGAPVLIGMEATGNSQWFTELVEDLGHVIWMGDAAQIRASYVRKQKTDKRDAAHILRLVVESRFPRLWTPDREQRDLRQLVLHRHKLVEIRSRVKNELQHLSMNKGMQKKRRLWSQAGMQLLRELPLKAWASCRREDLLGLLATLNQQIGTLDTAVQKAAEENPQAKLLMTQPGVGPNTALAFVLTIGDVSRFGRGKQVASYLGLIPREESSGGRQKLGAITKQGNRILRSLLVEAAQTAVRLDPQFRKQYLHRCHQKPKGVAKVAAARKLAVRLYWMLRSQVGYPEIVRIESSPRVALVGAS

SEQ ID NO: 334691 - protein, 322 aa, unidentified
MYKYTGIDISKQTFDASITTDKGVVSKKINHDEAGFSKLLKLLPVDAHVVMEASGPYYYRLAFFLHQHQVRVSVVNPLVIRRFCQMRMVRTKTDKKDAAMIREYGLTENPAMWQPDPPMITKLKQLNAALDLLDKHITSSNNQLEAFEQMPDADAYTLERLQHTIKENKQVRDQLEQEMEKVMQQHYRQTYQALRSIPGIGPKSAAMLIAISGNFTKFSCYRQLVAYIGLNPRVFESGTSVKGKGNISKMGTARLRKLLYLCSWSAKKYNAQCKEMYVRLKAKAKPERVIKIAIANKLLRQAFAVGKNLTNYKQNYQPTFAF

SEQ ID NO: 334692 - protein, 406 aa, unidentified
MNAVGIDVSKGKSTVAVLRPFGEIVVSPIDVPHNPKELSELVTLLKTLDGDTKVVMEYTGNYYLPIALFLRNNGVFVSVVNPILVKDYSTKSLTVRKVKTDKKDSLKLASFALDRWNELSPFSVQSETRLLLKSYNRQYNQYNKLKVSLKNNLISILDQTFPGANNLFTTPTRKADGHEKWVDFVLKYPHSECISKKSFPAFSKSYLSWCRKFGYNFSEIKAKSVYDSACNCSPSLSLTESTALLVSNAISQLNCINETLASLASEMNKIAATLPEYDTVMSFFGVGSVLGSQLIAEIGDVSRFSNKKALVGFAGLDASPFQSGNFNPQSRAISKRGSAALRKTLFQIMQVILQREPLNNSVFQFMDKKRAEGKHYFVYMTAAANKFLRIYYARVTEHLNSLKQSA

SEQ ID NO: 334693 - protein, 438 aa, unidentified
MEILYRVCAGLDVHKRTVAACLRGPGPNGTRAEEIRTFGTTTRELRQLADWLAAAGCTHAAMESTGVYWRPVYQMLEGRFELLLVNAQHIKTVPGRKTDVKDGQWLARLLEHGWLRASFGPPAPVRELRELTRSRRQLVEDRARDANRVQKVLETANIKLAAVATDVLGASGRAMLKALIAGERDADHLAALAQGVLRKKQAQLREALVGRVTDHHAFMLQALLSHVEFLDQQIALFDARIEAQTRPFAAAVARLDTIPGIARRSAEPILAELGDDMSRFPAAANAASWTGIGPGNNVSAGKRQSGRTRKGNRWLRATLVECARGAVRARHGYLAAPYHRIARRRGDQKAITAVGHSIVVIAWHVLRTGQPYRDLGHEYFDRLDRDRLVHDHTRRLAELGVVLPPPSPASAASRRVAFGGSGCGWPGSGPAGDSPSSS

SEQ ID NO: 334694 - protein, 427 aa, unidentified
MKYTQNEKIMQITENTLIIGVDIASDVHYARAFDYRGIELDKVIKFNNDIQGFKVFSDWITKIATNNHKQHVMVGMEPTGHYWFTFAQYLEENNIKIVLVNPYHVKTTKELDDNSPTKNDRKDPKTIAMLMKDGRYMEPYIPKGIYSELRNATNTRWQLVKKLNSIRNQVKRWIKIYFPEFNNVFADWEGKAALIILKHFPTPEKITKLDEPEIIATWRKEISRAVGIKRATKLIKAAKASVGIKEGLIAAENELHILLEEYELLMKQHQNTMSLIEKLTMQIPGVKEILKIKGVGLKTLSGFIAEVGDIERFDHPKKVQKLAGLNLKENSSGKHKGQTTITKRGRKRLRSILFSTIMPIVAKNKEFQQLHKYYTTRKENPLKKKQSLIVLCCKLIRVFFVILKTGVKYDPVKMMNDIKRPTLQEVA

SEQ ID NO: 334695 - protein, 455 aa, unidentified
MVAMSPAPLRIPREPLYVGIDVSKVTHYAGLVSSSLLRRHKQFSACPAFSFENSRKGFDKLLESLDLYAETTMVSVVMETTGHYHRSLQAFLQEQGIAVYLVHPQNAVGVRSKSDKIDALRLANQLYNQVELGAQALDASAIARRVSPPSPAAQQLRGLVRHRDEVTVDMTRRKNKLTAICDELFPEFIDTFKDVNGPTALTVRKAFPTPADVAAAPFDELLACRARNLPSPAALRDLQAAALHSIGVKDPARLHSLIFEQQQLIDELLLLSAHIHELDHEIARIVMASREGQILTSLPFINAVGAATILAHIGSIENFENAAKLRAFFGWSPRGFQTGTSKDSSTLTRGGNRILKKTLYLMAWTAIRDDTEWKALYDRLVPSRCMWDERLKAYRGKNKVLGRICGQIVSVIYALLKADADLVAACKDGSEPPPPTLYDREMHRSRRSSQLRRIP

SEQ ID NO: 334696 - protein, 423 aa, unidentified
MENTAARKRKQVPEGYLIIGIDPHKKRHAAVAITQDFTTRDKFKFDNTREGLEMMLRRAKMQMMKSGCRGVIFAIETGGHYWRNLAYALDEQGIPFRFINQFTLKRRREGKDLNRRKNDYRDSEVAAQLLCTGEFTESKIPQGVYAELRTAHNAYRRLVKERTRITNLLKGLLDALSPEFTHVFKDPCALTALSVLSICPIPRVIAGMTEDEFVATIEAQHKGRLMRKKLRMLHHMARTSIGIEAGARSVSFEISFLVEKLELIGQHIRLIERPLVSLVDETEEGKYLLSIRGLNYIAVAGLLAELGCFKAYRSAKQMIKMAGSNPIESESGGKRSSHTPMSKQGRPVLRYCAWTSVIPMLRLNPDFRAWAKQRRERPAHANPLNGREVVGAALNRLLRLSFALVKNQTYYQVPKLESALVAV

SEQ ID NO: 334697 - protein, 352 aa, unidentified
MDVRMLVDNSIQRPVGKEDLMYYVGIDLHKEQLVVAVEDDTGPLGRPRRIACRDEQEIRRQMETLRPFCAVIEASSSYRWLYDLLRPLGDVILAHPLKLRAIVTARAKTDKLDAALLAKLLRAGLIPKAHIPGAGYQTLRDLTRTRARLSRAATVAKNQLHSLLGGRNLHSPQRSLMSKSARRWLREMDLGFVGNLQRDELLARLDHYAEELKRLDGWLATMAAEFPETSCLTDLHGVGIYTALLIVGEIAETERFANPRQVGAYAGLTARVNQSGGHCYYGHISRQGSSWLRWALVQAAMKLIRKDEALNRFYQRIRKRSSRHIARVAVARKLAGICWIRLRRWHRINAAA

SEQ ID NO: 334698 - protein, 341 aa, unidentified
MQITTIGLDIAKNVFQVHGIDAAEKVIVRKQLRRGQIIAFFEALAPCLVGMEACATSHHWARELTKLGHEVRLMPAKDVKAYVKRNKNDAADAEAICEAVRRPTMRFVRIKSAEQQGQLMLHRARDLLMRQRTQLINALRAHLAEVGITAAQGREGIKELLAIIAQDEGSRLPVDAHASLTVLAAQLQAVQTTIGSIEKRIVAQHRSNEASKRLETIPGIGVIGATTITAVVTDPKAFRSGRDFAAWIGIVPRQDSTGGKQKLGPISKQGDQYLRRILIVGAHSVLRRARQQPQKYPWLTQLLARRPFKVVAVALANKMARIAWALLARGGSYRAPQLVAV

SEQ ID NO: 334699 - protein, 377 aa, unidentified
MKKVRFLGLDVHAETIAVAVAEADGEVRSLGTIPNREESVRKLVKKLGPAEQLQACYEAGPTGYVLYWQLTGLGVKCEVVAPTLVPVKPGDRVKTDRRDACKLARSYRAGDLTAVWVPDAAHEALRDLVRAREAAKQDQLRARHRLSKFLLRQGRRAPAGIKPWTRKYMDWIQQQVEFEQPAQEYVRQDYLHEVEHANDRVRRLEEAIGEAVKQVPEAMREVIHGLQALRGIAQISAVTIVSELGQISRFARARQLMAYSGTVVSEESSGKRLRRGAITKTGNAHLRRVVIEAAWAYRHHPAIGATLRQRQQGVSEEVKAIAWKAQHRLHKRYRSLAAAGKNQPKLVTAIGRELLGFIWAIGVKVENQASHPSQLAA

SEQ ID NO: 334700 - protein, 359 aa, unidentified
MDIRDQAKRHVVGGVDTHKDLHVAAVVDERDRVLGSQSFATTRQGYRQMLAWMGSFGEVQRIGIESTGSYGAGLLRFVQTVGIEVLEVTTPDRHDRRRRGKNDDLDAQNAAHAAFAGQRTVTPRRRDGLVESLRVLSACRKTAVAARRVALQLIQNTIVCAPDGLRDVLRSMTRMQLIRTLAAWRPDLTAYRDVEAAYRITFKSLARRYLELHDEIADLDIMIGAIVDELAPDLVARNSIGHVGAAQLLLAAGDNPDRLRSEASFAALCGDQSGSRLIRQTIRHRLNRGGDRHANSALHIIAIGRLRTDPKTKIYVAKRVAEGHSKLEAIRALKRYIAREVFTLIMRRHKTINQTQIAA

SEQ ID NO: 334701 - protein, 387 aa, unidentified
MPQPNDLSRSLVALDQNSTIIAVIEMSQSSWLVAGMVPGIERQPRKKLEPSPERLLGLLHRWRYEAIRAGRTITRIALAFEAGRDGFWLARWLAARGIEAHVIHASSVAVSREHRRAKTDRLDTELLKRGFLGWLRGERGHCSMARVPTIAEEDAKRPSRERDCLVGERTRIVNRIKSTLTRLGIRNFKPTLRKAAERLASVHTPEGMPLPPNTLAELQRDITRLGVVISQIRQIEDARQKRLEQQPETGCHAMVRQLARIVGVGVETADLLVHEVLSRPMRDRRAVARYAGLTGSPDESGAQRREQGLARAGNARVRRGMIQLAWRFLMFQKESALALWYRARTADSRSGPRKTMIVALARKLIIALWRFVTTGEPLEGVVLRPAS

SEQ ID NO: 334702 - protein, 315 aa, unidentified
MSDLPCFVGIDVAKAQLDIALRPSGERWAVPNDASGVMTLVDRVQALHPTLIVLEATGGFERAVTSALATAGLPVVVVHPRQVRDVARATGQLATTDALDARALAHCADVIRPTPRPLPDAQTQELRALLGRRQPLIGMRTAEQNRLAGTNARLTKDIAAHMTWLNAAIATLEDDLETILRASPLWRENDDLLQSAKGIGPVCARTLLPELPALGTLTRQQSAASVGVAPLHGDRGTRRGRRMIWGGRAHVRTVLYMGTLVATRFNPQIKVFYERLLAAGKVKKVALTACMHKLLTILNAMLKHRTPWQPQEVQS

SEQ ID NO: 334703 - protein, 396 aa, unidentified
MRAIWAGIDAGKTHHHCVVIDETGKRLLSRRVANDEPELLQLLADVVALGDEITWGIDLADGGAALAIDLLLSHGQHTLYIPGMAVNRASEGYRGAGKTDAKDAAIIADQVRVRRDLHPLRAGDELVAVLKILTVHRRDLIEDRTRVINRLRGHLTGIFPALERVLDLTNVGPLVLLAGYQTPAAIRRVGVRRLETWLRNRKVRGADQLAQAAVAAADSQYTSVVGEKPTAQLVHTLAKEVMRLNEQVAEADKLIEARFREHKYAEVITSMPGIGPVLGAEFIAATGGDMASFSTPDRLAGFAGVAPAPRDSGKISGNLHRPKRYSRGLQRVFYTSALISVRHCSESRRFYDRKRAEGKRHTQAVLALARRRVNVLWALLRDGRCYEPIPPVMTAA

SEQ ID NO: 334704 - protein, 358 aa, unidentified
MEYGAIDLHKKESQIRIVMESGEIVDRRIATTRERFTAVFWGRPRMRILLEASTESEWVAQHLETLGHEAIVADPNFTPMYSHRSRGIKTDRRDVAALAEACQRGFYRAAHRRSAPQRTVQSQLNVRRELTDSRTRAISLARAIIRGAGFRMRSGSTGSFLDRVAALDLPPSITETLLPVRTLIAVLSEELTSADDRFAKLVTEDPVVSRLTTLPSIGPITASAYVAALDDASRFGRAAQVASYLGLVPREHSSGEQQRRGRVLRSAHPAVQSLLVQAAWRMSRSKDPRTAGLRAWAQSVARRRGKKVAMVAMARRIARILFAMWRDKAPYDAARIRPTRAMLATPNVHDATRLVVNG

SEQ ID NO: 334705 - protein, 361 aa, unidentified
MLEQKNELNFEGRNIYVGIDVHLRQWNVSIYVEELFHKTFQQPAEPMALNHYLRQNFPGGQYHSAYEAGFCGFWAHHKLKELGIDNIVIHPADVPTTQKEKVQKTDAVDSRKIGRSLQKGELKAIRVPTKETYEDKSLLRARKSLVKALSKSKNQVKSMLYLFGIRMPERYMRTSAWTRNFSRWLKEEAIKGFSQESGRESLLLTVEKVERLRALLLRANRDLRELEKSDLYRHRMELLRGIPGIGLITGLTFLLEIEDIGSFDDTDQLAGFAGLVPKCHGSGDEEGKGEMTFRGQNNLRIELIESSRISVGRDPALGMAYLNYCKRMDANKAIIRIARKLLNRIYYVLSKDRKYETCVVK

SEQ ID NO: 334706 - protein, 424 aa, unidentified
MKVTFQTCCGVDVHKAFLVATIIKTTGGIEPSYQKRRFSTFNNSILEFKRWLLENECLDVCMESTGKYWIPVFNLLEDEINVTIANPKWVKAVKGNKDDTKDSKWIGDLFRLGLVRGSYIPCKKIRILREFTRYRYKLVSCRSSEKNRYQNALTVCNVALDSVVSDIFGKSSTSIIDYLLEQSGTSIDHEVIASKLLKRLKAKEDAVIESIEGYQMTDSQKYRMHLVRTHMDHITAAINDVDSEIESLITSDPDYQNAIELLCTIPGVKHDSAVTIISEIGIDMSQFCTSKRLCCWAGLTPGSNESGGKKKAVRITRAGVYLKPALVQCAHAAVKSDKSPYYKKKYESLVKRRGKKRAIIAIARMILTAVFQMLTTGEAWNPCDLYKIDMPEILLEKQKQKAIKQAQKLLIREGLLPPIETVAS

SEQ ID NO: 334707 - protein, 415 aa, unidentified
MCSIPKWILEVTLYINSMIAFHVSMNYGCDGEGESVSHLMPGSMFCRLDPLPRNLVLELVRYLRPPSYGRACMCKVDSDGVRVCCDCRDKEGEIMSFIVGVDIAKKKFDVALLVNEKVRHKVFINSEDGFSELGLWLKKQGVDRARVCMEASSTYGEELATCLHDQGHVVSIVNPARIKGFAQSELLRLKNDKVDAGVIARFCDKMHPDQWVPLPSEIRELQALVRRVDALIVMRTQELNRIDTAHEAVLHSVKDHLSFLDEEIAALKKEIADLIKKNPNLKAKSDLLRSIPGIGQATVAAVLSELALFENCDCVRKIVAYVGLAPREFTSGSSIKGKSRLSKVGSARMRKALYMPSLVSMQCNPVIISFCQRLRMKEKNGKVIVCAVMRKLVHLIFGVLKSGRSFDPTFGLKTA

SEQ ID NO: 334708 - protein, 385 aa, unidentified
MQTLNDLSQSRIVLKQDSTLIAVIEMSLSSWLVAGLVPGVERQPLKKLAVDESVLLKLLHRWREEAEKTGRRIERIAVAFEAGRDGFWLARWLRARGIEAHVIHASSAAVSREHRRPKTDRLDTELLKRVFLGWLRGERDHCKMVTIPTIKDEDAKRPNRERESLVGEQTRIVNRMKAALSRLGIRGFNPKLKKAAARLEDLRTPEDEPIPPNTLAELRRDMERRRLISDQIRQIEDARLERLERMPNDGSHAMVRLLARVIGVGIETADMLVQEVLSRTMRDRRAVARYAGLTGAPDESGAKRREKGLARSGNARVRRGMIQLAWRFLMYQKDSTLAQWFRARTENARGTRKTMIVALARKLLIALWRLVTTGEVPAGVVLRAA

SEQ ID NO: 334709 - protein, 281 aa, unidentified
MQHVRVDTKGVIGGFDCRSEVHVGAALDPLGRLLGTASFPATPDGYRRATEWLHSLGPIIAVGVESTGSFGAALARVLPEQGLRTIEINQPHRHTRSRRGKTDAIDAEAAARKVLSGEATGAAKAALRSVARRIASLTKEAAALAEQLDRLVAFAAPRTLEQLGLGTQNTAALLIAAGENIGRFHSKAAFAHLCAAAPISASSGHTTRHRLNHGGNRQANRALHMTVIVRLRYRPRTRAYMERRVREGRTKQEVIRCLKRYIARDVYRTLTADLGTMAIRA

SEQ ID NO: 334710 - protein, 422 aa, unidentified
MNQLADTLFTAYVGIDWADAKHDICVRSPDGELVEFDCISSRPEAIADWALGLYQRFGGPIAVAVELTKGPIVTALMKYDFMVMFPVNPLMLARYREAFTPSRAKDDPTDAELAVDLITRHPQRFEPLQPQSVEMRKLMALVEHRYKVLCDQRRIANRLSHALKQYYPQVLEWFRQHNTVLFCDFVLQWPTLQQVKRARASRLERFFGAHNMRRKGVIERRLTAIKESTPLTEDPAVIDPYRLQIEVLIDQMRGTITALKRYDNDIEAITQQLPDYDLLFSPLPGAGHILAPRLLAALGEDRERYQRADELQMHSGIAPVTERSGKKTWVRWRWQCPTFMRQTFVEWAAQTINKSAWAGAYYRQQRAKGASYEVAVRALAFKWIRILYRCWKDRKPYDELKYLETLRRKGSPLLKYLADPAL

SEQ ID NO: 334711 - protein, 344 aa, unidentified
MTYYAGIDISLRTVNICVVDVDGELVAETRLSSDVQQIIACLDALDLKLAVVGLEAGTLAQYLTYGLQAAAFEVVCMEARQVKAALSAMRNKTDKHDARGIAQLLRSGWYSQVHVKSMESHHIRMLLTSRRTVLDKCIDIENEIRGLFKIFGIKLPKRLGHGSFDKTVRGIIEADAKLSHALLPMLDARLVLYKTFRVLDNRTRHLAWGDEVCELLMTAPGVGYVTALTYKAGVDDPSRFKRSRTVAAHFGLTPRRQQSGETDIEGRISKAGDAEVRRTLYVAANSVLTRSSRWSSLKAWGMKIKKNRGHKKAVVAVARKLAVILHRLWIEETQFQWGMDRVRS

SEQ ID NO: 334712 - protein, 307 aa, unidentified
MISWLGIDVAKSSLAVWLRPQDISFSVPNNSAGYAQLIEKLSGYRVLRVLLEATGGYERGVLVALGQAGFTVVRVNPRRARAFAQAIGKQAKTDPIDAQVLAQFAETLKSSNYQVVSPQAQCLRELVQQRERFVQQRDDDRRRVLQAQLPRVIDALKGHIAFLKAQIQELEKAIEQAMMALNDFKATQLTSVKGIGTITAASLMAYLPELGELDRHQIAALAGLAPYNNDSGNFQGKRKIYGGRSAVRRVLYMSCWTVIRYDDSFKTRYERLCEKGKSAKAALVACMRVLLIRLNAMLRDGTEWQTQ

SEQ ID NO: 334713 - protein, 412 aa, unidentified
MIKREKIELVKGSDIYAGIDVSCDIHRVRFIDNLGQEIIRGISFSNDREGFNKLEEHMKKYGIDHNIIFGLEPTGDYWKPIGYYLKSKGYRVVLVNPYHLKRTKEIIDNSQQKDDRKDSYLIADLVKQGKYFFPIIPEGIYGEMREISISWRRTKQQITRLKCYLSNFLAKYFPEYRSIFSDILGKSSFYILSHYPLPEDIKRIGKVRLTRIIKRVSKGKIKQEKIDRLYEIAKDTVGIKEGKETARMFLKEILKELERLIRRREKLKGKMKDLLMRSGYGDYLLSIRGVGVVSACLFLGEIGDPRRYKKSSQIEKLAGYNLVEESSGKKKGQKQISKRGRETLRYVGYLVANVAIAKNKEIRELYRYKVEVLKKNRINAMVGIAVKMLRIMFAVCKNKEYYNSDKIRENFI

SEQ ID NO: 334714 - protein, 384 aa, unidentified
MLIIGCDYHPGFQQIAFVDTETGELRERRLGHCEETEQFYTGLKGQSVRVGMEASGHSRWFERLLGELQFELWIGNAAEIRTKRVRKQKTDRQDAQLLLRLLIEDRFPRIWVPDSENRELRQLLWHRRRLVQMRTRVMNQLHVVALNEGLRRKKALWRPAGRQELESFVLAPWASRRRQDLLDLLDQLTPKIQELTRALQAEVEKRPVTRRLMTHPGVGPLTALGFELVIGTPQRFHCGKQVASYVGLVPSEESSGDRRRLGHISKQGNALLRFLLVEAAQVTVRSQAQWRSRFFHLAMRRTQDCQGSDGAEAGGASVLDVAARLGLRPIAEARFARGRARTSRWCAVITDVMIGYPAPSSREFEHVIMIAVSDRRDGWVGLSS

SEQ ID NO: 334715 - protein, 370 aa, unidentified
MLMQSHYKVGCDAHKHYSSFSVFDGQGRAVQRTRVDHQRGAIRSFLSRFPPGTPVAVETVGNWYWIVDEIEAAQCMPLLAHALLAKKRMGYVHKTDKLDADGLATLLHMGTLPAVWIPPGDLRDERELPRTRMAFSKVRSMLKNRIHSTLAKYALSLPTDSDIFTAKWRPQLSALLHQLPAETRRCVEQELELLDQLQAHIQCLEARILERVEITPTLQRIMSIPGPAEILSIVIDRELGSIERFPSPKHLASYSGLVPRVQASGGKVHYGRMIQQCNHYLKWAFIEAANVVARQRRHPNWSRKYAVRLFEHTRQRKGHGVAVAVGATARYLAGATFWVLKKGEPYREPVPRRPVGSLLRTSPKQGQARA

SEQ ID NO: 334716 - protein, 374 aa, unidentified
MDDHSVAYVALDTSKLRNAVAIAEAGRDGEIRYLGEIDNAPAATAKLARRLAKKHAALTFAYEAGPTGYGLYRQIKSLGHDCIVVAPSLIPQKPGDRVKTNRRDALSLARQLRAGDLTAVWVPDPHHEAVRDLTRARGAAVRDQRAKRQQVSALLLRLGLHYPGKTTWGKAHMAWLAGQKLAHLEQRIALEEMLHAVRQAGDRIARLEQAIHAAVPDWSLAPSATALMALRGIEFIAATTLLAEIGDLTRFRTPRELMAWLGMVPSEHSTGERIRRGAITKTGNRRARSVLVECAWSYRHPPRVSRDKLARLEAAPPAVRDIAWKAQSRLTARYRALRRAGKLDVVAITAVARELAAFIWAVGLAVGSGRTPEV

SEQ ID NO: 334717 - protein, 331 aa, unidentified
MQYVGIDLHKQDLVVAVEDESGPVGKTVRLGCKDESRIVSFFEKLVPFEAVIEASSSYRWLYDLLSPLGRVLLAHPLRLRIMVTRRAKTDKLDAAVLARELRRGEIPEAYVPPRPYQELRELTRARARLSQAATAAKCQLHALLRGANVHPPYRSPFGKRGRRWLGSLDLGVAGNLTRDELLLRLEHYERAGTQLDAGLAQLAQGFPEVEALTALYGIGLYSALLIIAELGEVDRFGTARQVGAYAGLTARVHQSGGHDYHGHITRQGSRWLRWVLVQAAMKIIREDVPLRNFYTRIRKRSSKHIARVAVARKLAGICWVRLRRWHRDHAA

SEQ ID NO: 334718 - protein, 371 aa, unidentified
MLLDHLSDGLTAIRTQFGAIFVSLELSRSNWLVTSLSPGKGEKMSKHSVTAGDVAGLMKRFADLRRKAEARTGESYPVITIQEAGLDGFWLHRVLQQNGIESHVVDPASIAMPRRRRRAKTDRLDGETLLRALLAYKRGEPRVCAMVVAPSPEEEDRRRICRERRSLIAERITHVNRIKGLLFAQGVSDYEPLRRDRRARLEALRTGDGRELPAHLKAQIGRELDRTELLLEQIKSVEAEQDALLAAARKPASEEAAPDPVTMLLALKGMGANFAAVLWSEAFYRRFSNRRQVAAYAGLAATPWQSGGIRHEQGVSKAGNPRVRTTMIQFAWLWIRHQPQSALTRWFKERSPQGRKRAIVALARKLLVALW

SEQ ID NO: 334719 - protein, 375 aa, unidentified
MGKHRLAYVAFDSAKNKHAVAIADSGRGAEVRYLGEIDNSPDAVRKLVAKLTRQYERLHFCYEAGPTGYGLHRQLTELGHVCDVVAPTMIPKRSGDRVKTNRRDSVTLVKLLRAGELRAIWVPDSVHEAVRDLTRARETAMVDLKTKRQQLLSFLLRHGRSFPDGRNWTKMYERWLAKQTFGHPAQQIVFQDQLEAITTAQARLAALEQQLREIVPTWTMASVVAAYQALRGVSFLVAVTFVAEVGDVRRFATPQQLMAFLGLVPSERTTGDTVRRGSITKTGNYRARRVLIEGAWTYRFSARVSETLRTRLKDLPLSVRAIAWKAQVRLCARYRRLIARGKKPPVVTSAIARELAAFLWAIGQQVVPQTGVLRN

SEQ ID NO: 334720 - protein, 427 aa, unidentified
METDLSRVERFRQFKQEIRGNERYLIIGIDVAKDRHHAFLGTANGRTVLRRLAVENSRNGFEHLGAHVQFQMTKHGFAEVVFGVEPTSVYHKPLAEYLIEHEFLVVYVTNAAIKHNRQLLDGRWDKNDTKDAANVADLVAQGKCHYYDLPNEVLKDVRSLLGVRRMLKRQLHSARMRIRNNLAAQYFPELDKFWNKAEEENLAIVRWCLDPQEIRQLNFTEFFHRVTSRSKGARQHERLRRIWEAASTSIGCRVGKALEVETKILVEEVKQTRERMAEVEQAIRARLTGLPHYEVLLSIPGFGPYICAVVLAAVGNPHRFENRSQLLKLAGLDLSANRSGKRSATAVPVISKSGKADLRYALYQAALVASSFNERVMAYYRKLLRGREREKGIRTKMRVKLAAKLLVIAWTLMKNKEPFNPSCLNID

SEQ ID NO: 334721 - protein, 398 aa, unidentified
MEHYSEAFVALDTAKLRNAVAIAEAGRNGEIRYLGEFDNTEAATRKLVTKLASKHTRLTFCYEAGPTGYGLYRLIKSIGHDCIVVAPSLIPSKPGDRVKTNRRDAVNLVKLLRAGELTAVWVPDERHEAMRDLVRARDAAAKDYRIKRQNVSSLLLRLGRHYPGKKTWGRAHINWLTSLKLEHREQRIAFEEMLLAVRQVRERIERLEQAMREAVADWTLAPVIEAVQAMRGIDMVGAVAFLAELGDLSRFENPRQLMAYLGVTPSERSTGESVKRGGITKAGNTRARRLLIEAAWSYRFPPRVSKDMQARIGAAPRAAREIAWKAQMRLCGRFRTLTRKGKRPTIVVTAIARELSAFIWAINREVAGSHATANQRPGSWTDRAMKGSTGPQPLRPHT

SEQ ID NO: 334722 - protein, 367 aa, unidentified
MSITLEGTTTAMSIVAETHPFVVGVDTHARKHVYTILTAETGAVIATDDFPTTVAGINRALAWVTRRTEADADTLWVIEGTGSYGAILTGTVAAHSYPVAEAPRMEPTQRYGVGKSDALDSHRIATAALSLPLTALRRPRLNDGIRQAIQILVTARAAMTNDRTRSINALTALVRANELGLDARGKLSKAQIVEVSKWRTRKEDLAILVARAEAIRLAKDIQELDQQLTANERQLEELVQVSHAAPLLEEKGFGPVSAAKCLAAWSHPGRVPSEAQFASLAGVNPIPASSGNTVRHRLNRGGDRSLNSALHMVAVSKMTHDQETKSYVTKRRAEGKTDREIRRCLKRYLARRVFRILNTQSQRLQPV

SEQ ID NO: 334723 - protein, 424 aa, unidentified
MKVTYQTCCGVDVHKSFLVATIVKITGGIEPSYQKKRFSTFNNSILEFKQWLLDNDCHDVCMESTGKYWVPVFNLLEDDINVVIANPKWVKAVKGNKDDTKDSKWIGDLFRLGLVKGSYIPCKKVRILREYTRYRYKLVSCRSSEKNRYQNALTVCNVALDSVVSDIFGKSSTSIIDYLLEQSGSSINHEEIASKLLRSLKSKEDAVIESVEGYQMTDAQKYRMRLVRAHMDYITAEINDVDKMIENMISSNTDFENAVQFLCTIPGVKRDSAITIISEIGTDMSQFSSSKRLCCWAGLTPGSNESAGKKKSVRITRAGVYLKPALVQCAHAAVKSDKSPYYKKKYESLVKRRGKKRAIIAIARMILTAIYQMLSTGEQWNPSDLYKIDMPVALVEKQKAKAIKQARKLLQREGLLPPDEPLAS

SEQ ID NO: 334724 - protein, 343 aa, unidentified
MRTITTVGLDIAKSVFQVHCVDANGDVVLRRQLKRRYVLTFFQKLPPCLVGIEACASSHHWSRQLQALGHTVRLMPPAYVKPYVKRQKNDAADAEAICEAVTRPNMRFVPTKTPEQQSCLTLHRTRHLFIRQQTAIINSIRAHLAEFGIVAPVGRNGVEQLLEVVANVEDTRLPEVARACVAALGTQLRALKAQILAFDRHIMAWHRSNETSKRLDVIPGVGPALATALVASIADPKAFRSGRDFAAWIGLVPKQNSSGGKDKLGSITKQGDRYLRSLFTTGALAVIRSAKLHGTKHRPWLAALLARRPTKVAAIALANKIARMAWAMMARGERYKEPVALAA

SEQ ID NO: 334725 - protein, 408 aa, unidentified
MRVFVGHDWAEAHHDVFIEDESGNRLAAARVSEGIEGVARFHALVADHIEDPSEVTVATETDRGLFVGALVAAGYRVLAVNPMSVARYRERHVTSGAKSDAGDAWMLAELARVDGHHHQPIRGDTDLADAVKALARAHQMMIWSRQRHTLQLRSTLREFYPAALEAFDDLASGDALAVLSIAPTSKMGRRLSSQRIVSALRRGGRQRRIDERAAEIRAALRVEHLTAPDVVADAMGATVTALVGVIREMVTQIRRLEAELADRFEQHPDAKIIRSLPGLGTILGARVLAEFGDDPNRFDSAKSRKNYAATSPITRASGKHHIVLARYARNRRLANTCHQWAFTAISASPGARAFYDHRRRSGDTHNQALRVLANRLVGILHGCLRHHTSYDEDTAWHTTTQNVELRAA

SEQ ID NO: 334726 - protein, 362 aa, unidentified
MTEITRAPVARVGVDLSKRLYQIHAVDAQGHTVLAKALPVDRFFAWCAELPQGCIVAMEACGGAHHVARRLRLLGLDARLIAGHFVTPYRMTGKSGKNDANDAAAICEAAGRPHMRFVPVKTTGQQGQLAVHRLREGFKEERTALINRIRGLLTEFGLVFAQGPDALRVVLAGVIEDASNEIAGVARLALQRAHLHWIDIDLQIAWCDERIAAHVRSDARAAKAATLLGIGPTTASALVASVGEFGQFANARQFGAWLGLVPSQNSTGGKARLGGISKRGDDYLRTLLIQGAKSAVMSAPKRSDRISQWLVQLKERVGWQKAVVALANKNARILWAVLTRDGVFDPDHVPQIPAARQKPQPG

SEQ ID NO: 334727 - protein, 422 aa, unidentified
MSYCPVAGIDVSKQFSDMCILSPDNKIFAQEKIYHDETSINRANALLQKAERLFFSKPVIVMESTSHYHLILFQFFSEHGYDVIVVNPLQSNSMKDFSIRKRKTDRVDAFKLAMMYRTKTLRPSQIPQTATRALRQLCRHRAELLNDVSSYKNRLTALLDQTFPGYDKVFSDVGGVTSCAVLVRFPTLTILLVEEESELVEVIAVASKSGYSFAKKKAGLLISAAQKAQTLGIHSCADETLIVCTIQMLRTLSESVLQIETAIDNLLAQIKEMRNNVSLLQSIPGVGSHSAAFLLGEIGDISLFKKPKQLAAYWVLDPTERQSGSFRGTKNKLSKRGFPYARAALHMGVVNSICKRGKDSAANPVLLSYYEKKCKNKPAKVAQAASMHKLVFIVFAVLRDQKPFELKTPEQHAVEQGFVKAA

SEQ ID NO: 334728 - protein, 361 aa, unidentified
MADLAASVTGGVDTHKDLHVAAALDGVGRLLGTESFPTTAAGYRALLGWLRSFGTVTAVGVEGTGSWGAGLARYLAGQDVKILEVNRPNRQQRRRRGKSDPADAEAAARSVLAEQAIGTPKATNGVIEAVRLLRLARRSAVKARTQAANQIHSVIDTAPEELRAQLIALPTAARITRCSRLRPADVATPLGAAKLALVSLARRWSALDSEIDTLGTELGRLVAIAAPSLVAVKGVGTEVAGALLSAAGDNPERLLSEASFAALCGASPIDASSGRNQRHRLNRGGDRQANCALFTVVLNRLTWDDRTRAYMARRTAEGKSKREVIRCLKRYVARELYQEIRKISAEPTSVSLPDEISQNAA

SEQ ID NO: 334729 - protein, 331 aa, unidentified
MKHFEYFIGIDVSKATLDFSVVKEGKQLFYQRTANNPKAIRQLLSLVAKEYCPDLFKAVFCMEHTGIYNNHLLQALQAAQLTIWMESAMQIKRSIGVQRGKNDKIDAKRIALYAYKNREGVKVWQPSREQLQKLRQLLGIRKRLIKAKANLKKPLGELSFLSLQGQKLLKDSNRCSLDALQKDLDRVNKQIEKTIQEDGHLRHVFNLVTSVKGIGKVTATQMIVVTNEFKSITEAKKFACYAGIAPFEHTSGTSVVGRAHVSNIADKSTKCALHMAALAAVRESGELQDYFLRKVKEGKNKMSVINAVRNKLIHRVFACVRDNRLYNTQLA

SEQ ID NO: 334730 - protein, 350 aa, unidentified
MLIIGCDFHTRYQQIAMMDSETGELVERRLEHENGEARAFYARLPKPVLVGMEATGYAQWFERMLAEQGHELWIGHASEIRAGVVRKQKTDARDAAHLLRLLVEKRFPRIWIPSPAERDTRQLLRHRHKLVCFRVSVKNQLHGLAMSQGICRKKKLFTAKGREELEKLSLGPWASRRRQELLEMLDRFNPLIDELDRAVQQQAESHADAVGLMTHPGVGPVTALAFVLTLGPVARFQRGKHVVSYLGLNPKERSSGDKQHTYSISKQGNTMMRWLLVEAAQTAVRFDPELQRLYQRLKFRRGASVAKVAVARKLAVKLYWMLRATASCAQRAPMQGSSGGTLIPHVGSKV

SEQ ID NO: 334731 - protein, 402 aa, unidentified
MDVLHPRCAGLDVHKDTVVAGLRLAGDGAVRSEVRTFDTTTPGLLAMSAWLAENGCTHVAMEATGVYWKPVWHILSDGDFTLILANAAHVKNVPGRKTDVADAIWLADLLAHGLIRASFVPEAPTQEMRALLRIRKQLVREQSSHVQRIQKTLEDANLKLGSVLTQIMGLSGRAILDALIAGERNPDTLLTLVQWGVKAPPETIRAALQGRVTDRHCFLLRLHLRQFDALAAAMAEIDAEVDRDLDPFRQAVRQLRTIPGVSDLTAQVIVSEIGIDMTRFPTAGHLISWAGLCPRNDESAGKRRSTKLRKGAPWLKTTLVQCAWSGCRKKGSYLKAQFQRLKARRGPKKAICAVAASILTAAYHMLRDGTLYQDLGDTPFNRTSPEQKAGRLVRQIAKLGFD

SEQ ID NO: 334732 - protein, 339 aa, unidentified
MNRIVVGVDIAKRVFQLHWVQPETGEIVALQLKRERFLEHFANRSACLIGMEACGGSQHWARSLQKLGHEVKLLSGRMVKPFVVGNKNDAADARGIWMAVQQPGIKAVAVKSEEQQAVLALHRMREQLVKFRTAQINGLRGLLTEYGEVMPQGRAGIKRDIPSALGRLSDRLPAMVIEALREQYARLEELDEQISQIERRLRQWQHEDSATQRIAAIPGVGLLSATAAVATMGDPKAFKSGREFAAWLGLVPRQTGTGGRVQLLGISKRGDKYLRTLLIHGARAVLTHSKSPPEWLTELLKRRPKNVAVVAMANKMARTIWALTAHERAYQSGYVSRPA

SEQ ID NO: 334733 - protein, 354 aa, unidentified
MSQNPITAIATVGIDIGKNSFHIVGLDERGAIKLRQKWSRGQVEARFANMPPCLIGMEACVGAHHLSRKLKALGHDARLMPAKYVRPYSKGQKNDFRDAEAIAEAVQRPTMKFVATKTAEQLDLQALHRVRERLVSQRTGIINQIRAFLLERGIAVRQGQRFLRAELPRILATPPDVLSPRMVRLIENLAGDWRRLDERVESLSDEIEAVARQDADCERLMSVPGVGPIISSAMVAAIGRGDVFSKGRDFGAWLGLVPKQTSTGDRTILGKISKRGNRYLRVLFVQAAWVVLIKPKSWERHGLKPWIEAAKKRLHPNVLAIALANKLARIAWSVLARGRNFEASTNTNATAQAA

SEQ ID NO: 334734 - protein, 315 aa, unidentified
MKKISTAASHNIGKVEGQRLTVGLDVGDRWSWYCVLDEAGEVLLEQKVATTPKALKEMFGKMPCSRVALETGMHSPWMSRRLSELGHEVIVAHARNVRLIGESRRKDDRLDARTLARLARIDPQLLAPVKHRSAKAQADLTVIRARAGLVRARTALINTARGLTKSYGERLRGCNSRNMNAEQAQGLSPELQAALGPLLAEIESLSARIREYNERIERLSQESYPEVALLKQVKGVGTLIALTYLLTLEDAHRFGKSRDVGCYLGLQPGRRNSGQSEPQLHITKEGDPYLRTLLVQGAHHILGPFGADSDLRRWV

SEQ ID NO: 334735 - protein, 355 aa, unidentified
MSQEKYIGMDVHQASISVAVMDARGKLIMECLLETKAATILEFIQGLRGTLALTFEEGTSAAWLHDLLKPHVSRLVVCDPRKNALLKDGNKSDRVDARKLAELLRTNQVKPVYHGKHGTRALKELGRSYLTITKDVTRVMNRIKAVYRSWAIPCAGTSVYTPRHRAEWLAKLVEPGVRIRAEHLYQQLDSLQPVRLEARRELLLESRKHAAVKLLCQIPSIGPIRAALLVALLQTPHRFRTKRQLWAYSGFAVEIHDSGEYRSVRGKLQRNRERITVRGLNDNHNKDVKSLFKSAAISASTRPGPLHDFYVTRVESGMRPTMARLTLARKIAAITLTMWKKGVSFDPKQLQRQAA

SEQ ID NO: 334736 - protein, 314 aa, unidentified
MMTGTMYIGVDVSKAWLDIAVHPTDEGWRTENTESGVTKLVKVFQEMVIDRIVVEATGGYEARLVERLAQAGLPVCRVNPGRVRRFAQGMNWLAKTDKIDAKVLAQFGEKAQPRLLILPTEAEKRLSALVKRRKQVVDMLTAEQNRTELAEQEVFEYIANAIQFLQKQLADLDTQIQNLIDQTPELKHKRDLLQSTPGVGKVLSATLVSQMPELGSCDRKEIAALGGLAPFNHDSGRKRGRRMIRGGRPFIRSVLYMATIAATRFNPVIKSMYERLLKTGKQKKVAIVACMRKLLTILNAILRTQTSWQPVFSA

SEQ ID NO: 334737 - protein, 362 aa, unidentified
MEYFCGLDVSIDETAVCVVDEQGEVHLQATAVTDAEALFAVLKPYLPRLRRVGHEAGSLSPWLHPEMLKLGLPAICLETVHVRAAMSAQRNKTDKADALGIAHIMRTGWFRRAHVKTEGCYRMRLLLTHRRNLKRKFLDLENAIRHSLKAFGIRLGGIGRGKFDAAVREAVADDPFTTDLMEVMLTARAALWKEYCRLHDLVVKMVAQSELCRRFMAIPGVGPVTALSFMTAIDDPSRFRRSRDVAAYFGLTSRRWQSGTSIDVKGRISKAGDADVRRALYEAASALMTRFKGKDSLKMWGAALAKRSCHRKAVVAVARKLAVIMHAMWSAGTFYTGAPNDGAAQADARQMRKERKLLGAHA

SEQ ID NO: 334738 - protein, 377 aa, unidentified
MGDYSEAFVGIDTSKLRNAVAIADAGRGGEVRFLGEIENTAAATAKLVRKLAAKYQRLTFCYEAGPTGYGLHRQIKGLGFECAVVAPSLIPKRRGDKVKTNRRDALSLAKLLRADELTPVWVPDGRHEAMRDLTRARETAMLDLRTKRQHVSAFLLRLGRPYPQSKKTWTKTHVSWITSQKLEHPQQRLVLEEMMLAIRQAQDRLARLEQAIAAAVPEWSLAPLVAALMAMRGIDLISATTLLAEIGDLSRFQTPTELMAYLGLVPSEDSTGDTVKRGPITKAGNRRARRMLVECSWSYQHPPRVGQAKQPKVDAAPPAVREIAWKAQCRLYRRYRMLIRKGKLKTVAIVAIARELAGFIWALARAVSTMPIAAATT

SEQ ID NO: 334739 - protein, 392 aa, unidentified
MIYVGIDVAKDKHDCFAMNSDGEILIENFSFQNNSDGFNLFFNSISQFNESFENIKVGLEATGHYSNNILNFLTSKGFNVFVINPLQTNLFRKGQSLRKTKTDKLDARFIATMLISNNLKPYSNLSYHISELKSLVRHRFRLIEERSKFKVSLSRLVTIIFPELEKIVWSISQNSVLYLLYELPSVKDISECNLKHLTNLLKKHSCGKYSRDKAIEIRDLAKKSIGTHSPSISFELRQVIQTILFLQSQVDDIDKELKRLVVELNSPILSIPGISYVTSAFILAEIGDINNFGSPSKLQAFAGLEPSTYQSGKFTSTHSVMVKRGSKYLRWALLTATRLVCMRDKNFNDYKNQKLAEGKHYFVALSHTAKKLIRVIYHLLKTNSTYELQKVT

SEQ ID NO: 334740 - protein, 311 aa, unidentified
MEQVFVGIDVSKRQLDVHVRPSGEAFSVARTSDGIEDLIARLRGGAGPQLVVMEATGGFEMVVAAALAAANLPLAVVNPRRIRHFAEALGLLAKTDRLDATVIAHFAQAVRPHAQAVPEPAAQRLGELVARRRQIVGMMTAERNRRGQTTNGRIQRMIDRMLAMLQEQLSEIEKEISDEVRASPAWVARDTLLESVPGVGPKIACTLIAELPELGALTRRQIGALVGVVPYNNDSGRKQGRRNTKGGRPAVRGALFMAVMVSIRRDLPLAAFYRRLRAAGKAGKVAVVAVMRKLLTQLNAIVRDNAQWRAA

SEQ ID NO: 334741 - protein, 315 aa, unidentified
MQDMPCFIGIDVAKAQLDIALRPSGERWAVPNDASGVMTLVDRVKDLKPTLIVLEATGGLERAVTSALATEGLPVVVVNPRQVRDFARATGQLAKTDALDARALAHFADVIRPTPRPLPDAQTQELRALLGRRQQLIVMRTAEQNRLAGTSTRLAKDIAAHIAWLNADITTLDNDLETLLRASPLWRENDDLLQSAKGIGPVSAHTLLLELPELGTLTRQQIAALVGVAPLNCDSGTMRGKRMIWGGRAHVRTVLYMATLVATRYNPQIKAFYARLLAAGKVKKVALTACMHKFLTILNAMLKHRTPWQPQEVQG

SEQ ID NO: 334742 - protein, 397 aa, unidentified
MKGFCISLDVSKGSSFYQGFKGLEEPITKPKKIEHNLEGFKELLKLKEIIRTEYDSDCIVIFESTGVYHKALQTYLDEHDFKYTIISPLLSAKVRKSDIRGTKTDAKDCSSIAKVFYLKDLRIYSKTDEIYDDLKEKSRYYDFLVDEMKRWKIEFRRLLDIIYPGFDKIFENLYIDYTQALLLEYPHPEIIRKKRLDTIAKFIEKHTCHKESFSLKQAQALKDYAENCASGCSYKSYLVSQFDTVIHTLNSQIKHLEITLDEIIEIAKKLPNYEIIRSIPGIANNLASRILAEIGDIDRFNNASQLVAYAGIDPQIYQSGQISGLHLKISKKGNKKLRCLLYLAVTCMIKTNRDTKIVEFYKRKKADGLASRSALVASMNKLLRIIHSLCKNGCLFK

SEQ ID NO: 334743 - protein, 346 aa, unidentified
MLYAGLDLSRKRLDFHLLDADGGTVEVGAAPPDADGLRGLTERIDRHGAPIRAAIESMNGARFVHDRLELAGWQVEIADAQKVKGLAPLACKTDRIDAWVLAELARRELVPAIWLPDPTVRGERERARWRLHLVRHRSSLKQRVHAVLLAHGKPCPVSDLFGVRGRQLLARLDLPEPWQGTLEASLRLIDELDREIGDCERELRRLGADHRYVPLLLTVPGIGWVLAYTIAAELGDINRFPTPRKLTGYTGLCPRVYQSGERDLRGPLSKQGPRYLRWALVEAATHACTHPAYRDRYQQTKTRIGKQRGAKVAQIDLARRLTEAIWHMLTREQPFAPKGATDPLAA

SEQ ID NO: 334744 - protein, 357 aa, unidentified
MPSSNVKYIGLDVHKEAITVAVRNGAGKLVMESILETKASTLLQFLNGVRGELHVTLEEGTWAAWLYDVLKPHVREVVICNPRRNALLKEGSKDDRVDARKLSELLRAGLLRTVYHGENGLRMLRELTRSYQVISKDLQRAMNRIKALYRAWGIPCTGTQVYGQRHREQWLKKIHEAGVRRRAELFYQQLDALQPLRVIVRGELLTESRKYPAVKLLRQIPFIGPLRAAQLVALMQTPHRFRSKRQLWTYSGLAVVTRDSAQYRYVDGQLQRSKKPQQIRGLNQNYNHAMKEIFKSAALSATLRAGPFQDFYVGLLARGMKPELARVTLARKIAAITLTIWKKGECFDTAYVKPQAA

SEQ ID NO: 334745 - protein, 367 aa, unidentified
MDPLTNRLQMSHDVISTQHQTVRGPHMHTITYGIDLAKNVFQVHAVNTDGEIILKRKLKRKEVLAFFARQELGLIGIEACGGSHYWARELSKLGFTVRMMSPQFVKPYIKGNKNDANDAEGICEAVTRPNMKFVTVKTTDQQDILMLHRIRTQRIKQRTALSNQARGLLSEYGIVIPVGIRNVRKDLIDILTDIEEKRLSEFVKPHFNNLYEELLYLDDLIQTVDKALKVYFNQNEACQRLASLPGISIITATALVGYLGDISNFKSGRELSAYLGLVPKQHSSGGRELLLGISKRGDSYLRTLLIHGSRSVLKVAATKEDKDSLWLIDLQSRRGYNKAAVAQANKTARRVWALLSNKTQYEVQQAA

SEQ ID NO: 334746 - protein, 362 aa, unidentified
MKIIGCDFHPSFQQIAMVDLETGEETQLRLSHSNGEAKRFYESLSQPALVGVESSGNMRWFQRLLAGLGVELLMGDATAIQASNPRKQQTDKRDAQHILKLLLEKRFPAIWVPSMAELDLRQLLKHRHTLVQMRTRVKNQLQHIAMNEGFQKKRKLWTEEGLEFLRNLELGPWTKRRRDDLLKILAELNRQVRELSRAAEDEAEKQPKVWLLMSHPGVGPILALATVLTLGTIQRFQSGKQVASYVGLIPREASSGMRRWLGAISKQGNSFMRFLLVQAGIVAARKDAELGRFYKRLAHKKHHGVAKVAVARKLLVRLYWMLRTNTPYPEVVVRMQGSSSHPVAKKAKAEPLSGRPASREKN

SEQ ID NO: 334747 - protein, 416 aa, unidentified
MTEQIHVSAGLDLHKKFIIATILSEDGFKEQQRFERTESGLLNLKEWTIENKCEVVACESTSDFWVPVYNMMEGHVTVIVGNARDIKMFSHKKTDKVDSELIAQLALKGMIRPSRIFDRKHQEFRSLARLRHKLVQKKTDIKNEIHHILDSELFRLSSVLTDLFGKSGLRILQGITNGSPMDEIIKKLPLNVRKKTVQLNEILQTTISPGAILRLKYCLNLLQCLDDETGNLTEAIFQYANEWFKQEMKILKSVPGIGNIAAVTLLAEIGNFSDFPSGDKLASWLGLVPNVYQSADKMRTGSITKRGSDHARWILVQIAHAASRKRNTVFKRFYDRKKPMIGAGKTIVALARKIVIIVWHLITRSEFFNDENGDDIPSSKTVKIRIPVIVTLEEILKILNRATVVLKDPDPNMRGW

SEQ ID NO: 334748 - protein, 418 aa, unidentified
MKVVYPICCGVDVHKTFLVATIITSEGITPHYSKKRFSTFNNSILQFKQWLIDNNCYDVCMESTGKYWVPVYNLLEDTIHITVANPKWVKAVKGNKDDAKDSKWIGDLFRLGLVPGSYIPDKPIRILREYTRYRFKLVSCKSSEKNRFQNAFTVCNVALDAVVSDMFGKSASSITDYLISSDSFDPEYCSSLLKRSLKEKADTVIESIEGFQMTKEQKERIVVVRSHLEFIQKSIAELDDKLDKMVALYEGAITLLCTIPGVDRASAITIISEIGTDMSQFANSKRLCCWAGLTPGNNESAGKKKSVKISRAGVYLKPALVQVAHASVKSCSSPYYKNKYERLCKRRGKKRAIIAIARMILTAVYNMFDTGEEWNPSDLYKIDMPQEMLEKQKEKAIKQAVKLLISNGVIKTADISAA

SEQ ID NO: 334749 - protein, 436 aa, unidentified
MRGCRCSMIMGFTKPIEHFNLQRKKVITMNTLYVGIDVSSKSNVVYLMLPNGDKHSNFSVANSHEGSTQLVKRILSALTSHSLDTVLIGLEATSIYGYNLVYFLREDATLAPFNRKIHVLNPKQVKKFHDAYNDLPKNDYVDSFVIADCLRFGRINKEVYMGDYRYKALQNLTRARFFAVQNLVKEKQRFMNVLFKKYSTMTQEKVFSDTFSTTALAVYDEFESAEALANMDLHELTDFIIEKGKNRFPDPDAVAKAIQKAARNSYRLPKTVNDSVNQVLSISITSMKALESQIKEFDKAIKAQMELLPNVLISIPGIGPVYSAGIMAEIGDINRFNSQAALAKYAGLAWKQHQSGGFESEVTRLIPSGNRFLKYYLCEAAFSLVRCDKKYSDFYHLKYKEVNRCQHKRALALTARKFVRLVFRLLKDNRLYCPAK

SEQ ID NO: 334750 - protein, 320 aa, unidentified
MSATLVVVGIDVAKAQVDVAVLGAALDAPQFINEAEGHSALAAALIPLGVALVVMEATGGYEAALACALQAAGLAVAVVNPKQARDFAKSLGKLAKTDRTDARMLAEFAAVLARRDDLAHFIRPLANSEQQALAALVTRRRQLLTMLLGERQRLQLAMALVRPSIEAMITAIRAQLDDVEAQMVDHVREHFAELDQLLQSASGIGPVASATIIAELPELGRLNRREIAALVGVAPMANDSGTSRGRRHVGGGRFEIRRVLYMATLSAARHNPSINAFYVRLLAAGKFPKVALVACMRKLLTILNAMVRYNKPWDQSLHNA

SEQ ID NO: 334751 - protein, 317 aa, unidentified
MAQFPERTWAGIDVSKKHWDVAIADGKRVDRFDANASGGLKLAALLKQAHVTHVCLEATGHYERPLVEVLREQQMPLSIVNPRQVRNFARAGGQLAKTDQIDARVIARFGTLLQPALTEKKSENQEKLSSLRARRRQVVATRVQEKNRLDTQPDADARRLIEAAVEFYKEQLKSVDEQIRQLVKSDAELQRRADLMVSMISIGNTTATALLAEIPELGTLSSRQAARLAGLAPINRDSGMYRGKRMIGGGRAGVRKALYMPTLVAIKHNPPIKAFYEQLLARGKAKMTAITACMRKLLLILNAMLKENKPWNPTHST

SEQ ID NO: 334752 - protein, 404 aa, unidentified
MIIVGLDWSRCKHDFVIMNLQGQILERGTIAHNTNALEELATRIEHRVDSAKQVRVGLELNDGALLAWLVTKGYTIFGIQPKSAQRARDIYRPSGSKDDRIDAFVLAEFVRINADRLRQWSTPSETTLQLRELVRWREELVQQRTADYQRLRALLAEWSPQLAELCDNLDCIWQLDLLSEFPTETRLCQAHGNRIRSFVRNHRMRSKKQQKIEDIRRSVPMPIPAGRVQVVEKQTIFLLEQTRMLTEQIKQIEQDLQQLILQHPDINVFKSLPVQGIVTIAGLMAIFGDDHKRTTSPDELAALYGVAPVTIASGKTKRVRQRRACDHTFHQTLVHFAFNTAFCDGCWAGPFYQRKRSEGATHYAALRCLAKRWLKILHRIWRDQSAYDEQLHQANQKRNRNHAA

SEQ ID NO: 334753 - protein, 350 aa, unidentified
MTKSKRRHPERDFTPTHPNAAAIDIGSRMHVAAVPPDRDPEPMRAFGTCTGDLQQLADWFERCGVRTVAMESTGVYWIPAYELLEQRGFEVVLVNARDAKHVPGRKTDVSDAQWLRRLHEYGLLRGSFRPKGELAALRAYLRQRERLLDYSASHIQHMQKALMQMNVQLHHVVTDVTGETGMGIIRAVVAGERDPAVLATHRDRRCHASEEEIAAALAGNWREEHVFALGQALELYDAYHAKVVECDLRIEIVLRRLRDAAAKPTGRLPPARHRDKTANAPTFDARAALHAVLGVDLTQIHGLGPSLALKLIGECGTDLSAWPNAKHFTSWLCLAPANKISGGNAARQSG

SEQ ID NO: 334754 - protein, 393 aa, unidentified
MSSRVVIGMDPHKRSATIEAMDEDEAVLGKGRYGTDPEGFVAMLAAAARWPDRVWAVEGCEGIGKHLVLRLLERGEAVVDVPAKLSARMRVYATGQGRKTDETDAHSIALVGVRMTGLREVVNDETLEVLRLLVDRRRRIGEDHTRMVCQLHQLLLELLPGGAKKDLSAAQARRLLATVRPKDVAGKTRKRVAMELVVDLERVYARKKAANKELIELVKQTGTGLLDLHGIGPSGATRLLVEVGDVTRFSTKGHFASWTGTAPIDASSGDNVRHRLSRGGNRQINKALHMMAVVQLRNATEGRAYYDRKVAAGKTANEAMRCLKRRLSDIAYRTMLDDLVATKAAGARTGPGGHRGNVSDSSAAGSHPHTDSSDKSLPGPAKTKPKTPLRRAS

SEQ ID NO: 334755 - protein, 410 aa, unidentified
MSEDTAEIVYVGLDWATATHAVCVLSAVGKILAQLMIDHTADGIATLVRKLAKFGEPADVHIGIERPNGRLVDLLLDAGHPVIPVSPNAIKTWRDGEVVSGAKSDAGDALVIAEYLRLRHHRLHPVAPYSGHTKALRTVVRTRDDLVAMRVSATNQLSALLDDHWPGAKAIFADVQSPISLAFLHQYPTAVSAARLGEKRLAAFLIKHGYSGRRPAGELLGRLRAAPAGTSDPILSIAVADAVTALVTVLDTLNKVGKTLDRCVIARLGEHPDAEIFTSLPRSGQINAAQVLAEWGDSRAAYDGPDAVAALAGATPVTKASGKQHAVHFRWACNKRFRRALTTFADNSRHQSPWAADIYTRARARGHDHPHAIRILTRAWIRVIYRCWHDHRPYNPNLHGGTQRLLPKTA

SEQ ID NO: 334756 - protein, 362 aa, unidentified
MRIIGCDLHARQQTVAMLDTTTGEVVRMTLTHEGDNVREFYSSLPQPVRVGIEATGSMQWFVNLMEELGIECRVGHPAEIRAAEPRKQKHDRRDADLILKLLMENRFPAIWLPSKELLDLRALLRHRHQWVRLRTRIQNALQSIALANGLRRGPSLWSQAGQQAIASLPLRPHTAYRRSELQAMYAKFEAEIEKLNQRVEEQACERPGARLLMTHPGVGPVTALATEVFLGDPARFADSKALASYVGMIPREYSSGERQRLGGLSKQGNPLLRFLWGEAGAHAVRRDPELQRFYRRKLVQKGLGKASVAVARKLGIRLWIMLRDQIEYNEFCRRGQKQQKSSDACAGMPETRYGAKSHRPID

SEQ ID NO: 334757 - protein, 411 aa, unidentified
MIVGIDVGSETHYARAFDWRNYEYSKKPLEFSNTEAGFLTFKAWVEDIAEKHGKTAVIPGMEPTGHYWFALGKFLQDNGMKPVHVNPHHVKKSKELDDNNPNKNDRKDPKTIAALVNEGRFSYPYIPTGIYAEIRSLSNLRFQTQEELTRIKNRIARWFSIYFPEYKDVYGDLKAVSGRMVLKVAPLPEDIRKLGAEGVNRIWRDAKLRGAGMKRAKTLVSAAEHSVGSKEAPEAARIELKNLLNDMDVYASRLEELLKGIEEKLKEIPYVDKLMEIKGIGLVTVGGFIAEVGDIGRFDNPKQLQKLAGYAIVANDSGKHNGESRISYRGRKRLRYVLYEAAISLIGKNAEFREIHEYYRTRNANPLKKMQSVVAVACKILRIFYTILTKGVDYDAEKLMSDIRRPQMQAA

SEQ ID NO: 334758 - protein, 502 aa, unidentified
MKSKPQDKTNKTTNHPTQRHWHEMNRKQRREMTRQIQSEDLSLEVVHPDAAGIDIGNESHYVAVPPSRDSQPVQRLGCTTAELKVMAAWLRQCRIRTVAMQSTGVYWIAVFDILEEAGLEVYLVNARDTKNLPGRKSDVQESQWLMKLHTYGLLRNSFRPSQEIRTMRTYWRQRNDLVQSAGRHIQRMQKALTQMNIQLANVLSDISGVTGQAIIKAILAGERNPHKLAEFRDPRVKASEEQIAQSLEGNWQQDLLFVLKQEQDGYEFCQKQMAECDRQLNQYLEHGEDRSHGASLPEEKRKGRLKKKKGTAPQFNLREGLFRMTGTELTRIDSIDVMTATTVISETGYDMSKWETENHFVSWLRLCPDNRISGEKIIGKGRLPTNNRATIALKMAASNLTTERYLSRSAVSSIPNQARCPLRDQGHGRQAGPLGLPHAALRDEIRGPRSSLLRASTPRDTDQAPQGQSRKARIPSHPNTGGGLTVSGEECRFESYRADQRK

SEQ ID NO: 334759 - protein, 343 aa, unidentified
MQTHSVGIDLGKTTFHLVALGAAGKVLVRKKFTQRQLMTYTANMQTSLIGLEACSGAHFLGRALRKQGHDVRLIAAQFVKPFVKSNKNDFVDAEAIAEAVERKNMRFVPIKTDDQLDLQAIHRVRDRLISRRTAVINQLRAFLLERGMILARTPAKLRSAMPDILENADANLTPQMRNLIDLLWSEWKTVEQQIEEPSLELEKIATSDPGCARIRQIPGIGPIVATAIVAAIGNGAAFRKGRDFAAWLGVVPRQYSTGGNAKLLGISKRGNIYLRKVLIHGARAAAMRIKRDRAPIGAWMDALEARVPRNVLVVAMANKLARIAWAVLSSGEDYRPLANGIAV

SEQ ID NO: 334760 - protein, 340 aa, unidentified
MDATTYGLDVAKRVFQMFWVEVETGEIVNRRFGRDELIRFLAQRPPGRVALEACGSAHWWARKIKALGHEVVLLHAKFIRPFVQTNKTDAADARAIWTAVQQPGMRTVATKTEDQQAMLSLHRMRALLVKFRTMQVNQLRGLLYEFGATFRAGRAAGLAEIRARTAELEDALPGTMMCCLQDQLRRIDELQRDIDLLEKRIGVWQKQDAACHAIAAVPGIGRLTATALVATMGDAKSFRSGREFAAYLGLVPRQSGTGGKVRLGPISKRGDPYVRTLLIHGARSVLYNAKVPTPWQKDIQARRPANVAAVALASKIARTAWAILARGQEYQRNYVSVRPA

SEQ ID NO: 334761 - protein, 339 aa, unidentified
MRLYAGFDLHSSNTYLGIIDEDGKRVFKKKLLNDREVILSTLAPYKDIMVGVVVESTYNWYWLVDFLMEEGYRVHLANTTKIQKYSGLKYADDQHDAFWLAEMLRLGILPEGYIYPKEDRPIRDLLRKRSHLMRLRTSLIVSLQNILSRNNGFKLKVNDVKALTIDHVTPYLADNEDLALAGKVSKASVDFLTVQIKSIESAVEERIELRASYNKLLTEPGIGKVLGLTIMLETGPIDRFAEVGNFVSYCRKVSTAWISNEKQKGKGNKKCGNKYLAWAFSEAAELARRFDKDARAYYNRKAQKTNRMVAHNALAHKLARAAYYIMRDGVPFLPEKCFG

SEQ ID NO: 334762 - protein, 399 aa, unidentified
MTNPSSLQLRVGIDVGSRCHNVAIGLSDGSLLEEFEIPHTASGFQDFFKRVEASAQRHAAPIAVAMEGYNGHVRPLDSLVKARGWQLFNVNNLKLARFKEIFPAAAKNDRIDTRKALELFQLRDHLPMAGDVLQEIAPIPEENNVLKRLSRRQRRLVDERTRLGNALQADLQAVCPGLLEITREVNNYWFLSFLTCRKGLPKLVRLRRASLLKVPGIGHKYAGLIQAWQSSAFFSHDVDLVGDMIQQDAERMLELRDQIKALKGQMARVAKDSAIARQLDTIPGFGLISTAELAGEIGTIERFRKEASLAVYLGMANLDHSSGKSRRSKRPKHVNVRAKAAMMTAMDAHRKLCPQSQRYYEKKRAEGKKHNQAIRALGRHLCPVIFNILKQDRPYWIET

SEQ ID NO: 334763 - protein, 327 aa, unidentified
MSTYTTIIGIDVSKNVLDINELTNSNNKSYSIKNTNLEIRIWLSKIKTKNTLFVLEPTGCYSQRVLYFLRNLSFDVSLVNPSQSHNFMQVLGITNKNDVQAAKALALMGQRLDLPLYNHRTDDMENRKQLLTTISGLKKQRQMLKNQLHAFNHQIVFATKAVESLKTILQTVEIEIQELEEQLNTLDDEEIEHQLELMQSVVGIGSKTAQALICATGGIQNFKQPQQLAKFLGLAPSSHISGSSVYKKGGITKKGNAEVRACLYMATRSARKYNKSCKDLYDRLRSIGKCHKVAAVAVMHKLVKQVFGVVKSGNPFDNQYYLKFNVN

SEQ ID NO: 334764 - protein, 487 aa, unidentified
MAKRRKSTFERLSTGQMNRSQRRELGRRVAAGDAGLAIVQANAGGIDVGKESHFVAVPPDRDTNPVREFGCWTAALNEMAEWLKSCRIDTVAMQATGVYWIALYDVLEQHGVRVVLVNAQHTKNVPGRKTDVQECQWLMKLHTYGLVRDSFRLQQDMEYVRTIWRVRDRHVKEAGREVQHMQKALTKMNVQLANVISDVSGVSGQAIVTAVLKGERDPYKLADLADYRVKASREEVARSLEGNWRADVLFELQQAVDSYHFAHRQMRECDEKLTFYLVSLPTRMLEIPVPSKGAPETPESPAQKRKKAKKPRDNEPRMDMKGELKRICGVDLTSIDGINVMTAFTVLSEVGTDMARFKDEDHFSSWMGLAPSKDISSGKIVGRGKKKVKNRVAVVLRTAATTLLESDTHLGARYRHLRRQLPTHKAAVKAMARYLAVLIYRLLTKGEAWVDRGARQFEQRRTQREMVSLQTKAKAKGFTLVPLAEAR

SEQ ID NO: 334765 - protein, 526 aa, unidentified
MATADNITKHPHDEGVYSSDVLKNVTLDDGTRVVTSPQTDIRRPVCAGIDVHKSILMAAICITDKNTLKAVFYVRQFTTANSDIRRMAGWMLGYGVLDVCMESTGKYWIPVYDILEQNGLHPTLTHPKYVKQAKGHKTDFRDAIHIANLFRMDLVVASFIPPADIRDLRELCRYRLKLTYIRTSEKNRYQNSMTISKVRIDSVFTDPFGKSATDIMSYLVSTDPENVSDAEILSFVRKGCKASAEEILDSIHGYEFIGVQRDKLQVISMHIEDINRCIEMIDEKLEYYRSKYSKIIYHLTTMIGVSLESALYILGEIGADMSVWKDSASLSSWAGLSPASNASARKNKTTKIGKGGHYLKPLLVQCALAAIKSTKKHPYFYNKYVSLKKRRGHKKAIIAIARKMLVSIYHMIRDDKDFQPIDYDKVVTRKQFSKELNLKNVIEFLGERGVDADTIRIVKKQCSQGTMDQKKAATSAAGKIEQKKKQPKPITEDTATEQKPAKRRGRPPKSRQTKAQPLDQPTDTTA

SEQ ID NO: 334766 - protein, 451 aa, unidentified
MAKSIKKKKSKRKNLNEFNIINPNAAGIDISSKDYVVSISEDRCKKNIRTFGAFTCDLKAIALWLLSCRIETVAMESTGVYWKQLFMVLQEHGLEVFLVNSRHVKNVTGKKTDEDDAHWIMRLHTCGLLSNSFQPEEQIRTLRELLRHRKSLNRNKTIAVNKMTKALNSMNVKLNIVLSDLTSVSGQKIIMSINSGERRPKELVKLVHHKVKASKEDILKALEGAWREESLFELKQATEHYYFLQNQTSECDKKIEEQMVLITAKYKDGDITGLKEMAAKKHTRKNELKFNVNPYLQEILGIDVSQIYGFSDDTALTLFAEVGSDLSCFGTANRFTSWIGLAPNNKISGGKIISSHLPKKKHAIKKALIQAANSLYRSDNALGDCYRRLKSRMGPKAAKCAMARKLAIIYYSMVTKKEEFNIELLNSHQQSFKKKRIKFLENQLAVLKDVA

SEQ ID NO: 334767 - protein, 321 aa, unidentified
MPATNAGHGQLLGWALQRWADGGLRFAVEDCRQVSTRLERTLLAAGQAVVVRVPPKLTAGSRSSARTRGKSDPIDALAIARAALREPDLPLATLDGQFREIRLLVDHREDLVAARTQIQNRLRWHLHELEPGREPGLRCLDRYCELDRLATWLAGREQTVLVRLAGELVRDIRAMTVRINELKNELAELVPLVAPQLLILPGCGVLTAAKIIGEVGPVSRFRSEACSAMHAGVAPIPASSGKTSRHRLARGGNRQLNAALHRIAISQIRIGGAGSIYYQRRRARGDTTMEAIRALKRRLARVVHGLLATAPANVVLAAAAA

SEQ ID NO: 334768 - protein, 385 aa, unidentified
MSELNDLSRSLTSLEQDKTIIAVIEMSQSSWLVAGIVPGIERHPLKKLEPSEEELVRLLMRWRTEATKNGHTITRIAVAFEAGRDGFWLARWLRARDIETYVIHPTSVAVSREHRRAKTDRLDTGLLKRVFIGWLRGEPDHCHMAAIPTLAEEDAKRPNREREGLVRERTRIVNRMKSCLARFGIRNFKPTLRKAPERLATLATPEGVPLPPNTLLELRRDMARLRFVMDQIKEVEEARAQRLEQAPQEKTHAMVRLIARVIGVGIETADMLVHEILSRQLRDRRAVARYAGLTGAPDESGNKRREKGLAKAGNARVRRGMIQLAWRFLVFQKDSALARWYRARTESAGKKRKTMIVALARKLLIALWRLVTIGEVPAGVLLRAA

SEQ ID NO: 334769 - protein, 412 aa, unidentified
MDRWIERCCGLDVHKETVAACVRVPGAKGRRTQEVRTFGTTTPDLLALQDWLAAHQVTHVAMESTGVFWKPVYYVLEARFTVLLVNAAHIKQVPGRKTDVRDCQWIAELLEHGLLRGSFVPPPVIRDLRELTRYRRTQIQERTRVANRLHKVLQDANVKLSNVTHHVLGVSGRAMLDALVAGTTDPDVLADLARGQLRKKLPALRQALTGRFRAHHAFLLGQILAHLDYLEEAIAAVSAHIEEQLRPFAPQVERLMTIPGVQRRTAETILAEIGTDMAVFPTAGHLASWAGMCPGNDESAGKRRSGKTRKGSKWLRTSLIEAANAAARTKATALGARYRRILPHRGHRKAIVAVGRHILEISHHLLRTDRTYQELGPDYFDRRHAERLQRRCIRQLEQLGLQVTITPASAAA

SEQ ID NO: 334770 - protein, 343 aa, unidentified
MNEVTTIGLDLAKNVFQVHGVDASGRAVVRRQLRRSQVLPFFERQAACLVGIEACATSHHWAREIAKFGHEVRLMPARYVKPYVKRNKNDAADAEAICEAVTRPTMRFVEVKTEEQQSVLMLHRTRQLFVRQRTTLINAIRAHLAEFGIIAGIGRNGVERLLLLIDGGMDERLPPAAEECLRALQTQLVLVKRQILEADRRILAWHRSNELSRRLEAIPGVGPLIATALVASIPNPYAFGSARDVSAWIGLVPKQNSTGGKERLGSISKAGNRYLRSLLVVGALSVIRRAKQVGYTRRVWLAELMARRPAKVAAIALANKIARIAWALMVRGTHYREPVPQTA

SEQ ID NO: 334771 - protein, 416 aa, unidentified
MDIVHRQCAGLDVHKKTVVATILIEEEQGVLYKETRTFETMTADLLALSDWLMSKGVTHVAMESTGEYWKPIFNILENNFEVLLVNAHHIKQVPGRKTDVKDSEWIAELLRHGLLKASFIPPLGQRELRELTRHRTNFVHERATLINRIQKTLESGNIKLASVATNVMGVSGRAMLAAIVEGKANPSEMAELAKGRLREKREQLEKALEGHVKAHHRFVLTELLCQIDSLDESIARFDLEIEKYCRPFEETVKLLDTIPGVAQRTAEVIVSEIGTDMSRFPTADHLAAWAGVAPGNNESAGKRYSGTTRHGNKALNTILVQAAHAASHTRNTYLSAQYHRLAGRRGKKRAIVAVAHSILVIAYNMIQRHEPYHELGGDYFDKRRPEASAKRLMKRLEQLGYDMSNVQPLTALPTAS

SEQ ID NO: 334772 - protein, 351 aa, unidentified
MSQPVTTTIAVMGIDIGKNSFHVVGLDQRGAIVLRQRWSRSQVERRLANMPPCLVGMEACVGAHHLSRKLKGLGHDARLMPAKYVRPYSKGQKNDFRDAEAIAEAVQRPTMKFVATKTADQLDLQALHRVRERLVSQRTGIINQIRAFLLERGVAVRQGQRFLRIELPRLLTAPPDVLSPRMVRVIEDLAGDWRRLDQRIEALSAEIEAIARRDAGCQRLMSVPGIGPIISSAMVAAIGKGDGFGKGRDFAAWLGLVPKQISTGDRTILGKISKRGNRYLRVLFVQAAWVVLIKPKSWERHGLKRWLEAARKRLHRNVLAIALANKLARIAWSVLANHRNFETTRILVAAQ

SEQ ID NO: 334773 - protein, 382 aa, unidentified
MQTIDTVNPTILLAIELSASTWLVAARVPGWEKPHLHRIDGGDTAALLALISSLQARAARGLDATIGVVCCFEAGRDGFWLHRLLTAHGVVCHVLEPTSILVNRRARRAKTDRLDAEGMLRVLAAYLRGDHQACSMVRVPTPEEEDAKRTHREREKLVQERLRIENRIEALLFTQGIRKRPSLRSWERDLAVLRTGDGREIPRHLRAELDRLRRRLVMTLELIREVEAERDQAAKTKPQDRACHKIAALSRIRGIGENFAAVLTREVFYRSFDNRRQIASYVGITPMPYQSGGMDRDRRISRAGNPRARTTMIQLAWLWLRYQPGSELAEWFRERVGTLAGRTRRIAIVAMARKLLIALWRYAETGVIPAGAEIRAEITVAA

SEQ ID NO: 334774 - protein, 310 aa, unidentified
MDAIFVGIDVSKDRLDVHVCPRGEAFAVSRDGKGLEELIDRLRILAPQLIAIEATGGFETIAAAALAGAALPLAIVNPAQVRHFAQAVGKRAKTDPIDAAVIARFAEAVKPEVRPLPDEQARLLGELVARRRQIVEMTVAERQREQRTAIVRVRKSILRHIKMLEKELAEIDNDVGTLVRGSPAWRDKEDLLVTFPGIGNTLARTLLAEMPELGSLTRREIACLAGVAPFARQSGRWKGKSMIAGGRAPVRSALYMAALSAITCNPPLKRFYQRLLSAGKPKMLALIAVARKILITLNAMLRERKQWQTA

SEQ ID NO: 334775 - protein, 346 aa, unidentified
MKPNSQMTLDKYFRQCVGIDISKDKFTACLYMYDIASDVGCHTESIDFTNTRTGFNQMVKWSRREAQKGFPLTYLMEPTGSYYEPLAYHLNKIGLTIYVVLPNKARKFCEYEGIKTKTDAMDARCLALLGCANRKLRPWEPPKPIYRELRQLTRLRASLIKMQTQLRNHIEAVDHMESASKEVRKSYEKLLDSIDKQLEKTEQAIATKVAQDKELEARIRRITSAKGIRTGTVTCIVAETQGFYLINNRKQLTSFAGLDVVARQSGKDDPKHKISKKGNAYIRAALYMPALSAAYCNRQMTHTYMKICDKHPDSKMIGVTAIMRKMLLLIYSLWKSGEEYDETRDF

SEQ ID NO: 334776 - protein, 340 aa, unidentified
MKEVITTIGLDLGKKVFQVHGVDAVGGVRVRRSLRRSQVLGWFGKQPACLVGMEACATAHYWGRELSRLGHEVRLIAPAYAKAYVRRNKNDAADAAAICEAVSRPGMRFVAIKTAAQQAAGGLHRVRDLLQKQRTMLINQLRGLMAEFGIVVAGGPQHVKDLLAVLADPADARVPELLRGPLLGLAQVLGDVERRVATLERQIVAWGRGNATYRHLITVPGYGPILAGAFAAFVVEPSTFRSGRDFSASLGLVPRQEGTGGKLRLGSISKRGNGYLRRLLVNGAMSILNTSRARQDPWIARLLASKPRKLVAVALANKLARIGWAMMVRQEDFRPRSAAA

SEQ ID NO: 334777 - protein, 423 aa, unidentified
MTKRSSNPTDAVLVAIDMSKHRQEVLIERPEGGRRRRMTVMATKADYDRLATDLSDIGRPIIVGFEATGNYHRTLAHRLLSAGFELRLISSVALARTREALHNGWDKNDSKDAQVILHMLRIGATQRYVDPLAAGINDLQEMSKTHEAISKAKTQTWHRILTHYLPLYFPEIERFAGNSRSDWFLALLERFPTPASMTLLGQETFSREAWDLVGRKVSKARLINDIYETACASVALPVDEDSVSIAMFRMVIAQARNLIRQRDEIERTAHAMLAENRDYQLLRMIPGIGPINALTILAEAGDLRRFSHHRQFLKFCGLDLATRQSGTFRGRTMLSKYGNARLRRTFWMAAQVAARQRNNSFRDKLGRYTAGHADDADRRRKAMTALTAKMARVAHAVIKTGTEYRPFVERSDARWKDPSLQVP

SEQ ID NO: 334778 - protein, 372 aa, unidentified
MAWLLTVMPPVFIRSRPALNWTLHQEVGEMEESQGLVVGVDTHKESHSAALVDELGAVLGSTDVEANQRGYVQLLQWARGRSSHRTWVVEGTGSYGAGLASFLVRCGEVVYEGDRPQRRKPGASGKSDQLDAIKVAREALAREHHALPRQRGNREAIRVLLSTREGAVSASRQALNQLYALVVTAPEPIHERLVRLKGEQLVAACVRLRCTSAVIETSVTTRALRQVARRIRTLQAEAADYEAQLERLVAQTVPALLAEPGVGTITAAQLLVSWSHAGRIRNENAFAAMAGVAPVPASSGRVVRHRLNRQGDRRLNRALHVVAICRSSFHAKTKDYIARRTAEGKSSREIRRCLKRYLARRFFRLLQGLDNT

SEQ ID NO: 334779 - protein, 476 aa, unidentified
MVVPNQEPKKPSKPKKPAKPNKPRAKSLPVPVPTSPVALSLVNPDAAGIDVHSDMHMICVPADRDADPVRQFGANTADLQEIAAWLKKCRVKTIALESTGVYWIPLFEVLESEGFEVSLIEPGQLSRCGARPKTDVLDAQWIQRLHCYGLLRASFRPPDSVLALRAYWRQRQMQVRYAASHVQHMQKALELMNVKLAEAVTDITGLTGMSIIEAILNGERDPVKLAKLRDKRCHSSEDQIALALQGTWRPEHLFELRQAYQLYHFHHKQISECDQQVQAELARFPNRAGEKTHARKPRKRGRKSNDVRFDATGPLFRALGVDLTLIDGIDVGTALVILAEIGVDVSRFPTEKHFASWLRLCPPQDESNNTKRRRGHRKVTNRVTIALRMAARSAGKTMTPLGLFYRRIRSRIGGLGAVKATAHKLACLVYRMLKYGQEYVVQSMEEYEAKMKANMLKVLQRKAAAMGFQLTPIATP

SEQ ID NO: 334780 - protein, 277 aa, unidentified
MNSTTIAVDVAKSVFEVAVSEQPGEVRERQRLSRERFRRFLAERPPATVLMEACGSAHHWARQAQALGHRAVLVPPHVVRPYVLRNKTDRTDTKGLLEAFRNEDVRPVPVKSETQQALAALHRLRSMWLAARTARINTVRGLLREFGLIMPIGAHHVVPHVATLLEDADSAVPGLLRPALADAATDIREIEARLRAIERQLESVASENVVVRQLRTIPGIGLLTATALVATVGDVARFSSGRHFASYLGLTPREASTALRRRLGAISKRGTPMCACS

SEQ ID NO: 334781 - protein, 343 aa, unidentified
MKLSRVGIDLAKNVYQLHGVDRHGKTVWKRRLKRHQWFKVLLDTVGPECEIGMEACAGAHHWGRELQSRGYTVKMIPPQFVKPYVKSNKSDAKDAEAICEAMSRPNMRFVTVKRVEQQDIQATHRIRAELMTQRTAKANQVRGLVAEYGLVAPKHLSSLRAAIPCWLEDAENGLTGDFRALLQGVWMDLLLLDDRVGEMDQKIKLLADNNEDCVRLQQLRGIGPMISTAMIATVGDARQYSKSRQMAAAIGITPKQHSSGDRDRLLGISKRGDVYLRTLMIHGARAVVARAKHKDDRLSRWVTNIANKKHPNVAAVALANKTARMAWAMLRNETDYDPDFALR

SEQ ID NO: 334782 - protein, 336 aa, unidentified
MSFKILKNNCCGLDVHKTWIFACIGITDSRSRTEYKQARFSSFSKGLQELCDWLAKYNCTDVCMESTGKYWIPVFNILEKNNVWVTLSHPKYTKPQKGNKTDRKDARWICDLYMCGMVKPSFIPPADIRELRDLVRYRYKLTCMITGEKNRAQNCLTVSNLKLDEVFSDVFGKSSRSITEQILQHPGEIFDVTPFVDGRCKTPIEEIQAAVDGAVSTEQAVKLKQCLNHIDELEMHKAEIDREIFRLSDKYEEALILIRTVPGFDKNPMTAIQVLSEIGGDMSVFPTAKNLVSWAGCCPRNDQSNQKIKSTRISRAGSYFKPVLVQVANALIKSVA

SEQ ID NO: 334783 - protein, 422 aa, unidentified
MNTQPLDSFTAIVGVDWGDTKHDICIQPSIQKNREFSVIAHNVNTIDQWAQALHARFGGMIAIAVELSKGPIVSALQKYDFIVIFPINPATLATYRKTFKPSRAKDDPTDAELALDLLLCHPEHFEPLRPQSVDIRTLATLVGQRRSLVGDRVRLTNRLRSSLKQYYPQILEWFDDIDTPLFCEFLARWPTLIQAKHARPSILRKFFHAHNMRAEKVLVARISAIKAASPLTSDDAIITPHRMLALVLVEQLRGILGAIKDYDVQIERIAAAHPDYDLFSSLPGAGVALAPRLLVAFGEQRDRFKNAGELQKYAGIAPVTERSGQKCWVHWRWHCATFLRQTFVEWAAQTVRKSFWAGEFYWQQRGKGCTHQAAVRALAFKWIRIVYRCWQTGVKYDEAAYLKALARRGSPLLARQDILKSA

SEQ ID NO: 334784 - protein, 348 aa, unidentified
MRFYTQQHPFYCGIDLHARSMYLCILNRDGQTVLHRNMPSAPEPFLAAIAPYRNELVVGAECIFCWYWLADLCAQESIAFVLGHALYMKAIHGGKAKNDKIDSYKIAGLLRGGMFPQAYVYPADMRSTRDLLRRRMHLMRERANLLAHVQNTNSQYNLPQIGKKIAYKANRAGVAERFVDPAVQQSVAVDLDLIGYLDTTLNELELSITKLAKVHDGQVFYLLRSVPGIGKLLALVILYEIHDIHRFPRVQDFASYCRLVKCAKESAGKHYGYSGKKIGNAFLKWAFSEAAVLYLRGNPDGQRYLDRLARKHGKSKALTILAHRLGRAVYHMLRRKEPFDAERFLATS

SEQ ID NO: 334785 - protein, 343 aa, unidentified
MEYYVGLDVSLKQTSICVVDQSGSVVREGVVDSDPEAISVYVRSKAPGAVRIGLETGPTSTWLWTELKRLGLPVICIDARHAKAVLKMQINKSDRNDAIGIARIMQTGWFKEVHVKDIDSHTVRALLASRALLVKIKRDLENHVRGLLKNLGLVIGRAKFNVFAVRAEELIEGRPELIAAIRPLLEARTAVEQQVSELDRKVMKLARHDAQVRRFMTVPGVGPITALAFKATIDDPARFARSRSVGAYVGLTCRRHASGEVDWSGRISKCGDAMLRSYLFEAAGVLLTRVQKWSAVKAWGVKLAKRNGLRKAKVAVARKLAVILHRMWIDGTEFNWSKKEIAA

SEQ ID NO: 334786 - protein, 356 aa, unidentified
MGEGTWVGLDVHARKVVAGVLDGGSGELRSWRAPVLPVETVEWLRRFPAPVRVAYEAGPTGYGLARACAAVGIACTVAAPSKIPRASGDKVKTDRRDAERLARLLRLGELVAVRVPEPHEEAARDLVRAREDARGELMRARHRLSKLLLRHGLVYDASAWTLAHDAWLRRQHFESGPLRLAFEESYAAALQAKARRDTLDQAIIELAAEPPFAETVGRLCCLRGVSTLTALALTVELGDWTRFRPQSLGPFLGLTPSEDSSGERRRLGSITKTGNTHARRLLVEAAWQQRRPMRESSTLARRRQGQPAAVRARADHSARRLHARWQALERRGKRRTVVAVAVARELAGHCWALATM

SEQ ID NO: 334787 - protein, 314 aa, unidentified
MYYYIGIDVSKKVLNIFDGKKDLIFDNKENLSSFKKYLKKRYPDFSSLVILFEATGIYSYHLKAFCATHMVKVYIINPQASHNFAKSLGTRSKTDTTDARTIWAYHKLIGEKDISIPKVDRRIITLSSYLASYRLTLKQRLSLANHLEGVKDKTLYRLLKKEQERLGKLEHELLIRMDTYIKQYPKLNEDYQRLLSISGIGQKTAISLLTLFHTYPDTNRNQITALIGLDPIQKQSGTSVHGRSRISKHGNQMIRRCLYMPTLSSIKYNHKIKVFYERLVSKHKPKKVAVIAAMRKLLLIAHAIYKNKTVYVPG

SEQ ID NO: 334788 - protein, 362 aa, unidentified
MKNNKLDFTGQTIYLGLDVHKKNWAVTICFQGIILKTLSMVAKPEQMVKYLHKNYPNATYLSVYEAGFCGYWIDRKLRSLGVKNIIVNPADIPTKQKERRHKTDKVDSKKLARELNNNNLEGIYIPSEENESIRALSRLRRQITKDQTRLKCRIKSLLHFVGIELPENSELRHWSGKFIKYLSELEFSERSFGKDKAMKLTLEGLLESLRQQRQILVNIIKNLRQVVTENDSVKKTVNLLQTVPGIGFITAVTLCAEIMDITRFRKFDHLSCYIGFSPATDSSGEKETVVGLSNQQNKYLRSMLIESAWTAIRKDPALTQVYGKLVMRMGKQKAIVRIAKKLLNRIMYVWKNEKEYVCAVVS

SEQ ID NO: 334789 - protein, 344 aa, unidentified
MYFIGVDHHKQVSMMTVLDEDGQERKNGRVPNLRRYVERFLEDCRPFTAVLEAGRSSYVMADLLWELGGEVKIANALQVKAIAHARIKTDKRDSRTLVHLLRANLIPEVYQRGEWNRRAQRVMRMRAYWVRKQTEVKNKIRALLAQQREDVRLEVEKRESGLFSSKGLEFMAKLPLESREKEVLEDLLQGYQEIQAHIKKSDGLVNALYGEMEEASRIDTVPGFAKTLSVLVAVEIADVKRFSRAADLHSYAGVIPSTYSSGERTYHGHITKQGSSWLRWAALEAVYPAIKKDLVLRTLYSRLARRKGPNVAKIAVARRLLTIIYRMLTEKRDYIPEIMKQSAA

SEQ ID NO: 334790 - protein, 370 aa, unidentified
MEWPAPPSGVVSSLELQEEEELGMALAKISVLGVDLGKNVCSVVGLDASGAVILRRKMRRETLIDLAEKLPPCVVGMEACCGAHHLGRVFASHGHDVRLMSPEYVRPYVKAQKNDDRDAEGIAEAATRPTMRRVDLKSQDQLDMQTLHRSRDRLVGERTALINQLRAILLERGMVAPKGKRRLEQFLTVLMDEQGGAGLSPRMILLVADARAQWAELDRRIAAFDAEFVRWAKENEDARRLTTIPGFGAIVASALVAAVGHAESFDHGRDLAAWLGLVPRQFTTGGKPKLMGISKRGNKYLRRQLIHGARAALPHGAERDTPLGRWAKALMARTHHNVAAVAFANKLARIAWAVLRRGERFAATGTPMTA

SEQ ID NO: 334791 - protein, 388 aa, unidentified
MKKNTTCHSQKNQRRARRQAGAPRKSRVRKNQPPEITIGLDLGDRSSRYCAIDAPGTVVLEGSTPTTQRGMAQAFGAMAPCRVALEVGTHSPWVSRLLKRLGHEVIVANARQVQLISQSSRKSDRVDAQTLARLARLDPQLLRPIRHRSEEAQGHLLVIRVRATLVEARTELINAVRGLAKASGERLPVCDADQMGPEKLTGFPAGLGSALRPLLAEVESLTRKIQEADRQIEQIAREHYPPCARLRQISGVGELISLAFILTIEDPYRFQRSRDVGCYVGLRPKRGDSGNSQPQLRITKEGDPYLRQLLVQGAHYILGHRGPDTDLRRWGLKLAARGGKNAKKRAIVAVARKLAVLLHRLWVSGETYDPLRQSRTAAGKKVRPAVAA

SEQ ID NO: 334792 - protein, 346 aa, unidentified
MKINRIGVDLAKNVFQLHGADHKGRAVWKRKLSRDKWLKVLFETAEPGTVIGMEACAGAHHWSRVLIEKGYEVKIIPPQFVKPFVKSNKNDANDAQAICEAMIRPNMHPVKVKTVEQQDLQAVHRIRHEIKSHRVAKANQIRGLVTEYGLVAPKELSSLRKAIPEWLEDADNGLTMFFRQLLHGLWQDLLSLDKRMAELDKQVAVIAQENPIAKRLQQLRGVGPLIATALVATMGDAKQYRKGRDMAAAIGLTPRQHSSGGKDRLLGISKRGDAYLRCLLVHGARSAMRTAKDKDDRLSRWITSLQDRRHANVAACAMANKMARMAWVIMSKGVDYDPDFSPAITR

SEQ ID NO: 334793 - protein, 349 aa, unidentified
MARILAIDLGKYKSVACDFDSDSNGHEFRTLRTRPHEVHDLIVELEPDRVVIEVGSQAGWIQDLCELLEVPIEIANPNHEGWRWRNVKRKTDRDDALKLAKLSAMGQLPVVHLPSGPVRQWRSLIGYRAKLVSRRTAIKNSIRALLDRQGLRMPSGRRGWSAEVLEQLRAISRPLESVSRNGLWRGQLQMELTALEQVQALVEPVEARLDALGKQDKRVRTLRTIPGVGPRLAEVVVAVLDDPKRFKSRKQVAAYAGLVPRQYESGTMSRSGGITGAGHRLLRAMLVEVSWMMKLHNPHLDGVFEKACRGVKSRRKIAVVALARRLLILCWAMLRDGTSWRVPVTAAGR

SEQ ID NO: 334794 - protein, 361 aa, unidentified
MAKVRSWAGLDVHARSVVAVTLDAESGELRSARLPGETAKVVEFLAKLPAPTRVAYEAGPTGYGLARALGAAGIGCVVAAPGKIERPAQDKLKTDQRDAERVLRLLMIDALCPVRVPTVEEEALRDLVRAREDVRGDLMRARQRLSKLLLRHDILYEDSASTWTQRHRSWLRAQQLGGGAQATLLDYLGAIDTLELRRSTLEKTISELVVASPYAQTVARLCCLRGIDTLSAVGLCAEIGDFTRFERASKLMSYIGLVPSEHSTGESRRQGPITKTGSRHARRLLVEAAWHYRKTPSRGLTLKRRQDGQPANIIAISWQAQQRLHRVWQRLAEQRGKRRTIVAVAVARELAGFCWALAHAD

SEQ ID NO: 334795 - protein, 386 aa, unidentified
MKKHGEAFVGIDTAKARNAVAIAEGGRDGEVRYLGEFDNTPDAVAKLIRKLADRYETLHICYEAGPTGYGLYRQVLALGHECTVVAPSLIPRRPGDRVKTNRRDAQALARLLRAGELTAVWVPDETHEAVRDLVRTRAITIEDYRRKRQHVTSFLLRHGRAYERAATWKGRHLRWLDGQSFAHPAQRLAFQEMLNAVRASAERIDRLDAALIEIVPNWTLAPVVSAFQAMRGIKFVTATTMVAEVGDLRRFEHPRQLMAFLGLVPSERSTGETKRQGGITKAGNVSARKALVEAAWTYRHSAGMGVQHQERQQGLPQPVRDIAWKAQTRLCGRYRRLIAKGKRNTVVVTAIAREIAAFLWAIARHVAPLPATPGSAPDLCSTGAVS

SEQ ID NO: 334796 - protein, 319 aa, unidentified
MAQNDLVVVGIDVAKDKVDAYIRSLSLGRTFPSKAEGRRQLTSWLRRHKVSKAVMEASGGYERDWAKVLREAGLEVRIVDPKRVRSFARSAGRLAKNDAIDAQMIAWFAETFGEAPSHAYDAARENLVQIVNARQALLDLQTKLQNRSEHAAPEPVQKMQARLLKKIALEVVKLEDAIVVLIKATTHFAELAEIIESVPGLGRITSAGLIAAMPELGQVNNKVAAALLGTAPYDDDSGRRRGERQIRGGRRKIRNLFYMACLGAATRHNPVLKAFYDRLRAKGKQPKVALVACMRKLIVILNTMIARRQKWDPALCASG

SEQ ID NO: 334797 - protein, 400 aa, unidentified
MRAVLSVDVAKCKSMVMLSTEYGEVLIEPKEIKHNIKDFDELKNQINSFKLEDLTIFMESTGIYHLPVERYFKENNFNTLVINSLTTKNNYDTLRKTKTDTKDCMRLAKLFFVNEVEYHDLSKKDLYANLKAMTRQYFYLTQLNVSCKNRYKRLINICFPEFEEIFKGSRIYEETALNFIKTFPHAYIVKEKRIDALYNNLYKTNSRHDYYYKRLANKIKEISLNSYPGVDKDHSDVKNLSDMASVLQENIKTINELKDKMIETAKESPYFNIINSFYGIGEVLTTELLGELGDITRFDNHKQLIAFCGLDPTIIQSGKSINVHGTISKRGNKYARWILFNISQMVVKLGHQCPNHPVYNYYLTKKAEGKHYYENLTACSTKILRMLYTMCKNNTTFKIN

SEQ ID NO: 334798 - protein, 422 aa, unidentified
MSYCPVAGIDVSKRFSDMCILSPDNKIFAQEKIYHDETSINRANALLQKAERLFFSKPVIVMESTSHYHLILFQFFSEHGYDVIVVNPLQSNSMKDFSIRKRKTDRVDAFKLAMMYRTKTLRPSQIPQTATRALRQLCRHRAELLNDVSSYKNRLTALLDQTFPGYDKVFSDVGGVTSCAVLVRFPTPTILLMEEESELVEVIAAASKSSYSFAKKKAGLLISAAQKAQILGIHSCADETLIVYTIQMLRTLSESVLQIETAIDDLLAQIKEMRNNVSLLQSIPGIGSHSAALLLGEIGDISLFKKPKQLAAYFGLDPTERQSGSFRGTKNKLSKRGSPYARAALHMGVVNSICKRGKVSAANPVLLSYYEKKCKNKPAKVAQAASMHKLVFIIFAVLRDQKPFELKTPEQHAVEQGFVKAA

SEQ ID NO: 334799 - protein, 355 aa, unidentified
MCAKKTGSLEDLAVVGVDIGKDTFHLVGFDRAGQLVIRKQIKRLALSATFEQLPRCIVGMEACLGAHFVSRTLRGMGFEPRIIPAIYVKPFNKGQKNDYNDAEAIMEAALRPNLRTVSEKDEDQLDLQALHRVRARLVSRRTATINQIRAFLIEQGITVRSGLRALKNSFETILEQRQDEISPRMRGILIGLYGDWLWLDKRIEDVSGQIEEISRTEENCANVMTIPGIGPMISTAMVAAVGKGEAFDRGRDFAAWVGLVPTQYSTGGRTIVGRITKRGSRYLRMLFVQAAKVIMMRQNRWSTFSFGPWLTEAVKRMPRNKAAVALAKKLARTAWSVLRHGTRFDAPKDMAMETI

SEQ ID NO: 334800 - protein, 365 aa, unidentified
MWEAPVNLQRTSVGLDVHARSVVACGLDGQTGELFERRLTPSHEEIGEWIRSLPGPAAAVYEAGPTGFGLARFLLAAGIACSVAAPSKLQRPSGDRIKTDARDARHLARLLHLGEVAAVAIPSIEQEAARDLVRAREDCRGDLMSMRHRLSKLLLRHGIVYYGGRAWSGKHELWLRTHRFDAPGLQLAYDAAFDAMLATLDRRDRLDRAIAQMASDSLFTPVVTRLGCIRGISTLTAFGLAVEIGDWNRLTGRSIGAYLGLVPTENSSGSTRSQGGVSKTGNGHARRLLIEAAWHHRPRYRPGRDLRRRWEAASPAARARGQAANRRLHHRWVTFDQRKKRSVVANAAIARELAGWCWSLAVLDD

SEQ ID NO: 334801 - protein, 412 aa, unidentified
MDGWIERCCGLDVHKQTVAACVRVPGAQGRRTQEVRTFGTTTPDLLALQDWLAAHQVTHVAMESTGVFWKPVYYVLEARFTVLLVNAAHIKQVPGRKTDVRDCQWIAELLEHGLLRGSFVPPPVIRDLRELTRYRRTQIQERTRVANRLHKVLQDANVKLSNVTHHVLGVSGRAMLDALVAGTTDPDVLADLARGQLRKKLPALRQALTGRFRAHHAFLLGQILAHLDYLEEAIAAVSAHIEEQLRPFAPQVERLMTIPGVQRRTAETILAEIGTDMAVFPTAGHLASWAGMCPGNNESAGKRRSGKTRKGSKWLRTSLIEAANAAARTKATALGARYRRILPHRGHRKAIVAVGRHILEISHHLLRTDRTYQELGPDYFDRRHAERLQRRCIRQLEQLGLQVTITPASAAA

SEQ ID NO: 334802 - protein, 344 aa, unidentified
MESSFAGVDWASEKHDVVVQNAAGEELLAASFAHDEAGLRSLCRQLVRLNVQLVAIERPDGVLVERLLDAGLRVLALHPNQVAAARARFRVSGGKSDRFDAFVLCELARTDHHRFRVLEPDSDQTKALRALCRGREDLVQARVALTNQLRAELERFWPGAVKIFRSIDSPIALAFLEKYPSPIEARTLGEQRLAAFLRRQQYSGGKTPRELLRKLRSAPEGRAGETEIRTRRQLVLALVGLLRPLVAQIKELERQLARALDEHPDGQLFRPLFRDPKSVITAAELVSEIGDCRGRYPTGDALAGDAGQAAVAIESGKRKVACYRWACNKRLRDAFCTLADSTRH

SEQ ID NO: 334803 - protein, 350 aa, unidentified
MSLRNAPRPAAVYGVDIGKNIFHVVGADSGGEPVQRARFRRDTLLQFFARAAPAIVGMESCAGSQWIARRLQALGHKVRLIPAQFVKPYVKSNKSDIIDAEAIAEAATRPTMRFAAIKSEEQADLQALHRVRDQMIGTRTRLINQMRAFCLEYGIALRQGAGLFKLDLPLVLDDASNDLSPAMRKLLTDLFADLRRLEQRIDDVTREIAAIADREDVARRLMTIPGIGALGATALLAAVGNGRQFQKARDLAAWLGLVPREHSTGGKQKLLGISKRGNRYVRKLLVHGARSCFRHLDRTRDRLGSWLDGLQSRMHPNKAVVALAAKMARIVWVVLTKPGALYERRDPAFA

SEQ ID NO: 334804 - protein, 342 aa, unidentified
MKTTTIGLDLAKNVFHVVCFDKHFKEQSKRMLRRRDVLKYFANIPPCLIGMEACSGSSYWGRELKQLGHNVKLMPAQHVKRYLQGNKNDYNDARAIAEATTRPKIPTVPVKTPQEQDMQALHRMRSQCMRDRTALSNSTRGLLSEYGIILPKGISQLRQGIPELLEDADNALSDFFRELLARRYQQLIELDEHITFYTQHLEKLARQDEACRRLQTIPGFGPIASSAFRSAIGNGENFSKGRDVAASLGLVPRQHSSGGKNVLLGISKRGDRYLRTLLVHGARAVVNQAERKSDPLSLWINRIRRERGWNKAVVAMANKMARMGWAILRHHCCYQPLLSQNA

SEQ ID NO: 334805 - protein, 386 aa, unidentified
METQTFIPRDYDVFAGLDVDKKSISATFTDHQGFLKSLTMPYSVEYLVNHVRKHYGDKKVAFAYEAGPTGYGLYDGLEAQAYKCLIASPSMIPKAPGQRVKTNRLDSRGISENLRGGQLKPIHVPTPLYRELRHLTQLRDALVSEMVAMKQRIKSLLLMEGLEFPPAPAGSQWSFLVKDKLRKLPCSSVVRFKLDRLLDSLEFDEKQVLKTTREIRRFCQTDPELAQCINYLKSLPGIGWIVASQMMARVGDWRQIKNIRQLPAFLGLVPTERSTGERTERGSITHTGDGRLRSKLIQASWSAIRQDGELREFFRTVAKKHPRHCAARVAIVAVAHKLCVRASVVLMKQRPYEVRQKVQSAPLTQQETVPQGTTRRRAEAGESTTP

SEQ ID NO: 334806 - protein, 354 aa, unidentified
MKYYTSTTQFNCGVDLHAHQMYVCVMDREGKKLVHTNIKNNDFDYFLKLVAPYRHDLTACAECMFGWYWLADACQAAGLHFVLAHALYLKAIHGGKNKNDRIDSEKIAHLLRSNLIPPGYVYPADKRPLRALLRQRLFYVWSRTELLARIHSHQLAHNRPTGRQRPYNRESWSEQLLAQEDNPVRQFALQNDMALIGHYDTQLATLEKELLKLTKQNAGRDFALLQTTPGIGELLGLTLLHEIGDINRFPTVKDFVSYCRLVKGTVASAGKIKGLRGAKLGNPYLRWAFGEVAVIAKRDAVLGPLTQRLEARMGGNKFKANAVLAIKLARAIYFMLKNKTVFEPERLVAALSRT

SEQ ID NO: 334807 - protein, 331 aa, unidentified
MNYSHFVGLDVGKKTFDASLMSAAEKELSHKSFDNTPEGIQSLLDWIAGYHLSLSKLLFCAENMGSYVTELSVSSVSMGFSLALVCPLTIKKSIGLQRGKNDRIDAKRIANYAVLHYRKLELYKLPNKDLVRLRGWIIIRDNLVKQKVSSIKLLETFSQMAKLADVTESISFLEEQLKSIKEKILEVEEDMEQLIAASTSLYTNYLLLRSIKGIGIINAIVLLCVTDNFQRFDNPRKFACYCGVAPFEHTSGISIRGKTQTSSLANKEVKVYLTRAAITAISWDPQMKAYYKRKIAEGKHKASVINAVRAKIIARSFAVIRRQTPFVTLAI

SEQ ID NO: 334808 - protein, 393 aa, unidentified
MSLNHRFEEPTAIRTNLGAIFVSLELSRSTWLITSLSPGGGEKMSKHSVSAGDIAALLARLSELNQKAFARTGKSFQVIVIQEAGLDGFWIHRVLQSEGVESHVVDPASIATSRRRRRAKTDKIDGEALVRALLAYKRGEPRVCAMVKAPTPEDEDRRRLCRERKTLTNERVQHVNRIKGLLFCQGISGYEPLRRNRRQRLDELKTGDARPLPPHLKAQIARELDRLELLLEQIKAVETERDALISAIKPDGMNADARRSPPAILINLNGIGPEFAAVLWSEGFYRSFANRRQVAAYAGLAPTPWQSGSVAHEQGVSKAGNPRLRTTMLQLAWLWLRHQPQSALARWFHERVRRNGGSLRKSTIVALARKLLVALWKYVTAGVVIDGAVVRAA

SEQ ID NO: 334809 - protein, 393 aa, unidentified
MQKNNTKKNVREHAPEVTTQKLLALMEAHKKGEPIAARLTIGLDLGDRASCWCVLDENGEVIGRGVVSTDRQSMEREFKQFPLSRVALEVGTHSPWVSRILKQLGHEVIVANARRVKLISESSRKNDRLDAEFLARLARADQKLLAPVRHRSEAAQADLTLVRVRAQLVELRTQAVNAARGLVKSFGQRLPKRDAASWKQEHAEHLAPEIRPHIESLLRVAETLTGEIESCDEEMKKISRERYAQETERVQQVPGVGPVTALSYVLTLEDPHRFKRSRDVGCYLGLRPRSSQSGETNPEMRISKEGDTYLRKLLVQCAQGILSPRSPVSDLKIWGARIAAKGKKKAKRRAVVAVARKLAILLHRLWVSGERYYPLRIERLAARNRLQQPAAVV

SEQ ID NO: 334810 - protein, 459 aa, unidentified
MGRKQSQGSTWEGLKVIHPNAAGLDIGSEEIWAAVPPERTAEPVRKFGTFTPDLNALADWLTACGVDTVAMESTGVYWIPVYEILEARGFVVYVVNARHVKNVPGRKSDIQDCQWLQGLHGVGLLRGSFRPAEEIAALRAYLRHRAGLIEHRAAHIQHMQKALAQMNVQLTQAVKDITGVTGLAIIRAIVAGERDPKQLATLRQPGVKKTEAEIVKALTGNYRPEHLFALQQALALYDFYTEQLAACDTEIERQFANLKPISDDLPPLPPSAKRDSHSKNGPSYDARSYLYRLTGVDLVAISGLNESTVQTIISEVGTDLKAFPTEKHFCSWLGLAPHNDISGGKRLRSRTLKTNNRAGQAFRMAAQSVAKSPESAFGAFYRRMKARLGGKQAIVATAHKIARAFYHILTHRTPFHDLGGEEYERRAREREIKNLQKRAAKLGLAVVETPATPALAGSF

SEQ ID NO: 334811 - protein, 341 aa, unidentified
MKNKSFIGIDISKNVIDASIFCEGTPIKDFPHAVFNNSHKGFGEMCTWLKKNHVVLSNSLFGMEFTGSYSMELEKFLNARKYQFCMLSTHVVKHHPMGPKDKSDKIDSAKIADFLYRYDGTECVKPYKMPDKTMQRFKALMNERKFLVEQRTCFMNRRQLCTTKEGAQLYDSYIKQLSHDIENIELKVQKLLETDDSLSTTYKNLLTIPGIGFVNAMNVIVITRNFTAFDTARQYASYIGVAPHFHTSGTSVRWRPRPSARCDGQAKADLSMAASVAVQYDAELQSFYNRKLGGKQDSDTKRKALNAVKFKLVLRMFAIGKQNRKWEPLDSKSSKEKLAIS

SEQ ID NO: 334812 - protein, 348 aa, unidentified
MIKHSMHTVFLGIDVHKKTFSITAIAEKTVIKRSTMPADPKILLAFIRNNFPGATVYSAYEAGFSGFGLHRFLVKNDVINIVVHPASIEVAANNKVKNDKRDSAKIAEHLSNGKLRCVHIPSIQREAWRSVTRLRSTFVKERSRTSSRIKDFLFHFGLLDHKHSGRASKKWINSLFTLKEINEDVFYCLKEYLELWLYFDKKIAEINKRLKKQAKKDFKVGNVYKNMSGLGFTSTRILANELGDLSQFRSERALYSFTGLTPRERSSGEKRQLGNISHQGRPIIRAILTEAAWIAIRKDEHYKEVFDRLVRNTGSRKKAILGIGRRMIGQIRAQFKEVLQEEELLCVK

SEQ ID NO: 334813 - protein, 441 aa, unidentified
MRVMYERCCGLDIHKSSITACALITEKGKPQEETRRFGTMTGDLRELAGWLQQKGIRHVAMESTGVYWKPVWNILEPAGFELLLANAQEVKVVPGRKTDQKDSQWIADLHKHGLLRKSFVPPRAIRDLRDLTRTRAILTQEHTSVCNRIQKVLEDANIKLGSVASDVFGVSGRAILRALMKEEKDPEVLAELSKGTLRKKIPQLRRALEGQITAHHRSLLTGHWNRMEFLEQQIADFETQIAQRMKPTPEEMALTIQNAAEEAPLPLSPREEAIQLWMEIPGVGWTAACNMVAELGVHMDQFPSAAHLASWAGLCPGNNESAGKRFSGKTRKGNVWLRRTMCEVAWAASHTKDSYFAAQFRRIASRRGNKRALVAVAHSMLVTAYHILKHKRHYMELGGDFFDVIDRDKVRNRLVQRLTKLGFEVKLMTKDAVENVTSATN

SEQ ID NO: 334814 - protein, 401 aa, unidentified
MAPQIRVGIDVGCKAHRVAISDPHGSILEEFDISHTGAGFCDFFRRIDQHRQKLDLPVAVAMEGFNGYARPSDRLIQERGYILYNVNNLKLARFKEVFPGAAKTDPIDTRKILELFHLKDHLPLAKDVLQKVVLAPPVNDKLKRLSRRRRQLVNEKVRVANRLQSDMQAVCPELLAITNNVSNLRFLRFLTCRDDLTQLARLRRTTLLGIPSVGQKYARIIQEWQRKASFSAEVEYVGPMIIADGRRILELRKQIHALDEAMAELADQSELACRIGSVQGFGKTCVAELAGEIGTTERFTGERSLSLYVGMSPLSRDSGQHHGSKCPRQVNHRAKAAMMRAVAHHIRCVPESMAYYEKKRAEGKSHNQAVRALGRHLVRVIWSMLKNKRDYELREVIPSVT

SEQ ID NO: 334815 - protein, 415 aa, unidentified
MALKIVYKICCGIDVHKTFVVACIASTNDKGVTTYVSHRFSTYTKGLKDLLQWLLSRNCKDVCMESTGKYWIPVYNVLENDCAIVLAHPKYVKAIRGKKTDKKDAKWIADLFKHDLVAGNFMPPADIRQLRDLMRYRFKLTCFKSSEKNRLQNCLTVSNIQLGNVVSDTFGKSAQAILDKILENPEDTSFDLEPLVFKSLKKKLPELRDAIDGYITPEQAGKLKVIKAHYENLESRKAELEELILALAAPYQQELAILQTAPGISSGFTAIGIISEIGTNMEAFPSAKHLCSWAGLTPTNNESAGKKKSVRVSKAGCYIKPLLVQCANAVVKSKKHPEIRNRYLRLKKRRGHKKAIIAVARMLLTALYHMLKNGENYNAELYRKSDLPPIDCEITVEQALIIARNQGYRIKSATA

SEQ ID NO: 334816 - protein, 316 aa, unidentified
MPYVGIDVAKNKHDVTALNVQGKTVLKPLTFSNNKAGFELLDLSLRQLNQDCLIALEDTGHYAFNLLNFLHEQGYKVYTYNPLLIKKFAKSLSLRKTKTDKKDAHGIALKLLSDPNREQFQHNNRQVELKILTRHIHRLKKKQSDWKVQYTRCLDIIFPELDKIVGKHSEYTYQLLTRYPNPQKRIEAGFDKLIEIKRLTASKIQDILSVAPRSIGTTSPAREFEIIENIKHYKRLIDKAEKCVNDLMAELNSVITTVTGIGNRLGAVILAEIQNIHAFDNPAQLQAFAGLDSSIYQSGQIDLAGRMIKRGSPHLR

SEQ ID NO: 334817 - protein, 338 aa, unidentified
MIVIGVDVHKQSLTAVAVDEAGRMLAETTVAAANEQLSEWAAGLAAERLWAIEDCRQLTRALERELILAGEQLVRVPPKLMAPERRAGRQRGKSDPIDALAVARAALREPRLSRPRSDEQPLRELKLLVDHRDDLVDERRRAQQRLRWHLHQLDPALLVPAKALDRPLHLDRVGRWLARRPPEVQVRVARELVVRCRQLTRTIVELDRELERRTAETAPALLELPGCGALTAAKLLAEIGPIDRFQTDAQLARHGGVAPLEASSGRVQRHRLDRGGNRQLNCALYRIAITQARYHPAARAYVERKQAEGKSRREAIRCLKRTLARVVFNTLKPSPALT

SEQ ID NO: 334818 - protein, 336 aa, unidentified
MKRYAKRERPAATSTAAVGVDIAKRTFAACLRLSQGKCYQRQFTNDLTGFQTLVAWLTKYTPPPVPVCMEATGTYGEALAVYLHEQGYLVSVVNPHRIVHYAKSQGTRHKTDQVDARVIAEFCAKEVPPRWAPPAAHYRYLQALLRHQETLEQDQQRERNRLAAAAHPPFVRQSLEAGLAQLDAALLAVAAEIQAQLAAQPELRAQLQLLISIPGIGEETACWLLAELGGGGRFQRAPEVASYVGVEPRLRQSGPWKGTTRMSKQGNVWLRKALFFPALSALRWNPVIRAFGARLRERGKVPMAIVVAAMRKLLHLAFGVLRHQRPFDPAWTGVTP

SEQ ID NO: 334819 - protein, 316 aa, unidentified
MSVETWFVGIDVAKDRLDVALHPTDERWTGSNDPAGIEALSEQLVRLAPQLVVLEATGGFEVPLVGALGARGLPVVVVNPRHVRDFAKALGRLAKTDRIDATVLAECAARVRPVVRPLPDEEARELHAWLARRRQWVEMITADENRRQQAAAPIRRPIEGHLRWRRCQLAALERELTTRVRRSPVWRESETLRRSTPAVGPVLARTLLADVPDLGRLNRQQIAALVGVAPFNRDSGPRQGHRSLWGGRAPVRGVLDLAALVATQHNPVIRAFSQRRVAAGKPWKVVLTACMRKLLTILNARMKHRTAWKPVPALGA

SEQ ID NO: 334820 - protein, 452 aa, unidentified
MPKKRKARKTDNAVLPVMRPHAAGIDIGSTEIYVAVPADRDAENVRSFPTFTQDLYALADWLKRCSIETVAMESTGVYWIPLFQILEDRGFEVCLVNARHVKNVPGRRTDVSDCQWLQFLHSVGLLRASYRPEQEVCAVRSLLRHRESLVQMGATHVNHMQKALDQMNLQLHHVISDVTGLTGLAIIDAILGGERNPFTLAKLRHDRIKASEEVIAKSLVGDYRIEHLFTLRQSLTAYRSYQHLIDDCDREIRRCLDTFQPPGKPTDSPAHEPESKKRPASADAGLRTELKRVFGVDLTKIPGIRTGIAQMLFGEIGPDFTKFRSASAFASWMGLCPDNDISGGKVLWVGTRKVKCRAATSLRMAAQSLHHSKSGLGDFYRRMRAKLGAPKAITAAAHKLARIIFHLVTTRQEFDDARFAADQLRYIKRQESKLRTKAHALGFQLTPLANAG

SEQ ID NO: 334821 - protein, 409 aa, unidentified
MERMIERGAALDVHKKTVTACVRVPGPAGSRRQDVQTFGTTAAALLALRDWLSAYGVTHVAMESTGVYWKPVYYVLEEQFTCLLVNAAHVSKVPGRKTDVRDCEWLAQLLEHGLLRGSFVPPVAIRELRDLTRYRAVLVQDRTREANRLHKVLTDAGLQLASVATNVLGKSGRAMLDALVAGTTDPGVLADLALGKLRRKLPALREALAGRFRKHHALLVSQLLAHLDYLDEALEDLTAQIEDALGPFASEAARLDAIPGVGPRTAEILIAELGVDMQQFPTPRHLASWAGLCPGTHESAGKRRAVRTRKGNRWLRAALIEAALAAVNVRDSALAARYRRLRPRCGHKKAIVAVAHKMLTTAYLLLADGRAYQDPGAGYYDARRKDRDVRRALQALERHGYRVSLEPAA

SEQ ID NO: 334822 - protein, 384 aa, unidentified
MSAHPTQIQAAAQLQANTLFASLELSKARWLVTVSAPGSDKLSRHQVPGGDGQALLELLWRLQAAAARRSAPVMIIVIQEAGLDGFWIHRLLVQNGITSHVVDPASIAVNRRHRRAKTDKIDGVKLLRTLMAWMRGERQVCTMVQPPSPEDEDRRRLARERARLLKERIQHTNRIKGLLSGQGIPDYDPLHRDRRGRLAALTTGDGRPLPKRLETEIGRELDRLELVASQLAAVERERDALMAQTAEADARAAPAALIRLRGIGPELAALLWLEALFRRFENRRQIAAYAGLTPSPWKSGGIDREQGIAKSGNPRLRRAMIELAWFWVRHQPGSALSRWFVERVGAARGRVRRIAIVALARKLLVALWRYVTQGVVPEGAVLKG

SEQ ID NO: 334823 - protein, 339 aa, unidentified
MQLIRVGVDLAKSVFQVHGVDRSEKAVWRRRLSRDNWLKVLLDTAPAGCEVGMESCSGAHHWARTLQAHGFVVKLIAPQFVKPYVKSNKNDANDAEAICEAMARPSMRFVAVKSVEQQDIQAVHRIRSGLVHQRTATANQIRGLVSEYGLVAPKELHFLRVAIPQWLEDAENGLSSRFRRLLGGLHADLLSLDRRVAELDVEIAAIARSDPAAKRLQQLRGVGPVIATALVAAVGNGEQFANGRQLSAALGLTPRQYSSGGKDRLYGISKRGDTYLRTLLIHGARAVIRTARNKDDRLSLWLNRLVERSHTNNAAAALANKTARIAWAMLRNGTDYQPA

SEQ ID NO: 334824 - protein, 365 aa, unidentified
MIVIGTDTHKASHTAAGVNAATGQVLADRTVRAKRRSFDDLLRWARRLGGERVWALEDCRHVSGALERFLLARGERVVRVAPKLTAGARDSARERGKSDAIDAVAIARAAIRHGIETLPLAQLAGIELDIRLLVDHRERLVGTRTRLINDLRWQLHDLWPELEIPTGGLIAVHWPQRLASRLARTEQTTRVQIARDELRRIRELTRTINALEQQLAPLVAQAAPHLLAERGCGVLVAGKLIGEIAGIHRFATDSKLARIAGSAPIPASSGSTIRYRLDRGGNRQINAALHRLALCKGLHDPDTAAYLARKQAEGKTHREAMRCLKRHLARRVWHLLQPTHTPPPRPPQPATTIHCNTPYNSFSLT

SEQ ID NO: 334825 - protein, 343 aa, unidentified
MNSTTIAVDVAKSVFEVAVSEQPGEVRERQRLSRERFRRFLAERPPATVLMEACGSAHHWARQAQALGHRAVLVPPHVVRPYVLRNKTDRTDTKGLLEAFRNEDVRPVPVKSETQQALAALHRLRSMWLAARTVRINTVRGLLREFGLIMPIGAHHVVPHVATLLEDADSAVPGLLRPALADATTDIREIEARLRAIEHQLESVASENVVVRQLRTIPGIGLLTATALVATVGNVARFPSGRHFASYLGLTPREASTALRRRLGAISKRGDTYVRMLLIHGARSVLCHAKTKTAPPPDRLRAWALQLERLRGHNKAAVALANKLARIVWAVWRHGQDYRMPVV

SEQ ID NO: 334826 - protein, 368 aa, unidentified
MEVTTIGIDLAKSVFAVCGADSSGRVVMRRQLRRPQVLSFMRGLPRCVVGMEASGGAHYWARQLTALGHEVRLMSPALVIPYRKGNKTDRNDADAILEAVTRPSMRFAMVKSVAQQDLLALHRVRAQLVKSRTALCNQLRGLLRERGVVVRTGAAALKRSLPAALADDRSELSGEMRELLCEMSQWLRTLEQRIASCEARITRKFKHDERCQRLAAVPGVGPLTATALVAAVGNAQRFRNGRELSAYLGLVPRQHSSGGKTVLLGITKRGDRYLRTLLIHGARSALRQCKDDARSGWVRRIRAERGPNVAAVALANKNARVLWALLARGDRYRSTNVATRAVLRSGSPPAVKRAPSEKLRVAKDSWGH

SEQ ID NO: 334827 - protein, 370 aa, unidentified
MLDTTTFVGLDVHARSIKAVSLDVMTGEVRAATFGYDAGAVAEWVRSVDPGARCVYESGVTGFDLQKRLSGLGVDCVVGAVSKMIKPSADRRRKNDRNDAEFLARMLSVGNVVEVWVPDDECEAARDLTRALEDARDDLSRAKQRLSKFLLRHGLAFDERTPTGRRKGNWTRAHWSWIESIRFAEGADEEVLAYYVDAVRRAAEEKARLEGLVEGEARKPRWRRRVDSLRCLKGVDTASAADLVFEAGEFSRFRNARSFAAWVGLTPSEHSSGESDRRGAITKTGNKHLRKTLVEAAWHYLTCSGRPKDLAKGQAPDRGARRHAAKGVRRLVERREALLARGVHGNKANVATARELACWVWAVGLMAEEA

SEQ ID NO: 334828 - protein, 339 aa, unidentified
MRREDFECIGVDVSKDTLDVALFRGKVDWNEGHVKVSNNESGYKELKKWLRSKQAEKQRMRVCMEYTGLYAHDFRTWLEKEDLTYYMVDPKRMHNFAPPLSIKGIRQTKTDKADAFRIAIYCSLFHDSMEPSRLPSPAFFKLKRLLAERKQYQKQVVLYKQQLHDISVYDTVSSRMRKQEELKNLGRCVRQTEKEIGEIIESDAAIKKNYDLLLSVVGIGLVVAVTTIVLTENFTVFANPRKYASYIAIAPFPHESGTSVRGATRVSKQGFRQAKADLSVCVLTAIRFDPDIREYWQRKKAERKHTGVVFNAIKFKLVLRMFAVVKRGKPYVNTKGYKG

SEQ ID NO: 334829 - protein, 326 aa, unidentified
MARVTWIGVDLAKASFVAARRQQGKCITEEFSNDPAGLVLFGAWLPRRSRVCVVFEPTGPYGRRLEAWLGPRWPRMSYVLANPRRVRNFARAAACASKTDVIDARRLLEFAEAFQPPACQRPTPITLELRALWRHQLELRKLLDGLRDRRQKAQVDPYIPAALVEGLGELADRLAAELAKIQAQALTLARTERSLRPRFELLVSIPGIGSLTALALLAEYGPQLAHASPRQLTRYAGLDPVLRQSGSSIRGKTRISKQGSSRLRKALYMAALVGVRWNPVLRSFYERRLRKGLTPKPALIAAMRKLLHICYGVLKNDQPFVAVATP

SEQ ID NO: 334830 - protein, 427 aa, unidentified
MTKVQHTADARVLVGIDISKHRHEVLIAAPGKRRRRRLTITNTVDDIDRLIALLGDYNSPVQIGFEATGNYHRALMYRLGAAGFDLKLVSSIAMARTREALHNSWDKNDPKDAQVILHMLQIGATQIFLDPLRAGTNDIQELSKTHEIVSRAKTELWHRIQGHYLPLYFPEATRFHRSSRSDWFLAFLEMFPSPHLIAAMDKEAFIAAAWQVVGRKVSKTALISDIYETARCSVGLPVAEDSDALRMFRMVLAEGRSLIRQRNTIEDRATELLGDHPDYRLLTSVPGIGPINALTILAEAGDLRRFPHHRQFLKFCGMDLATVQSGMFRGQSRISKYGNARLRRTLWMAGQTAVLQRTNSFRDKFERYIAQDRHNPHLRRKAYTAVAAKMARTIHAVIKSGDPYRPFFEGVSPGGRTPLCRAVEAVR

SEQ ID NO: 334831 - protein, 343 aa, unidentified
MKKLKADEQALLRLLHRWRDEATKAGRNINRIAVAFEAGRDGFWLARWLQAHGVEAYVIHASSIAVSREHRRAKTDRLDTDHLKRAFIGWLRAEPDHCHMAAIPTLEEEDAKRPTREREKLVGERTRIINRVKSCLARFGVRGFKSKLRKAAERLEALRTPEGVALPPNTLAELRRDLLRLRVIMDQIKAIEVGRLERLKKAPKARPNAMVRLLARVIGIGIETADMLVHEILSRNLRDRRAVARYAGLTGSPDESGKRRREKGLARAGNARVRRGMIQLAWRFLKFQKDSALAQWFQSQTTNARCRTRKTMIVALARKLLIALWRLVTSGEIPIGVALRPAA

SEQ ID NO: 334832 - protein, 360 aa, unidentified
MQEITRVGVDLAKRVIQVLAVNAAGLRVTGRALPREKFLPWCAQLPAGCLVAMEASSSAHHWARKLIKMGLDARIIAAHLVSPYRMQGKSGKNDANDAAAICEAASRPKMHFVTVKSVEQQSMLCIHRLREGFKTERVACINRIRGLLAEFGVVLPQRPAVLRQALPDVAEDATNELGGLARLALQRAWAQWQELDEHMRWCDERIAAHLKTNEQVRQAQQLMGVGPVTASAVVATVGDFHQFKNSAQFGAWLGLTPRQNSSGGKNCLGGITKRGDMYLRSLLIQGAKSIVQTAQKRDDPISKWALKIREKSGWQKAVVALANKNARILWAVFVRGKAFDANHVSVKPPAVMPQIGAVPA

SEQ ID NO: 334833 - protein, 427 aa, unidentified
MAASTQLMPDTVCVAIDIAKRYHDVLVRWPDGRERVHKMPNTRAGHDDLIRFLQQQEAPVLAVMEPTADFHRPLAYRLAHAGIPVHLASSLAGARVREALYTSWDKHDRKDARVLMYLLTQGMTHPFHDPLREGYFDLQEISNTYQQIVRARTRCQHSLVNHYLALYFPEMERYLSASRAHWFCHFLLAFPTPASITELTREAFVEAAWESVGRKVAKQQFLEGIYEAAQTSMGLPVVPDSPAVQTFQLQVKQYLSLTEQRQALEAMATTCMRDNKDFARLQTIPGVGPIIALMILAESGDLRRFSHHRQYLKFCGFNLAASQSGNTCSRYRLAKRGNARLRYAYWLAATVAVRMRDNSFRTKFDRYIGKDPTDGDLKRKALTAVAVKLARVAHSLIKHGADYRGYHEYCILGGGTSLQSRRAARTS

SEQ ID NO: 334834 - protein, 334 aa, unidentified
MQNITLIGIDLGKHSFHIHCQDKSGKALLRKKFTRTKLMQFLATCPPSVVVMEACAGAHFMARCISDFGHETKLISPQFVRPFVKSNKNDFVDAEAICEAASRPSMRFVQPRTETQQAMRALHRVRESLIRDKVKTTNQIHGFLLEFGISLPIGDAVIKRLSLVLAEHEIPEYLSRLLVRLHTHYLYLVEQIAELESELSQSINADDTAQRIMTIPGVGPITASLLSSQLGDGKQFSCSRDFAASTGLVPRQYSTGGKSTLLGISKRGDKNLRRLLVQCARSFIMRLERKHGKLAEWVREQLNKKHSNVVACALANKLARIAWAITTQKKEYQA

SEQ ID NO: 334835 - protein, 339 aa, unidentified
MWYSGIDQHKAFCLITTYGPDGPRVKQARVASSPLALQQYCAEFPGPHQAVVESTGGWYWLADTLAALGVELVLAHATRVKAIAAAKVKTDQVDSNTLALLLRADLIPRAHMIRPEARGPRDLMRTRLRVVEKVVSAQNSIDRLLEKFNLADVAQLDDLYQLQANCHAAQIQLLEEQIRTVERALYPFLIPNADVQRLLWIPGLGKVNAFTVYTEIDGIARFPSERQFFSYCRLVPGADNSAGRTRHRSGSKAGNRYLKLAFSHAGIRAVQYYPEIRAFFKAKARRKPIRIARTLVALELARIVYHVLATQEDFTGQFKGRPLSRQKHPQWPRRASPSA

SEQ ID NO: 334836 - protein, 412 aa, unidentified
MEFAAHVGLDWADEKHAVSLESADGSIPEEFELAQKPDAIHSWVAELRQRFGGQGVAIAIEQAKGALIHALMMYEFIVIFPINPKALAKYREALAVSGSKDDPTDARLLKDFFKKHRDQLRAWVPDDVQTRTIQILVQQRRNVVEDRVRLMHRIESLLKAYFPQALDWAGGLHTVQACDFLKQWPTLADVQNVRSATLRKFYYSHRCRSRELIERRIAAIPHARPLTEDPAIVRGLSMAMQAAVAQLRPLIEVIDDFDRQLAGLFAEHPDHEIFESLPGAGAVFAPRLAAVMGADRSRFEDASEIQRSSGIAPVTVKSGKSCWVHHRWACPKFVKQTFHEFSELSIPYSSWARACYKLLRKRGMAHHAAVRALAYKWIRIIFRCWKERKPYDEAQYVETLRRRGSPIAEFLC

SEQ ID NO: 334837 - protein, 347 aa, unidentified
MRYVGLDVGKAKCRAALMNQKGDIEGEFFFENNSRGISNLVSALRSEDKVVMESTGNLWLNIYDALDHRNISVVLANPLKTKAIASAKVKTDKVDARILAHLLRSDLVAESYVPPRNVREMRALVRHRLSLVKMRTMVKNKAHAISDRYGYRCEYSDMFGKAGMEWLRTLEFGELDRLMLENHLSLIEAINARIRRVDEAIRKKASQDEDIHLLLSLTGIDVYTALLLRSEVGPIARFPDYKKLVSWAGLAPSVHQSGNVEYHGAITKRGSSMLRWAMVEAARTAVQHDERLGAFYERVRARRGDQKAAVAVACKMLKIVWFMLTKRETYGNANGRLYGEKLKKIGV

SEQ ID NO: 334838 - protein, 343 aa, unidentified
MNKLDVAGVEVSAKALVVALKSQGRMRSSEFPNTASGHRQVIGYLRCHSPRVRVCMESTGLYGLDLALAVQAEQGMEIMVANPRSVRHFGEAMMKRSKTDPLDAKLLAEYAERMPFQVWQPPSLPARQLCAIARAIHQLTEISTMQKNQLHAAGSTQTTPKIIRTELRRNLAHQERAIERLLQEAIHLLQSDLLLQKRFQLLLGIRGIKELSAVQLLGELVLIPADCDVRQWVAYAGLDPRQYRSGDSVERKVRISKAGNRHLRRALFMPALVAVRHNPHFRTFYRQLLAKGKLKMVALVAVMRKLLHGIYGIFKSQQPFDATKLFPSLLAPALDPATTKMAC

SEQ ID NO: 334839 - protein, 310 aa, unidentified
MDRTIVGIDVSKDRLDVAVRPSGEVFAIERNPVGLEQLTLRLTALFPELVALEASGGFETVVAATLAAARLPVVVVNPAQIRAFAKAVGQRAKTDPIDAGVIAHFAEATRPEPRPLPDEATRLLADLVARRRQILEMMVAERQREKRVTVPHLRKSIVRLLKALERELTSLDTDITDAVRGSPAWREKEDLLASVPGVGPTIARTLMAELPELGQLSRRQVAALAGLAPFTRQSGQWRGKSFIGGGRSAVRAALFMGAMVAKRHNPILKVFFDRLVAAGKPRMIALIAVARKLLTMLNAILRDRRPWQTI

SEQ ID NO: 334840 - protein, 333 aa, unidentified
MMNMHSQGRVASEATRPNAGIDVSKEHLDVHLLEFGMRVDNDASGWDPLIAKLKESDVDLVVVEASGGYERGLVTALHRAQIDVARVNPRQAREFARSMGVLAKTDRVDARCLRDFADVLARHKDRHKYITVPADPERELLAALMTRRRQLVDMRVAEANRLEGATARTVRSIRSVIKTLDKQLQDIDGDIDQHLERHFKPQKELLDSVRGVGPVTILTLTSALPELGRLGRRQIAKLVGVAPLADDSGRRKGVRRTAGGRSEVRAVVYMATLTAIRHNPVIQVFYSRLVAAGKPKKVAIVACMRKLLTILNAIVRDQAPWRTDAGITSSRST

SEQ ID NO: 334841 - protein, 370 aa, unidentified
MTPATTAEKSLFMAMELSNKNWKLAFSNGEKLRYVNVIAGDQKGLRSSIERSKEKLGLPADCPVWACYEAGRDGFWIHRCLTEMGVQSLVVDPASIEVNRRKKHLKTDRLDAEKLVRMLMRYVVHNEKTVWRVVVIPTEQQEDERRVHREGERLKLERAAHLNRIRALLVLHGVRPRKIARTDNSTARDWQGKPLSAALREEIRREQARLEVVDQQIKNLEAEQRKRLKAPTNAAEQKAAKLLKVKGVGAVSAWVLAKEVFGWRTFKNRREVGSMAGLTGTAYASGNTTIEQGISKAGNRRVRYTMIELAWMWTWHQSDSELSKWYQQRFGSGGKRQRRIGIVALARKLLVALWKYVEFDEVPAGATIAA

SEQ ID NO: 334842 - protein, 357 aa, unidentified
MKTQITKRLDFSGKKIYVGLDVHKKSWSVTIIVEGIEHKTFNQPPNPQVLSDYLNRMFPNGECHSAYEAGFCGYGIHRALNELGIKNQVINAADIPTSQKDTLGKTDRVDSRKIARALEKDMVHGIHVLERDLEELRSLSRTRMNLMKDFRRSKNRIKSFLFYYGIDLPPQFDNNRWSRDFEVWVEQVIMDTLDGKEAINQLLATYRYFRQQMLDINCHLRKCIRKYDRVLYDLLKTIPGVGPLTAIALITELGDIKRFRHINHLASFVGLVPRMKQSGDIEWTGDLTFRCNHYLRTMIVEASWTAIRMDPVLMQYYQGKRINSIAQKVIIKVARKLLNRIRYVMKHRQPYVLGVIE

SEQ ID NO: 334843 - protein, 420 aa, unidentified
MVYLERGYNLKELPWSKTVSNSFLFKEACMILVGVDVAKDKHDCYIMTSEGEVLFKSFTIANNMEGFNQLYEKILSVIDNFDNVKIGLEVTGHYSYNILGYLLDKGLTPYVINPLHSNLYRKSLSLRKTKTDKVDSRIIASMLMSDVSLKPYSNTLYHNEELKSLTRYRFTKVQERAKLKISISRLVTILFPELEKLVPTLQMNSIYALLYEFPSAHAISKAHLTRLTNLLNTTSKGHYTKDKAVLIREAVKNSIGSNMPAKSLELKHTIKLIKELTSEINEIEEEIKIIMNKINSPILTIPGIGLSTGAQILAEIGDFKNFSSPDKLLAFAGLSPSTYQSGNMYSSNAKMEKRGSKYLRFALFNAAIYVSYWEPTFSQYLKKKRVEGKHYYVAISHVVKKLVRLIFHLEKTNERYSTVV

SEQ ID NO: 334844 - protein, 411 aa, unidentified
MFYVGIDIAKRSHVACVMRDDNSLEIRPFEFSSTKSGFEKLRAQLSSLACDISELLIGMEATGLLFDNLYRFLRSLEYRVVLLNPYQTAKFREMDTMKRVKNDNIDAQMIAALIKSGRFSEGYVNDDQLQSLRTLYRHRASLDDQLKAIKRQTQTLLNVVFPELEQVISDPFNITGLALLEKYPTAKHYSHASIDRILKTFRGIKGNNFNEIKANKILTLSKESIYSGAGKEGYEATIRSNISLIRLLKEQMQSVEEAMLALFKVKEATHEEQEEMAELIDNLRTIPGVSDKTILALLAECGNLDRFHNAKALVGYLGLYPTLEQSGDSHKNGRLAKRGARLAKKAIYLAAIAAVRHNKELRQVYINYRSKGRAKKECIIITARKLLAIIYAIYTHNTPYNPNRVFIAQPN

SEQ ID NO: 334845 - protein, 456 aa, unidentified
MARRVIGMDLGVTSPSEVAVAQGANVERVFRSPSTPEGLTRAIQRAAAGEPIELVLESTAMAWFVAGVAAEKSGVEHTLYRVSGRKAAALRDFYRFHTKTDRIDARVLARMPMLDDALREFRLPSGEELALKRLVTLRAKLVRDATRLKGRLRSTLHWAAPGLLGERAVTDGVVATLSRWPNLQRLAAARTSTVAREAGIDRGQAEAVRRAAREAVSFYADRVDFDALALEITLTTSHLKLLQAQQRQLETQIQALHARQYPDDALLTLPGVGPATAAVIRAAVGDAGSFTNLAAFKAYTGLVPRENSSGEAKRRGRISKAGPNQLRAALYLAADSARRNDPELASLYRRLLLERGHHHTQAVCAVATHLTARIWAVLRENRPYQPRDLDGRPITQQQARILALDLAIDPDTRQHLKTGKGGPGAPSSRQPKAPHGATRPSRTQLTDTALELARKA

SEQ ID NO: 334846 - protein, 321 aa, unidentified
MNESERLTIGIDVGKDHLDFAILPTGTLHRVTNDAAGHAELMALLQAAGEGVGIARVVLEATGGYERAPALALADAGLPVVIANPRQSRDFARASGLLAKTDRLDAVALAQFARALQPVVRDMPTREQRRLEDLVHRRRQLVVMIGSEKQRLSTSHEPRVRTSIRSLLDVLERERRAIERELLHAIEQDPGWRDRMHLLRSVPGVGPIAAVTLLAELPELGTLSEKSIAALVGVAPMNRDSGRKRGKRRTSGGRSSVRKVLYMAALTATRYNPVIRAFYQRLRRAGKLAKVALTACMRKLLLILNAIMKTGRSWQPRPIPT

SEQ ID NO: 334847 - protein, 407 aa, unidentified
MNQDSPSDLHARIWCGIDWGGRFHHVCVLDDDGQQLLSRRIAHTVEGLSALVAMIAALPGSVRIAIERAEGLLVEHLQLHCDAEIYCVSPKISARARERYRMAAAKSDEFDAYVLADTLRHQHAQWRPLVMPSPVLAELIAVSRDRQRILDLQVDTENRLRAILESYHPAPLHLFSSLDRDITLAFIRTYPTPAQASRISAARMGAFTSRHGYSGRQKAESLVDRMHPHLLSASDGTVAGKALAAKAFTEQLTLLNAHLRIHDKRLDELLAAHPDTPIFTSFPGIGPVIAAVLISEMGEARQRFPSPPSLLADSGLAPVTKASGRTRQVRFRYAANRRMRHAIDWWMFVAVREDPWSADIYQRARAAGQPHHRALRGLGARWVRILWRCWTDHITYDPAIHHRMTVA

SEQ ID NO: 334848 - protein, 372 aa, unidentified
MGWLPSSPNGIVMCQENGVYNHCAERTATVTTTTMIGVDLAKNVFQLHAASMSGEVEYRKQLSRDKFRKFMAQQAPAVVVMEACGSANYWARELARLGHEVRLIAPHYVRPFVKRQKNDATDAEAIVIAAQRPEMRFVVPKSEEQQGRAMMFRTRTRMVHQRTELINMLRAFLYECGHTVPKGIHQFQRIEAIVTEPNSDLSVMARAECSELLEQIAALTARIAASDRRIKMAASQADTARRLQTMPGIGPLTALAVEAFAPPMESFHCGRDFAAWLGLVPRQHSSGGKARYGRVSKAGQADIRRLLIIGAMSRLNWLGRKTIAQESWLARLSARKPRMLVAIALANKMARMIWAMLTKNEDFRNPATATAA

SEQ ID NO: 334849 - protein, 324 aa, unidentified
MSDPDVFVGIDVAKATLCVHIQPEGDAGGHERTFEVANAGKGIASLVADLLKLSRAGRRLAIGFEASGGYERELGQALFDADLPCFLIDPARVRAFARAERQIAKTDPLDARLIARCLKAVGHSLRPYAPNPLVLLLAENVRTRRHLLDQAVELEAQIETLSAPTLRRMMARQIASLRATAKAIEIEMRTILAGDGGTEQLYRRLRTAPGVGPILAATLVASLPELGRLSSRQIAALVGVAPFDRQSGRTDLRRTCHGGRPAVRSVLYMACISVTRMKRGPLKAFYQRLRENGKPPKVAIIATMRKLLVTLNAMVAKNTDWRAA

SEQ ID NO: 334850 - protein, 347 aa, unidentified
MPQYIGIDLHKATSFITRMDQRGRILEQVQLRTDAASLGGYLRRLRPDTRIAVEATGHWTYLYELIEDRCPDLVLAHPLKTKAIASARIKTDKIDSATLAHLLRTDLLPAAYIPPRPVRDTREVLRTRASLVRLRTQVKNKVHAILTKNGIRTPTKTPFGVKSRRVLATVPLRPCYRLALDGYLRLLAALTAELATVTATIAAQAQQDPQAQLLCTMPGIGAYSALLILSEIGDVRRFPDSRRLCSYAGLVPSVHASGGKTRRGRLTKQGSTWLRWILVEGAIHARNGAPQFRSLYHRVATKHGAHTGRVAVARAMLKTIYAMLRKGEPFRPIGTGTTGQRHGVMAG

SEQ ID NO: 334851 - protein, 356 aa, unidentified
MDRYIGIDAHTTSSTVAVVGPTGRRLRCDVVDTQAKALIEYLRGIAGDKHVCLEEGQQAEWLYEVLSPHVADVTVANIRGMPSSDNKSDESDAFTRADDLRLGRIKKRVYKQRGTFGELRALVHVYDKLMGDHVRAQNRIRSVFRARGIEVRDPRYPPEEQTRLLNALPVYQRQAAELLFAQLTATGVTRKAADDALTAEAKKHSMAKLLMTMPGMGIKRAAQMMAVVVDPNRFRTKQQFWSYCGFAIQTRVSSEWERVGREWVRIRKPMTRGLNRAHNNMLKNVFKGAAKTVIATADPQEPLYQDYLRLTEASTRPDLARLTVARKIAATSLAMWKRSETYNPEAYRRQPESRDE

SEQ ID NO: 334852 - protein, 348 aa, unidentified
MTLVGCDLHSRTQQVAVLDTTTGELREQELAHAGDAVEQFYRALRPPVTIGIETTGYTQWFHALMHRLGHTVLVGEAAKIRAMVVRKTKTDRRDARHLLDLLKHNRFPTVWMPDPETRDLRALIAHRVRLVRMRTMVKNSVQAIALNQRLALRSALWTQRGLSQLRALALPPHSRRRRDDSLELLAWITSRIDQLDEQIAGIVDADSRARRLLTHPGVGPLTALTTILVLGPVARFPDAKHVVSYVGLAPAINASADKQHLGKITKQGNALLRWVLGQAASLATRADDDLRRRYFAVLHRRGRPKAKVAVARKLLVRLYIMLRDEVDYAEFRRRGRAARAQSGGVVIT

SEQ ID NO: 334853 - protein, 352 aa, unidentified
MSQQTLAHRWCVGIDLHKDTLTVCVYCPCCGEIRFQKLACKCRGQILEFFASLPRPHAVAIEAVGFYRWLWDLLEPIVEKLVLADATAARALAGRRLKTDREDAQNIAELLAAGRLPVAYAPPLEVQILKDQTRHRNQLSRLHARVLHQVKSLMNANNRPGPARLQSHGLIRYLKAFESKLPARHAAILWKCVDQLTLIERQMAQAEIELRHLLDGERFRDTAALLQSFPGVGLIVCATVLAEVGDFRRFTYRKAIACYAGLHPRVFASGGRQREGHIAKTGPRDLRWVLQQAAWTAIRCEPGIKKMWLKMSRSAGKKAAAVGIARKLLSWMWAAVIKGQTYQPRGVAPLTT

SEQ ID NO: 334854 - protein, 335 aa, unidentified
MKKYVCFTGIDVSKSKLDVTFVTEPLEKKAQHFVVSNGSKGVQQMLSLLKKSKIDLKNTLFSFEDTGVYSLPLCFLLSEKQLDYWMIPAIEIKRSKGISRGKTDKSDSKDIAYYSCTHLHKLRPGGIPEKEIMQLRLLFTEREKVLKALHLLESTMEASDFIPKAIMDSVRKINASGVHSLQKMLLELEEKMREIINSCEPIKQQQNLLCSIPGVGPQTALYLIIATKSFKTFKNSRQLACYAGVAPFEYSSGSSIKGRTKVNHLADKKMKSLLYMCAMNAKKCDKELSEYYQRKVEEGKPKMLVLNNISCKLLGRVFAVINRDTPFVNMHKFAA

SEQ ID NO: 334855 - protein, 363 aa, unidentified
MPQDSTDVAIIVGVDTHNDIHVAVAIDTLGRRQGQLTVPATAAGYQQLHRWALNLGPNHGFGVEGTGSYGAGLARYLHRHGAHIIEVNRPDRATRHRLGKSDPIDAEAAARAVLAGTATGTPKHGDDYVEMIRILKLTRDSAVKSQTQATNQVRAVLVTAPPQLREALQHLPRVALLQRCAALRVGELITPLAAAKHALRLLARRALALRAEAKALRAHLTELTAAACPALVELTGIGPDSAAALLISAGDNPQRLRSEAAFAALCGTNPVPASSGKTTRYRLNRGGDRQANAALHRAVVTRMHWHEPTQAYLQRRTTEGKTKPEIMRCLKRYLARQVYRCILPAPVREKAPAPNQKDSERAA

SEQ ID NO: 334856 - protein, 349 aa, unidentified
MNTTVPPLASIGIDIGKEVFHLVGFGTDGKIAFRRKIRRLALVETFKKLPQSIIGLEACLSAHFVSRALRRLGHEPRIIPAIYVKPFVKGQKNDYNDAEAIAEAALRPNLRAVREKSQDQLDLQACHRVRSRLVSRRTATINQIRAFLIEQGIAVRAGSRALRNSLFEILKNREDEMSPRMSDLIVGLYEDWLWLDERIETITKEIEEISQREGNCVRLMSVPGVGPLISTAVVAAIGTGEAFDRGRDFGAWLGLVPRQYSTGGRSILGGISKRGSRYLRTLFIQAAKVLLMRPQNWRKFSFGAWLTNAAPRMHRNKLATALANKLARIAWSVLNTGKAFDTHLQLETI

SEQ ID NO: 334857 - protein, 450 aa, unidentified
MSPLALDVVTKTDKTPVLGRMLSKYVGRKTSSIENGITKARNHSRQRGNIMRVVFGIDVSKASSEVAILVNGEKVHGYTIPNDAIGFNRLLGDLKTVHQPEIVFEATGVYSRRLQAFFEDNSYTYTRLNPLESKKQLDSLRVRKTDKIDAEKLAASQFILNRKPSYVQEALYQELRDLSRFYQNLTEDIVCAKNRLHKVLQITFPELENILSAPTGEQYWNLVITFPCNSFVLESDDATLTAIIRQSTAKRISEKRVTYLVDKLTKLANQSYCAVKKTSPVIEEVKYYAGELLRLSEHRQGVVEEMVTLAQSLPEYEILLSIPGIAETTATSIIGELGDIRRFHSANQINAFIGIDLRHYESGNFLAKEHITKRGNPYARKILFKCIHNIASASHTNPCHIADFYEKRKRQSQVTSTKPHTIASIHRLIRTMYYLITHNKLYDYTSTQNR

SEQ ID NO: 334858 - protein, 345 aa, unidentified
MKLSACGIDLAKAVFQVHGVDLHGKPCLRKRLRRAEMLTFFVKLEPCLIGMEACGGAHYWARKLSAMGHTVKLMAPQFVKPYVKTNKNDAADAEAVCEAVTRPTMRFVAIKTEEQQALLAIHRARQGFVKARTAQANQIRGLLAEFGIVIPQGLCHVSPQLAALADASSGQLPSSFCNLLQRLADNLKELDRQVKELEQQIRLWHEQSEASQRLAEIPGIGPITASALVATIGDARCFKNGRQLAAWMGLVPRQHSSGGKPVLLGISKRGDCYLRTLLVHGARAVIRHAEHKVEHAANWLVRLLGRRNKNVAAVALANKNARMVWALLMHDERRFRPGYAAGAAA

SEQ ID NO: 334859 - protein, 431 aa, unidentified
MDTQQFEVIRPKCAGLDVHKKSVVAAVCTSDPVTLTASYKTKVFNTTNSDIAALRDWLLAQDCRDVCMESTGKYWIPIFNILEPHMHVILTHPKYVKAIKGKKTDKRDAKWIANLFRFDIVKASFIPPADIRALRELSRYRLKLSYMRTAEKNRYQNSMTISRIRIDCVLTDPFCLSATRIMDYLLSDEPFDEETCRSLIDRRVKASKDEVMDAVHGYHILEEQKFKMTHAKAHMDFINRSIGEIETELFLRSRQYDCQVRRIATVPGITELSALFILSEIGADMSVFESDRHLCSWAGLTPANNESASKKKSTRCSKAGQYLKPLLIQCALAAVRSRKEPYFAIKYQRLSKRRGKKKAIIAIARMMLTSIYHILSKGESFHPNDYEATINPPKQKPVILTIENTLQFLREQGADPETLKLIQQQCAAQDG

SEQ ID NO: 334860 - protein, 383 aa, unidentified
MSIAPANSTEVRRYGIIGGTLAAVDKVIKKLAAASIELRIVYEAGPCGFVLCRHLRSQGLECAVVAPSLIPKKASDRVKTDRRDADQLARLYRAGELTAIHVPDQEDEAVRDLVRARTSAMVEQRKARNRLKGFLLRLGFRYTGKSSWTEAHQRYLAGLVMPQPPQQIAFQEYLHAINDATERLARLTQAVEDALPGWKRAPVVRALMSLRGVQALTGMTLVAEVGDFNRFGDARSLMNFFGLTPSEHSSGGSRAQGGITKCGNAHCRRVLTEAAWQYRLKPKVSEAMQKRQENQSQEVRLIAWKAQQRLHQQFGRLAAKKKIVIAATAVARELAGFVWAIACKVKATDQPAAPEIVRTCRGKVYRLDAAKKLAAANKPELTK

SEQ ID NO: 334861 - protein, 352 aa, unidentified
MEYIALDAHKRYTVALVEGSPGEVLRETRLAHYRGAIRTFLEEWTPGSPVAVETVGNWYWLVDEIEEAGMVPQLVHARKAKAMSGMINKTDKLDARGLNRLQRTGTLPTVWIPPAEVRDQRDLPRTRMVLVSTRTRLRNRIHATLAKYGLTVTGVSDLFGIEGHKLLADKIRRLPPHTRYATHQLLEHLELLDEQVADLEERIRDVFTTTPAFEWLHTMPGVGYKLGVVILTEVGDVRRFPDAEHLATYAGTTPRVHSSGGKTRYGPTRSDVNHYLKWAFREAAEACCQHRERPHWQHRHVSRLYARVRRRKDHPKAIGAVARHLAEATYWILTKEVPYQEPTCKADASTKA

SEQ ID NO: 334862 - protein, 412 aa, unidentified
MRRVIGIDTHRTFGEVVIWEDGRLRYVGRVDMTRTALEGFGKKLLATDEVVIEATGNCMAVSRVLTPFVKRVVIANPLQVKAIAHAHVKTDKVDAGTLASLYAAGYLPEIWTPDAATERRRRLVARRYQVVRHRTRIKNEVHSILYAHLIPRCPHADLFGHLGRTWLTSQPLPDDERAAIERHLRELDRLGDDLRVLDQEIAQSALDDAAIKRLITITGVNLAVAAGLVAAIGDIGRFSSPQKLVSYFGLNPRVRQSGLGAAHHGRISKVGRSHARAMLVEAAWATAKAPGPLHAFFVRIRARRGHQIAAVAVARKLAVLCWHMLTKQTDYHWARPALIANKRRAMELQAGRPQKKGNKRGSTYAYNVKALRDQEMRLAQQAEQSYENLVAHWQPRPAKKQARGRLKPAGLE

SEQ ID NO: 334863 - protein, 347 aa, unidentified
MRFYTQQHQYYCGIDLHARKMYVCILNNIGKIVLHKNIKTDPELLFEILFPFLPEVVVGVECMFSWYWIADLCREHCIPFILGHALYMKAIHGGKTKNDKIDSRKITALIRGGNFPLAYPYPKGMRSTRDLLRRRMHLVRKRAELLSHIQNTNTQYNLPVIGERIAYKANRKGIADRFEDPSVNKSIQIDLAMIDTYDKLLKDVELYILKHAKAHDANTLYLLQTIPGVGKILALVMLYEIHDIGRFPLVQDFSSYCRLIRPRKESNGKITGKGNKKIGNPHLKWAMSEATVLLIRESDRAKKLHQKLVKKNKEGKALGILSNKLGRAIYYMLKNKQAFDMDKFFGN

SEQ ID NO: 334864 - protein, 340 aa, unidentified
MYKSSAEGFLSCGIDVSAAQLVVALEGEAGSWRQRSFPNRTSGHQALIRWLQKTGERVRVCLEATGRYSLDLALALHTASGIEVAVLNPKVVHAFAVTLCRSKTDPADAQVLAEYARRMVFQPWHPPSAVALELRTITRHIAALTQQHTQQSNRLHALSASSAGSGWVRQDLKRSLRDLQRRMEKMRRAALALIAQDAELRPRFARLLSMPGIAEISALSLLGELALLAPGLSVRQWVAHSGLDPAHHDSGSSVHKRARISRAGNRHLRRALYMPALVAVRRDPHLRAFYQALLARHKAKLQALMAVARKILHAIFGMFRAGTDYDGSRLFPTLELAVAA

SEQ ID NO: 334865 - protein, 347 aa, unidentified
MKRIAVDLAKSVYQVAESFRSGQVVQRKRLNREAFRRYIQEQADPVEWVMEACGTAHYWGRVVQSLGHWVRLIHPRYVRPYRRRNKTDRNDCDAMLEAARCKDIHPVPVKSHEQQQLQQLHGLRETWKKSRTQRINLLRGILREAGIEAPASTVAFIRAAHELVDRPELAPLHHQLHIVLAEINLYEQCMAECEQQLKRWHADDEIVRKLDEVSGVGLLTASALTAAVGKPERFASGRQLSAWLGITPREFSSGDRRKLGHISRQGNVYVRTLLIHGSRAALLAAQRCEASTPEKLTQLERWAVETAARVGHNKAAVASANKLVRICWAVWCHERRFSGNWQSVKPA

SEQ ID NO: 334866 - protein, 454 aa, unidentified
MPNDKTPTPSLPVLDPTAAAIDIGSEQLHVSIAGGPPKVFGTTTGQLYALRDYLVIQGVKSVAMEATGIYWLCPYEVLEQAKLEVVVVNGKYVKNLPGRKTDMSDSQWQATLHAHGLLKPGFVPPEHIRRLQDYLRLRSDHIVMAGSHEQHMQKALERMNLKIHDVISDLTGTSGLKMVEAILGGERNPVALLALCDAQIQKRKAQRLLEALQGTWKGEHLFALRQAYELWQSYQAKIRECDQAIETVLREMTGPEDPQAPPPPPPTKRGGVNTPQIAELHGLLYRLCGGKDPTTLPGVADYVCLQLLGELGTDLGGPWKTEKHFTAWLGLAPGSKQSGKRKGSARRSRNRAGRLFCVIARSVGRSVDKALGGFYRRLKGRRGGLVANLALARKLAELFWRLMVHGKAYVEQGLKQYEIKVAQTEQRLLAKLARKYNMVLQPQATAPTAARLNP

SEQ ID NO: 334867 - protein, 468 aa, unidentified
MTSQTRTSITVEIVSLGPSRATIEARPERAADRAPAHGRTSLPPRGPVGCCRRGARRPRRLIGKCRAGAAAGNVSAEGEAIRSNDYRKDTTVKAPSTRPAAVLGLDVGKSSHWACLIDRDGEVLASAPVRNREAELDALFASAPAGTLVVVDQFRNIGSLAVRRARAAGLGVAYLPGLAASRAAGLFAGEAKTDERDAAVIARTALGVPDSLSGVPGRGEALEAARALSSQRDHVVACATRDKNRLRAVLLESCPALEAAVDLSDRRWLELLAGFGGAWGIARSGAEGPRAEAAGEAAAASTAPPPALVEAENRQVRFLAARISEALDEAGALEAETAALLEGDETYACLLTVPGIGPRTAAQLAVSVDIGRFPDHDHLASYCGIAPRVRSSGTSVRSVRASRRGDARLKSLLIFSCNSLVRSSGRYGEYYRACRARGMGHGRALKAVARKRLRAIYAVMRDRVPYRE

SEQ ID NO: 334868 - protein, 456 aa, unidentified
MIQKRSKPKIDRTMPMVHPNAAAIDIGATMHTAAVRADRTPEPVRSFGTFTTDLHRLVNWFKECGVETVVMESTSVYWIPIFELLDARGFSVFLVNARDAKHVPGRKTDVSDAQWLQRLHSYGLLRASFRPKGQIAELRAYVRQRERLLEYAASHIQHMQKALTEMNLQLHHVVADITGITGMSIIRAILAGEHDPKVLARLRHYSCHSSIETIEKALTGSYRAEHLFALEQALALYDAYHEKVSACDVRIEAVLKELSARRGRQSGSLPSSYRRTDQANRLAFDARAALFTLLGKDITQIDGLGPYLSLKLIAECGDDLSAWPSAKHFTSWLCLAPSNKISGGKVLSSRTRRGSRAAALLRLAAVAVGRTDTALGAFYRRLSARVGKAKAVTATARKIAVLFYNAVRYGMEYVDPGSSFYETRYRKRVVDNLHRRAKAFGFILQPLAPTPSVTVS

SEQ ID NO: 334869 - protein, 438 aa, unidentified
MGLKSRLEYELTAWVAQTSFLRKDSAMRILALDLAKNKSVYVDYFTGGGDRHFGKISTNAGDLQKLLLRCSPDRLVIEACPAAGWVCDLAQKMEIPVQVANANDERWKWKTVKDKSDRKDGLKLAVMSEMESLPTVHVPKPAVRQWRSLIEYRHNLVDRRTAIKNSIRAIYEREGLSLPSVRKAWTSEALEGLKKQASRASAEQLWLFQVGCELQQLEQVQKQIEQVEGKLKEFAESKEAVKRLQTAPCVGPRLSEAVVAILDDPHRFKNGRQVGCYAGLTPRRWQSGESDRQGHISKAGNRLLRKLLVEIAWLGVRNRTWMLEVYEQVRRGSEKRKKIAIVAVARRLLVRLWAMLRDGTEWKEASGALPPDPQDLSLDAPPAEGVKGNGPSKVARPVSRKVVHVGAPVASQQSRILRVDDKSVTRRRKSGKVLARIK

SEQ ID NO: 334870 - protein, 404 aa, unidentified
MAEGLEIWVGIDVGKQSHHACAVDVAGEVVFSQKVGNDQRAIEQLIARAGRATTQVRWAVDLTGPLAMMLLTVLLNAGESVVYVPGQVVKTMSQGFRGEGKTDARDARVIAETARMRRDLTDVTIPDELVAGLTQLTRYRADLMSDWVAGINRLRAQLGSIFPALERALNYSTRGPLILISALCTPSEITRAGIDGITTHLRERGVRPSGIAKMAAAALAAANAQDVALPGEPDAAVLIKRAAGKLLDLDREIKAADKLIAQRFRSHAWATIIESMPGMGPGLGADFLVETGGSLVGFGSPGRLASYAGLVPVPRDSGRVTGNLRRPTRYNRRLRRVFYLAAMTSLRIENGPSRRFYDRKRSERLIHPQAVMALARRLVDVLWALLRDGREFVLERVGSDAAAA

SEQ ID NO: 334871 - protein, 353 aa, unidentified
MMIIGCDFHPSFQQIAFVDQETGEYGERRLGHREEAERFYRSLAGRQVVVGMEATGNDRWLRKLLGELGEELRIGDASAIHASAPREQRTDKRDARHILRLLVENRFPSVWQPPAGNEEQRQLLMHRCRLVRMRTRIKNQLDSIAKSEGLTGSRRWSAERRGQIEALPLAGWYARRRADLLGMLDGLEERIKPLDVAVETAARQDAQARLLMTHPGVGPVISLAYVLVVGDWRRFPRGKQVGSYLGLIPSEASSGKRQQQMGHITKQGNTLLRWLLVEAATTAQRHDPGWHRQYVRLSMAKHHGVAKVAIAHKLAVRLYWMLRSGQDYGQMMERGSHARQSECPVGRSRRPIE

SEQ ID NO: 334872 - protein, 313 aa, unidentified
MHCFANTAAGHKALLRALTRKGRRVRVVLEATGLYGLDLALALSAQEGIAVMVANPRAVRHFAQAMMQRSKNDRLDAGVLREFAARMPFQPWARPGENTLALWAIARRLEVLVKQRTAEKNRQHAARISQAVPLVVRREIARSLRELENGILRLRREARRCIAADARLQRQWELLCSITGVAEVSAVTILAELAMLPEDRDVRQWVAFAGLDPREYSSGTSVRKQTRISKVGNRHLRHALYMPALVACRYEPHVRDFRPCWPWRVNSCTPSTACSELYSPSMAPVCLPSCQLKRLEIEERIYKARLQAVAGFG

SEQ ID NO: 334873 - protein, 343 aa, unidentified
MDHFAGLDVSVKETSVCIVDDTGRIVREVKVASEPEALLTVLTNPAYHFKRIGLEAGPLSQWLFSALAEAGLPVICVETRHMRAVLKAQINKTDRNDARGVAQMMRAGLYRPVHVKTLRSQKLRMLLTHRKLLQSKAIAIENDLRGTLRNFGLKVGMVGKVRFEARIKELVENLSDLAALVEPLLIVRRVLREQIDILHRRLLAVVRDDEVCRRLMTIPGVGPVVALTYRVTVDVPARFKNSKAVGAVFGLTPTRYQSGESDRAGRISRCGDEMMRIMLYEAAQSMLVVSTKWSWLKAWAMKIAKNRGMKKAIVALARRLAVIMHRIWVDGTEFRWTKEVAAA

SEQ ID NO: 334874 - protein, 428 aa, unidentified
MSKQKLIRHKQYCQIVKEITRSDQYMVVGIDIGKDQHHAFMGTATGKSLFRKLIFENNLEGFSKLLKTSDLIKNRNNLSKVVYGLEPTGNYHKPLARHLIRCNSNVVLVSGEAVNKNRSLLDGRWDKHDTKCAANIADLVSRGRCLYYDSPSPGIIELRSLLSLRKRLKKEEHSLRMRIRNNLLAQYFPELDRFYSACESESLAIVKWCLEPDQIAGMAFEPFFQMVTRTRRGSAQLLRLRKIHQQAIESVGCPMGSAAAFEAQLLVDKLEQVRQQLKDTEAAIKDVALEFDEYRYLLTIPGFGLYISSSVIAAIANPFRFKNRKQLLRMAGYDLCAKRSGKTSDNAVPVISKKGNSNLRYALFQAAKIASGRTEVFRNYFAEMLRGRERERGIITKMRVKLAAKMLIIAWTLMKNKEPFDPAYLTIE

SEQ ID NO: 334875 - protein, 383 aa, unidentified
MSSSAAVSKIIYLGLDVRKDSVTIAVLPADAPAPTRIDKYPNDFAKLRRVFERCAKDGKLCACYEASGAGYVLQRAMKEWGYHCDVIAPSLIPVKPGVQRKHDKYDAGQLARLYRAGELTVIRIPSEAEERVRDVVRCRETLQREAVKSRHYILKVFARRGFIYRGGVHWRPAHYTWLRQLTGATSPLAPEDRLVFGEYFALLEYKLSRRDALDARIAEIALTPTYAPAVATLQCFRGLQVHSAMVLATELVDWRRFASPRQLMAYLGFVPREHSSGPRERRGSITKAGNAHCRHVLVQAAWAYRLHPKTGPALAVRQRGQPAAVTLHAWKAQQRLYTMYHRLSLRRSPQIAVVAVARELIGYLWAVMRELETPRAFATTAPA

SEQ ID NO: 334876 - protein, 341 aa, unidentified
MTITTIGIDIGKRWFHLVGCNAAGRPILRKKVERTHLIGVLANVPACLIGMESCAGSQHLAREFHKLGHDVRLISPRFVKPYLKSDKNDFNDAEAIAEAVTRPTMRFVPVKTPEQLDIQAAHRVRERLVGERTAVINQIRGFLLESGICVRQGRRALREAVPSILEDASNSLSVRMRTLLDRMRHHWLVLEGEIAAVTDEIETIVAQDDNCRRLATIPGIGPIGASAIVAAVGNASAFSRGRDFSAWVGLVPKQRSTGGRPTLLGINKRGNSYIRKTLVHGARSLVHMLRRERHNMGSWITQLEKRVHRNVLVVALANKLARIAWAVLTKKEDYRPGLPVA

SEQ ID NO: 334877 - protein, 400 aa, unidentified
MSGFKGSFDYFVGIDISKDKFDACGITGEEAKLFQIAAAMDRKGFEKLKGHLAAVSVSSVLIGMESTASYHVNLFSYLVAEGYKVILINPLLISNYVKMQLRKTKTDKKDAIVIAQFLLANGDTLIQRATPALISDLRDLSRQRESLVDEMTSLKIEIKQLLNITFPELEHMVGIFTKAILKLLQQYPSANALRDADIGQLSQTLIADSYGHKREAFAKTLVKAARSSIGTNSPAKEMIIKQKIGLLLHLEEALQVITDMLIEMARKLMEEDINIMTSIKGIGDKTAANFLVEMGGDINQFERSGKIIAMAGLDPAVYQSGQHEGRGRITKRGNRHLRRIIWMMTTSVIQYTDIFHAYYQKRRKEGLPYKKAVLATAHKLIRVIYAMLTQRKTFCPQVNS

SEQ ID NO: 334878 - protein, 334 aa, unidentified
MKKRYFMGIDVAKASLDFCLLSKNAALLWRGQLPNEPQAIAQFLAQLQARGYKLAQIHFCCESTGVYGQRLVEALDQGALALSVLNPAQVKFFAISVLRRTKNDKVDAEIIARFCRERQPLATRPLRPIESQLKLLVHERESRVNEQNRERNRAKKDPYQIALPKLIEQQRKSRLKQLAAQIAQFDGAIDSLIASDEALSTQSHLLCSIPGIAKLTAAKLLCELAGKEFQSARQLAAYAGLTPQECRSGYSSYGKTVLCKIGNAFLRKALYLPAAVAKRWCKPLQPWIARLQSRKLHDLAIRGAIMRKLLHIAFGVLAHQQPFNPSLVFIPKNP

SEQ ID NO: 334879 - protein, 414 aa, unidentified
MSLTDTTATTRAVSAGIDWSEADHAVCVVDGDGEPIERVTLAHSKAGIARLVAVLARHQVLAVGIERPDGPVVDALLAAALTVYVIAPAQIKALRRRYGTAGNKDDRFDAYVLADTVRTDRRRLTPLHRDSQATTALRQLCRARKDLITHRIAIANQLRAHLAVALPAAIGLFTAIDSITSRHFLARFTTQEAVDRLTPTRLTKWLSTIPHNHRSNPEVIYQRISQAPRGATGAHATALAGITHAYLAALTAICDQITALTDQITHALAAHPDKDIFTSLPKAGTVRAARLLAEIGDARGRFPTATALACLAGVAPSTRESGKARVVSFRWSADKQLRDAVCDFAGDSHHANPWAADLYAKARARGHDHPHAVRILGRAWLDIIWKCWTTNTPYQPDRHRALQRLLKQDQTAGG

SEQ ID NO: 334880 - protein, 335 aa, unidentified
MTIIRVGLDTSKHVFQVHGVDDNEQSVLSRRLGRTQMAPFFAKLPPTRIGLEACGAAHHWARRLRELGHMVVLLPPQYIKPYVKRGKNDAIDAAAICEAMSRPSMRFVPIKSAERQAALMLLSSRDLLIKQRTMLLNAIRGHAAEFGVTVAKGPQQMGELLPRLVTGEGVPVLAREMLGLLASQLDAVNAKLTAIEARLMAWHRQDQISQCLATIPGIGPIGGVSFALKAPDPKGFRSARHFAAWIGITPREDSTAGKHRPGKLSRQGDEDLRRLLVLGATAVIQQAKRGRASPWLLGLLARKSKKVALALANKMARIVWAMMVSGETYRRPAQA

SEQ ID NO: 334881 - protein, 360 aa, unidentified
MKIQRTSVGLDVHARSVVGCALDGDTGEVFERRLTPDHQDILDWLKSLPGRLAVTYEAGPTGYGLARFLIAAGIMCLVAAPSKLVRPAGDRVKTDARDAAHLARLLHLGQIVEVTIPTVEQESARDLVRARDDCRGDLMTARHRVSKLLLRQGIVYSGGNAWTGAHELWLRRQRFDNPVLQLTYDSALEAMTACLDRRGRLDKVIAEMAVDSEFAPVVARLCCLRGVSTLTGFGLAVEIGDWSRLNGRSIGAYLGLVPTEYSSGGSRSQGGITKTGNGHARRLLVEAAWHHRAPYRVSRTLRRRWDAAPPAARERGHAANRRLHERWEGFDARKKRSTVANTAIARELAGWCWSLAVLRD

SEQ ID NO: 334882 - protein, 404 aa, unidentified
MVDITVSDFMKGRYNLMIYVGIDIAKLNHFASAISSDGKILIEPFKFTNDYDGFYLLLSKLDPLNPDSIIIGLESTAHYGDNLVRFLITRNYKVCVLNPIKTSTMRKNNVRKTKTDKVDTFVIAKTLMMQDSLRFSSLEDLDYIELKELGRFRQKTLKQRTRLKIQLTSYVDQVFPELQYFFKSGLHQKAVYALLKEAPMPKNIASMHMTHLSNLLVKNSRGHFTKERARELRVLAQKSVGLNDSSLSIQITQTITQIELLDSQLFETELEMANLVTCLHSVIMTIPGIGFVNGGMILGEVGDIHRFPAPNKLLAFAGLDPTVYQSGNFQAKRTRMSKRGSKVLRYALMNAAHNVVKNNATFKAYYDAKRAEGRSHYNALGHCAGKLVRVIWKMLTDNVEFNLE

SEQ ID NO: 334883 - protein, 412 aa, unidentified
MNPVVGLDVSKGESQVQAFLDKGQPYRKSFSIKHTLDGLGSLLEFLKDIEKLADGKQPSVILESTGQYHIPVIQFLEEQQYVYIIVNPLISHRARSTNLRKVKTDAIDAYRLCELYYKEELEPYKKRGIQLLNLRNLTRQQETISSTAAQTKLQLQSILDQVFPEYRGVFGNLYSKISLQILSLFPTSEEVLSVSESDLADKIAELCTTRSEKWAKEKAHQLREAALRNPFQNNLYQSHIFNLKMFINIVLQYQEHLSKLAAEIDALAKEIEEYEIIQSIPGIGEKIAATIISEIGEIVRFNHPKKLVAFAGIDPSVYSSGRFTASINRITKRGSSRLRQALFMAVQCGIRDARKQKTSDEIIPRNKRLREFYDKKREEGKPFRVAIIACANKLLHWIYALLKWKMPFQNTA

SEQ ID NO: 334884 - protein, 394 aa, unidentified
MKLIGIDIGKNKHFFCVMDQQTGEIISQPVSFSNDKEGFDFLVQKIKSYPKDSILIGMEDTGHYHFALLKYLLNLQYTVALINPKTTDFNRKMQGGITKNDKLDTINICDVLDTPERKKQYRITKVNSFDLYEQKQLTRHHHNLKEEENVYKNRLQKCIDIVFPEFNKLFNSKYGTVYMNILKTFGSAENIANTDIRTIRKCFEIEGRGNRISLTPERLKECARSSIGISSSAEVIQIKHLTAQIELIEEQLTEIDKKIEEFSIQNNSPILSIPGISHFSGTSILAELGDISNYSKPSQIIKFAGVAPLHYESSQFNAQHTSITKKGSKYLRKTLYQIILPVIRHNPVFNKYYQLKISQGKGHRCAQGHCVRKLLRIIYHLLKTNQQFDPQLLR

SEQ ID NO: 334885 - protein, 321 aa, unidentified
MNKSTIFIGIDISKDTFDIYDPIQGHQQFTNNEKGFKNFLKTLGNNYWCVMEATGCYHQQLALFLFNKAIRVTVMNPLVIKRFIQMKLNQIKTDKSDAKMICQYGQEQKMDLWQPSPKYVEDCKQLQTITQLYFKQSTAIKNKLHTLHTRGFNKGKMISSLKRQLKSIQKEIKLLETEMEQLIKSNQQELYTKLNTIPGIGKKTAILLIVTTNGFKDFQSSKQISSYLGLAPNERSSGSSIRGKTRINKTGNPIVRNHLFLCSFTASIHNPQCKALYERIVAKGKSKKLALIAVCNKLIKQAYGISKSGLPYDKNYVSKLA

SEQ ID NO: 334886 - protein, 421 aa, unidentified
MKEYISLDVHKRYSLGEREEVQTGRAVQQRFEHRPGAIRQYLQGCEAGTEVAVEATGNWYWVVSEIEEAKLVPRLVHPRKAKLMMGMINKTDKLDVHGFNRLQRNRTLPTVWIAPAELRDLRELTRMRMVLSRQRARLKNRLHATLAKYGLEVEGFSDAFGAAARKRLEELVGKLPPQTAWASGLLLEELDQVQEHLERHEQRLKELLKVSPEMRRLKTLPGVGLILSAVIALEVGPVGRFASAQRLASYSGTVPRVSSSGGKTRYGRLRDDVNRYLKWAYMEAANVVALNRRRWRDRDAAGGEGVGRHVSRLYERIRQRKGHAKAVGAVARHLSEASWHVLDREQDYREPRDAKGRPLVQRGPQPALVGGPVDQAGGGAGESGKKESDKRKSDKEKSNKEKSDNAVKAGRAKQGVSAVSS

SEQ ID NO: 334887 - protein, 404 aa, unidentified
MWYVGLDWADTHHDVEVLDEAGKRVGVRRFAHNHQGLNELKQFLLGIAPSPEELACIIETNHGLLITFLLGAGFPVYPVNPKIANQLRKVAGAKTDRIDAHLLAKLGRFELAELRRLEPDSPSVAELKTLSRDQDALIQTQTRLVNQLTACLKEYYPAALQLFAKLQQRSTLLFLQAYPTPQAVASASVEEITATLRASKHTNPTAVAPKIFEEVHRPHLVANEVVVRAKSRLMLSLVKQLLVVIQEIASYDKAIKTLFLTHNDQEIWSSLPGAGKRLAPRLLAEWGDDRSRYADAASVQALAGTAPVPFESGNYAKAHKRFACSKPLRNHLHQFAWQSTRQEAWAASYYQRKRAEGKTHSMAVRALANVWVRIIYRMWVDKTEYQTATFEAAKRGHAPRQHVA

SEQ ID NO: 334888 - protein, 340 aa, unidentified
MTITTVGIDLAKNVFAVHCIDQNGKAVLVKPKVSRAALSELIAGLPPCVIGMEACSGAHYWARLFRQYGHDVRLMAPKFVSPYRMAGKTGKNDAADAIAICEAVQRPHMRFVPVKDESQQAMQCLHRTRQGFIQERTATYNRLRGLISEFGVIAPQSTDALRHVVSDQKETLPVQVRLCIDDLLTHVTNIEEKIAEYDRVLSRVAKTDHRSQQLMELKGVGPTTASALVASIGNAHDFKNGRQLAAWLGLTPSQYSSGGKSKLGRITKAGDAYLRTLLVQGARSVMVGAENRTDPFSRWVCSLIGRRGYWRAVVAIAAKNARLYWASLHYGDDFRLYSTT

SEQ ID NO: 334889 - protein, 448 aa, unidentified
MRKPQVIDDQEHERVSGRVAAVDVAKASGVVCTRLPHPSRPGGRQSAVWTVPATMGAVSELAGRLAADQVEMVTLESTSDYWRIWFYLFEAAGLRVQLVTASQARQLSGRPKTDRLDAMWLARLTENGLLRPSFVPPAAVRVLRHYARARTHLVQDRTRCWQRLEKLLEDALIKVSSVASKLTTLSAQDMIKAMIAGERDPQVLAGLARGRMRAKHGALAEALAGMFTDHHAEIARLLMDQITFLDTRIARLNVLISEQLASISAGWGIDADGTTGPGAGTSGNPVARPAIARLDEIPGITAELAASIISETGLDMTRFPTAGHLVSWAGLCPRTLQSGSRARQGKGTGNTYLRGYLGQAATGAAGTATFLGERHARIARRRGPAKAQVAIARSILVIIWHLLADPQTRYADLGPGHYQHRIDKTRKARSHIRQLEALGYQVTITQAA

SEQ ID NO: 334890 - protein, 342 aa, unidentified
MQITTVGLDIAKHVFQVHGIDAAERVVARKRLRRSQVIAFFAALPPCLVGMEACASAHYWARELTKLGHEVRLMPAKDVKAYVKRNKNDAADAEAICEAVRRPTMRFVQVKSAKQQGRLMQHRARDLLLRQQTQVTNALRAHLAELGIVAAQGREGLKQLLTIIADEKDARLPIDARASLIVLAAQLQALHTMIGSIERRLTVQHRANEASKRLQSIHGIGIIGASAIAATVTDPKAFRSGRDFAAWIGLVPRQDSTGGKQKLGPISKQGDRYLRRILVVGAHSVLRRAKQNPEKYPWLTQLLARRPFKVVAVALANKMARVAWALLASAGRYRQPRLAAAA

SEQ ID NO: 334891 - protein, 350 aa, unidentified
MKIATVGIDLAKNVMQVHGVDERGKTTLKKQIRRDQLLPFFANLAPCLIGMEACGSAHYWARKLEALGHTAKLMAPQFVKPYVKANKNDAADAEAICEAVGRANMRFVPAKDGEQQAVLSLHRARQGFVKARTAQANQIRGLLSEYGIIIPKGIGHIAKRLPEILEDGENDLPGTLRQLLQRLGDHLKELDRQAGELEVHIQLWHRKSDASRKLTAIPGIGPITASALVASVGDARSFDNGRQMAAWMGLVPRQHSSGGKPTLLGISKRGDTYLRTLLIHGARSVVRVAERKVAAGDSWIKRLLGRRNPNIAAVALANKNARTVWALLAHDRSYEADYGMAHRTRICQQA

SEQ ID NO: 334892 - protein, 355 aa, unidentified
MNATTVAVDLAKNVFELVSADEHWRILERARLTRAQFERWFDNRAVTLVIMEACGSAHHWGRTLRARGIEVRLLPAQYVRAYVKRNKTDAADAQALLEAARATDLKPVAVKSIEQQALQGLHRLRSGWMATRTRRINTLRGFCREFGLEVRVGAVQGLAAIARLIADDRSPIPAMLRTPMRLALEEIRLMEARIEQLERELAQLARHSPACEALESVPGIGLLTSTAMVAAVRDPGSFDSGRRYASFFGLTPREYSSGQHRYLGRISKRGDRYIRMLLTHGARSVLRAATAARRQGRKLDRLRTWALQVQERTNHNKATCALANKLARIAWAVWVKHEKFKSTEAQPTLAAETTA

SEQ ID NO: 334893 - protein, 412 aa, unidentified
MQDILTCVMGLDVHRDIIVACLVKGAVDAEPEAETRTFSTLIPEMQKLRDWVIEAECRNIAMESTGIYWQPIYEMLESCFDGEISILVVNARHMKNVPGRKTDMKDAQWIATLLRAGLLKGSFIPDKTFRELRHLTRYRKSVVHDITAQKNRIDKFLQSSGFRFTAFLSDTFGASGRNIIRHLIERGSIDREALDKCLKTKTRNRIDEILVALNGSLSVHQRRFLNIVFLHLEDLEAHKHTIEDEITEEVLKHTDALNLLCSIPGIDVTAAAAIVAEIGTDMSAFPDSQHICSWAGLSPGNNESAGKRKSVHINKGNPYLKSMLCETAWIMAFHRKLYLSGWYWKVKQRKGAKRATIALARKVLSIIYTMLKTGTPYSEECFEQRRQRCERKRANRMVNELQKLGYTVVAPD

SEQ ID NO: 334894 - protein, 340 aa, unidentified
MEITTIGLDLAKNVFQAHGATAAGAVGFRKKLRREQVLAFFSAQLHCLVAMEACASSHFWAREIGKLGHEVRLIPPAYVKPFVKRQKNDAADAEAICEAAQRPTMRFVAVKSEEKQASAVIFKTRDLLVAQRTQIINALRGHLGEYGFIAPQGVTYVDRLIAEVESNSSSAPEAARACLLRLVDILRELQAEIAALDAEVAVRAKRDAVAKRLMTIPGIGPVIATAIEALAPPAETFRSGRDFAAWIGLTPIQKSTGGKPRMGRTSRMGERTLRRLLIIACSGVVRWAKRKGTPTNLWLARMLTRKPPMLVIVALANKTARVAWAVMTRGEVYRAPPSVA

SEQ ID NO: 334895 - protein, 435 aa, unidentified
MEEVTDEPLYRDRVCGIDIGKVAMVATIRVPSDKDPARRAAETRTFGTTKREVLALADWLRAWQVPAVVMEATGDYWKGPFYRLEAEGLECVLADAKQVKNLPGRPKRDPADSRWLAACFERGAITPCFVATPEFRIIRLHTRYRRDLTDERTREKNRAEKLLESAAIKLSSVLTDLHGVTGRDIMSHLIAGERNPKVLAQLARAAARRKISQLEEAVEGAEFFTAEHAALLAKVLQRIDRLTADIGDLSEVIERLLAPYEEQLQQAESMPGWGRRAAQDTIAETGVDMTRFRTGAHLSSWAGRAPLDHQSGKRAGRAKAKKGNRYLGAITGETAVAAGRTQTREGARHRRLARRRGTAKACVATGNTQLKVYHKLLSNPGMRHQDLGPDYYERQRGVRRQVAHHVGKLGALGFEVTLCRIPEPGPDTTGPAQAA

SEQ ID NO: 334896 - protein, 324 aa, unidentified
MFYLGIDVAKAKIDCCLILENSANKKKTKTFSNTPKGFEQLQTWLKQHAATSTQTIILMEATSIYHELLVKYLFDAGYQVCVTNPARARYFAQSMSKLNKTDKVDSEVLARFAMTADLHFWQPLPKHIQLLNALLDRRAILCEDLQREKNRLEKAESTFTMEPVLQSIHKSIEQLNKHIQGIDQQIDDHINQNSDLKNDKELLSSIPAIADRTSLLMLSFLRSHTFERASQAAAFVGLVPIQKQSGSSIHGRSRLSKAGSSKIRAGLYMAAIVATRHNPHIRAMNERLLANGKTKMIAIGAAMRKLIHLCYGVLKHQQPYQVNY

SEQ ID NO: 334897 - protein, 400 aa, unidentified
MMTPDDIDVWVGLDVGKSAHHAHALDHDGNTLYDKPLKQDEKAIRTMLGKLSKHGRVLLVVDQPNTIGSLPLTVARNMGIAVACLPGTAMRRTAQLLPGDAKTDRRDAHVIAWAALKLPETLRDAGPDDETLAALKLLAGHDEDLAHESTRHVNRLRSLLLQTHPAFERALKGERITRDATLALLERYGGPMGVKRAGIEDVKDWAKSNGLRAGRIIDDMFKAIGEQTVTVPGTLMAETIIPSIAHDIKTIRDRRREVGRQVEKLLEDHPLLTVLTSMPGIGVRTASNILLGIGGDIANFKSSAHLAAYAGISPVTGQSGTSIKGERPSRRGNKRLKNALWQTAFVASTKHPPSVAYYKRKREQGKHHNAAIICLARRRCDVIYSMLKNGTLYQEPALVA

SEQ ID NO: 334898 - protein, 412 aa, unidentified
MQTLIEHGCGLDVHQATVVACLLIVSRDGRVGKQMRTFGTTTRELLSLRQWLLSEGCTHVAMESTGVYWKPVYAILEGALEIVVANAQHVKKVPGRKSDVKDAEWLADLLCHGLLRSSFVPPKPIRELRDLTRYRRKLVESQTAERNRLLKLLETTNIKLASVACDVFGVSGQLMLKALLEGKASPREMAQLAKRRLRSKIPELELALEGKLEQHHRFLLRLQLDRLQAVEQDLTTLEQHIQEKLQPYAAQLALLQEIPGVDWTLAASIIAELGVDMSVFQSVSQLASWAGVCPGTNESAGKRKSSRIPKGNVYLKTGLVEAANAASRAKGTYLRDKFYRLKARRGYKRATIAVAHKILVAIYHMLSQQVSYNDLGDLYLDKLNKNHLTHNLIHRLERLGYVVTLTLQQQAA

SEQ ID NO: 334899 - protein, 345 aa, unidentified
MKIVGCDLHTRYQQIAMLDQETGELIERRLEHESGEARAFYAALSSPVRVGIEATGHTRWFERMLAELGHELWIGDAAQIRASVVRKQKTDARDAAHLLELLLSERFPRIWRPTMAERDLRQLVWHRQKLVWMRNAVGNQLHALAMGEGVCRKKKLFTKKGRAELESLGLGVWASYRRQELLTMLDRFDGSLGELDRAVAEQAEQNAAAVLLMTHPGVGPVTSLAFVLTLGPVERFERSKQVVSYLGLNPREHSSGGRQRLGAISKQGNPMMRSLLVEAGHTAARLDGELRQDYQRLKLRRGSGVAKVAIARKLVVRMYWMLRGQASYAQLVRMQGSPWATLVTE

SEQ ID NO: 334900 - protein, 360 aa, unidentified
MDKQFYYEVGLDLHKNYSQMAVVNPKGTTCNQVKIPNEPQMLDIFFCSIDKPFRVTFESTRNYYWLADYLNDKKIPFVMADPYLNRMIATVHAKNDKYDAQVLVNLTRTNLVAKCYVPEKNTRHLRELIRHRASLIRMRTLAKNKVQTLLCKYNFKAPYHYVFGTKGRTWLENQAFPPLVKLLLGEKLSVIESIDTRVQFIYERIKVRVLKHPWYRILTSIPGIGLIHAATLIAEIADISRFRSPNSLVRYTGLFVNTFASADVIHSGHINKQSNKYIRTALVEAVPHVAGKDPGLGLFFEYLKAKRGHAIASVAVARKLCRSIYFMLKKNEPYRYRRIQKPWARDYARITTRTLSSGRL

SEQ ID NO: 334901 - protein, 363 aa, unidentified
MVELSENFNPIRQEGLMERAKVSTEYCCGVDLHARTMYVTVVNRAGEVLVRQNMPNHFGQFVRVLRPFLPSVSVGVESTYNWYWLADGCHQADISFYLGHALYMKAIHSGKKKNDRIDSQTIADLLRCGFFPVAYPYPREMRATRDLLRRRHRYVSLRAEAYTHIQGTFSQHAMLGITGTDTKRKTTRRELPGEFEEPSLSMSVTCDLDMVDTLDAIITQIEQQIRALAKHHDNRALSILMSVPGVGEMIALTILYEMHTPARFPSAQKLSSYARLVKVDHTSDGKWAGEGNPKIGNPHLKWAFTEIVQHAPRQSERLSRYYDKLKSRHRPGKARIVFAHKFAVAIYHMLKNGQAFDEKRFLS

SEQ ID NO: 334902 - protein, 413 aa, unidentified
MQLLYRRCCGLDIHKAAISVCVLIQREGREPEYRKRSFESFTDDLARLRRWLAQCKVTHLAMESTGVYWKPVWNVLEEGPWEMLLINPQHFHGIPGEKTDPKDSRWIAELLAHGLLRPSFVPPQSIRQLRDLTRYRVHLKQDRNRIHNRIHKQLEDANIKLDCVASDILGMSGRAMINALIEGRNGPVYIADHAARGHLRKKVPELARALKGRITAHHRLMLAELVRDLDATDEAIRRIEATLVERTLPYQDIVERLATIPGVDLITAWTIIAEIGTDMSRFGDADHLVSWAGLCPGLNESGGKRRSGRTRKGDRYLKRALCQTAWVISHTKDNYLTALFYRLAGRIGIKKATLAVAHQVLRIVFHIIRDGAVYRELGGNYFDRLHPERTTKRLVRRLEQLGHQVSLQPKNAG

SEQ ID NO: 334903 - protein, 384 aa, unidentified
MNNDTIIFIGLDTHKSFTQVSVLKDNRGEVPITYGRIDSSKSAFIKLAQKLQSQYPKATLHFIYEAGPCGYWIYRLLTSLGHHCFIVAPSLIPKKPGDKVKTDKRDAAKLAKLFRADELNPIYVPEAEDEAIRDLSRAREVAMKDLKDAKMQLKGLLLRNNIQTEVKDNWSKKHLRWLTALVLPHHSQQIVLQEMIQTISERIARLQRLDNELLHQAKQWRYYPVVKAIQAMRGVRLLIALGTIAELGDLRRFDHPRKLMAYLGLVPSESSSGQRRKQGPITKCGNSRARRLLVEGAHTYKYKPNISSELQIRQEGLPKEIIDIAWLAQLRLCRRYQRLMFLGKHRSVVVTAIAREMVAFIWAIAREVVVTNIDPKTRLARLPA

SEQ ID NO: 334904 - protein, 344 aa, unidentified
MKKKEQEQHYEYYVGIDVSKLTIDVSCLQATGEVNYHQFTNNTRGYKSLERWLKAHKALDYSQTLYCMEDTGMYTRQLVSWLLQNQAKVWVESPLQIKRSMGMTRGKNDKVDSLRIASYAMSNSEKARLMILTSRTLIRLKDLISSRDRVLKSYQSIRITIKELEQVDKQAGVELRKLNQKALKGLLASKEAIEERISELLTSEHDLQRQYELITSVKGVGKILATELLIYTNGFSRMKNVKQLACYCGVAPFEHSSGTSVKGRTGTSNFANMKLKSTLHMAAISSIRNNGELKTYYERKVAEGKHKMNVINAVRNKLLQRIVAVVKRGTPYQENFLKKDLVLS

SEQ ID NO: 334905 - protein, 428 aa, unidentified
MTTDSPLELAAAVGIDWADEHHDLALQVMATGDREELRLPHTPEALQRWLGQLEERFGGQRIGVAVETSRGPLVHALLEAPFIVLYPVNPRSLRRFREAFSPSGAKDDAPDARLLLELVLKHREQLRPWQPEEPVTRLLGRLVEQRRTAVELRTQLIQQLQAALKEYFPQALEWAGTDLATPMASHFLQRWPTLAKLQRARPTTVQRFYTRHGCRRRDRIEARLSAISTASPLTRDPAILESGALHVHLLTTQLLALAPSIARLDAVIAKQFGQHPDAEIFASLPGAGAALAPRLLVALGTDRTRFPTAAHVQEHTGIAPITIRSGRQHLVRRRWATSVFLRQTFHEFAHHSIRHTPWAKAFYAQQRRRGCPHHTAVRALAFKWIRIIWRCWQDHTPYDNARYVRALHLRHSPVSASLTTSHTADAAA

SEQ ID NO: 334906 - protein, 380 aa, unidentified
MSKEKRMVNWERKIVSVGIDLHTTQFTVCAITPAGDVLKEEQYQTTDEGYESFISWCHEVEKEHEVAIEMAIETTGSARYFRNMMQNEGFHVIVINTLHFKVVVQSSKKTDWHDAELIARYLSKDMLPESYLCDQETEELRKLLSERSDLITVIVKTKNKIHNMLRGYGISTTGAQFQSQKKRQQLLNDLKDHKLYTEHAAKTLEMLLSTLSVLEKQVNEIELLIDEFIENDEVVKRLETVPGIGKITASTISAYIGDIDRFETYKQFAAYCGLTPFVRFSNNKGFTGHITKNGPTELRTAMVQAVMGMLRLQKSIGYLNLISKYKKMKRVKGSGVSIIAFARKLSRIIFVMLKTGTDFDPHRLMDGGYDDPDKKTQEVC

SEQ ID NO: 334907 - protein, 480 aa, unidentified
MKQRDKSKTATGRATQPSWQEMNRKQRREMVRKIQSEELRLDVIHPDAAGIDIGNESHYVAVPPSRDSQPVRRFGCTTAELKVMAGWLHQCGIRTIAMQSTGVYWIAVYDILEEAGFEVYLVNARETKNLPGRKTDVQESQWLMKLHTYGLLRNSFRPPQEIRTMRTYWRQRNDSVQAGARHIQRIQKALTQMNIQLANVLSDVSGMTGQAIIKKILAGERDPHKLAELRDPRVKASEEQVERSLEGHWQEDLLFVLKQEQDGYEFCQGQMAECDRRLDQYLQQQKDRSQGASLPEEKRKERLKKKKGNKPRFDLRTGLFRMAGVDLTQIDCIDVMTATTILSEAGSDMSKWETEHHFVSWLRLCPDNRISGNKIIGKGRLPTSNRITNALKMAASTLRTSNTYLGAQFRRLRTKLGAPIAIKAMAAKLARLIYRMLRYGMKYVDQGAEFYEVQHRKLQIKHLKSKAAKLGFQIVQAPAA

SEQ ID NO: 334908 - protein, 353 aa, unidentified
MRTYYVGMDVHQASIVIAVLNGAGKLVTEAIIETGAETVRNFIKQFRGQVYVTFEEGTQANWLYEVLRGVVTEVMVCDPRRNKLLQSGNKSDRVDARKLAELLRHGSLRAVYHGDKGTRLLKELVRNYDCLVSDTTRVMLRLKAIFRGRAIACAGHEVYRKDRRPKWLAKLKEPGAKQRASCLYEQLEMLQRLRHEAKRAMIKEARRHPAYPLLMSVPLLGPISVAQIIAVVQTPFRFRNKRQFWTYVGLAVVTHTSAEYVLVDGLVRRSRRPVATRGLNRNHNHLLKKVFKTAAKSACAREPFKAAYEARVTQGMDPSLARLTIARKLCAVTLSIWKRGERFSPERMKQQVA

SEQ ID NO: 334909 - protein, 339 aa, unidentified
MNSMAVGVDIAKTVFQVHYIDQETGEIVNKQIKRAKFLEFFANRAPCLVGMEACGGAHHWARQLTKMGHQVKLMPAEFVKAFNIRNKNDAADAQAIWRAVQQPSKPVAVKTEMQQALLALHRMREQLVKFRTMQINALRGLLTEYGEVMGKGRTALDKAIPEVLARVAERLPAVLIDTMREQWNGLTALDEQIAGIERRMREWKKDDPAVKAISEIPGVGLLTATAAVAMMGDPKAFRSGREFAAWAGLVPRQTGSGGKINLHGISKMGDTYLRKLLIHGARSVLTHAKEPGPWIDQISKRRPPNVVTVALANKMARTIWALLAHNRPYQKDHLSVKPA

SEQ ID NO: 334910 - protein, 446 aa, unidentified
MVATGSRELNRKQRKELARRLRAQDPGLDIVHPHAAGIDVGNSSHYVAVRPDRDPDSVRRFECFTADLHRLADWLQQCGVTTVAMQSTGVYWIALYEILDARGLDVYLVNARHTKNLPGRKTDVQESQWLLKLHTYGLLRNSFHPSAAIRVVRTYWRQRGDHVQAVSTCIQRMQKVLTQMNIQLANVISDLSGWTGQRIVRAILEGERDPATLAALSHHGIHATRDTIAKSLEGTWQPDLVFVLQQEVAMYDAYQQRIAECDHELEQHLKGFADKVADPAADGEPSSTTPRTGLRSGPKRRRKAGSHAPQFDLGRELHRISGVDLTRIDGIDVGVAQTVISEVGLDMTRWKTEAHFASWLGLCPDNRITGGKVIRKGTRHVVNRAATALRLAATTLLRSQSYLGAQYRRLRARLGAPKAITAMAHKLARLVYRMLKWGHEYVDKVL

SEQ ID NO: 334911 - protein, 309 aa, unidentified
MLSSVGIDTAKATLEICIKPQKIRFEVANNSAGFEALLERLKDFNISRVLIEATGGYEKDVLIALASAGLETICINPARARKFADAMGKKAKTDKIDAEVLADFAAHLSAPQGQPVSPEREELRELVKQRAQFVQSRDDYKRRRQQCRSATVMAHFDEHIEQLKVLIKRLDEEIDQAMVQLDDTRARQLLAVTGIGRVTAANLLASLPELGQLDRRQIAALVGVAPYNNDSGSHRGHRQIWGGRAHVRRVLYMSSWIIIRHNTEFKARYEALRERGKCAKVALVACMRVLIVRLNAMLRDNTPWREQTA

SEQ ID NO: 334912 - protein, 429 aa, unidentified
MQNESTPGARGPVFCGVDTHADSHWLYVLDWRGRRVLSRRFPADAAGYEALAGAIAAAGEPACVAMEGTSSYGAGLTRHLASLGMPVREALSPAGMQRRRPGQGKCDEADAERAARAAMSGSRLGTPKSQDGWVDGVRCMLAARSGAVKARTSAINTARSLLTTAPEGLRSRFRGMGGPRLMEELPSVRAEGALGAALGALADLWAAARDAALDMELAIEASLEENCPALLAMYGCGPVSAAKLAVAAGDNPGRLRSEASFAAICGACPIPASSGKTVRHRLNRGGDRQANSALHEIARQRVMRDPETAEYAERARGRGKSDREVMRCLKRYVAREAYRALMRPHEIRRPEDASELVAARRAARVSQVRAASILGTSEKYISMLERGQRELKPIRRAYEAWVEAGLPLDWDRQAFEAERKMDSKKHLAK

SEQ ID NO: 334913 - protein, 351 aa, unidentified
MKLEPTAQPNLYIGIDIHKRSWKVHCATDLFGGKSFAMPPKPEVLYEYVAKHFPDHQVTTAYEAGCCGYYAHRSFEAYGWHSLVVNPADIYRKGKERFTKTDKIDAQLISRELKDGRLESIHVPHVEREQLRSLFRRRNDLVKDYRRIKSLIKMQLLYFGIAIPEEFDNDHWSHKFRGWVDEVVFAYPSARETLDSRMRSFRFIDQELRDVSTKMRAYCRRHYKKDYYLLKSIPGIGGIVACGIICELGDLRRFNSIKHLAGYVGLAPGIHQSGDNQKSTGITMRAHRLMRSYFIEASWQAIRTDPIMQAYYRRHLGKNVKSIIIKVARKLLSRTLAVIKTETPYAIGIIE

SEQ ID NO: 334914 - protein, 443 aa, unidentified
MTRKNQKRFEVVHPDCAAVDVGGSEHLAAVDPAKCADPVQRFSAFTDDLHAMADWFSSMGVKVVAMEATGVYWIPLFEILDRRGFEVYLVNSRATRQITGRKSDVLDCQWILQLMTHGLLRGAFRPSDEVCSLRSLVRQRANKVRDQAKSLNRMQKALVQMNIQLAQVISNIAGVTGMSILRAIVEGERSPDVLARLRDKRVKADEATVARSLRGNWRAEHLHALSQELAAYDFLEKQIGECDQAIADALDRLPVLQSDVTTPTKTLRSMHRSNEQQLALHQALNKVMGVDLTAIPTIGIDTALVLASELGADLSRFPTSQHFCSWLGLAPPTRISGGKPLPGKSAKVINRSAQALKQAASIARNDKSFIGASHRARLTRMDTCCAIKATAHQLARLIYAMLTKGQPYVEKGIEEFEERSRDRQLRALERKARKLGLQLVKAA

SEQ ID NO: 334915 - protein, 403 aa, unidentified
MNMNAVGIDVSKGKSMVAILRPYGEIVSSPFEIKHTSSNIQSLIAQIRSIDGESRIVMEHTGRYYEPLARELSLAGLFVTAVNPKLIKDFGAHSLRKVKSDKADAVKIARYTLDSWTELKQYSLMDELRNQLKTMNRQFGFYMKHKTAMKNNLIGILDQTYPGVNTYFDSPAREDGSQKWVDFATTYWHVDCVRKLSLNAFVDHYQKWCKRRKYNFSKDKAEEIYGAAKELVPILPKDDLTKLIVKQSIEQLNTASRTVEELRTLMNDTAAKLPEYPVVMGMKGVGPSLGPQLMAEIGDVTRFTHKGAITAFAGVDPGVNESGTYEQKSVPTSKRGSSSLRKTLFQVMDCLIKTKPQDDPVYAFIDKKRAQGKPYYVYMTAGANKFLRIYYGRVKEYLMSLPE

SEQ ID NO: 334916 - protein, 369 aa, unidentified
MLYAGLDLSRKRLDFHLLDAEGAIVDVGASPPDADGLRGLSERLNRYGEPIRAAIESMNGARFVHDRLELAGWQVEIADAQKVKGLAPLACKTDRIDARVLAELARRDLVPAIWLPDPRVRAERERARWRLHLVRHRSSLKQRVHAVLLTHGKPCPVSDLFGLRGRQLLARLGLPEPWQGTIEASLRLIDELDREISECERELRRLGADHRYVPLLCTAPGISWVLAYTIAAELGDIGRFATPRKLAGYSGLCPRVYQSGERDLRGPLSKQGPRYLRWALVEAATHACTHPVYRDRYQQTKARIGKQRGAKVAQVDLARRLSEAIWHMLTRDQPFAPKGATDPLAASRSLSSCATGANPNRPCPLNRRR

SEQ ID NO: 334917 - protein, 422 aa, unidentified
MLEQTQDEQEIIDRVAALDIGKAELVCCVRVPDPKGGPRRVQEVTTYSTMTRSLQVMADRLMDLGVTRVVMEATSSYWKPPFYLLEAHGFQTWLVNAKDVKHLPGRPKTDRLDAVWLCKVAERQMLRPSFVPPIPIRRLRDLTRYRMSLVSDQSAEKNRVEKLLEDAQLKLSVVASDIFGVSGRDMMAALIGGQRNPKVLAQMAWTRMRAKIPQLEEAFVAHFTDHHAFLLTKMLARIDALSLDIADLDTKIEARLAPFADAVTRLDEIPGVGATTAAVIIAEVGDDMTRFPTPAHLSSWARFAPGVKESAGRKKGTGATGHGDRYLARVLGEAAVSAAKTNTFLGDRYRRIARRRGKKKAIVAVGRSILVIVWYLLSDPETRYHDLGSGYYDSRINPERKKRNHIREPEALGYKVTLQPAA

SEQ ID NO: 334918 - protein, 403 aa, unidentified
MGVDWGDRLHQVYVGDEDGKKVREMKLQESPQGLAEIGRWLDEKRAEGFELWAAIEKPQGRIVDFLLDHGVEVYPVNPKAVDRVRDRYRMSGSKSDAFDAYVLAEFLRTDQAHLRALRPSSEKAQELKMLSRDQRRVVRHKTRFLNQLTTTLKEYYARPLEVFEDLETEIALDFLQRYPTPAHLSALTRKQFNRFATKQHHLSKQRCEELWEKLNKPQLAVPEHVVRAKAQLVEVLIEQLRASIKAVKIYNHRVESFFASSPAAQFAKTLPGGKSGTLVAAVWAELGDAQGRWESSRHLQAEAGAVPVTKASGKSRVVHFRFACNKHLRYTMYWFSFVSLNHSEWAKLYYRGQRDNGHSHHQALRALGAKWLKIIFVMWRDHKPYDENYHLANIARQKMRQAA

SEQ ID NO: 334919 - protein, 343 aa, unidentified
MQIHSVGIDLGKTTFHLVALGAHGKVLLKKKFTQRQLITFTANLQTSLVGMEACSGAHFLGRALRAQGHEVKLIPAQFVKPFVKSNKNDFLDAEAIAEAVTRENMRFVPIKTDDQLDLQALHRVRERLMARRTSVINQIRAFLLERGIVFAKSPIRLREAIPDVLENANENLTPRMRNLVAMLWSEWKDLELQIVEMNDEVERIASSDDACRRLRQIPGIGPLVATAIVASIGNGAAFHKGREFAAWLGLLPKQHSTGGKARLSGISKRGNRYLRKILVHGARAVVLRSKRDRIAMGAWITSLEMRAPRNVLIVAMANKLARIAWAVLSTGQDYRAVPDTVAA

SEQ ID NO: 334920 - protein, 447 aa, unidentified
MRIVYQRCCGMDVHKDSITACVLLIDEEGEFRTESRRFGTMTRSLKEMSGWLASLGVEAIAMEASGVYWKPVWNILEAEKKFALLLVNAQHVKRVPGRKTDQKDSEWIGELLQHGLLRASFVPPVEIRQLRDLTRMRARIRQTLASFANRIQKVLEDANLKLGSVASDVLGVSGRHMLKALMAGEQDPQKLANLAQGHLRKKIEPLQLALQGHFTDHHRLQLKLLLEFVEFGEQQLSHLDSEIQLLLSKVQGEPGLPGPAEGTVAEAEASPPQVTSPLQTAVELWDSIPGIDQLAATTLVAEIGANMDQFPSAHDLASWAGLCPGNDESAGKRRSGKTRKGSVWLRRALCQAAWSASRTKNTYLAAQYHRLIVRKGKKRTIVAVAHSMLIIAYYLLKRRCTYQDLGPDYFNLLNEEAITQRLVKKLTGLGYHVTLQPARTQAVSQAA

SEQ ID NO: 334921 - protein, 421 aa, unidentified
MSYKVAAIDIHKKVLMVVVASAAEEVGEATGEAIEFDCRRFGTGSSQRQHLVSWMREQGATEIVMESTAQYWKPIWMDLEPHFLKLHLAQAHSNRAPRGRKNDFRDAKRLARRLLADELILSFVPEAEQRMWRTLTRSKHQLTRERVRLQSQLEALLEETRIKLSSVISDLLGASGRRILAALAQGEKDPAKLAELGDDRLKCSKQELTDALTGSPEPLHLEVLKLYLERLQLLDQQIQSLDVLVAKELRKHQDAVLRIAEMPGFGVDSAQQIIAEIGVDATAFPTAAQFCSWAGTCPGRHESAEQNHSSRSPKGNRFVRRILTQAAQAAVKKKGSHFQSLFRRLLLKLGYKGAIWAIAHRLGRLVWKILHDEVRYVEQGQETNPKARKRRAQKLTQALRNLGYQVTLTPIQSTPIQEQQG

SEQ ID NO: 334922 - protein, 357 aa, unidentified
METQNTKTDFSNQTILTGIDVHKKQWKVTLRGCRMELKTFSMNASAEELYKYLRRNYPGAKYKSVYEAGFSGFGIHRELRQLGVENIVVNPGDIPTRNKEREYKTDKIDSRKLARELENGTIISIYIPNEQQEELRSLSRLRQQLVKDQTRIKNRIKGLLLYYGKKIPDNCEILHWSGNFIKYLEGIEFHTETGKQCLGTYIADLRDKREKISQTLKKLRQAIKYTCHQKTIENLCTIPGISFITAITLYAELMDIKRFNNMDRLCSYVGLTPSVSSTADHTVVRGLTDRHNRYLRNLLIESAWTAARTDPALTEKFGKLLVRMSKQKAIIRIAKKLLCRMKFVWQNEKPYQFNKKD

SEQ ID NO: 334923 - protein, 343 aa, unidentified
MLYTGLDLHRSFSYITTMNEKGEIVGQKKLPSNGEVVEFLKEFDDTMEVAIEATPSWYWLYDHLEDEGFKVKLSHPLKTKAIAYAKVKTDKVDSATLAHLLRSDLLPLSYVPEKPVRLNRELLRYRARLVRVQTRIKNNIHTILAKNNVSHSYSDLFGKAGMAFLYSLSLPENYKIALEGYLSVLETLRHEIRLASKRVQALAEENQDAVLLMTIPGVGYYSALMIKSEIGDVKRFPSAKQLCSYAGLVPSTYASGNTCYHGHITKQGSRWLRWILIEAAIHAVKRPGPLRRFYFKVERKKGGKVAKVATARKLLEWIYHMMRDNKSFKEVERLAELQVRVSP

SEQ ID NO: 334924 - protein, 345 aa, unidentified
MIIGCDFHPSWQQIAWLDSETGETGERKLVHASGDAKAFYQQLAAPARIGMEATGNSQWFIELVQDLGHEIWIGDAAQIRASYVRKQKTDKRDAAHILKLVVEGRFPRLWTPDREQRDLRQLVLHRHKLVEIRSRVKNELQHLSLNKGMQRKAKLWSQAGQKLLRELPLKPWAACRREDLLGLLALLNQQIGTLDQAVQQAADQHPQAKLLMTQPGVGPNTALAFVLTIGDVSRFPRSQQVASYVGLIPREESSGGRQKLGAISKQGNRLLRSLLVEAAQIAVRYDPGLRKQYLHRCHQKPKGVAKVAAARKLAVRLYWMLRTEKPYPEIVRIESSPRVPLVGAS

SEQ ID NO: 334925 - protein, 312 aa, unidentified
MYYIGIDVSKKDLSVFDGKKDLKFTNKEGLKSFKKYLKKKYNLSEIAIIFEPTGVYSLYLKEFCAENSIKAYIINPKKSHNFTRALGKRSKTDKIDARILYQFHKNIDLKDIKVPKIDQQAKTLASYLVSYEFVLKQRISLSNHLESLRNKSLISLMKKDLKRAKMLEDKLFHDIKEYVSKNQNLREDYKRLLTISGVGEKTAIALLTLFKTYQGTNRAQITALAGLDPVKRESGTSVKDKAKISKNGKGIYRKIFYLPTICATVHNQKIRVFYQRLLTHHKTKKLAVIASMRKILLIAHAMYRDKTEYIAI

SEQ ID NO: 334926 - protein, 412 aa, unidentified
MPKIVYPVCCGIDVHKSFVVACVATTDKNLVTTYSKQKHFSTFTSGLRQLAKWLEDNNCRDVCMESTGKYWIPVWNILEATCNLVLAHPKYLKAIKGKKTDRRDAKWIADIFKHDLLNGSFIPPPDIRQLRDLVRYHVKLTSCTTGEKNRALNCLTVSNIKLDDVFSDVFGKSATAITTQLMNHPGEAFYVAPFVDRRCKTPADEIQAAVDGIMCAQQAEKLRIIRSHMDALGLCKANLESEILAVAEKYLPQINLVTTAPGFKTFSAIATVGEIGVDMSVFETSRHLCSWAGLAPQNDQSAGKKKTTRISRAGVYIKPILVQCALAAIKSNKHPEVRNRYQAIKKRRGHQKAIIAIARMLLTAIYNILKKNEPYNAELYLQSDKPPVQRKVSVEQAIFILQRQGYLVTASS

SEQ ID NO: 334927 - protein, 380 aa, unidentified
MARTEPQRKKEPAAMTSVTGTRESIYLALDVHKNSITAGALEPGATSAVMTRIGPDDAAVRRLIGKFSDRKQLKVCYEAGPTGFALARALTKWGVDCEVIAPSRIPKQSGDRVKTDKRDAATLAVLHRAGMLTAIRVPTEGEEALRDLCRARQDAYDDLKRVRRRLLAFLLRHGQVYRTSSTWTREHQRWLNQVRVDEPAARAAFEHYLAVERLRETEVEAMTRELLGWVDREPFATSVHRLAAYRGVAYISALGITAEIGEWSRFHRATGFMSFTGLVPSEHSSGDRRHQGEITKAGNVYVRTHLIESAWQYRHHPVVGAELRRRHEHVGPDTIARSWKAQQRLCGRYRRMNARLVNPNIIITAIARELGGFLWAEMTS

SEQ ID NO: 334928 - protein, 413 aa, unidentified
MDVVHPRCAGIDCSKKDAKVCVRIAGQGRKRASSTVTTWGATTSQILALREHLVAEKVTCVVIESTSDYWKPFYYLLDDELDMMLVNASRVRNVPGRKSDVSDAAWLADLGAHGLVTASLVPPPPIRALRDLTRARTHITRERSREVLRLEKLLEDAGIKLSSVATDITGVSGRAMLEALIAGQSEPAVIADLAKRRLRRKIPDLTEALVGRFTEHHAFMARLFLDRIDAHSADIGRLDARIEEAMAPFRLARELLMSIPGFSTKTAEVFIAETGGDMNVFPSAGHLASWAGVSPGSNESAGRIKSTKTRPGNPYLKGALGVSAMSAARSKNTFFFAKYQRIRSRRGPMRALVAVEHALIITAWNMLTDGAFYRELGADYYTVRKPAKAKARAVSQLEALGYTVTLTPLAETA

SEQ ID NO: 334929 - protein, 436 aa, unidentified
MDIVHPRVAGLDVHKKIVWVAVRLPGEAPGERRVVVKSFKTFWRSLQKMAAWLAELGVTDAALESTGVYWWPVYHALAQAGTEVCVCNAAHMRNVPGRKRDISDCKWIAELHEYGLLRPSFIPADEVAGLRQRTRYRKKLIQQRSSEGQRLSKVLEDAGIKIDSVASKLLIKSGRKMIAALIAGERNPGRLADLAEGVLRRKTDELQMACDGRFTDSHGQMCRLHLDAYDHLTAKIAELDQLVAAAAAPFAPVIARLVTIPGIGQRTAEVIVAETGADMTRFATPARLAAWAGLAPGDNESAGKRKKAPTRKGDQHLRTAMAESAWATWRTATRPGARFRRLARRFGKGNENKAAVAVAHTLLCIAWAVMKYDGDYADAGADYYERRDQRNREHLVRYHQHALARLGFQVTLATPGDGSPPPGTDPPPATTQGQAA

SEQ ID NO: 334930 - protein, 337 aa, unidentified
MKVTLIGIDLAKSIFQVCGTDMHGKSQFNRSLRREKLLGFLLQHPEVTIAMEACSGSNYWGRELKQRGFQVMLIPPQHVKPFVKGNKNDRNDAFAITEAARRPGLRCVEPRSIVQTDMIQVHRLRERLVGERTSLINQLRGFMNEFGIVVSRGKQALFNALPGVLDNQNNGLSPSARRLYRVMLGQWRYLDDEIKQLDKTIAAQAKADESARRLMTIKGVSEKIATAAIAHAGNGAAYKNGRHFSANLGLVPKEHSSGGHQKLGSISKRGNRYLRRLLVQGAWSVMRNAARNQDRLSRWACEVAARNGQKKAVIAVANKLARILWSMLYHRTEYRAG

SEQ ID NO: 334931 - protein, 381 aa, unidentified
MTCKELSGAGLGPTPDNMNKCLHTELSSHEGTRSEFNPSKTVIKLGIDVHQEFYVVVCQEGGGNPKPAQRFKKEAFLCWAAKLKQKSGAEIHAVYEACGFGFGLQRQLAALGIACHVVCPQKLDERNKRVKTDGLDAKALCLKLDRFVEGNREALALVRVPSEEEEQLRAIHRQREQLVKARKQVEAQGRSLLVNHGIEPVQRWWKRRAFAALCVPEWMKQLLRNSQPILLGLEEKIGALTVQLQTAAAPNQPRGLGMMTSVVIDREIGNWSRFKNRRQVGSYTGLCPGEDSSGNTRLQSCVTKHGNPRLRAALVELAWRLVRFQPDYRPVVKWRQVLAKGALATGAARKKAIVAVARQLAVDLWRIRTGRLQPEQLGLSI

SEQ ID NO: 334932 - protein, 414 aa, unidentified
MLKIVYRVCCGMDVHKSFVVACIAATNEQGVTTYKSKRFSTFTGDLRRCAAWLAENNCKDVCMKSTGKYWIPIYNILEHTCNIVLAHPKYVKAIRGKKTDKRDAKWIADIFKHDLVAGSFIPPPDIRQLRDLVRYRWKLTNFTTGEKNRAQNCLTVSNFKLDDVFSDVFGKAASAITARILEDPTEKITDISGFRTKGMKATDEQVLAAVDGEMCAEQAEKLRIIRSHMDSLELCKLNLESLILSTAEKYLPQFNLVMSAPGIQSFAAIGIISEIGVDMSVFPTSKHLCSWAGLTPQNNESAGKKKTTRISRAGAYIKPLLVQCALCAIRAKQFPEVRNRYLALKKRRGHKKAIIAIARMLLTAIYNMLKKNEPYNPELYRQADRPPTHREVSVEEAIFILQRQGYLVTAPSVT

SEQ ID NO: 334933 - protein, 364 aa, unidentified
MTMIGAERPDTTGVAVILGVDTHLDFHVAVALDHLGRRLGESSVPATVKGYERLLRWAECFGPVRCAGVEGTSSYGAGLARHLRARGIEVLEVERLKHRRRSSRSNVEKSDPSDAEAAARAVLAGEASGVPKSGDGEVEMIRTLRAARRSAIKARTQAANQLQGLRVTAPEQLRHRLRGLSTKELVCVAARLRLGDDPRDVPTATKFALRSVARRYEALSEEIADLDVHLDRLVAQVAPELVALPGIGTDNAATLLIVAGDNPQRLGSEASFANLCGVSPIEASSGKVVRHRLNRGGNREANRALYMICLARMRRDPRTKEYVARRTAEGKSKREIVRCLKRYVAREIYRVLISCDACSSPIGS

SEQ ID NO: 334934 - protein, 410 aa, unidentified
MEPVVKVSAGLDVHRKNVMATILSEQDDGSLQEKTCEFGTFLKNRKQLRRWLLKHNVELIVMESTGIYWKAIYSILERAGRNVYVVNARHAKNLPGRKTDVQDSKWLATLARFGLLSPSFIPPKDLRELRLMTRRRMKMQGILSGEKNRLHKILDDAGIRLGAVVSDINGISAQAIIDGLIRGESPVKLMQYVRGRLKVKIPELLESLEGTISERHIFLLRQIREHIRYLEQDLMELDQYIIAAMSPYQQQWEILQTIPGIDQISAAGLLVEIGIDMKRFGSMGRLASWAGMCPGNNESAGKKKSSRTRKGNRTIRQILCEISNAARRTKTQFQGKYKGLVIRRGHKRAIMAIGHKILRIIYTLLLKKEPYQDSTVDYESLIVQRNAPRWMRALQKFGFLPKVQQACSAC

SEQ ID NO: 334935 - protein, 345 aa, unidentified
MASMTYIGLDIHKKTISYCVKDVSGKVLSDGKINATRQGLDDWMKRLTRPWTVAMEATMFTGWIYDYLRPHAAAVKVAHPLMLRAIAVAKKKNDRIDADKIADCLRCDFLPECYMAPMEIRQRRRTLRYRKLLVRQNVQLKNKIAQMLMESGVSYNKDKLHQQGYFHQVLPSNPEIDASLWPLLKLSREMIERTQKTERALLRSLEADPLLSARVERLMTIPAIGHVTALTWVLEVGEVERFHSVKQVISYCGLCSGEKTSAGNSRRMPISKQRNRHLQTVLLEAAHLAPRLNPELAVLYEREAARSNRNQAAIAVARKLAAYLVAIDRGQRSFVKHEVQSSVAA

SEQ ID NO: 334936 - protein, 419 aa, unidentified
MNKLYVGLDLSLKDFKVSIIDQEGVVATKPFAATNDLYGSQVLIEAIEDCCRRLDASTVFIGFESTSVYGWHIQHLLADSPSLKPYHPNIICFNPKIIDRFKESLGNLPKNDYVDANTIAERLRFGRLPKSCPVDFRYLALQRLTRHRFHIVDNIVREKSYFLSNLFLKFSGLCQEKVFSNNFGAVATELFQEYLTVEDIATRSLDDLIDFIMEHGKKHFDNPKATASALKEAARKSYRLNQSVDNSLNFVLRSCLENMKALEKQKKAVEKAIESELPFFNNEYLCLTSVKGIGPVIAAGLISEIGGISRFDNDNALAKFSGLYWSEYQSADFVADDTYIKKTGNVYLRYYFVQAAEQLRKYLPEYTAFYSRKYKESKTHHHKRALVLTARKAVRLIFALLREEKLYNPSARKGEVDIT

SEQ ID NO: 334937 - protein, 349 aa, unidentified
MTAIGVDAHKSTLAASAVDELGREIAALAVSNDAVGHGAFESWLTRVGTERRVGIEGGGSFGAGLARRLVERGETVVEVPARLTARERRRLTTPGKSDPGDALAIARITLREAGLGPVSRAGQAEDLRLLSVERDALLTERTRLVCRLHAHLIVISPGYEQRIPNLRSGRNLARAARLLADHHDIRGELARRLVGRIREIDRDARILEREIGSRVASPRLHQIHGVGPIVVAMLVGQTGDVLAVRSAAAFAALSGTAPISASSGQTNRHRLNRGGNRQLNRALHIIALSQSRSRSESPGRTYLANKRAEGKTWSEAMRCLKRQLAGVVYRAMVADAQAASVAYDGALTT

SEQ ID NO: 334938 - protein, 350 aa, unidentified
MDQIVRIGMDTSKHIFQLHGVDAAERPVLRRTLRRRDMIAFFERLTPTRVAIEACGASHHWARLLRGLGHEVQLIAPQLVKPYVKRGKNDAADAEALCEAMSRPTMRFVPVKTAEQQAALMLVGLRDRLVRNRTQLANAIRGYAAEFGIAGAKGIARVPAFLERIQADESLPELARELFAIQAAEYAQVQTKIAAVDAKLLAWHRADPCSRRLAQIPGIGPIGATMLIMKTPAPEAFRSGRQFAAWIGLTPKDHSTAGKARPGVITRAGDEALRSVLVVGATALIRRVREGSGHDGHRLAAWVGALLQRKPPKLAAVALANKLARVAWKLMITGESYAAKPAPTTVVGAS

SEQ ID NO: 334939 - protein, 517 aa, unidentified
MSKSADAAWEYILFSLFGPLALVQEQPMKKPAIKHSSRKRSHKKGRRRSRITTFREMPVIDPNAAGIDIAATSEHWVSVPADRPGMTVRPFSPMTYGQEALIAWLKEMRITTVAMESTGVYWVSLYIRLHEAGFRVILINPRGVTRLKPKSDIADCQWLQYLASIGALRPSYVPPPVILSLRAISRHRNRLIRESARHLQYVQGALDEMNLHLHHVLDDLAGLSGQTIISAIVEGERDPMKLASLCHDNVRTDRAIIASALTGQWREEHLFVLQLAHENYLHAQKQIAECDKELWRLSEELGVRLNEDQLPAQSAPSQKGRQRKGSDKSGKKSKRITSRNAPSGPQSPNQWTRKFHALFGVDLLAVPGVGVLLVLALLTEVGTDWSAFKSAGDFAAWLGLCPYNDQSARKVLRRRTGPGHAELKAMFRTAAQSLSRNQTHLGDHYRRLSARLGAAAANTATAHKLARIIWHLVTKQKEYDETVLAKLDQNRPIQQARRLRRQAKKLGFELVPLKQAA

SEQ ID NO: 334940 - protein, 358 aa, unidentified
MATRWIRYGLGLDMSKDTFHACLGGYTREGEFKVIAQRQFKNSKKGFDELVEWLERNRKEKTLDWQILMEVTGVYHEGLLYHLHSKGFPVCLELAKRVKKYIQSIGHKSKNDKLDGQGISQMACERKLNRWKPISPQIHSIRTMLRHRKALIAARVQFENQLHALKHAAAEERVAERSLRRMIKELNTEIDKAQAKATELAKQNEPFFRKISQIAESVKGLGILTVLIVVSETNGFEEFTSIKQLVSYAGYDVVENSSGKFTGKTKISKQGNARIRAALHMPSLSMIGRKVEPFYSLYLRLVIRTGGIKMKAVVAIQRKLLVLIYTLWKRNERFDKTRYQAERSANRAAVIELEVAPM

SEQ ID NO: 334941 - protein, 356 aa, unidentified
MDKVIREGAVRVGVDLAKHVIQVHAVDATGRVLSNKPLARAKFIEWCVRLPRGCMVAMEASSSAHHWARKLAALGLDPRIISAQLVEPYRSQGASGKNDANDSAAICEAASRPTMRFVPVKSIEQQSMLCVHRLREGIKEDRTACINRIRGLLAEFGLVFPQGPRELQAVLSELLEDATNELGALARLALQRAQAQWHELDEHLAWCDERIDAHAKHNADVKTAATLLGIGPVTASAAVATVGDFKQFKNGAQFGAWIGLTPRQRSSGGKNNLGGITKRGDTYLRTLLIQGAKSAVMTAHRRQDKISTWVVALRERSGWQKAVVALANKNARILWAVLTRGQAFDANHLSVKPTAA

SEQ ID NO: 334942 - protein, 352 aa, unidentified
MYYVGVDLHKKQSWFYVMDAAGKKIDSISISNERDTLKKYISGLPTPFTLAVETTYNWYFFVDLAREYTDNVYLANSYELKAFAKRHKKTDKIDARLIADVLRKGYLPTVFIPNTENRRLKEHLNYRMNLVQNRTRLIIRLKALLDRYGFIATGDFTTDKRLDELLTENIPDGCRCIVEKYVTQLKWYRRQIFDYKKELIAMISGDDDIKNLITIPGISYFSAALIKSQIADISRFATFNRLCAYAGLAPRVHQSGDTCRHGPLNKNRRKLLQWILLEVSIIYWHALPERARYFEAIKRRKGTNTAKVAAAREMLKMVYHVLKEKRPFFYKTERSQRLRSKGSEALLMASAS

SEQ ID NO: 334943 - protein, 342 aa, unidentified
MGEVITIGLDIAKAVFHAHGADEAGRQVFSRRIARGKVLEFFALQPRCLVALEACGGSHHWARQLTALGHEVRLLPPAYVKPFVKRHKNDAADAEAICEAAVRPNMRFVAIKSEAQQASALVFRTRDLMVRQRTQTINALRGHMAEYGWVAPKGPSHVALLGDLLEDSLGASLPTAARSMFQMMLGMLEELNARIAELDKEIARRAREDVVARRLMTIPGIGPIAATAIAALAPPLEGFAKGRDFAAWLGLTPLQKSTGGRQKLGRTSKMGERTIRRLLIIGASAVVRHAAARGAPEGSWLAGMLARKPRMLVTVAQANKTARIVWAVLTKEENYRALAAAA

SEQ ID NO: 334944 - protein, 410 aa, unidentified
MTDTVIAQTEPVLVAIDIAKARHEVLISVPGRKRRRRLTVRNQLDDFNRLIATLSEYDHPVRAAFEATGNYHRALAYRLGAAGFDVKLVSSVALARTREALNNSWDKNDPKDAQVILHMMQIGNEQFYHDPLLCGTNDLQELSKTHDIVSRSKTELWHRILTHYLPLYWPEAERFHRSSRSEWFFAFLERYPSPHFISAMDQETFIADAWEVVGRKVSKERLLADIYQTAKSSVGLPIAPDSDAARMFRLVLAEGRSLIAQRNEIEGRAVELLKDNTDYLLLTSIPGIGPINALTVLAEAGDLRRFRHHRQFLKFCGMDLATIQSGTFRGQTKLSKYGNARLRRTLWMAGQVAIMQKTNSFRDKFERYIAKDRQNTQLRRKAYTAIAAKMARTVHGIIKRGEPYRPFFEG

SEQ ID NO: 334945 - protein, 367 aa, unidentified
MEKSSKVFVGMDVHKESIDITLAEPGGEVRRLGQIGGDRASLLKMVRKQQSRARELVFVYEAGPCGFWIYREITALGHACMVVSPALIPRRAGDHVKTDRRDSARLASLARAGELEAIHVPDIRDEAIRDLVRGRDDAVIAQRRVRQQLKALLLRNDIRYVGRTSWTGAHRRWLSELKLPEPAQQIVFEEYVDAITVATGRIERLTRAIETEVASWRFAPVVGALQAMRGIQFVHAVTLIAELGDLTRFASARQLMGYLGLVPREDSSGEHRHQGSITKAGNSYARRALIEAAWAYRYPARVTRIIATRQAGIPKAACDIAWRAQLRLSAKYRRMNARHLNHNKIVVALARELSGFVWAIGQSVKPQ

SEQ ID NO: 334946 - protein, 361 aa, unidentified
MKKVIKQTQRMEATDGKPVLTMGLDMGDRFSHYCLLNEEGDVVEEGRMQSTEAAFKRHFASEARMRIALECGTHSPWVSRLLTGLGHQVIVANARKIRAITASESKNDRNDAEKLARFAAHDPRLLSPLEHRSEQRQVDLNLIHARSTLVRARTMIVNALRGLVKSAGGRLPACSTESLPARAPAAIPPQLATVATPLVEQIELLNAQIGGMDKQIEKLAVKYPEIGLLRTVPGVGPIVAAAYVLTLDRSDAASNRSAGAFLGLRPGQSQSGDSDPQRRISKTGNSCLRSLLVQSAQYVLGRFGPDSELRRWGLKLAQSGGKRGKKRAIVAVARKLAVILHSMWRSGQRFQPFPQSAAVAA

SEQ ID NO: 334947 - protein, 324 aa, unidentified
MLPTLGIDISKDSFHLELSINNKLRHRKFANRKEGFGELCVWLVKHKATQVHACLEATGPYSEALAIYLHQQGHTVSIVNPVQIKAFGQSELRRNKDDRPDAGLIRRFCEKQRPAPWTPPPVHLRELQALTRHLENLIETRQQQINRLEATNTKHVAKSLRKLVAHLEAEIKRTEQQIDDQVDRHPDLKQQSELLESIPGVGKRTAAKLLAEITDINQYKSARQVAAYAGLTPRNNRSGTIRGKTRLSKTGNARVRKALFFPAIVAKRHNPIVRAFCQRLSSNGKNKMQVIGAAMRKLIHIVFGVLKSGKYFDPTHELLLNSVS

SEQ ID NO: 334948 - protein, 336 aa, unidentified
MNTQYVGIDMSQANFTSSYWQDRAIELGEFANNKAGFKQLARKLKTVNREQSICLVVEATGGYEQKLLHFASEQGWLFSLPNPAQLRYWARGMGYRSKTDRLDGQMLCHYGASCQPRPQLALSQPLQELGQLLARKEDLTKQKRQEQNRYHAWGQSLSPASAVGASIQRLLAFIEQELSCLQQAVDQFMLSYPEFAAEAQRLATVPGVGRETLFPLLYFCHRFRARSMGQGTAKGITAYAGLDVRLHESGRSIWSKPRISRMGDKLMRRRLYLAALGGTRSHKSPLGDFYRRLLERGKPKKVALVAAARKILVWAWAVFQSGQNFDPHYLTPSIKA

SEQ ID NO: 334949 - protein, 360 aa, unidentified
MGVPNIKNLFQGDLAMKIVAMDMGKSKTVVCYFEAVKGSHRYLTVPTRPQSVHDAIIAEEADRVVVEIGAAAGWVCDICSALGIAVEVANTNHEGWRWKNVKKKGDRDDALKLARLSAAGDLPLVHVPQKEVRQKRSLISYRQSLVKRRTQITNNIRSIFDREGLAMYSGTKAWNRAWIKYLESESKEPAQCSVEELWRGELHIELAQLASIKNAIEQIEKKLDALGQQDRGTEILMSVPGIGSRLSEAMSAAIDDADRFENGKQVGSYFGLTPRRYQSGSTDRQGRISGCGNKLVRSMLIQVSWLGLKYNLWMRGIYERARRGSKSRKKIAIVAVARHVAVLCRVLLKEDRFWQERKAA

SEQ ID NO: 334950 - protein, 356 aa, unidentified
MSENITADQGVTIGLDLGDKHTQCCSLDDSGEVEETFRVRTTAPALSKRFGSIVPCRIVLEVGTHSPWVSRLLSDLGHEVIVANPRRVRLISANDSKNDAVDSELLARLGRADPKLLSPITHRGQQAQKDLVLLRNRDGFVRSRTQLINQARGFAKSLGDRLPSSSAVAFPKRVRAAKKDQLFSGLETLLQVIDTLTVAIGDMDRKIERLSRERYPETMLLRQIKGVGPLTALCFLLTLEDPNRFKNSRSVGAYLGLRPKQRDSGEQQPQLRITKSGDEMLRRYLVTASHYVLGPFGPDTHLRRVGLRLAEHGGKAAKKRAIIAVARRLAVLLHRLWVTGEEYQPLGYGTAGSKAA

SEQ ID NO: 334951 - protein, 405 aa, unidentified
MDAATPSRVAGLDWASRLHAVCVLDPDGQVRARFDVPHTGTELRGLTRRLVRLGVRQVAIERPDGPVVQALLAAGLGVVVIPGRQVKALRGRYGTAGNKDDRFDAYVLADALRTDGHRLVPLRPDAPETAALRVVSRARKSLVATRVALANELRANLEIAFPGAATLFSDVDSPIALAFLGRFPSVTHATWLTEARLAAFLRRTGYPGRKAAAELLRRLADAPAGLTGPEGEARATVTLGLVAALDTVRAQIEELEGEVVERLGTHADAAIFTSLPRSGRVRAAALLAEIGDCRARFPDAESLTSLAGAAPSTRQSGKHKKVVFRFACDKKLRAAVMDFAGDSRHDNPWAAHLYQQARARGHRHAHAVRILARAWLRVIWRCWQDHTPYDPARHGSYQRLIAQQA

SEQ ID NO: 334952 - protein, 343 aa, unidentified
MEQYAGIDVSLERVSICVVDASGRIIREAKVASEPGVLITWFGRLEVPMTRIGLEAGPLSQWLYAGMQKAGLTVELLETRHVRDAFKAMPVKTDRNDARGIAQLMRLGWFRPVHCKSLPAQELRAILTGRKLLQGKRHDVEMSLRGILRGFGLKVGATTARSFEGRIRELVEGQPTLVALADALLLARGTLGEQLGKLQKRLVSLARDDARARLLMTTPGVGVLVALTYVAAIDNPGRFKSSKATGAHFGLTPKKYQSGETDVTGRISKIGDASVRTALYEAANVILTRPVKASSLKSWAMRVAKRAGMRKAKVALARKLAVVLHRMLVDGTTFVAGKAAAAA

SEQ ID NO: 334953 - protein, 366 aa, unidentified
MKKISTMQVFGNEIFKEQKLTIGMDLGDRWSFYCVLDEAGKIILEQKVATTPEAMKQTFGKIPRSLIALETGTHSPWVSRLLTELGHEVIVAHAQKVELITKSNRKDDRHDARTLARLARIDPELLGPVRHRSAKAQIHLTVIRARAELVSARTALVNAARGLVKSFGERLPKCGTYQVNEKLAEGVSAELRDVLVPLLREVESLNERIQEYDERMEKIAKEVYPEVSLLKQVKGVGTQIALTYVLTIEDPYRFPKSREVGCFLGLRPGRRNSGESAPQKRISKEGDRYLRTMMVQGAHYILGPFGEDSDLRRWGRKLAERGGKNAKKRAVVAVARKLAVLLHRLWVSGEVYEPLRNSQRAMRAVA

SEQ ID NO: 334954 - protein, 412 aa, unidentified
MKAIGRAIGLDVHLDFCEIAICEEGKVRSAGRVASTPEALRVLAESLLPTDRVALEVTGSSWEILRILEPHVARVIVVSPDDTGIRQARAKTDRLDARTLARLLASGELDGVWTPDELTRVLRRRRLARREQLVRSRSRAKNEVHAVLMRRLKGRPPVSDLFGVGGRRWLRQLELPVEECETVEGCMRHVEFLDAEIAEVERLIARQMLSCSDARRLMSVPGVNVICAASFLAAIGDIRRFKTSRQLAAYLGLDPKVRQSGSEPARSGRISKQGSASARWAMVEAAFSVVRQPGPLHAFYERLRSRRGHQIAVVASARKLACLFWCLLTREEQYAHQQPSLTAKKLRRLELTAGAERYDTKAAGVWSTNQAMRDAERKLALAAEASYVRMVSDWQATAPRRGAGASVTPGRA

SEQ ID NO: 334955 - protein, 394 aa, unidentified
MKLVGIDVGKNSHHFCVMDKETGELNVAPSSFSNNKEGFDFLINSLKPYSKKSILIGMEDTGHYHVALLKFLLSNGYTVALINPKTTDLTRKMEGGITKNDKLDTITICDVLDTPERKKQYRITKVDRFDLYEQRQLTRHHHNLKEELNIYCNRLQKSIDLVFPEFNTLFGSKYGVVYMNLLKTFGSAEAIASTDIRTIRKCFEIKGRGGRISLTPEKLKECAKNSIGISSEVETIQIKHLVSQITLIKEQIAEIDKKIEEFSITNNSPILSIPGISHFSGTSILAELGDIGNYSKPSQIIKFAGVAPYHYESSQYNAQHTGITKKGSKYLRKTLYQIILPVIKYNPAFKKYYRLKISQGKGHRCAQGHCIRKLLRIIYHLLETGQSFDPALLR

SEQ ID NO: 334956 - protein, 429 aa, unidentified
MQEPSKAASAAGVAAYVGIDWADQKHDVTLRAAAEPAKVEHQRIAHELDALMEWVGQLHQRFAGKGKVLICLEQSRGALIYHLMGYDFVELYPINPGQLASYRETFSPGGAKDDRPDSELICELLYFHRDRLKAWKPDDELTRKLAFLNEGRRKAVDQRTELANEIKSQLKVYFPLALQVLGNDTSTMLAADLLLKWPTLEALQKERPHKLRKFFYAHNCRNESKLLERLELIKAAKPLTRDLAVIEPAALRVQLLAKQLKSLLPFIALYEKQIAELFGAHPDSFLYRDLPGAGAALGPRLLTAFGTDRDRFDNPTELLSLSGIAPIRRASGKKTGKRASVHFRHACPKFLRQSFHEFGACSIRYCPWAAACYQTQRDRGKGHHAAVRAVTFKWIRILFACWKQRQPYDPQRYQQALQMRRSQYAATAA

SEQ ID NO: 334957 - protein, 371 aa, unidentified
MKQQTKSSNITVGLDLGDRRHRFCALDERGEVVEQDSICNDRVSLRKLAGRYHGALGVMEAGAHSPWISRFLEALGWRVVVSNPRKVRAIYQHERKSDQRDALMLARIGRMDLALLYPVRHGTAEAQQDLLRIKLRDSLVRARVAVINSVRFTLKSLGYTVRNPSSERFHKVVMEEVPESVREMIMPSVQALAELTARIKMLELEINTLAQMKYPQSAQLQQIPGVGPITALYFVLKIEDPNRFAHVRDVGAYAGLCPRRDQSGESDPQLRISKCGDAYLRRLLVSAAHYILGPFGPQSALRAYGLMLAADGTARAKKRATVAVARKLAVLLLSLWKSQQPYQPFPGACLNGEQEDRRSGTIALHRMEATD

SEQ ID NO: 334958 - protein, 417 aa, unidentified
MINDVKWYVGIDWATQSHCVCLLDAEGKRVGQREFVHGGAGLAELCDWLLEKTQAAPGQIAVAIETPHGPVVEMLLERGFAIFAINPKQLDRFRDRFTVAGAKDDRRDAHVLGGSLRTDPAAFRQLAADNPVTIELREWSRMADELKQERTRLANRLRQQLWRYYPQAAKLTDDVADDWFLALWQKVPTPESAAKASEKAIARILAAHRIRRLDAATALKTLRETPLFVAPGTTQAACAHIRSLAARLHLVNQQIKQAQQNLDRLCAQIEAEENASGQSSEQCDVTILRSWPGIGRINLATLLVEAAEPLRRRDYHALRALAGVAPVTRQSGKQRFVVRRLACNRRLQSAVHHWSRVAIQHDTAARQRYDALRKRGHGHARALRSVGDRLLCGLCATLKQQIPYDAGHKCVKTSAKA

SEQ ID NO: 334959 - protein, 402 aa, unidentified
MNCVGIDVSKGKSMIAVMRPFGEVVVSPFEVLHTDSELSKLAGLLKSLDGETRVVMESTGNYHAPVAWLLHDAGLYVSVINAMLVHDYGNNSLRRAKTDKKDAVKLANYGLDHWLTLPRYIPEEDTRLMLKTCYRQYQQYSKVQTMLKNNLISLLDTAFPDANRLFTSPPRADGSEKWVDFVAAFWHCECVCGLSEKAFTAKYHKWCRKHGYNFSEDKALDIYASACGHFGVMPKTDTAKLLVEQAISQLRATSATLAALKQEMQSLAASLPEYPVVMGMFGVGPVLGPQLMAEIGDVRRFHSKKALVAFAGIDAPPYQSGQMDIRSRSISKRGSSSLRRTLFLVMSVILQRAPMNEPIYQFMNKKRSEGKPYRVYMMASANKFLRIYYASVKAYLDSLGHD

SEQ ID NO: 334960 - protein, 432 aa, unidentified
MQKQDSYDYYVGIDCAQNKHDFAMKNNQDKFLIKKGHFSNTLQGYEKFLNTVLSKCLDKDMILFGMEVTGIYGTNLYERLKSDGYHVVMIFPDSVKNYRDYKRLNKTDKIDSACIAELLLNGDAQIVHAEKNGYTDLKAYIRRRNALKVTCTQETNRFLAKVCLYFPDLLKVFPSGRATLKAIFSIYPTPYSIIEADFNELVSVLQKASKNKFGVDKANELIHAARNSIVVRKSISDGELYNIHSLIDSIDSLESEIRNLEKIIDSKAEEFPAYHVLLTLTGCGKITAATIVAEIGDISRFHKASQIVSLAGLYGDNSKSGSSVNKRGKISKKGSRYLRHAIYMVAEFARRNNPIFKAYFTKKKNGDRTKHILAVNAVANKLCKVIYSLMKNQSTYIIQYRDLAKLSESTQNEFFQNDETAYSAKYRRKKYL

SEQ ID NO: 334961 - protein, 343 aa, unidentified
MYYIGLDVHKKTISYCVKNAAGQVLSEGKIGSTRRELDGWVRTLPEPRMMAMEATIFTGWIYDHLLPHAEKVKVAHPLMLRAIAAAKRKNDKIDASKIADCLRCDFLPESYMIPTEMRDRRRFLRYRNLVLRQSVQMKNRISGMLMETGVSYEKLRLHRKGYFDQLMRSNEEVSDSIRPLLKLCREQIDRSILLDRTLLKTLERDPLLSGRLERLRTIPGVGPLTALTWVLEIGDVSRFRSIKQAISYCGLCGEEVRSADKVMRTPISKQRNKHIQSMLVEAARLAPRYSPELALLYDRERQRGDGNRATLAVARKLVAHMVAVERRQSSFLPAGDFKQTAAA

SEQ ID NO: 334962 - protein, 382 aa, unidentified
MPDVISSAPAAVRMRAALDVHKRTIVCAAQPDDPRAELRLEEIPNTERAVRGLVRRLGGPEGLVVCYEAGPCGYDLFRLLSAMGVACDIVAPALTPVAPGARVKTDRRDAKRLLVLHRAGALKFVAVPTPAQEGLRDLVRCRDDLVCARRAARHRVAKQLLRHGHVFREGKKSWTKTHQAWVRRQRLGDPLAQSALEHMLAHLDSLDAQIAALDHQLDEIAAREPWSDPVRWLCCFRGVTTITALGLLAELGDLRRFATARELMSFLGLTPSEYSSGEQRHRGHITKAGPRHARRLLIEAAWHYQHPPRVSQRIAAVHPHVPPDVAARAFSAQVRLHHRHRHLTSHGKRSTVANVAVARELAGFIWAAMTRQPLGDQEVTAA

SEQ ID NO: 334963 - protein, 351 aa, unidentified
MVIVGTDVHKRTHTFVAVNEAGAKLGEKVVPATSTGHQKALQWARTEFGQDLLWGVEDCRNLSARLERDLLSAGQRVVRVAPKLMAQTRACARTRGKSDPIDALAVAHAVLRYPDLPVAAHDEVSRELKLLVDRREDLVAQRTSTINRLLGRIHELDPARTPKRGALDRAKTRNELGNWLDTLHGLLAELARDELDDITRLTDTINALAARIGQHVHDVAPELLALQGCGELTAAKLVGETAGVKRFRNEAAFARHSGTAPIPVWSGNTAGRVRLTRSGNRQLNAALYRIALTQIRITDSPGQLYYRKRLAHGDSSTEALRCLKRRLTRTVYHRLHTDEQARLNDPHPAAA

SEQ ID NO: 334964 - protein, 353 aa, unidentified
MKCDKYIGFDVHQATTVVAVLDAEGKVVLETIVATEAAAIIRFLQSLSGSLHVTLEESTQARWMYDIVRGYVSEVIVCDPRRNKLLGEGSKADKSDARKLAELLRAGLLRPVYQGHDATRELKELVRGYETLSADMQRMMVRIKAIYRAHGIPTSGSGVYQQKQRGQWLQLLTEPGTRQRVSWLYEGLDQLRPLRKQAKQAMLAEGRKHQAFRLLRTIPQLGPIRCAMLVATVDTPYRFRTKRQLWAYSGLAIVTYMSSEYEIKAGRVVRSRKPLATRGLNRNCNRRLKELFISAAVAGSRSEPYRSYVAGLQQKGMRTEMARLTLARKIAAVALRVWKKGETFDPKKLNSTT

SEQ ID NO: 334965 - protein, 367 aa, unidentified
MKILAIDLGKFHSMCCFFDTNTQQHSFWNAATTRAYLTTVLKTHQVDLVVMEACGPSGWINDLCQEFGLKTLVCSTNEEAWRWHNVKRKTDKDDALKLARLTMMRQLRAVHVPSHQVREHRTLIKYRKTLGGRINRIKNSIRSLFANRGIEIDRGKRVWYTGRELIDSYRKSLAECSLEELWRGQLDIELTQLDSLDEQLADVERRLEVIAKTDERIQRLQTIPGVGRRTAEVLVTALDDVDRFDNARQVSSYIGLVPRQYQSGETDRNGRITKRGSRLLRTMLLECAWVSLQYNDWSRATYDRIHGGQQTRKKKAAIALARKIAVVAWSMLKHKTDWDPARLGFPAAATVEESPPERTETKAAGIA

SEQ ID NO: 334966 - protein, 414 aa, unidentified
MLRIVYPVCCGLDVHKSFVFACIAATDENGVTTYQSKKFSTFTEELKELAEWLSRNNCKDVCMESSGKYWIPVWNILEPTCKLTIAHPKYVKAIRGKKTDKKDAKWIADIFKHDLVSGSFIPPADIRQLRDLARYYRKLVGFNTGEKNRAQNCLTVSNIKLDDVFSNVFGKSATAITDQLLEHPGETFDVAPYVHARCKTPIPEIQAAIDGAICEEQAEKLKIIRSHMGNLELCKLNLESVILGISQKYLPQLELISTVPGIGDIFTAASIIAEIGVDMSVFPSDKHLCSWAGLTPQNNESAGKKKTTRISHGGAYIKPLLVQCSVAVSKSEKHPEIRNRYLSLRKRRGHKKAVIAISRMLLTAIYHILKKNEPYNAELYKSADKPPLNRQVSVEEAIFILQRQGYFVSAPLAE

SEQ ID NO: 334967 - protein, 435 aa, unidentified
MNTPNIPESEIAAWVGLDWADQQQVICLQAADWAAVETSVVKQRPESIQAWVAQLQARFPQGKVAIALEQSRGMVLYALMAYEGLVLYPIPPKTLAKYREAFHSSGAKGDLSDAALLLDLVRRHRERFQAWVPDDPSSRQLRLLVEERRKLVAQKTRLTNELTSRLKSYFPQALDWVGELDTRLACDFLPRWPRLDSLQKARPAQLEQFYRRHHCYRSALIQQRLEQIRQAQPLTRDRAVIAATSLMVQALVRLLGPLLESILQFDQQIEALFAQHPDQALWASFPGAGPVLAPRLQAAFGSDRARFQQALELQQLSGIAPITQQSGKSRHVERRWARPKFLHQTFYEYAAQSRLGCGWARAYYEQQRARGSKHPAAVRALAYKWIRLLFRCWQNRVPYNEETYLKALARHNPALRLAAEAAQSQVAKKKEKKAA

SEQ ID NO: 334968 - protein, 332 aa, unidentified
MVDTETGEFVERALSHEGNALREFYGALEGPVVVGIEATGSMQWFLELLQELGIQCRVGHPAKIRAKETRKQKHDRRDARLILELLIEDRFPEIWMPSIEERDLRTLLRDRHQWVKMRARLQHTLQAIALNHALRRGHALWSQAGQNTLQALPLPPYSSQRRTELLSLYEQLQQRIQELDKEVEAQARQRLQARRLLTHPGVGAVTALATDVFLGDPSRFDTANQVASYIGMIPCEHTSGKRQRLGKLTKQGNSLLRYLWTEAGMHAVRKDPELQRFYRRKLIQKGMGKARIAAARKLGIRLWIMMRDQIDYQQFCRRGRLRQKGESPCGDA

SEQ ID NO: 334969 - protein, 335 aa, unidentified
MSKLTVFVGLDYHQDSVQVCVLDRKGKVLVNASRGNDWQSIAEAPPEGASVFAAIEACCGAADLAEELITKAGWSVDLAHPGYVARIKQSPDKTDFTDARLLADLERVGYLPKVWLAPENIRELRRLVRYRSQLVQERRNVKLRVRALLRDHRVKPPEEINPWTKAWLLWVQTCDQLGDTTRWILKQHLARLEVLKADIRAVEKHLQAQTQEDVVVKKLLEQEGVGLITAVTLRAEIGRFDRFRTGKQLARFCSVTPRNASSGQRQADAGLIRAGNPELRRVLIETAHRLKWRSDWWSEFAERLKDRGKAPCVITAAIANRWIRGLYYEMKTVAA

SEQ ID NO: 334970 - protein, 340 aa, unidentified
MEIAVLGIDLGKNSCSIVGFDDGGAVVLRRRMRREGVIKVAGKLRPCVVAMEACCGAHHLGRVLRAQGHEVRLMSPEYVRPYVKSQKNDDRDAEAIAEAATRPTMRFVELKSEEQLDMQTLHRARDRLVGERTALINQLRAVLLERGITVAQGRRKLERHLAGLDAQGGLSQRMRVLIEDMRLQWCELDRRIAELDKELTEWVRNEEAARRLMTIPGIGVLNATALIAAIGQGESFARGRDLAAWLGLVPRQLTTGGRPRLVGISKRGNKYLRKLLIHGARAALPTLLESPTSLGAWLRGLMTRMHKNAVVVALANKLARLAWAVLRHGEMFRFAVSAAA

SEQ ID NO: 334971 - protein, 455 aa, unidentified
MLLEDKRVKQEPEEIPDTEHELVLERVCAIDVAKDSGKVCVRVSSRAGRRVSKVWDVPARSGAVAELAEHLLGEGIEKVTVESTSDYWRIWLYVLEAAGLSVQLVNARDVKNVPGRPKSDKLDAVWLAKLTEKGLLRPSFVPPAPVRELRDYTRLRIDLTRERSRYWQRLEKLLEDALIKVSAVASTLDTVSVRDMLEALIAGERDPRRLADLARGRMKPKHGALVEALSGRFDDHHAELARMLLDQIDALATQIATLTTRIDELLTAMEPETRADEPDTPGGAGAVADGARELTTIERLDEIPGIGRGAAQIILAEIGFDMSRFPTAAHLVSWAKLCPRTIQSGAIQRGGKTGRGNPYLKGALGEAAAAAAKTNTFLGERYRRIVKRRGKLKALVAVARSILVIIWNMLNDPTARYADLGADYHATRVNTERRTRNYVTQLMAMGYRVTLEPAA

SEQ ID NO: 334972 - protein, 335 aa, unidentified
MWHVGIDLHRTTVVLAAVNDGGEIIDPITIPCSDAAMIVRSVNAMGTFRAVIEATGTYRWLYDLLRPYGTVLLAHPMRLRAMIQRRTKTDKLDAQLLANLLRINQIPLAYIPPEPYQQLRDLTRCRARLGRQLAAVKIQLRALLARQNRESPYRTPFGSRGLGWFRGQDFGSIEDMVRDELLERFRHYAKQMTLFDKRLEEMRQAFPQAEALLDIRGIGLYSALLIVAEIGEAERFRAAKQVGAYTGLTSRVHQSGGHCYQGSITRQGSPWLRWVLVQAAMKAVHGDDVALKNFYRRIRKRSGAKIARVAAARKLAEICWKRLRQWQREHVSQAA

SEQ ID NO: 334973 - protein, 402 aa, unidentified
MDSHDLYVGIDVSKLKHDIAVIDDQKKLLTPCFAIRETAAGYDELFERLIKIQNRCHATHVNIGMEATGEYWKNLYHFFLNRTDWPVTVINPMQTRHFAKSQLRRAKTDSIDAVDIARYMQERQPAPTPPRTFGLQAIRDIDRQILSLVKERNANIYRLRLELGKTFPELEQKSSSLTARRVLILLQHYPTAESIRNTPAEKLYELNYDGNKKRRLPTSFLNQVKALAQNSIACKYGANAGIIVQALAQRINQINQHIIWLQKNLVTSFRQQNGKPSILATIPGIAPLTATILEAYIGDVNRFANYKKMVAYFGMNPTVHLSGKATRSRSRLEKKGHARVRGILFLNTLTMIRFKVDPIYSFYQRKVDEGKPKMVALCAAMRKLLVIIYEMLKNNEPFRLEK

SEQ ID NO: 334974 - protein, 340 aa, unidentified
MNITTYGLDIAKRVFQLYWVDIKSGEIHNRKFGRQELLEFLAQREAGLIALEACGSAQWWRRKLMALGHEVKLIHAKFVRPFVQTNKTDAADAKAIWTAIRQPGMRTVAGKTEEQQAMLSLHRMRMSLIRFRTMQVNQLRGLLYEFGITLKGGRQAGLAEMRQRMAELEQTVPGMLFEAIKEQLQRLVDIETDIQDIERRIKDWQKQQEACRKIAEIPGVGMLTATALVATMGEANSFKSGREFAAFVGLVPRQSGTGGKVKLLGISKIGDTYLRTLLIHGARAVMFKAKEKGAWSEALLQRRPANVAIVALANKMARTAWAILAHGREYQKGYVSVVPA

SEQ ID NO: 334975 - protein, 404 aa, unidentified
MWYTGIDWADEHHDALTIDEKGHQMGSIRVDHTPQGFAKLDTFLMQIIGSASKEQMACIIETTHGLLIVHLLEAGWPVYPVNPRTVDRRRSASGAKTDTIDAYLLAKTGRADFADLHRLTPDSDKVAELKQLTRDQDTLIRTQTRLVNQLTACLKAYYPVALDLFSQLQQKSTLGFLQTYPTVEAARAASLKEIQQQLKHTRHPQPAQAAASIVEMLHHPQLQADAVLTRTKSRLMLALVSQLLPLLEQIATYDKEIHTLFLTHEDHAIFESLPRAGQHLAPRLLAEIGDDRTRYQDASSLQALAGTSPVLYQSGMYSKAHRRLGCIKPLRNALHQFAWQTTQSEAWAKDYYQRKRMEGKSHTVAIRALSNVWVRIIFAMWTRRECYQTATFELAQQQHARRAA

SEQ ID NO: 334976 - protein, 456 aa, unidentified
MKIPQSTIRLLTGRLVKILLNKEVSIMKSNTQNAKIEAITENTLVLGIDIGSETHYARAFDYRGIEYSKKPFKFSNTEVGFMSFKAWIQDMKEMHEKDKVVPGMEPTGHYWFNLGKFLQDNEMRPVLVNPHHVKKSKELDDNHPTKNDRKDPKVIAGLVREGRYMIPYLPEGVYADLRTASNIRFQLQAELTRIQNRISRWFNIYFPEYKTVYGKPDAKSGMMILKVAPLPEDILTLGIDGVNQIWRDAKMRAVGKARAKTLMEAAEHSVGSKEGAVSARMEIRMLLEDYESRNVRLQEVMALIEELVKQIPMAEKLLEIKGVGIKTVSGFLAEVGDISRFNNPKELQKLAGLALVENSSGKHKGETRISRRGRKRLRYLLFEVAMSLVSKNAEFKELHIYYTTRRINPLKKMQSLMAVAAKALRIFYAILTKGVAYDPKKMINDIKMPKIYLQAA

SEQ ID NO: 334977 - protein, 403 aa, unidentified
MRAFAGIDWAAEKADVMVQDQDGGVLLERAFAMDDAGIADLCRTLLAHRVCRVAIERPDGVLVERLLDAGLRVLAIHPNQVKAARPRFTAAGGKSDRFDAFVLCELARTDSHRFRVLAPDRDETKALRALTRARDELVDARTALCNQLREQLLAFWPGATLVFADLDSPIALAFLERYPSPPDTRGLGPRRLQAFLDRHAYSGRQTPETMLTRLRSAPTGRAGELETDARRATVLGLIAALRPIVAQIGQLTSQIHGAVRAHPDGQIFLPLFRDTKTAICPATLIAELGDQRARYPTAAAMLADAGQSPVAVESGKRKVACFRRACDKRLRNAVCTLANSTRHWHPWAHQIYTNARARGHNHQRAIRTLGAAWLRVLWRCWHDHQPYDPTRHGALTRQLTHAG

SEQ ID NO: 334978 - protein, 391 aa, unidentified
MIFVGIDVAKDKHDCFITNTDGEVLFKSFTITNNLDGFDELYQKIESVMEDVSKVKVGLEATGHYSYNLLGYLLDKGLATFVINPLHTNLYRKSLSLRQTKTDKVDARTIASMLMSDVNLKSYSDTSYHNEELKSLTRYRFDKVKERAKLKTSISRLVCILFPELEKLVPTLHQNSVYELLYEFPGAKHVANAHLTRLSNLVETASKGHYTKDNAITFREVARTSIGSNMPAKSLELRHTIKLIRELDAEIEEIENEIKIIMDEINSPILSIPGISYRMGAMIIAEIGDFSQFDSPDKILAYAGMSPSTYQSGQLDNCHSRMEKRGSRYLRYALYNATAYVCLWDPTFKAYLAKKRSEGKHYYVALSHATKKLIRVIYQLESSGQQYIKAN

SEQ ID NO: 334979 - protein, 408 aa, unidentified
MQRYYLGVDWADKSHQLYVADEGGRKMKEWEVQQTADELAELGRWLDETRSQGIELWAAIEKPHGRIVDFLLDHGVVVYPVNPKALDRARDRFRVSPSKSDGFDAYVLAEFLRTDHGHLRVLEPDSAEAQELRLLTRDYDRLGRQKARLLNQVRITLKEYYPRPLEVFEDLETKIALDFLKAYPTPQALSDLRRGGWNRFAKRDHHLSVAHTNELWDKLHKPQIPVPAHVVRAKAKLLLALVVQLEASIKAVNSYSREIEDFFGAMAAAEIAKTLPGAKTGSTVPTIWAELGDAKNRWKSSRHLQAEAGTVPVTKSSGKSRIVQFRYACKKRLRHALYWFAFNSLKRCEWANRYYRDQRAKGHNHHQALRALGAKWLKIIFVMWRDHKGYDENYHLANMARQRIRQAV

SEQ ID NO: 334980 - protein, 356 aa, unidentified
MSEITRVGVDLAKSVIQVNAVDAGGKLVTNRQLSRDKLLSWCAQLPPGCLVAMEACGGAHHWARKLIALGLNAKIIAAHLVAPYRLQGKGGKNDANDAAAVCEAASRPNMHFVPVKTTVQQGILCVHRLREGLKEERTASINRIRGMLTEFGLVASKSPDKLREKLTDMLEDASNDLSGMARLVIQEAYDQWKDLDERIDWCDERIKAHVKDDAHAKAAKELMGIGPVTASAVVATVGDFNQFKNGAQFGAWLGLTPKQNSSGGKSCLGGVTKRGDMYLRTLLIQGAKSAVMTAHKRDDPISKWLYQLREKSGWQKAAVAMANKNARILWAMMTKGCRFDPRHVSVKPTGSATMMA

SEQ ID NO: 334981 - protein, 339 aa, unidentified
MKKVFIGIDISKDTLDVCFIESLSESRLFEFRVQNNKSGIKSIQERVSKLGYSLSDAWFCFEHTGTYGYLLAYLLDQKDLCYSVVPGVEIKRSIGLARGSNDKIDARRIAMYACRNHRKLLPTKFPSETILKIKSCHACREHFVKISTQLKNSLHNYKLASEVINNQLIINEITRQLDSVKSSIQNIESELKQLLQMDVSVYKNYKLISSVIGVGPVIAAHMIVCTANFQSFPDARKFNCYAGIAPFSKNSGISIHTKSKVNNMANKQMKKLLNNGANSAVRNDPELRAYYIRKINEGKHHNSVMNAVCCKLVARMFAVVSRQTEFVSLYSHSLNKQAC

SEQ ID NO: 334982 - protein, 342 aa, unidentified
MNEERKIWCGIDISRNDMSAALDIDGELPVRKLPAQSFKRTLEGLQDMLEWCAARNAALPDLAVFMESTGVYSMEVLQWFQNHFPDIHVSVGNPRHVKHFIESEHLGNKTDAMDARAIARMGTIQRPRATPLPPPEYLQLRTLVRSRDDMVTKMRSMEVSMDAMLDKASVAYAAYGHAVDAMGRGIAKIETAIDDLVDRMPEIGRAVELMCTMPGIGRIAAVTIVSELGPFSSDFSRSSFSAYTGLQPVQRQSGTSVNSSHLSKNGSPLLRKVLYMCSVHAVKKIPSLACFHSRQVAKGKSPISARCACMRKMLLILRSMVLNKREFQENYVSSFRKKSKAI

SEQ ID NO: 334983 - protein, 404 aa, unidentified
MIFVGIDWSEHHHDVCVVDEQGTQLAKVRVPEGMQGVVKLHETIADHAEEPEEVIVGIEIDRGLLVGALVAAGYRVFAINPLSVDRYRDRHATSGAKSDPGDAKVLADLVRTDRHNHRPVAGDSELAEEIKLIARTHQSFVWERQRHVNRLRSALREFYPQALEAFGTELAAADAIAVLKIAPTPELGRRLSRSKIAAALRRTGRQRNLEPRAEQIQRALRSEQLRASEGLERTYGVIVSSLTGLIEGLNTQIAGLQDDLERSFERHPSAEILRSLPGLGIVLGARVLGEFGDDPTRYADARARRNYAGTSPITKASGTRRVVLARFARNERLFDACFLWAFASLTKSPGARRYYDLQRARGKTHNQALRALANRLVGILHGCLRQGELYREDVAWRGRESLAA

SEQ ID NO: 334984 - protein, 315 aa, unidentified
MEQPATTPSFVGIDVSKERLDVHLRPSGQAFAIARDSKALEQLVSDLRALAPALIVLEATGGFELTVAAALAGAGLPLAVVNPRQIRDFARATGRLAKTDALDAQVIALFAERIRPEPRPLADADSQTLAELVTRRRQVIEMIGMESNRLHQARDLRVQRTIKATLKTLEAQLARLDREINDTVKGSPAWRAADDLLTSVPGVGTITSFTLIADLPELGQLDRRRIAALVGVAPINRDSGQMRGRRTIAGGRTDVRNALYMAALSAIRWNPVISEHYQSLVERGRPKKVALVACMRRLLGILNAIIRTKTPWQCA

SEQ ID NO: 334985 - protein, 357 aa, unidentified
MSIVGGLDIHRKQLTFDWVDEQNDKWERGRISPADREHLADWLTRFDPAAGGPVAFAMEGCTGWRYIAEEMSRAGVTAHLAEPAETSALRGPKRRAKTDKADAKLLRELLATGRLPECYIPPEQVLEWRALLELYQDLRSEHTGWAQRIQSVCFHQGTTAPGQAGIIRGDRARLHAIVDEQLSIVGRLQVNTALAIMDTLAEHLDRLRRRLLSTARGVNGARALMHEIYGVGPLSSLALCAWLGGADRFSSSRKAVRFVGLDITVHSSDGKRSPGRLSRQGPEVLRWLLFEAAKTSARPCAPGYGYYTGVKERYDANRACLSQARRIVRHATHILDALGDDAFTVIAQPAAPTTIAR

SEQ ID NO: 334986 - protein, 451 aa, unidentified
MIPKKPRKGKALKKVERLDYININAAGIDIGSKSHFVAIPEGRDTQTVREFQTFTNSLFELISWLKKIGITTVAMESTGVYWIPVYDMLEEHGFEVLLVNAKHIKNVPGRKTDVLDCQWIQQLHSYGLLMGSFRPKEKILRMRTLMRHRSMLIDYASSHVLHIQKALSLMNIQLKNVIRDVMGTTGMQIIRAIVEGERDPIKLAKYRDPKCKNSEDVIRESLIGNYQEEHLFCLKQALELYDSYAGKILACDKEIEKIIAEMESLSDKETDISQKKTPSKKHAFAFDMHRQLIEITGVDLTAIPGINVQTAAKIISEIGVDMSRWKTSKQFAAWLGLCPGNKVSGGKRLSGKTAPCANKAAAALRLAANGLRLTDTALGAFFRRLNGRLGAAKAITAGAHKLAVILYNMLKTGKEYMESGAQYYEKQYRDRCVRNLEKRAQQLGFSIVPLA

SEQ ID NO: 334987 - protein, 384 aa, unidentified
MEKSSTLHVGLDVHKDSIDIATAELGRAGEVRHVGTVGGDLASLDKALRKLTSKGHRLHVVYEAGPCGFVIWRHLNALGQSCDVVAPSSIPKRSGDRIKTDRRDAMLLARLDRSGDLTVVRVPSAADEAVRDLVRAREDGVRECRNARHRLKALLLRNGTAYAGKTAWTAAHLRWLAKLKMEHAAQQIGLQEYLHSITETTARIARLEQAMRETLPDWSLRPLVQALQALRGVQLIAAMTLVAELQDFLRFDSPRQLMAFVGLVPGEHSSGAKRRQGSITKAGNSAARRMLVEIAWHYQHSPRVSPIIATRQHQLPKAITDIAWAAQLRLHAKFKRLLARRLMKNKAVVAVARELAGFVWAIGCEVQRSGWQGIAVESATAAVN

SEQ ID NO: 334988 - protein, 311 aa, unidentified
MTNDTIGVDISKDHLDAHRMSDGASRRFANDRGGHRAFTGWLGQPDMRIVYEPTGPYHRAFERKLAAAGAALVKVNPRQARRFAEATGRLAKTDRLDAAMLARMGALLDLDARRARSPVLNDLKDLHTAREALVKNRAAAKNRAKTLTLAILKRQSAEQLRQIERQMAAIEKEIMALIEAEPDLASRFAILVSIPGVSAVTAFALLIEMPELGTLGQGQAASLAGLAPIARQSGNWTGRAFIRGGRANVRKALYMPAIVAMRFNPDLKAKYQKLKAAGKAPKLAITAIMRKLVLLANALLRDGRKWTPSLP

SEQ ID NO: 334989 - protein, 424 aa, unidentified
MRFFGLDVHLDFCEVAVAEGGRVSRVGRIASTPEAIREFAAGLNGSDQVVLEASCGAMMIARLLEEGDVGRVVVCNAAETRAISHARVKSDRFDAAMLAKLLSAGMLKAVWVPDEATSALRRRVARRAGLVRARTRVKNEVHAVLARCLLGRPPVSDLFGKQGRVWLAEQQLPEEEAETVASCLRHIDFLGGEITDLDRGIARQALAFPGFGRLLTIPGVDVGTAAAVIAAVGDITRFPTAGQLVAYLGLDPKVRQSGSEPARYGHISKRGDPQARSMLVEAAWISIRSPGPLKAFGERVRARRGAQIAAVAVARKLVVLCWHLLTKDQDYAFARPSLTRQKTRRLELLAGAPPLARRHGGPPVSPTSSQRAAERELQHQAELAYRRLIDDWRTTAPKGGAGATPGRASQKPKEGKAARQATSP

SEQ ID NO: 334990 - protein, 336 aa, unidentified
MREYVGIDLHRRRSVVVRKSADGEVLSKVHIDNDPAALAEAVAAAGPEPEVVVEATFGWYWAADVLAEMGAHVHLAHPLGNNWGNRRVKNDERDANDLVDLLRLGRLAEAWIAPPEVRELRELVRYRAKLVRLRSGLKAQVHAVMGKNGVLPARVDMFGPGGTAQLDALDLPLGYSCRLESLRDLIVDYDREVLALDRRIAAQLANHAGYRAIQALDGVGPVLGAVFVAEIGDVTRFPTPDRLCSWAGLTPKHRESDLKVHRGSISKQGSRLLRWAAVEAASKNHAGGDFKDAYRRIAARRGRNIAKVAAARRLLTLVYYGLRDGEIRCLAQAQRG

SEQ ID NO: 334991 - protein, 338 aa, unidentified
MGEQYVGIDLHRRRSVIVRMTPEGEVLETVRVDNDPVALSLELAKAGPDPEVVLEATYGWYWAADLLQACGAKVHLAHPLGVKMFGYQRVKTDARDSTNLAELLRMDRLPEAWLAPPQVRELRELVRYRAKLVALRSGLKAQVHAVLAKEGVRVPMSDLFGVAGSRLLDELHLGHAYALRVASLRSLITAYDQEIAMLGREISTALAGDVGYLAIQAIPGVGPVLAAVFVAEIGDVHRFASAPPLCSWAGLTPRHRESDTTVRRGPITKQGPRLVRWAAVEAVQRLPGGSKQAADFHRIADRRGTGIGRVAAARKLLTLVFYGLRDGQVRCLAPREAM

SEQ ID NO: 334992 - protein, 465 aa, unidentified
MVQQEGSHNNKKKRSRAVAAMGVTHPDAAGIDIGSRSHWVAVPADRAEVPVQEFGGFTDQLHRLADWLKSCGIETVAMESTGVYWIPLYDVLEERGFKVLLVNASHLRNVPGRKSDVKDCQWLQQLHSYGLLRGSFRPPQEVLELRAYMRQRERLIQGAVQPVQHMQKALLEMNLQLSHVLSDLTGSTGMAIVQAIVDGERDGRKLAELRDRRCRHSKEQIAKALEGTYKQEHLFVLSQALGLYKVYQEQLKACDKEIELKLAKMAEKRRAPEEPCPKPRHGAPKANQPRFEIQSPLHRICGGVDVTQVHGLAPATALNVVSEVGLDMSRWPTEKHFTSWLNLAPGTRITGGKRQSGRRGPSKNRAGLALRQTAVAVGRTDTALGAFYRRIASRSGPACAAVATARKIALLFYRVLKYDLKFVEAGVAAYEQQQRDRQLRALTKKAASFGLKLVLETPDPAAAPN

SEQ ID NO: 334993 - protein, 441 aa, unidentified
MSLNDVIMIDWRGQMTRFATDEFAAFIGLDWADTKHDICLQVAGSDKREFQVLEHRPEVIDTWATDLLQRFQDRPIAIALELNKGPIVEALRKYDGLGLFHINPMMLARYREAFTPSRAKDDPTDAELQLDLLLRHRDKLKPLAPQSPEMRALSQLVEHRRRLVADRVRITNRLTSALKTYFPQVLQWFPNKETQLFCDFLSQWPTLKSAQLARRSTLARFFRQHHVHGEQRINERLEAMKSATALTSDEGIIRPQALLVQALVSQLRVTLEAIGSFDQAIAERAQQHPDFALFEALPGAGAALAPRLLVAFGEQRERYGSAAEVQTYAGIAPVMERSGKRSWVHWRCQCPKFLRQTFVEWAAESMQFSFWARAYYQQQRDKGASHQAAVRSLAFKWIRIVFRCWQTGTPYNESTYLAALQRQGSSLIPNLAKSSKKGENT

SEQ ID NO: 334994 - protein, 347 aa, unidentified
MAKIAYIALDLHTRSCTLGVMSAAGRFLGNQQFATTERELVKALEMVKAQHKHLVIEEGPLTRWAAQVASAHVERVVTCDSRENALIYKGSSKRDTLDTEKLCRLLRLGELKRVYQPESDHRAIFKAAARHYIDLRHQLIAIKQKIKAVFRYWGVIDCFGARLYSAKGREGYLERIAHGVVRQQLLRLYELMDFHVQAKESAKAQLKALGRRYPEVREFKKISGIGTLNACLFDAFIQTPHRFGNKRQLQRYCRLGVTERSSDGKPLGYQRLDRSGIGELKAISFRTFVASMRGDNEVKRFYQQSLARTHNKVHARLNTQRKVLSVMYGLWKKGGTYRPDLFLDPSA

SEQ ID NO: 334995 - protein, 369 aa, unidentified
MTDLTLFVGLDVHKKTISVAVAESTVGAEVRFYGTVANTPDSVRSLCKKLTKDGQQLHFCYEAGPCGYGVQRQLARLGHRCDVVAPALIPRKVGDKVKTDRRDAMMLAQTLRAGQLTAVWVPDEAHEAMRDLVRLRAQAMRDLRKTRQHLLSFLLRHGLISPYGHWTKMHRRWLGELTFAHPAQHLAHEEMLQRIERAEGLCDRLKGAILDLVPQWALAPVVQAIQALRGVSLIVASVIVAEVGCFSRFDSPRQLMAYLGLNPSEHSSGATVRRGAITKTGNALARTCLVEAAWTYRFPARVTQIIRDRLKNLPEPIRNVAWKAQVRLSARYRKLIAVGKPAPKVVVAIARELVGFIWAIARMVEPKFA

SEQ ID NO: 334996 - protein, 386 aa, unidentified
MIEAVIERCAGIDVGKKFLVVCVMSGSLEAEPKTEIRKFGTIVAELEHLRDWLIHEGCSHAVMESTGSYWKPVFNILEDSVEVVLANAYDVQNRRGHKTDPNDSRWLAHLLRHGMIRPSFIPERAIRELRDLTRRRRQLVGERARERNRIQKVLEDANVKLGDVLSDVLGLSGRLMIDALLEGLLQVEQIAQLAQRKAKQKIPDLIAALQRNRLTDHHRFLLRHALRHLDFLAEEIEALNIEIRSRLTAEQFRQKHALLQSIPGIQEEASAAILAEVGPNMAQFPSDAHLASWAGLCPGNHQSAGVRKTGRTNRGNNWLRSILTQCAWAASNKKNSMLQSFYFRLSSRCGRKRAIVALGHRLLRVIYHVLLRDQPYQESNVRLFSA

SEQ ID NO: 334997 - protein, 371 aa, unidentified
MNQLIKQCVGVDISKESFTACVCSRLLTGEEQLSEVLEFKNLKSGFNQLIKWSRKITVPSLEVTFVMEATGVYHENLAHHLHKLKQPVCVLLPNKVKHFAKSLNVKTKTDKVDARVIARMGAERKLSNWSPPHPLFKQLRDLTRGYSELMKEKTVFTNRLEALNSGYEPLSMIMKSHKEIIKQLDKQLARFKVEIEKLIFSEEWLAEKVKKILTIKGVGLMTVAVILAETQGFEFVQNIRQLCSYAGYDVVQRQSGTSVSGKSKISKKGNSWIRGALHFPALVASRHNSIMKTTYQRINNRNTYKMIGATAIQRKILVLIYTLWKNDTIFDEEYEAKRKAQKIPQRKAGRGISSLPAQDELKPKDLKFSFV

SEQ ID NO: 334998 - protein, 450 aa, unidentified
MSIAEAPGGHRCPSASQPEFAAFVGLDWADEKHCWKLAVAGSADWEQGEVKNTPEDLLAWATRLYARFGGRPVAVCLEQSRGAVVFQLSQFPHLVLFPVHPTTVAKYREAFFPSGSKNDPLDTSLLLELVMHHRDRLRRLDPDTPETRLLQMLVEHRRKLVDEKTRLSNRLTAWLRMYFPQVLDWIDDIDSPLGCALLERWPTLEKLQHAHPGTLRQFFQQHNCRSGERIQQRIQAIYQAQPAVTDTALLRAGALMTSDLVALLKTLQGSITKLDGEIDSLSSQHAEAELFAGVPGVGAVLRPRLIAAFGTQRDRYATAGELQSYSGIAPVTKQSGKSRQVHFRRACPQFLRQTFHEMAAHSIAKSEWARAFYQTQRDNHKKHHAAVRALAYKWMRILFRCWKDGTPYDERIYMEALAKRNSPLAKLLAGPTGLKWKTVAGFQKITLENA

SEQ ID NO: 334999 - protein, 423 aa, unidentified
MEVVAARCAGLDVHKATIVACALIAQEGRARPRKEYATFPTTAAGLASLAAWLKGLGVEQVGMEATGVYWRPVYAVLEAQGGFELIVANAQHIKTVPGRKTDIKDAEWLAMLVRHGLMRKSFIPDQPFRDLRDLTRYRRALVETQASERHRLIQVLESADIKLSGLVSDVFGLSGRLMLRALIAGEQDPAVLADLARGQPRKKRDALREALAARLGEHQRRMLAIQLSRVEAAEADIAVLDQEIDQRLEPYAEEMALLITIPGVDRVVAAAVVAELGTDLSSFPSAEHLAAWSGTCPGNRESAGKAKPARARKGNPHLKTALCNAAIAATRKKGSYMRAKYYKLKARIGGGKAALAIAHKLVVVIYHVLSKRVAYRDLGEDYLDQINAKRTAQRYVQKLNALGYGVSLSLLTRPAPAPQAEPL

SEQ ID NO: 335000 - protein, 358 aa, unidentified
MADKVTVAAVVGGVDTHKDLHVAAVVDQNNKVLGTQYFATTRQGYRLMLAWMTSFGALKRIGVECTGTYGSGLLRYLQNAGLEVLEVTAPDRMERRKRGKSDTIDAECAAHAAFSGIRTVTPKTRNGMIESLRVLKTCRKTAISARRVALQIIHSNIISAPDELREQLRNMTRMQLIRTLGSWRPDASEYRNVTNVYRISLKSLARRYLELHDEIADLDVMIAAIVDELAPELIKRNAIGYESASQLLITAGDNPQRLRSESGFAALCGVSPVPVSSGKMNRYRLNRGGDRAANSALHIIAIGRLRTDDKTKEYVARRVAKGHTKMEAIRCLKRYISREVYTLLRNQNRQVNSIPIMA

SEQ ID NO: 335001 - protein, 314 aa, unidentified
MSPLIFVGIDVSQTRLDIAIRPGSSCSIAHDESAITTLVEQLCALSPTLIVLEATGGMEIPLTSALATAGLPVVVVNPRQVRDFAKASGHLAKTDTLDAQMLAQFAEVMRPQPRPIPDAEARALAALLTRRRQLVAMLTAEKNRLLTTPSPIRKRLRTHIAWLERELQATNTTLAEAIRQSPVWREKDDLLRSVPGVGPVLISTLLASLPELGTLTHKQIAALVGVAPLNRDSGTLRGRRTVWGGRAQVRAVLYMNAIVAARFNPVIRAFYQRLQRMGKAKKVALTACMRKLLTILNAMLKHRTPWRHEEAQHA

SEQ ID NO: 335002 - protein, 371 aa, unidentified
MHDTIFVGMDVHKATISIAVADGARGGEVRQLGNFLNRPDHVGKLVERLSKTGGQRLRFCYEAGPCGYGLHRQITDLGHECAVVAPSLIPIKAGDRVKTDRRDAVMLAKLHRAGELTAVWVPDAAHEAMRDLIRARATAVRVLGKARQHLQGFLLRHGRVYAGKKGWTLPYRRWLTTVRFDHPAQQVVLQDYIHSVHDAEERIARLTKQIEDLVPTWSMAPVVEAFQAMRGVAFVAAVTIVAEAGDFTRFDSPRQVMAYLGLTPSEQSSGTAIRRGGITKAGNALARRVLIEGAWTYRMQARVSRKLHDRLEGLPQIVRDIAWKAQVRLCARYRRLAATGKPKVVVTTAVAREMVGFLWAIARQTQIGSPA

SEQ ID NO: 335003 - protein, 341 aa, unidentified
MTDVSTIGLDLAKNIFQAHGGDAAGAVIFRRKLRRDQVLAFFAAQPPCVVAMEACPGAHYWVREISKLGHTVRLIAPAYVKPFVKRQKNDAADAEAICEAAQRPTMRFVAVKSEEKQASAVIFRTRDVLIGQRTQLINALRGHLSEFGFIAPQGPSHIQQLIDQVEDPSSRIPEAARCCLVFLIEALRRLEEQVRELDAEITARAKADDTAHRLMSVPGIGPLIATALEALAPPAETFRSGRDFAAWIGLTPLQRSTGGKERLGRTSRMGERTLRRLLIIASSAVVRWAKRKGVPSGSWLHRMLTRKPPMLVIVALANKTARIAWALMTKGGICRAPTVVA

SEQ ID NO: 335004 - protein, 440 aa, unidentified
MTTPSLLVLDPTAAAIDVGSEQLHVSIAGGPPKIFGTTTGQLHTLRDWLKENGVRSVAMEATGIYWLCPYEVLEQAGFEVVVVNGKYVKNLPGRKTDMQDCQWQGTLHAHGLLKPGFVPPEHIRRLQDYLRLRSDHIVMAGSHEQHMQKALERMNLKLHDVISDLTGVSGLKLIEAILKGERDPAALLGLCDPQIQKKKAPALRAALEGTWKAEHLFALRQPHELWGSYQQKIAECDQQIEAVLKELAGPEDPQAPAAPPATKRGGVNAPQIAGLHGLLWRLCGGKDPTTLPGVADYVWLQLLGEVGTDLGQHWKTEKHFTAWLGLAPGSKQSGKRKGSARRSRNRAGRLFCVIARSVGRSVDKALGGFYRRLKGRRGGLVANLALARKLAELFWRLMVHGISYVEQGLKQYEEQVARTEQHLLQKLARKYNLILQPKAS

SEQ ID NO: 335005 - protein, 326 aa, unidentified
MNVIGIDVSKDKLDCLWLRDGATGKVKSKVFNNQSDQHKALVEWSIKNLSCDATEILFVMEATGIYHEALAYFLYEAGAQVAVVNPARIRDYARALGSHTKNDKQDSRVIAHYGATQQPELWQPEPPAVRELKALLARLEAVDKDSQREENRLEKATFSQASVEVIGSIGNMLAVLAAEKKRLEKLIDDHINSDPTLKSDTALLKSIPGVGDVLSRYMAMTYHSRNFQSAAQMAAYLGVVPVEYQSGSSVRGRPRMSKAGSGVIRSKLYMPAVVAMQHNKQARELYQRLLKNGKSKMAAIGAVMRKIVHVCFGVLKHQLAYSLQAA

SEQ ID NO: 335006 - protein, 452 aa, unidentified
MRLLNGKQGLRRSQFAKELKGADLEKVLIVPIDTSKVLQKAMVMNYFGDIVQAPFAFMVSQTGMKFLIQKMEEAKRVCQAERIFVGIEATGHYYEDIVRILTSEGFSVHIINPASTHEERKQHLTYTKTDDIDLYLIAEVLVGNKATNAKLSSGEYRKLQNLTRARRNEVNKRSRIKTEIRTLHDHIWREYQGYSVLEEGKVKTKMIFSDFWGKSSLHILSHYPHASNILELGEIGLKRISKEHNLKIRKTTIKKLLFAAIESVSKSLEDLSSELFLLKQKLKDYEWHTQNIQTYEQEIERIFINTDGLFLLTVPGIGLVTAAEIYCEMGDLTHYTSANQLIKKAGTNPVIKQSGKGEGYHGRISKQGNANLRRAVYSAGKSLSIHNEALKPFYARLKEKGKKAGSVYIAMGNKFLKIAFAMLKNKKPFEWNNSTFNYKEEVFKKLSLPIAA

SEQ ID NO: 335007 - protein, 317 aa, unidentified
MEADLGLDIAKRKVDAALLVGEKFKTKVFANDASGFSALSMWLAAQQVTVRRICLEATGPYGEALATYLHDQGYRVSVVNPAQIKAFAASLLTRNKTDRVDARLIARFGALHRPAAWHPAAPEIRFLQALVRRLEALQEMLQQEQNRLATADPAVALAIARHLQFLQREVAQVRQQMHDHIDQHPDLKRKQVLLDSIPGIGAATIAQILAFFGEAHAFGSARQLAAFVGLSPQQRLSGSSVHGRTRISKTGRASLRKAFYMPALVAWRYNPIVRAFCSKLELAGKPKMVIAVAAMRKLLHIVYGVLKSGQPFNPNHA

SEQ ID NO: 335008 - protein, 430 aa, unidentified
MVLKETQETEEIIRRVAALDIGKAELTCCVRVPDDDRPGRRLQEVTTHTTMTRSLVGLADQLRALGVTRVVMEATSDYWRSPFYVLEAAGFETWLVNARDVRHLPGRPKSDAIDAVWLCKVAERQMIRPSFVPPADLRRLRDLTRYRTDLVNVRTAEMNRVEKLLEDAQIKLGTVASKLFGVSGRAMLAALVTGERDPKRLAQLARTVLRRRIPELEEALTGSFTEHHAYLLGRMLARIDAATADIDELDTKIETAVAPYADLAARLDEIPGIGPDSARVLIAEIGTDATRFPTAGHLASWARFAPVTQESAGRRKGRNSTGKGNRYLARTLGEAAVGASRTRTFLGARYRRLARRGQKKAIVAVGRSILTIVWHLLANPDTRYHDLGPDHFDRRLNPDRVRRTHVRALEAQGFTVTLTPAAPTGPAPAA

SEQ ID NO: 335009 - protein, 368 aa, unidentified
MGNYDYTGKQVYMGIDVHKKTYVCVCVSVSEGYIVKKDSMVANPKVLIAYIKNNFSNSEIETAYEAGFSGFHLHRELTKAGIKNIVVNAGSIEVASRDRVKTDKRDAKKIATQLAAGRLKCIYIPTLEQESKRTTTRLRDSIVKLRHQIGQKLKSLLFTQGLIGDTDDTVLRKKWVNAKVKQVKELNYPIGFYYTIKNYANQWLIFTSDLFRIKKELLAMQSEEENKLLSIYKSVPGIGDITALKLKDELGDMSQFSNEKKLFNYLGMTPTEYSSGENVRYGHISRQGRAVLRRIFVESAWIAIRKDLDLMKVYERIKKTRGAKKAIVGVARRLAGRVRVCLKKEEVYKINFLKTENVNVVVKHRISA

SEQ ID NO: 335010 - protein, 416 aa, unidentified
MNLFVGIDVSSEKLDVCFLTDDDQLSILSEIPVTNDIEGATSIRDMILEFNENYHFNQIMIGMESTSMYSFHPSMFFHEDEELKKLNTLVTIENPFRIKQFSRMFDEDKTDRNDALRIADFLRIQRFTTSPIKEEKYMALQRLTRTRYQLIKQLTRTKQHFLENLTYKCNTLAREMRDESTSLFSATVISLMTEDFTLDELAELPLEAFCDLLQEKGRGRFKQPEKIAKAIQRAIRSSYRLGSVAQESIDIVLGVLVCEIRALEKNIKELDKAIEQLVVVIPEYQCLTSIPGVGKVYAAGLIAEIGQIERFEDQTKLAKYAGLSWKVKQSGNYQSQNTPLTKQGNRYFRYYLVEAANSVKNYLPEYKAFYQSKYKEVPKHQHKRALVLTARKFTRLVDTLLRNHQLYTPPRSVIDK

SEQ ID NO: 335011 - protein, 366 aa, unidentified
MASVTPSVDLIHLGMDTSRDTIVVGILRPGEEIPAVDRVFNDEASVRRLIGRFADRSVLSACYEAGPGGYELHRLLTSMGVACEVVAPSLVPKGGSERVKTDKRDAIRLARLHRAGELTAIHIPTPDQEAVRDLVRVRGDLLADRKRAQVRITAMLMRHGRVWRAGAKWTATHRAWLGAQSFGEPALAATFAHYRAALDTRETELGAIESELAGWACGGSLAPAVARLGCYRGVAALTALTLASEVIDWRRFPTARAFMGFTGLVPSEYSSGERTRRGHITKAGSEQIRTALIESAWSYRFRPAIGVTLRRRQDGAQPDTLAASWKAQRRLHGKYQQMTARGKPAAVAIVAVARELAGFLHAEMTR

SEQ ID NO: 335012 - protein, 366 aa, unidentified
MVNFSTVVGLDVHKDTVVGALLLSGADEVKENFKIENTPKAVERMADRLGGREPLTFVYEAGPCGYELQRHLSSKGFKCVVISPGHTPVRTSDRVKTDRRDAVKLAKLYRAGELTEIRIPGVEEEAARDLVRVREDVLENRLRARHRVSKFLLRQGRVWREGRGWGVAHRGWLRAQRFELVYAQETYNAYLRTLDDTETHLEKLSQQVMDLAQEKPYRRLVECLSALKGIDTLSSITLAVEAQEFGRFESARDFMGYAGLGICESSSGPRVYRGGITKTGNAHIRRILGEAAWSYRHGGTGKPLLERRKKCPETIQRMAQKAQDRLHRKFWKLVNKGKLRQVAVMAVARELAGFVWAIARETYKTA

SEQ ID NO: 335013 - protein, 351 aa, unidentified
MSQKLNAAIAVIGIDIGKNSFHIVGHDHRGAIVLRQKWSRGQVATRLANLPPCLIGMEACVGAHHLSRKLQMLGHDARLMPAKYVRPYSKGQKNDFRDAEAIAEAVQRPTMKFVATKSADQLDLQALHRVRDRLVGQRTGVINQIRAFLLERGIAVRQGLHALRFELPGILATRTDVLSPRMLRIIEGLAEDWRRLDQRIEDLSSEIETLARQDEACQRLMTVPGIGPIISSAMVAAIGAGDVFSKGRDFGAWLGLVPKQISTGDRTILGSISRRGNRYLRALFVQAAWVVLVKVRCWERYGLSSWIEAAKKRLHHNVLAIALANKLARIAWAVLNKGRAFACVKTVETVS

SEQ ID NO: 335014 - protein, 415 aa, unidentified
MALKIVYKICCGIDVHKTFVVACIASTNSKGVTTYESHRFSTYTKGLRDLLQWLLARNCKDVCMESTGKYWIPIYNILENDCTIVLAHPKYVKAIRGKKTDKKDAKWIADLFKHDLVAGSFMPPADIRQLRDLMRYRFKLTCFRSSEKNRLQNCLTVSNIQLGNVVSDTFGKSAQAILDKLLENPADTSFDLEPLVFKSLKKKLPELRDAIDGFITPEQVGKLKVIKGHFEDLESRKAELEELILALAAPYQQELAILQTAPGISSVFTAIGIISEIGTNMEAFPSAKHLCSWAGLTPTNNESAGKKKSVRVSKAGCYIKPLLVQCANAVVTSKKHPEIRNRYLRLKKRRGHKKAIIAIARMLLTALYHMLKNGENYNAELYRKSNLPPVDREITVEQAIIIARNQGYKIKSATA

SEQ ID NO: 335015 - protein, 351 aa, unidentified
MMIIGVDYHPSVQAIAFLIEETGECGEQELKHSDGQAEKFYRDLKQRGISVRVGMEATGYSRWFERLLAELGFEVWMGDPAEIKAKRVKKRKTDREDARLLLRLMLENNFPQVWVPGPENRDLRQLLWHRHRLVQMRTRIMNQLQALAMNEGYRWKKKLFSEQGRVQLEKLALAPWASRRRQELLELLDRMNPTIKELTAAVEREARKRPEVLRLMTHPGVGPLTALAYVLIIGTPTRFQRGKQIGTYVGMIPCEESSARKQRLGHVTKQGNSLLRFLLVEAAQAATRIHPDWRRRYIHLAMRRHKSIAKVAMGRRLAVRLYWMWRNGCEYSPSLEFGSYAGQLEIGHGVK

SEQ ID NO: 335016 - protein, 436 aa, unidentified
MSCHLSTDPLARRRAPLGSNKFGDQGGCYLIFVGDDWAEDHHDVHLMDETGAPLASRRLPEGLAGIGELHQLLARHADEPEQIVIGIETDRGLWVTALVGAGYQVYAINPMAAARYRERHHVSGAKSDAADAKLLADLVRTDRHNHRLVAGDSTDAEAVKVLARAHQNLIWIRNRHTNALRSALREYYPGALEAFDDLHARDALAVLGRAPSPLQGASLSLAKIRSALKAAGRQRNLDTRAQEIQAALRTEQLAAPAAVTAAFAASTRATVGIIAELNRQITDLQTELATHFETHPDADIYRSLPGLGVILGARVLGEFGDDPNRYTTAKCRKNYAGTSPLTIASGRKRAVLARHVRNRRLYDALHQWAFCALNVSPGARAFYDARRAAGDLHHQALRALGNRLVGILHGCLRHRTHYDEHKAWSHRQHNPDTQAA

SEQ ID NO: 335017 - protein, 455 aa, unidentified
MPKPKRIRNARTSPVPRILEPDAAGIDIAATEVYVAVPTDRDPEPIRCFSTFTDDLHRLADWLRACNVQSVAMESTGVFWIPLFQILEDRGFRVCLVNARHVKNVPGRKTDVSDCQWLQYLHSVGLLRASHRPAQTICAVRSIWRHRESLVQMAAAHIQHMQKALDQMNLQLHHVISDISGTTGLAIIDAILDGERNPETLAALRDPRIVASRKTIARALVGDYRTEHLFTLQQSLRAYRQYQQWIAACDVEIERQLRVLPNNLADDQKPLSKSKDHHKPRRNEPSFDLRSQLYRIFGVDLTEVPGVSSLTAHALLTEVGPDLRRFPNAAAFASWLGLCPDNRISGGRVLSVVTRKVKNRLTMALRMAAQSLHRSQSHLGQYFRRMRVRLGTPAAITAAAHKLARILYHLITTRQPYQESTFAAMEERSRHRQLLRLKKQAASFGFQLVPGSSVP

SEQ ID NO: 335018 - protein, 408 aa, unidentified
MTVVGIDVSKSKSMVAAMKPGGKLVAAPYEVRHSDIELSHLALDVLCMEPDTRVVMEATGRYHEPVAAQLHSAGIFVSILNPLLIKQSGAGSLRKVKSDPKDALKIAKYGLDNWSTLREYTPMEAIRQQLKLCARQCDLYNKSIVMLTNNLISLSDKTFPGVNELFSSPEKADGHLKWVDFYRTFWHCDCINRMSPDTFGERYQKWCKRKGYHFSADAADALYAASCRPYTTLPRDNNAKLLVTVAADQLIALRENQSKLEAEMLNFCKQLPEYETVMAMYGVGKSTGPHLMAELGDVRRFPHRSSIVAFAGVDPGVVGSGKMQLSSVATSKRGSPQLRKALFQVVSTYVKCKPENEAVYQFYTKKRDEGKPFFVCTTAAANKFLRIYYARVKECLNAAESATQVEEG

SEQ ID NO: 335019 - protein, 354 aa, unidentified
MPKKRPSELTDLSVIGVDIGKDTFHLIGFNPSGERVLRLKIKRLALPQVFEDLPRCVVGMEACLSAHFVSRTLRRMGFEPRTVPAIYVKPFNKGQKNDYNDAEAIAEAALRPDLKTVAEKSQDQLDLQALHRVRSRLVSWRTATINQIRAFLIEQGIAVRSGLRALKTSFLTILDEREGEISPRMQTILMGLYEDWLWLDERIETVSKKISEIAVGEPNCRNIMSIPGIGPMISTAMVAAIGIGNGFDRGRDFAAWVGLVPRQYSTGGRTVLGRISKRGSRYLRMLFVQAAKVIMMRPHRWPDFSFGQWLANAAERMHRNKLGVALANKLARMPWSVLRHETRFDERGDAAIAI

SEQ ID NO: 335020 - protein, 361 aa, unidentified
MKKPAQHLIAEVPRRQAKVEITIGIDLGDVWSHYCTLNQDGEIVDRGRFRTTPKAIEKWFTDVPPARVAMEAGTHSIWISALLQELGHEVIVANVRELRAISHSDRKSDQVDAEKLARYARLDPNILRPIAHRTVAQQEALTLIRARALLVRLRTAAVNAVRGLTKACGFRMPASATTCFAQRCLAVMPFGLAQALGPVLQQIAEMTAKIKQYDRQIQQLGQTEYPETQALLKVHGIGHLTALTFVLTLGSKERFGRSRDVGCYLGLRPRRSQSGDHDPQLGITHAGNAYLRSLLIECSNHILRPHGRDSALRQWGLHLAARGGKQAKSKAVVAVARKLAVLLHRLWSTQEAYIPFYEKAA

SEQ ID NO: 335021 - protein, 413 aa, unidentified
MEILYARCCGLDIHKRTVVACLFVPGAEGTPTKEIRTFGTMTNDLLALSEWLAAAECSHVAMESTGVFWKPIYNLLESSFGVLVVNAQHVKAVPGRKTDVRDAEWIGDLLRHGLLRASFIPDRPQRELRELTRYRTTLIHDRANEVNRLQKVLEGANIKLSSVATDILGKSGRDILEALVAGTTESAALAQLARGRLREKIPQLEHALAGQFSAHHRFLIAQQLAHIDFLDASLERLSAEIAERVRPFDAARERLQTIPGVGRRTAEGLVAEIGTDLTRFPSAGHLASWAGLCPGNDESAGKRRSGRTRQGSPWLRTALVEAAQAAARTKDTYLATQYRRLAARRGAKRAVVAVAHTILVLVYVLLTREQESYHDLGSHYFDERDRNVVQRRLVRRLEALGYTVSLEPTIPAA

SEQ ID NO: 335022 - protein, 352 aa, unidentified
MERYVGVDPHGGTCTFGVMSAAGKRLNSLVVETNGRALVETVRGIGGRVHLCLEEGTQSAWLYELLEPHVAEIAVTVPGKKKGSKDDLRDAFSRANELRTGAIETRVFKAPEHLAGLRNAVRAYGFATTDVVRAKNRLKSVFLSRGISTDASVYDPAKRPGGLKQLSSPHRELAEWLGRQLDRLEPLREEAEGLLLSEAKKHPIIKKLSTAPGMGPIRTAQVVAIVATPERFRTRRQFWSYSGLGVVTESSSDWVRDRAGKLVRAHNVQTRGLSRKRHPRLKAVFKGAATTVIAQLADDPLHADYERMLKSGIRPTMAKLTLARKIAATVLSMWKHQEVYDPKRHRPTPEQK

SEQ ID NO: 335023 - protein, 341 aa, unidentified
MHSSSQLQTAATATAIEIATLLVSFELSEGRWVLTVRLPGSAKLSRFSVPARDTEAVLNLLAKQRRQAEQRSGRAVQIVSIYEAGRDGFWLHRWLQAQQIESHVVDPASILGPQRRRQAKTDKIDGAKLVRSLAAWLNGEPGVCSMVVPASVAQEDYRRLSRERGELVSERTRLSNRINGLLANQGIAGFKPLGKDAQLALDDLRTGDGRALEPHLRATIERILQRLALLELQIKTVEKERDTLLKAVPVDSGEVASREAAIARQLFRLRSIGPEFATVLPAECFYRAFDNRCQVASFAGLAPTPWASGSVEREQGISKADNRRLRRTMIELAWSWTRHTQ

SEQ ID NO: 335024 - protein, 332 aa, unidentified
MYSIGLDISKSTISIYIPINNQYIDIENSLKGLKSFYSKLKKLYKKQLNKIVFVYEPTGNYSILLTKFCCKKDIKSFIINPKQSANYAKAIGSRNKTDKVDSFILSSAIVIAKENEIKVPVINDKQETIKELMTYYKFIVKQRVQHNNHLESIKVKDGNSYIIKDLEKSIKKLKQQEKDIIDKTLSLIRSDSKLSNDFNNIKSIKGVGELSAIVLLHLFIKYPNANQKQIISLTGLDPIQKSSGTSIKKLPKISKAGSKIYRGTLFMSVLSAIRYNPICTYFYEKLKEKGKHSTVAQIAVMRKIILIAFSLYKNNQVFDEEKYFKQKGVKLC

SEQ ID NO: 335025 - protein, 343 aa, unidentified
MTMDTIIGVDLAKNVFQLHGASDSGEVKFRKKLTREQFRRFMADHPPAIVAMEACGSAHYWAREMEKLGHAVKLIAPRYVKPFVKRQKNDAADAEAIVIAAQRPEMRFVVPKSEEQQARAVLFRARERLVHQRTDLVNSLRSVLYEYGHVLPQGIKHLPRISEIIEAPNSDLPELVREECRELLEQIAQISDRIAEKNAKAKKLAAETDTARRLQTMPGVGPLIALAIEAFAPSMEHFQRGRDFAAWLGLVPRQFSSGGKQRLGRVSKAGQADIRQLLIMGAMSRLNWAGRRGVAEGSWLARICTRKPRMVVAIALANKMARAIWAMLTKQQDYRDPTKEIAA

SEQ ID NO: 335026 - protein, 407 aa, unidentified
MEVIIERACGMDVHKDSITACIITPKGKEIQTFSTKTVFLLQLIDWIKEHDCTHVAMESTGVFWKPIVNLLEAESIEFLVVNAQHMKAVPGRKTDVKDAEWIAKLLRHGLLKASFIPDRNQRELRELVRYRRSIIEERARQHNRIQKVLEGANIKLGSVVSDIMGVSSLDMLRAIADGENDPEKLASFARRSMKKKKSELELALRGYINPHQRLMLKTILVHIEFLTEQIELLNEEVATRLSSHQEDIERLDSIPGIATRMAEQILAEVGTDVEKQFPSSAHLCSWAGLVPGHNESAGKRKSTNMKKGNKYLKSALIEAAHSVRGSKTYLGALYRRTASRKGKKRAGISVAHAILRISYYLLTRKEMYLDLGEDYFDKQKEQSIVRYSVRRLENLGYNVTITDPNAS

SEQ ID NO: 335027 - protein, 341 aa, unidentified
MGEVSTIGLDLAKTVFQAHGADASGEVVFRKKLRRDALLAFFASQPPCLVAMEACASAHYWAREIAVLGHETRLIPPAYVKPFVKRQKNDMADAEAICEAAQRPTMRFVTPKSAEAQGAAVVFRTRDLLVRQRTQLINALRGHLAEFGFIVRQGSGHVSKLVDLVADPASELPAEARSVLAVIADSLQAIQARILMLDREIAARAKADPVVKRLMTIPGVGPIVATALVALAPAASTFRRGRDFAAWLGLTPKQHSSGGKERLGRTSKMGERSLRRLLILGASSAAKNAGRDGSRASPWLVGMLARKPRMLVTVALANKMARIVWALMVHGGTYRAPVAAV

SEQ ID NO: 335028 - protein, 408 aa, unidentified
MNPLFVGIDVSSKNNVAYLMKPDGSKHSSFSVQNNLGGAKLLSERIVSALGSMQLERVVIGLEATSIYGDSLVYALREDGRLGRFQRKIHVLNPKQVRKFKEAYSDLPKNDWVDAFVIADHLRFGRINREVYMDDYRYKALQTLTRARFDVIQNLTREKQRFANYLFLKCSGMAQDKDIQNTSATTIALMEHFETVDDLANADLEELTAFITETGRGKFADPDATAKAVRAAAKGSYRLPKTVNDTVNQAMAVSIASMRALKGQVKVLDKAIEQQFEIIPNTLTSIPGIGKVYSAGIIAEIGDIHRFDSQASVAKYAGLVWNRSQSGDFEAEHSRMIKSGNPYLRYYLLEAGNSVRRCDSEFRRYYDLKFKEVNKYQHKRALALTARKLVRLVFRLLKDNRLYIPPEG

SEQ ID NO: 335029 - protein, 344 aa, unidentified
MRTALTIVGIDLGKNWFHLVGLDGQGATVLRKKLNRRQLAEYAATAARCVVATESCPGSQYWGRVFAEAGHEVRILPAQFVKPYLKSNKNDFNDAQAIAEAGGRASMRCVPLQTTEQLELQALHRVRQRVVTERTAVINQMRALLLEHGIVIPIGRTLLIRRLPAIFAEAEHRLSPRLVGLLHRLRQRWLALDVEIEDTTRDLTAWAEQSDLCQRIATVPGIGPMIATAAVAAVGNGRMFARGRDMAAWLGIVPRQYSTGGKPTLGRISKRGNLYLRQLFIQGAQSSFLYLKRDQSSLGEWLRQVETRRHRQVAVVALANKMVRICWKVLTTEQVYEPYPARIV

SEQ ID NO: 335030 - protein, 362 aa, unidentified
MTKSTIIIAFDQHAATTVAAVLLPADRTPALHELTSDIPTILRFLERMRRGHAVQCCYEAGPCGFELQRALSGRGIRCDLIAPALIPRRSGDRIKTDRRDGAQLAVLYRAGALTAIHIPTEQEEAARDLLRCREDIRADLLRARHRLSKFLLRHGRRFTGTKKAWSKRHDVWLRAQAWPIPALDQTPRAYLRAVDEALARLRSAEEDLRALVTLEPLQARVQRLRCFRGMDDLTALTIAAELGDPRRFASAPRTMAFVGLVPSEHSSGTRHARGAITQTGNAHLRRVLVEAAWHYRHRPFVGAALRRRQRGAPDAIVAQAWTAQDRLYRRYHRLAGRGKPHQQVITAVARELTGFVWAALVQ

SEQ ID NO: 335031 - protein, 400 aa, unidentified
MNSVGIDISKGRSTIAVMRPFGEVVISPFEVRHTGSELSKLAKQLKSLDGETRVVMEATGNYHASVAKLLHNAGLYVSVINAKLVHGYGNNELRRVKTDRKDAVKLANYGLDRWLTLPRYIPEEDTRLLLKNCYRQYRQYSKVQTVLKNNLISLLDTVFPNANRLFSSPIRGDGSEKWVDFVAEFWHCRCVSEKSERAFTSKYLRWCRKHGYNFREAKAHTIYAEASGHIGVMPKSETTKLLVEQAVAQLRATSTALAALKHEMQSLASQLPEYPVVMDLFGVGPTLGPQLIAEIGDVRRFYSKKALVAYAGLDAPPNDSGDVTGRHKSMSKIGASSLRRTLFLVMSVYAPLDEPVCQFMDRKRAEGKLYRVYMMASANKFLRIYYATVKAYLESLEHTA

SEQ ID NO: 335032 - protein, 491 aa, unidentified
MTKKPKRNQKAEKVVPVVKPDAAGIDIGATEIYVAVPADRDPEPVRSFATFTQDLYALASWLQQCRIKTIAMESTGVYWIPLFQILEDRGFEVYLVNARHVKNVPGRRTDVSDCQWLQFLHSVGLLRPSYRPEQEICAIRSVLRHRESLVQMAATHVQHMQKALDQMNLQLHHVISDITGMTGLAIIDAILDGKRDPHELAALRHEGIKASEEVIAKSLVGDYRAEHIFTLDQSLTAYRSYQKLIEECDREIRGQVEKFKAPEACSTASEAEAPVGKPAKPVSLREELKRAFGVDLTKIPGIQVGIAQTLLGEIGPDFSKFRSASAFASWLGLCPDNDISGGKVLWVGTRKVNCRAATALRLAARCLHHSKSPLGDFYRRMRTKLGAPKAITAAAHKLARIIYHMVTTKQEFDESKFCRGPSACASAAASKASRSRQSTRIPTRAGPVEVSSLGAAPFPGCCENVSHGSIDRITQGKDWETAKENGVFDKS

SEQ ID NO: 335033 - protein, 353 aa, unidentified
MKKILKEVAGIDVAQKELVVTLGRLEANLDIELFAYKVFVNSEKGILSLISWISTHCVRPKDVRYVMEATGVYHEKLAYTLDENNLDTSIILPNKISNYARTLDVKTVTDKTASQSIARFGLERKLDNWSPPKAIYRQLKQLTRERDQIVEERAMVKNQLHAEKSEAMPNQRSLKRIDEKIKFLSDQEKEIKLDITTLLKDQPEIMDRIKNICTIPGVGELTAVIVLAETNGFELIRNKKQLTSYAGFDVREKQSGTSIKGKPRISKRGNRHLRKAMHLPSLSAVKYNRNHKDMYARIIAKSGIKMKGLIAVQRKMLELIYVIDKSRVGYENDYQQKKDTLHECRTYPLQTNL

SEQ ID NO: 335034 - protein, 424 aa, unidentified
MKVTYQTCCGVDVHKSFLVATIVKTSGGIEPSYQKKRFSTFNNSILEFKQWLLDNHCHDVCMESTGKYWVPVFNLLEDEINVVIANPKWVKAVKGNKDDTKDSKWIGDLFRLGLVKGSYIPCKKVRILREYTRYRYKLVSCRSSEKNRYQNALTVCNVALDSVVSDIFGKSSTSIIDYLLEQSGTSINHEEIASKLLRSLKSKEDAVIESVEGYQMTDAQKYRMRLVRAHMDYITAEINDVDKMIENMISSNPDFENAVQFLCTIPGVKRDSAITIISETGTDMSQFSSSKRLCCWAGLTPGSNESAGKKKSVRITRAGVYLKPALVQCAHAAVKSDKSPYYKKKYESLVKRRGKKRAIIAIARMILTAIYQMLSTGEQWNPSDLYKIDMPVALVEKQKAKAIKQAKKLLQREGLLPPDEPLAS

SEQ ID NO: 335035 - protein, 343 aa, unidentified
MEAKRYIGIDLHRDCFTACVRLENGREYLKKWKLEDMPKFAGKLRPADQVAVEMTGNTRLFHDQVRPLVDRIVAVNPTQFKVITHSVKKTDPNDARLLALYLAKDLLPEVRMKDKTQAQIASLTQTRDTMVKLRTALKNKVNNICSANGVNLNRESLASEKGLRAVGEMPFDPLVNLELKIIVDQIRSLNKSIAELEELIGQEGQKLDGHRNLTSIKGIGKLSGGILLSIIGDIGDFADEGKLASYFGIVPRVSNSNETEHSGRITKRGTKLGRTTLIQCALIAQRYSPYLKTYYEKIKNRRGAGKAIVALARKFLGIIYRTLKNNWVFEDFPNFVLAEEATA

SEQ ID NO: 335036 - protein, 339 aa, unidentified
MENFVGVDLHKKVSQLATLREPKPASQVRFPNNTVTVEKVLKKLPQGSKIALEATGSWWWFVDLAQRTGHEVVMSHPKQTKAIASARLKSDKVDALMLAKLLKADLLPTVWIPPAAQRYVRELLTHRARLVRQRTSVINELHALYAKRNIDPGMIFHRVRPPAFRAEDLSGYGPRIVEEDVALLGFLNRQVQGLDKELKAIAENDPESKRLMTIPGVGPVNAVAGSCWIGTIERFSNSKKLSSYFGLAPRVRQSGERERHGHITKEGNRMVRSLLIQAALWHIRRGPVSSRRHYLAVCNRRGKQIARVAAANKLLGIIFQMMKEKIDYEEFLRRGGNAQ

SEQ ID NO: 335037 - protein, 419 aa, unidentified
MKNENYRAFVALDWGDKAHAFARQVSGADGIEQGSIEATPEALHAWLEQLGKTYDGQPVALAVEAGRNSLLQALLEYAWLTVYPVHPATSARFRTAFTPSGAKDDGPDAVVILTLLRMHRAQLTPLVLDTPATRELAALVAARRGAVDQRTGTANQLGSALKGCFPQALTLAGDDLTKPMALAFLRRFPELSAVKKVRPATLAAFYRQQNARSEERIAERLALAAKARALIEDRAVIAPALLSVAMLVDLLEVHARHIALLAARIAKVFAAHPRAELFAALPGAGPALAPRLLVAFGDLPERYPTAASLQKYAGVAPVLEKSGQKSWTHWRWAAPTFLRQSFVEWAGQTVGLCDWAHAYYHQQRRAGKAHHAILRALAFKWIRILWRCWHDNNPYDEQLYLASLRRHGSSLVSSLLKTG

SEQ ID NO: 335038 - protein, 412 aa, unidentified
MQDILTCAMGLDVHRDIIVACLVKGAVDAEPEAETRTFSTLIPEMQKLRDWVIEAECRNIAMESTGIYWQPIYEMLESCFDGEISILVVNARHMKNVPGRKTDMKDAQWIATLLRAGLLKGSFIPDKTFRELRHLTRYRKSVVHDITAQKNRIDKFLQSSGFRFTAFLSDTFGASGRNIIRHLIEHGSIDREALDKCLKTKTRNRIDEILVALNGSLSVHQRRFLNMVFLHLEDLEAHKHTIEDEITEEVLKHTDALNLLCSIPGIDVTAAAAIVAEIGTDMSAFPDSQHICSWAGLSPGNNESAGKRKSVHINKGNPYLKSMLCETAWIMASHRKLYLSGWYWKVKQRKGAKRATIALARKVLSIIYTMLKTGTPYSEECFEQRRQRCERKRANRMVNELQKLGYTVVAPD

SEQ ID NO: 335039 - protein, 328 aa, unidentified
MQKNKAYVGVDVSQESLDMVEYPTGEIRRFGNDDAGIAKATTWLTEVNPAIIVMEATGGMEVSLYVTLQEANLPAAVINPRQIRDFAKSMGILAKTDKVDAKVLARYAATIQPEARPSPDEKARQFKTLVTRRRQLGEMIVAEANRARASRDKAMKQRIHAHIEWLKQELANIDKDISRTIKENPVWDAKDKLMQSVPGVGPVLSATIIAELPELGILNPKKIAALVGVAPFNRDSGKRQGERSIWGGRCKVRQSLYMAALSAARFNPTIHAFYDRLVASGKEKKVALTACMHKLVTILNAMLKHNSHWSCDHATFTDTCIPSAKTVA

SEQ ID NO: 335040 - protein, 343 aa, unidentified
MQTVTTIGLDIAKSVFQVHGVDTEGNVVIRRQLKRRYVMTFFQKLPPCLVGIEACASAHHWSRELQALGHSVRLMPPAYVKPYVKRHKNDATDAEAICEAVTRPNMRFVATKTAEQQSCLTLHRTRHLFIRQQTSVINAIRAHLAEFGIVAPVGRNGVEQLLGVVADGSDKRLPEITRACVAALGTQLRVLKAQILEFDRRIMAWHRSSEVSKRLDEIPGVGPALATALVASVADPKVFRSGRDFSAWIGLVPKQNSSGGKDRLGSISKRGDRYLRSLFTTGALAVIRYAKIHGTKHRPWLTALLARRPTKVAAIALANKIARMAWAMMAKGERYKEPAALAA

SEQ ID NO: 335041 - protein, 356 aa, unidentified
MNKRSKLNFSSQPVYIGLDVHKKSWSVSIFTKHGEYKSFSQPPEAETLMNYLQHHFPGAQYHSVYEAGYCGFWIHDQLREKGIQNIVANPADIPTQDKERRNKRDRVDCRKLARGLRSGDIKGIYTPPRWKLEDRSLIRTRLSMGRKQGRCKNQIKSMLLFYGVDIPEQREMGHWSRRFIRWIEGIRMQRASGDVALKIHVEELCYLRQVIAKLNRAILALSRTEEYQGWVSLLRTVPGISTLTAMIVLLELGEINRFPSLDRLCTYVGLIPDVQGSGEKEHVGGMTQRGHSYLRWLLVEASWVAVRKDPAMMEAFNEYCKRMKKSKAIIRIARKLLNRIRYVLKNQAEYVPCVIE

SEQ ID NO: 335042 - protein, 340 aa, unidentified
MEKRYIGIDLHRNRFTCCIRLENERTYVTEWELENLSRFVKKLRPSDEIAVEITGNTRLFYDAVAPHVARVVVVNTSQFKVICQSVKKTDPHDARALAMYLSKNMLPEVRMKDREHAQLASLTQTRDTLVKLRTALKNKVNNILSARGLNLAKEALGSEKALNEVLELPFDEIVRIELRVIVEQIRSLNKSIVELEKTIGEEGSKLEGHKGLSSIKGIGKITGAILLSVIGDVNDFADEGHLASYFGIVPRVSNSNETEHSGRIHKRGTKLGRTALVQSALIAAKYSPYLKRFYEQVKARRGVGKAIIALARKFLGIIYRTLKNRWVFEDFANFVLAEAS

SEQ ID NO: 335043 - protein, 331 aa, unidentified
MLNLSQSYVLGVDVAKEDLVVFDGEKHYKVKNVKGLRRLETIIRKHVGDDFGKVIISYEPTGGYSNHLVRFCSEKGIKTLKVNPYRASHFFKSQRIRGKNDDQDAENLRKLVFVIPEEVKETIIDEKAERLKSLIRVYETISKSIVRWKNSLAHRKKYYKTENREEIEAIKSIIRVLQKKEKVIVKKINELIKSDGELQKRREYIRSMYGVGEKTSMVLLGFFLMYPNSSRSQIVSLAGLDVINSSSGKSIKRKGKISKRGSRAVRRMLFIAAMNLANRNEKFKKIYENFLKRGKSKMTALTAISRKVLLITRALFLNMTVYVEDYKNVVL

SEQ ID NO: 335044 - protein, 394 aa, unidentified
MKLVGIDVGKNSHHFCVMDKETGEFNVTPSSFSNNKEGFDFLINSLKPYSKKSILIGMEDTGHYHVALLKFLLSNGYTVALINPKTTDLTRKMEGGITKNDKLDTITICDVLDTPERKKQYRITKVDRFDLYEQRQLTRHHHNLKEELNVYCNRLQKSIDLVFPEFNTLFSSKYSIVYMNLLKTFGSAEAIASTDIRTIRKCFEIKGRGNRISLTPEKLKECAKNSIGISSEVETIQIKHLVSQITLIKEQIAEIDKKIEEFSITNNSPILSIPGISHFSGTSILAELGDIGNYSKPSQIIKFAGVAPYHYESSQYNAQHTGITKKGSKYLRKTLYQIILTVINNNPVFKKYYRLKISQGKGHRCAQGHCIRKLLRIIYHLLETGQSFDPALLR

SEQ ID NO: 335045 - protein, 398 aa, unidentified
MDPVIGLDVAKGESQVQAFLQRKETYKQSFKFTHDLLGLQTFHNFYQEVEKVSGQPPAVIFESTGHYHEPVLQFLEDKDIAYYLVNPVISFEARKTNLRQVKTDKADAFHLGELYYKEDLEIYQRKTNKALNLRLLTRQHSALTDSYVQIKLQFQVALDQVFPEYHCAFSDLYGKLSLNTLSNYPTAIDIHKVADEKLAEEMSQFGVRRSHAWFLDKAQQLKEAARRNPYQSQISHGQLVSLRMYIQMLFQYQEHLSELLTEINALSNSFEEYRLIQSVPGIGDKIAATILSEIGDINQFEHPKKLVAYAGLDPSVFESGKFKASINRITKRGSSRLRQTLYTAVQCGLAKGRNKKLIAFYDRKRNEGKPHKVALIACANKLVHWIYAMLKRQEVFVD

SEQ ID NO: 335046 - protein, 383 aa, unidentified
MSLQNAPNINVDGKMDVSNIHFINENAGGAFMAKYNIGVDYHKKFSYLVVKEEKGRVLRSGQITNSKKAVADFLKPFKDDSTAVLESCRNWCVMHDWLEDIVDDVILANPYKVKAIAEAKIKTDKIDATVLADLLRADLVPQAYIAKRPVRDMRNLLRERIYFVRLRTMTKNRITTIFDRYPEEVRKEKAKTDLFGKKGRAQLESIELRAADRALIDRELNFIDFINVFIKEVEEVIAENFNESKNAKYLKTIPGIGQFFSMLIDAEVGDINRFRNEKKFASYIGLVPSTYSSGGSTVNGRILKRGNKLLRWAFIEAVIPAIAHDEYMRWEYDKLRTRMNYNKAKTAMARKLSAIAFKCLREQRNYKKFNKIELEYKKLGRAS

SEQ ID NO: 335047 - protein, 341 aa, unidentified
MQAVTTIGLDIAKSVFQVHDATGNVVIRRQLKRRYVLAFFQKLAPCVVGIEACATSHHWSRELKALGHTVRLMPPAYVKPYVKRQKNDAADAEAICEAVTRTNMRFVETKTPEQQSCLMLHRTRHLFIRQQTAVINAIRAHLAEFGIAARVGRHGVKDLLHVVADSSDRRLPEVARACLAALGVQLRMLKAQVLAFDRRIMAWHRSNETSKRLDEIPGVGPALATALVASVADPKAFRSARHFSAWVGLVPKQHSSRGKDRLGRISKQGDRYLRSLFTAGVLAVIRYAKIHGTKHRPWLTALLARRPTKVAAIALANKIARMAWAIMAKGERYKEPAALAA

SEQ ID NO: 335048 - protein, 392 aa, unidentified
MVVSVGIDVSKDKHDCFILNSEGEILSDVFTIPNSLDGFTILLQRIRDCSSSQDNIKVGLEATGHYSYNILGFLLDNGLPTYVLNPLRTNLYRKSLSLRKTKTDRVDARTIAAMLLSDAGLKPYTDTVYHNEELKSLTRYRFDKVKERAKLKSSVSRLVCILFPELEKLTPTLHMPSVYALLDEFPGAKQIAEANLTHLKAILHNASKGRYNRDKAIDIRESARASIGAVMPAKSLELRHTIRLIRELDAEIEDIEAAIQSIMNEMHSPITTIPGIGTRMGAMILAEVGDFSRFDSPDKLLAYAGMSPSTYQSGQLKNCYPHMEKRGSRYLRYALYNATKYVCLWAPTFAAYLAKKRAEGKHYNIALSHAAKKLVRLIFAMEKSRQPYCSAT

SEQ ID NO: 335049 - protein, 315 aa, unidentified
MRSTVAQSVGVDISKDTLDVAIHPGGESFRITNNPEGHRALIKRLKGFDIARIVFEATGAYHRLFQQALVEAGLPWVKVNPCQARRFAQATGKLAKTDRCDALMLARMGAALDLETRAPASKTVEALRELVNARDALIKDRVAALNRQAIAVSPLIKRQLAQRLRQIDGQIEAIDRRLKTLRNADSDLCQRFDILTSIPGIGEVTANVLVVETPELGRLEHAQAASLVGLAPVPRDSGQTHGKRSIRGGRPRARQALYMPALNAIRLNPEFKAKYEAMVKAGKPAKVAIVAIMRKLLILANALIRDRRKWAPANP

SEQ ID NO: 335050 - protein, 387 aa, unidentified
MTDSFDVRKSDRPFDQNHTLVAVIELSQTSWLVGGIVPGLKRSPLKKLKPDREALFRLLVRWRDEAVKAGQEIMRIAVACECGRDGFWLVRWLRTQGIEAYVIHAASVAVSREHRRAKTDRLDTELLKRAFLGWLRGEVRHCSMVTIPSFEEEDAKRPSRERETLVKERTRVINAMKSDLTRLGIRDFNPKPRTAREKLETLRTPEGALIPPNTLAKLLRDMERLRLVVAQIKAIETARLKRLESSPQEKPHAMVILLARVVGVGIETADMLVREVLSRELRDRRAVARYAGLTGSPDESGSKRREKGLSKAGNARVRRGMIQLAWRLLRFQKDSALVQWYQARTADGRGGTRKTMIVALARKLLIALWRLVTFGEVPEGLILRPAL

SEQ ID NO: 335051 - protein, 356 aa, unidentified
MAHYVGLDVSLKQTSICVVNQAGSVVREGVVDSDPELMAAFVRSKAPGALRIGLETGPTTTWLWTELRRLGLPVICIDARHAKAVLNMQINKSDRNDAAGIARIMQTGWFKEVRVKDIDSHLVKALLVSRALLVKIKRDLENQIRGLLKNLGLVVGRAKFNVFAVRTEELIEDRPELAAVIRPLLAARKAIEEQIGNLERKVLKLARHDMQVRSFMTVPGVGPVTALCFKATIDDPTRFKRSRSVGAYGRDAVHESAVEVEQERGCGIGHSGDLPKKPAGAPWQSQAAPRRAAHIAARSRTHNAPDTSRTRSPTGSRTRAGACRRSAGIWRQATDMRSRSTTRSPARREFRSSVRP

SEQ ID NO: 335052 - protein, 448 aa, unidentified
MRTRKPPRPRKMKLPKHLQHINPHAAGIDIGGRSHFVAVPEGSCEQPVREFTSFTDDLHRMADWLLACAVSTVAMESTGIYWIPVFEILESRGLEVRLVNARHVKNVPGRKSDVLDCQWLQRLHSYGLLQGAFRPTEQECTLRAYVRQRMNLVRYAASHIQHMQKALAQMNLQLANVVADITGGTGMRIIKAVLAGERDPLVLAQLRDVRCKSNEATIARCLQGNFRPEHLFSLKQAVDLYEFYQGQIGECDRQILDQLSSFDGADASGNGPPESLDEALQRMTGVDLTQIDGINSNSALKVISEIGTDMSRWKSAKHFASWLGLCPGTKISGGKRLSAKSKPVANRAAGTLRMAAFSLFNSKSALGAYLRRQRSRLGAPKAITATAHKLARLVYSMLKHGTAYVDVGQKRYEERYRTRVVENLKRKAHDLGYALVEVSGKQPQPVAS

SEQ ID NO: 335053 - protein, 370 aa, unidentified
MSVRRILAKTIDTDLEYEAIGIDLAKNCVSAALLTTDGEVVCIDRLDYSELEKSAQALSSTTFAMEPCTEMNYLVQKLEAWGHRCLVIGGKNVQNYVENHFSGQKTDLNDAQALAFLAQDTQLRTIKAKDVEQQKYASLTTLREQYIKQYRQTIVSLKGICQAWGLNISKGISGKARLKDLIENHAAFPEELKESLVDMVTHAQTAQKALNKITKTLEELAKSDKVCQLIQTIPGLGSICSCRLRATIGDIKRFKNPKDFPAYYGLVPRSIATGHNERKGKITHRGDRTMRSLMVQAAGSLVNMATKGKLKSKQLTKWILKKQKEKMPWGKLVCAVAAKLLRIVRAVLISNKPYNSKIAGVAKCSLPKGS

SEQ ID NO: 335054 - protein, 483 aa, unidentified
MKSDSKEKSKKTTNHPTRPHWDEMNRKQRRETMRKIQSEDLNLEVLHPDAAGIDIGNESHYVAVPPSRDKQPVRRFGCTTAELKAMAAWLKQCSIQTVAMQSTGVYWIAVFDILEQAGLEVYLVNARDTKNLPGRKSDVQESQWLMKLHTYGLLRNSFRPSQEIRTMRTYWRQRNDLVQSASRHILRMQKALTQMNIQLANVLSDVSGMTGQAIIKAILRGERDPHKLAEFRDPRVKANEEQIARSLEGNWQSDLLFVLKQEQDGYEFCQKQIAECDRHLAQYLQQKKDRSQDATLPVEQRKGRLKKTKRYVPQFDLRERLFCLTGTDLTQIDSIDVMTATTVISETGYDMSKWQTENHFVSWLRLRPDNRISGDKITGKGRLPTRNRAAIALKMAATTLRKSNTYLGAQFRRLRTKLGAPSAIKAMAAKLARLIYRMLRYGKKYIDQGAAFYELKHRELQVHQLKRKAASLGYRVTPIPAAA

SEQ ID NO: 335055 - protein, 331 aa, unidentified
MDEVKRFVGIDVAKVALDVFIGPAGAAFSVANDEVGIRELLRQLKPADFVILEATGGLEMPVASALAAAWIAVVIVNPRQVRDFARATGRLAKTDRLDAEVLARFGEAVRPEARPLADEQAQALEALVTRRRQLVEMLTAEKNRRANAPKVLHRSIDEHIRWLEKRLSGLDNELAELIRDTPLWRERDELLRSVPGVGKVLSSTLLAHLPELGALNRKQIAALAGLAPFNRDSGSLHGSRCIWGGRAQVRRVLYMAVVAAVRSNPVIKNFYTQLRARGKYPKSALTACMRKLLVILNAMLHNKTHWQTPALTSSTSPPSPLLSPVPEHGCC

SEQ ID NO: 335056 - protein, 337 aa, unidentified
MEHIGIDVHQKYSEICVVSEQGEIVIRQRITTTESQLRSFFKGRPQSRVIIECGPMTPWVYRLLSELAHEVVVVNPRRVRLIAESSLKTDVLDAEVLARVGRLDLGLLRPVYQRSQEAQELRTRLRARSALVKSRTALINTVRGTLRAQGYRMGSSSTRNFLPRYLTVKVPPSLAQAVDPLVETIVELTNRIDPLHKELVAESRSSELLVRLQTVPGVGPLVSLAFVGWMDQPKRFQKSRDVGPCLGLRPRLRGSGGYEYRGRITREGDSEMRRLLVQAAHAALHCRADSALKRWAEQLLVRVGKSKTVVALARKIGVLLHRLWISGESFRAFPQAA

SEQ ID NO: 335057 - protein, 328 aa, unidentified
MCKGTLPIGIDVGKDKLWAAAADQKPRCFEHTAQGIGELYAWARQANPPDILHFCMEATGVYSQSLAVRLLQYPQARVSIINPGQIAAFAKAQLRRTKTDKVDALTILAFAQSQNPAPWKPESLVLQQLQALVAQADALRSSISQWANRDHTQSFVPNLPVPVRRSTTAIQRSLTRQLTKIEKAIEDLCAVDPHLKNQVDLLCTIPGIARHSATRILAYGKSPLTEYSVRSLVAHAGLAPRHHQSGTSVYRKSHIAKQGNKQLRHALYMPTLVGIVHNPIIKAHYQHLLENDKPKMVALVACMKKLLLISRAILITNKPFNPDLITLT

SEQ ID NO: 335058 - protein, 315 aa, unidentified
MESMYNAVAGVDVHQQKLTITTLVGNNSKKITKTTWECGTYTDDLVEAGKKIKSLGVTEVAMESTGVYWRPVYNIWSKMGINITLGNAYHIKNVPGRKTDIKDSDWLAQLHGNGLIRPSYIPKEEFRKLRDLTRHRGNLEKDIIDVKNRIQRALEDGNIKLKSAISNVFGVAGRKVLMAIIEGEKDPEVLAKLVDTNVKAKKEVIRKSLNHTLDEINLFLLKNMYSQLLYLEHLAQELEKKINDMMAPYDKFIKKLDEIPGIDKITAQIIIAEATTDMENFKDAKAFAAWAGVASGNHESASKKKEQNVARGIPL

SEQ ID NO: 335059 - protein, 342 aa, unidentified
MKFYAGLDISQSETAICVVDETGQIVREQKVETEPELLLSALRAHNVSFERVGLEACPLSEWLFAELTAAGLPAICVEVRRLRATLAGLINKTDKNDARGIAQVMRTGWFKAVHVKSRTSQELRFLLAARKSTLDRVQDAENELRGALKTFGLKVGSTTRRTFAARIRELVADLHILTTIVEPLLAVRAVLIEQHNRLHKLVLEQVREDTVCRRLMTVPGVGPVVALSFKTAIDAPARFARSRSVGAYLGLTPRRYQSGEIDRTGRISKIGDRAVRTALFEAASVLLTRTTRWSKLKAWAVRLAQRSGAKTAKVALARKLAVILHRIWIDGTDFQWQTAENK

SEQ ID NO: 335060 - protein, 323 aa, unidentified
MMHVGLDLCRTRLDVCVLAEDGTNLRTTTAAPDPDGLRVLVGELAPLGPVSAAIESMNGARFVHDTLEMLGWDVEIADAQKVKGLAPLACKTDRIDARVLAELSRRDLVPAIWLPDPSVPAERELARYRLHLVRHRTMFKNNIHATLIAFGKPCPVSDLFGVAGRKLLQSLKIPEPWHVAVVDALRRIDDLDEEIDQRQKQLGYTIASEIGDINRFSSPAKLVGYTGLCPRVYQSGGKDHRGPLAKNGPRYLRWALIEAATHAARHPAYAEHYQRTAKRLGKQRGKKVARVEVARKLAEAIWHMCTTNRPFTPARSHVLPLAA

SEQ ID NO: 335061 - protein, 334 aa, unidentified
MNYVGIDLHSNNSVIAMVDERGRRHLDKRLPNELPVILSQLEGLGPIASVAVESTYNHYWLTDGLLDAGYKVLLANPLAMQPYRGLKHQDDHYDAGWIAELQRLGILPTAHLYSRQRRGLRDVLRQRSRFVQLKTSLLLSLQSRYARWLGQRVCKSQLLAGDVPDLGDEHENLAAHSQLDVLSHLTEQIQWLEDRVSQQLHLEDPSYRRLVHIQGIGPVLASTIVLETGDLSRFPRVGKYASYARVVNSTRWTNFKKKGDGNRRCGNRYLGWAFHEAAHCMHRSCTRMQKFRKHQLSRGKHPRVVWSTMANKVCRGLYLVMRDADEFSPERLFG

SEQ ID NO: 335062 - protein, 341 aa, unidentified
MLIIGCDYHPGFQQIAFVDTATGECGERRLNHTEGAEQFYRDLGARGIEARIGMEASGHARWFERLISELGFELWVGDAAAISTKRVRKHKNDRQDAELLLTLLVENRFPRIWVPSCENRDLRQLLWHRHRLVQTQTRLRNQLHAVALNEGVRRKKALWRPKGRAQLESLVLAPWASRRRQDLLQLLDQVDSTIVELTAAIGKEAEKRPEVLRLMTHPGVGALTALAFVLVIGTPERFARSKQLSSYIGLVPSEESSGERRRLGHISKQGNTLLRFLLVAAAQATVRSDPDWRRRYLRLAMRRERAIAKIAMARMLAVRLYWMWRNGWDYAQLPKLGSYAG

SEQ ID NO: 335063 - protein, 354 aa, unidentified
MNSIKYIGIDVHQATSVFAIRDSRGNIIGESILKTEPTTIVDFLKGQRGTVRVTFEEGTYASWLYDVVKPYVSKVIVCDPRKNKLDENKTDRIDARKLAELLRLNALSAVYHGEQSHQTLKEYARSYLSLQQDSTRIMNRLKAIYRGRGIGCRGKAIYRPKNRKEWLDKLKNKGARCRAELLLKQLELFGKLRLEAQRDLVRESRKQKDYKILKGIPGLGLIRRALIMAFVITPHRFRNKRQFWTYIGFSVVRRGSSEYEINEGELKRKKRKPLPRGLNHNYNHVLKDVFKGAALTAAYRGQFKKLFEQRVADGTAENIALLTIARKIASITLAIWKKGERFDIKRHQLSEQKT

SEQ ID NO: 335064 - protein, 376 aa, unidentified
MENDSTLYVGLDVHKDSITVAYAIGMGEVELLGKIGTTKTDIDRLCKRLQSKARHIRVVYEAGPCGYGLYRQLVQRGLDCMVCAPSLIPRKPGDRVKTDRRDAIKLVRSLRAGDLSAVHVPTVEDEAFRDLARAWSSSREDLKQARQRLKSFLLSHGVQYLGRADWGPAHRRWLSTLSFDSVWQQLAFNEHRRTIEDRLAQCERLEVALREAVVSWRFYPAVLALQAMRGIQFTSAVGLVSELGDLSRFEHPRQLMAWIGVTPSEHSSGNKRRRGSITKTGNSYARKLLVESAWSYRHPARVSVDIQRRHEGIPKAIIDRAWDAQLRLCRRYRQLVAREKCAHVAIIAVARELVGFIWDIGRLGMSLASSQNGQAA

SEQ ID NO: 335065 - protein, 355 aa, unidentified
MDSKKYIGMDVHKESISIAVMNGAGKIVMECVIETKASMILQFIDGLRGDVQVTFEEGTSAAWLYDLLKPHVTKLLVCDPRKNASMREGTQNDKIDARRLAELLRLNHLSPVYHGEHGLRSLKELVRSYLTITKDLGRVMTRVKAIYRSWAIPCTGKQVYAPRHRAEWLGKIGQPGVRRRAEFYYQQLDALRTVRQQVRRELLAECKKHQAWKRLCQIPSIGPIRSAVLLGILQTPHRFRTKRQLWTYSGFGIETQSSADHRNVKGQLERAKKQNSIRGLNRNCNHDLKNLFKGAAIVASSKPGPFQEFYTALLTKGIRPEMARLTLARKIATIVLIVWKRGACFDAQHLKPQAA

SEQ ID NO: 335066 - protein, 406 aa, unidentified
MAATFAHDETGIRGLCAALVRHEVELVAIERPDGLLVDRILDAGVRVVALHPNQVAASRDRFRASGGKSDRFDRFVLCELARTDSHRFRVLDPDSDQTKALRALTRAREDLVVARVAMANQLRAELDRFWPGPVRMFSAMDTPVCLAFLAKYPSPQDARALGEKRLAAFLKAHRSTKAHAASELLARLRDAPSGRAGEAETARRRSIVLGLVRTLSVMVEQINQLEAEIADALDAHPDGPVFRSFFASQTSVLCPATLLAEIGDSRARYPHRDAVAAQAGHAPVAVESGKRKTAKFRWACNHRLRNALHTLAQSIRRWNPWAADLYAQARARGHNHRRALRTIGRSLSQIIWKCWQTHTPYDPKRHPALQHHITVTIPDPSGPRPDHAATQRMMNSLTSPHIPTTA

SEQ ID NO: 335067 - protein, 386 aa, unidentified
MENKLTTLFVGVDIHKNSHTMVGVNALYEPLGRLTFANTLAGYRQATDFTSRLARKHNLRPLFGLEDTGGHGLPFARYLLGEQIPIKGINPLLVKRKRQYETHPEKSDPQDALGVAKVLVERTDALPLFTLTQTREFAKDMAYLSNDRDRLIIELTSIKNRLHRVLFRLWGLAYRTVVQKDIFGKKALLFWEKYPAAIDFKKTRRPIRHKPEWLTRTPSSELPIATDYARTYVRRLISRYRFIQREIKTIEADMEVLLNHSGYHYLTTLPGCNTVTALALLSHIGDIKCFPTASKLARYAGIAPRKFESGERKRDVISRHGHSRLRRCFKTIALSQLGINGRQESKAYYRRKLREGKTKQQAIRCLMRVNVNIVFAMLNYERPYYL

SEQ ID NO: 335068 - protein, 327 aa, unidentified
MERTRLGLDIAKGVFQAVLVAERSRLVWKRRWRRPQVLSELARLEPTLVLMEACGSAHYWAREIEALGHTVWLLPAQHVCAYRQGQKDDVTDALALVEASYRAELHPVPIKSEAQQELKLVYQVRRRLIQARTTLANQTRGELSEFGIVLPQGLNVLRRQLPTLLSRLRPRVAELMNQQYDELVALDHQIAAVTRTLERLAAEREDCRRLMQLPGIGPITAVLLVAHCCPHAYRNGRSYAAVLGLVPRHDNSADRVRLSRLTKHGQRELRTLLIHGGRSVLKYAARHDDRLSRWALEVAARRGKNRAAVAVANKLARYAWAELKRAA

SEQ ID NO: 335069 - protein, 438 aa, unidentified
MSNKVIFNLDDLFISVGIDVGADFSWMSIALPNQQFVGKPYKILHNSIDSLTTAVSKIKEAEELYSLESRIFLESTGIYHYPLFCYLRDKGFNCSVINPIITKNSTNINIRKVHNDRFDSKKAALVGLKPDLKVSLMPSDLALNCRNLCREYYDLMDNRSAYVNKLQGELRMAFPQYLGIFSKVTINTSLTLLETYTSPSAFLKADKQEIIDIIKSTARFGITYAQNKYNAIIQAATDANQFGYIIDSNIKRIRLYISFIRKYDEEINSILESLHELVDANEDSDFVKQIHLIETFKGAGFLSAVSIMGEIGDFSAFSKPKQLFAYFGLDPAVKQSGKFEGTKVQMSKRGSAIARRVIHTLTLQSISISRNREAKNPVLREYYLKKCDSKPKLVAMGAVSHKVCNMIFAILRDNKPFKIIAPQEHIKQYNSAKCDIAA

SEQ ID NO: 335070 - protein, 316 aa, unidentified
MIGIDVASAHVDVAAIGGALPIALGHVANDAEGHSALADGLARLTPALVLMEATGGYEAALACALQAAGLRVAVINPRMARDFARAMQRLAKTDRIDAATLAEFAGVLARRPDCERFIRPLSEPEQQDLAALVTRRRQLVSMQLAERQRLRLARPVARPSIEALVAAIAHQLDEVEAEMARHVEQHHAQMAKLLQSVAGIGRVAAATLIAELPELGRLNRRQICALVGVAPYANDSGTSRGRRRIVGGRFEVRRALYMATLTATRHNAAIRAFYERLVATGKLKKVALIACMRKLITHLNALTRDHLNAQDRSAIA

SEQ ID NO: 335071 - protein, 340 aa, unidentified
MTITIVGIDLAKNVFAVHCIDQNGKAVLVKPKVSRAALSELIAGLPPCVIGMEACSGAHYWARLFRQYGHDVRLMAPKFVSPYRMAGKTGKNDAADAIAICEAVQRPHMRFVPVKDESQQAMQCLHRTRQGFIQERTATYNRLRGLISEFGVIAPQSTDALRHVVSDQKETLPVQVRLCIDDLLAHVTNIEEKIAEYDRVLSRVAKTDHRSQQLMELKGVGPTTASALVASIGNAHDFKNGRQLAAWLGLTPSQYSSGGKSKLGRITKAGDAYLRTLLVQGARSVMVGAENRTDSFSRWVCSLIGRRGYWRAVVAIAAKNARLCWASLHYGDDFRLYSTT

SEQ ID NO: 335072 - protein, 338 aa, unidentified
MTIETLAIDIAKNVFQLHGVNRNGRVVLKRRVMRNQLLAVLAQVDPCTMVVEACTGAFWWARKFEALGHQVKIISPQYVKPFVRRQKNDGNDAEAICTAARQPHIPFVPKKTVEQQDIQALHRARQRMVNHRTAVVSQIRGLLLDRGFPIAKSITCARRLIPELLADLANELTPMARDAIADLYDLVRDLDRRIASFDKKIEQVFRGNESCQRIAKIKGVGPKTATAIIAAIGDGAEFKNGRHLAAWVGLVPRQFSSGDRTTLMGISKRGNQHLRSLLVHGARAVVRTAPSKTDLNSQWVNQLRERRGFNRATVAVANKNARIIWAVLRTGEHCRAAT

SEQ ID NO: 335073 - protein, 392 aa, unidentified
MVVSVGIDVSKDKHDCFILNSEGEILSDVFTIPNSLDGFTILLQRIRDCSSSQDNIKVGLEATGHYSYNILGFLLDNGLPTYVLNPLRTNLYRKSLSLRKTKTDRVDARTIAAMLLSDAGLKPYTDTVYHNEELKSLTRYRFDKVKERAKLKSSVSRLVCILFPELEKLTPTLHMPSVYALLDEFPGAKQIAEANLTHLKAILHNASKGRYNRDKAIDIRESARASIGAVMSAKSLELRHTIRLIRELDAEIEDIEAAIQSIMNEMHSPITTIPGIGTRMGAMILAEVGDFSRFDSPDKLLAYAGMSPSTYQSGQLKNCYPHMEKRGSRYLRYALYNATKYVCLWAPTFAAYLAKKRAEGKHYNIALSHAAKKLVRLIFAVEKSRQPYCSAT

SEQ ID NO: 335074 - protein, 415 aa, unidentified
MADQKQWYAGVDWASDSHLVFLADAQGHKIGKRQFKHSGQGIGEMTAWLMAASGAAEAPHIHIAIEVPHGPVVEALMERGFAVYAINPKQMDRFRDRFSMAGAKDDSRDAEVMASALRTDAHCLRQLTPIDPVLIELREWSRIADELTKERTRLANRLRDQLWRYFPALLELESDLWAEWLLDLLQIAPTPDRAARLRESAIAKLLKRHHIRRLDAAHVLKVLRQAPLRLAPGTIAAASAHVATLIVLIRPVNQQLRQAQRQIDILITRLACTDETEPGQIKQRDVEILASSAGAGRFVLATLLAEASDPLQRRDYPALRCLAGVAPVTKRSGKSRLVVRRYACNQRLANAMYHWARTAMQHDRTSRAKYAALRSRGHNHARALRSVADRLLNVACAMLRAGTTFDPSLARQKTA

SEQ ID NO: 335075 - protein, 398 aa, unidentified
MTESSDYESVQVFIGVDVGKDTHHAVAINRSGKRLFDKALPNDENKLRSLISDLKQHGQILLVVDQPATIGALPVAVARSEGVLVGYLPGLAMRRIADLHAGEAKTDARDAAIIAEAARTLPHALRTLKLADEQIAELSMLCGFDDDLAAQTTQASSRIRGLLTQIHPAPERVLGPRLEHPAVLDLLQRYPSPEKLASLGEKKLAAQLCKLAPRLGKRLAADIAQALAEQTVVVPGTNAAAVVLPRLALQLITLRKQRDEVALEVEQRVLAHPLYPVLTSMPGVGVRTAARLLTEVACRAFASAAHLAAYAGLAPVTRRSGSSIRGEHPSRRGNKALKRALFLSAFTALRDPLSRAYYTRKMSQGKRHNQALIALARRRCDVLFAMMRDGTFYTPQGS

SEQ ID NO: 335076 - protein, 346 aa, unidentified
MAILEDTRVITGGVDTHADMHVAAALDPLGGLLGVREFPATAAGYADLLGWLSGFGDLALVGVEGTGSYGAGLARYLAAARVRVVEVDRADRQDRHRQGKSDPLDAVSAARAAQSGRAAGAPKGRDGAVEAIRALMVAKRSARNERTQAINQARSLIVTGPDDLRVRFAGLTAAALAEGIAALRPRPGDAAQYAVRIALRELGRRVEFLDGQLERLDDLIVPLVTARAPGLLSLYGVGPDTAALLLVAAGDHPERLRSEAAWAHLCGVAPIPASSGKVRRHRLNRGGNREANHALWRIVITRMSAHPATRAYIERRTKEGLSKKEIIRCLKRYVAREVYHHLRAGG

SEQ ID NO: 335077 - protein, 337 aa, unidentified
MQKSCLGIDVSKLTFDVSLIVVVTGQKQPIVISKFDNDATGLKSFKVWLDDHHVTFDKNSLLVIENTGIYHRLIWDFCTTHLLPIFIGNAADLKWSFGIARGKNDKVDSMRLCDYAYKNYDEIKPTTGLNKVLITLKDLLSNRSKLIKLKNAIKQTLNELKGSNDKTTQSLMEKLNKAALDGLKKSIAQMDAELLKIVRQDEAILVNYKRMLSVPGIGKITATFIICCTNNFVIKVTGKQLANYAGVVPFENTSGTSVRGKSRVHFMANKELKSLLTMGALSAVQSYPEFTDYYERKMKEGKKHLQVLSAIKNKMLLRVASVVNEQKNYVDNYKKAC

SEQ ID NO: 335078 - protein, 391 aa, unidentified
MTKPKTKTVNDFSRCLDPLDMDATLIAVIEMSQSSWLVAGIVPGVERQPLKKLAIDEHALLNLLNRWRGEAEKNGHRIARIAVAFEAGHDGFWLARWLAAQGVEAHVIHASSVAVTREHRRAKTDRLDTELLKRGFLGWLRGERGHCKMVAVPTLAEEDAKRPSRERETLVGEASRIITRIKSAFVRLGIRGFNPKLKAAATRLETLRTPEGEPIPPNTLAALKRDLERHQIVKKQIRELEQTRLESLTQAPAKGPNVMVLLLARIIGIGVETADMLVREVLSRTMRDRRAVARYAGLTGSPDESGAKRREKGLARSGNARVRHGMIQLAWRFLLFQKDSALAQWYRQRTANAPSTRKPLIVALARKLLIALWRFARDGVVPEGVRLRPAA

SEQ ID NO: 335079 - protein, 359 aa, unidentified
MSNDSTEFFVGIDLGDAEDKVAILDRDSKEPETDVVENTISAMNEFFDRFEEPDKVRVAVETGTHSPWLSELLRERGFEVLVGNARKLRLIWKQDIKDDFRDARMLARICRFDPNLLYPIEHRSRGAQMDLAVLKARDLLVRSRTSMIQFVRSVVKSAGERLPSCSARAFSRAVVEYIPKDLLPATVPCLNMIEEINQEIRRLDKQIETMCSEIYAEETAPLRQITGVGALTSLAFVLTLEEPSRFAKSRDVGAFLGLTPKRDQSGQSDKPLSITKAGNAYLRRLLVGAANYILGPFGPDCELRRYGERIASRGGTVSKRKAKVAVARKLAVLMHHLWKDHETYDPFYHANARKLRNAA

SEQ ID NO: 335080 - protein, 375 aa, unidentified
MKEKLRFLGMDVHAETIAAAIAEPDGEIRSLGTIPNRMESVRKLLKKLGPVEKLRVCYEAGPTGYVLYWQLAELGVQCEVIAPSLVPVKAGDRVKTDRRDAEKLARSYRSGDLTAVWVPDAGSEALRDLVRAREAAKQDQLRARHRLGKFLLRSGHRPPSGVRAWTHLHLIWVSQIRFAQAAQESTRLDYLHKVEHMRERVLRLEQAIAEAVKLASPALQEVIQDLQALRGIAHISAVTIAAELGQVSRFAGARELMGYCGAVPSENSSGKRTRRGSITKTGNAHLRRIVVEAAWSYHRPPAIWAGLRKRQQSASEEAREIAWKAQHRLHKRYARLAATGEDKRKIVTAVGRELLGFIWAIGTKEEATVVQRIAA

SEQ ID NO: 335081 - protein, 411 aa, unidentified
MDVFVERCAGLDIGKADLKACVRSPGARRNARRSEVRTFRTTTAGLLQLRDWLAGQAVTLVGMESTGDYWKPVYYVLEDALECWLLNAAHMKRVPGRKTDVSDAQWIAQLIENGLVRPSFVPPEPIRRLRDLTRYRTALTQERTREIQRLHNVLEDAGIKLSCVATDIMGRSGRSMLAALVAGERDEHVLADMALAKLRDKMPALQEALVGHFGDHHARLVSMMLGHIDTLQGDIDTLTEVIDEQIRPFHRTRQLLCTIPGVSERIAEVIIAETGAEMARFPTPGHLTSWAGMCPGNNESAGRHMSGRTRKGNRWLRSALGQAAIGAARTKASYLSARYRRVAARRGKQRAQVAVGATILQAAWHIMAADVAYADLGADYYLTRVPNPQRKIDRLTHELQALGYKVTLTAA

SEQ ID NO: 335082 - protein, 372 aa, unidentified
MEKFSKYVGLDVHKDTIAVAIAAEDSEVRFYGEIANNPTAIIKLVKLLSKEGELVSFCYEAGGCGYKIYRQLTAMGKDCIVVAPSLIPRKAGERVKTDRRDSINLARLYRAGELTPVWVPEDEQEALRDLTRAREDMKHFERQAKQRLLAFLLRHGWVYSGKARWTHAHYRWMETVKFDRQAQQIVFQEYKDIVNSFGTRVEEIENQMQIHAKESLSWPVIESLMSLRGVNFITAFTLIAEIGDLQRFASAPKLMAYLGLVPSERSSGNSVRRGGITKTGNSHVRRVLIEAAWTYRFAARRTPIIQRRMDKVPTAIQEISWSAQKRLCQRYKTLQTNGKLKVQVCTAVARELTGFIWAIGQATPMMKNTPTN

SEQ ID NO: 335083 - protein, 413 aa, unidentified
MQTLYPRVAGLDVHKNTIVACVRISDDPRQVQETVRSFGAMTDDLLALSDWLTACGVTHVAMESTGVLWKPVWNLLEGQSWHLWLVNARELKQVPGRKSDVKDSQWIAQLLACGLLRSSFVPERGQRELRDLTRQRAQLAGEHTRCVNRLHKVLQDANIKLSSVATDVLGVSGREMLAALVAGEDDPAALAELARGKLRGKIPDLQRALTGRVTPHHQFLLEQLLDHLAHLEEQLSRFSLRIAEALRPFVDEATFARLDAVPGINRETIENVVAEIGVDMSQFPTAGHLASWAGVCPGNEESAGKRKRTRTTKGNVWLRRALCQAAWSAARTKDSYFQAQYRRLAGRRGKKRAAMAVGHTLLEVIYHLLKHPNRTYCELGGNYFDTLDPNRLCRHLVKRLESLGYEVTLTASA

SEQ ID NO: 335084 - protein, 340 aa, unidentified
MQITTIGLDIAKNVFQVHGIDREGRAILRRKVRRDQLLALFGGLEPCLVGMEACATAHHWARELMALGHQVKLMPPAYVKAYVKRNKNDAADAEAICEAVTRPTMRFVPIKSADAQSILMLHRARHLLVRQRTAQVSAMRSHMAEYGVVAPAGRGHVRDLIETLDKGEAALPDLARQVLLLIARMIEELNRQIRTIEIELLAWHRSNPTCQRLETIPGIGFITATALAATVGDARAFPSGRQFAAWLGLVPKQHSSGGKDRMGGVSKMGDRYLRYLLVLGGTAVVRYTRRKANTVSKWANQLLERKPARLVTVAVANKLARIAWAVMAREENYRAVPAAP

SEQ ID NO: 335085 - protein, 342 aa, unidentified
MDHFAGLDVSVKETSICIVDETGRIVREARVASEPQALLKVLGNPIHRFKRIGLEAGPLSQWLFSALAEAGLPAVCVETRHMQAVLKAQINKTDRNDARGIAQMIRAGLYRPVHVKTLRSQKLRMLLTHRKLLQSKAIAIENDLRGTLRNFGLKVGMVGKARFEARIQELVEHFPDLGVLVEPLLIVRRALREQIVLLHRRLLAIVREDEVCRRLMTTPGVGPVVALTYRATVDVPARFRKSKSVGAVFGLTCSKYQSGEIDWSGRISRCGDEMMRVMLYEAAQSMLRSKKWSWLKAWAMQIARRRGMKKAIVALARRLAVILHRIWIDGTEFHWTRETAAA

SEQ ID NO: 335086 - protein, 314 aa, unidentified
MTGFVGIDVAKAELVITSRPTLTRWSVANTASGIEALAAQLRELPPALIVLEATGGYEREVTAALVAAGLRAVVVNPRQVRAFAKATGQLAKTDRIDADVLALFAERMQPTWRPLAAEATTDLAAVLLRRRQLSDMLTAERNRLGVARRPVRASLKKHIAYLERELRGTESELRTLIEDSPVWRVHDELLQSVPAIGTVTSQTLLAELPELGQLTHKQITALVGVAPMANDSGRLRGTRAICGGRARVRQVLYMAALVATRRNPVIRRFYARLLAAGKAKKVALVACMRKLVLILNAMMRDQRPWAAPVEASPA

SEQ ID NO: 335087 - protein, 340 aa, unidentified
MEKPIDSQAPAYILGVDVSKDSLDVCLANCSDGRMLHQKFNNNPSGFKRMKAWLKQQGCEAGQETLCCMEHTGLYTRQLVHYLLARDVRVWMESALQIKRSIGMIRGKDDKVDAQRIARYALLHQKEAQCLSLSGVTLERLKDLQANRSRLLKALQSLKTTIKELLQVDPVSGKTLEQVNRKAIKGLEKSKEQVEEKMQQFIEKDGELKRKYDLLTSVKGVGKVLAISLLVYTQGFTKMEDGRKLACYCGVAPFEYRSGTSVMGKTGVSKFANKELKHVLHMAAMNSVRYNQELKTYFERKVGEGKSKMSVLNAVRNKLLHQIVAVVKRGTPYEVRLNNF

SEQ ID NO: 335088 - protein, 407 aa, unidentified
MRVLYGVCCGLDVHKKEITAALMTGEEEYVVKTFGSTTSALRKMVSWLKEVGCEYVAMESTGVYWKPVYNIFEIEGIPAMVVNASHMKAIPGRKTDVNDAQWIADLLRHGLLRASFIPEKEQREYRELVRYRTSRTEERAREINRLQKMLEGMNIKLGDFVSDIMGKSAGRLLSMALSHDELTDEQIKEASDIRLKASLDELKESLTGIITPLQRELVLMVIEVIGEQTAQIAKVEALIKKYTKEAYDEAAKKLEAMPGIGTKSAQAIIAEIGIDMSRFPTANHLCSWAGVVPGNNESAGKRKNAKSRKGNKHLKKTLSQSATSAIKNKNSFFHAQHQRLVVRKGSNKATIAVAHTMLIAIYHILSGKEFKDLGADYYSQFNKEKKIWSHLKQLQKLGWTPPEVKAV

SEQ ID NO: 335089 - protein, 362 aa, unidentified
MANCIMVGCDLHDKSMLLKVAVDRDKPCVRSWGTDRAARRAMMEDLKRRQGQVGAGRIVLGYEACGFGFRLYDELTEAGIEAHVLAPSKMARSAHQRRRKTDERDAQAILDIVRAYVLAGVEMPSVWVPDPQTRDDRELVRIRLAVAQDKSAAQVRIRWLLKRSGVESPGLKAWTAAYWCWLESLVMRRLPAGAAAALGSQMREVAWLESEVRRLEEEVRTLSQTARYRPVVEALCRFSGVGVLTAMVYLTEMGDLSRFRNRQQVGSYLGLVPSSFETGEGADRKGHITRQGPSRVRKVLCQAVWSRLRWVAWEREAYDRIVARNPKHKKIAVVARMRALGVRMWHEGLAAQESLAAEAQCA

SEQ ID NO: 335090 - protein, 381 aa, unidentified
MSIKSSTIYFVGLDVHKESVTAAVFRGRDAEPMRVDRLNNDAKSLRRYFERLAKTGEVRACYEASGAGYVLQRSLVEWGYACELAAPSLIPRRPGDHRKTDRRDAIKIGRDFRDDRLTLIHIPSATDERVRDVVRCRETFQREIVKSRHYILKFLRRRGFIYRQGTHWTMRHMNWIRCLLEPDTLADDDRMVLSEYLTLLEFKLQRRDALDRRIEELALMPRYKPAVDRLRCFRGIRTQSAMVLATELGDLRRFESPRQLMAYVGLVPRENSSGDRRRLGAITKAGNARVRHVLVQAAWNYRRRPAVGKALKQRQEAQPPEVIAHAWKCQHRLYRVFHRLAERKPRQLAATAVARELIGFIWAVLHDLDITQLHTEVSNAA

SEQ ID NO: 335091 - protein, 387 aa, unidentified
MDQTTFTLSANILHCALELSKNSWLLAIQFPDREQPSLYQIEGGNTEKLMAKLTAARDCWAKVSGALPVITLCYEVGHDAFWLARFLKVRGIECLVIDPGSLQVNRRGRRVKTDRVDVKMLLRTLIAWCRGERHVWSLVRIPSVDEEDLRRSHRERSRLVRERTAHINRIKGLLFAQGIRGVNVKSRYKTLAVDQLVTGDGHRLLPRLACEIAREIQRLAMVQEQIAKIERERDTAPTPCEATERKRHLLLRLKSIGPAISALLSREVYYRQFANRRQVGSFLGLTPSPYNSGEEERCQGISRAGSGHVRAIMIEAAWLWIRHQPKSALTRWFLERTASQSTRLRKIMIVAVARKLAIALWRYVEHGLVPQGAILNPPTAGERKMTG

SEQ ID NO: 335092 - protein, 422 aa, unidentified
MPRRAAADAVTSEAEDEVVTSIDRYDEVDVFVGLDVGKGEHHAVALDREAKRLFDRALPNDERQLRAVIDQLASHGVVLLVVDQPATIGALPVAVAQAAGALVGYLPGLAMRRIADLHPGEAKTDARDAAIIAETARTMPHTLRSIQVADEKVAELSMLCGFDDDLAGQIVQVSNRIRGLLTQIHPALERVLGPRLDHPAILDLLQRYPSPAAMKTAGEKRLGNRLLKNAPRKGRVWAAEIMTALGEQTVVVTGTDAAALVLPRLAEQLQALRRQRDEIAIEVEKIVDAHPLQPVLTSMPGVGVRTAARLLTEVTTKTFATAGHLAAYAGLAPVTRRSGTSIRGEHPSRRGNKILKRTMFLSAFAALRDPESRAYYDRKIAQGKRHNQALIALARRRSDVLYAMLRDGTLYQPRPAEPALAA

SEQ ID NO: 335093 - protein, 411 aa, unidentified
MLFLGNDWAEAHHDIELQDESGRVLARRRVPEGVTGLAQVHALVADHLGDDDEPGSVLIGIETDRGPWVQALVATGYTVYPINPLQVSRYRQRHATSGAKSDPGDAHLLAEIVRTDRAHHRRAAGDSEQAEVVKTLARTHQTMIWTRQRQANQLRSMLREYYPAAVAAFGDDLAGRDAVAVLAIAPTPAAGRALTRARIAAALRRAGRQRNIDRRAGQILDALRTDQLGLSDALTTAYAASVRALLAVITTMAAQVDVLEAEVNRCFGQHPDAEIITSQPGLGVILGARVLAEFGDATDRYADAKARRNYAGTSPITKASGTRRVVLARFTRNRRLADALHQQAFAALTGSPGERARLLPPAAPPRRHPPPSPAHPVQPPRRHPRRLPTPPDPLQRNDRLGTPHHRCSLTT

SEQ ID NO: 335094 - protein, 432 aa, unidentified
MERLREKAAGIDIGARKVFVSIDGDEVRSFFTFTEDFENLREYLIEHRIETAAMESTGVYWGILYEMLEEAGIDVWLVDGAQTKQVPGRKTDVKDCQWIRELHSYGLLNRCFVAESDVKELRIYQRLREDHIRSASMHINHMQKALTAMNIRLPEVLSQVHGASGLAIIQAILKGERDKEKLLSLCDIRIIKNKGEEVLKSLNGRYNRSGLFSLRQAYDSYQFYQNQISQCDIMLQEVIKRISCGKPDQKSNAPRKPVRHNKPDINDLGTEMLKIFDGKDATSLSGITDYTWMQLLSETGTDLKRWETEKHFTSWLGLAPGQHMSGKMKRTRAKNGKPKAGQIFRTIAQSLLTSKRIALGAFGRRLRSRKGSAIAIKAVARKLAILYWRIMVKGMDFVENGILKYEEQLIAQKQRSLMRLAKELKMQVVVPM

SEQ ID NO: 335095 - protein, 351 aa, unidentified
MMLIGVDYHPSFQTIAFLMEETGEYGEQELNHGDGQADRFYRDLKQRGICVRVGMEATGYARWFERLLAELGFELWIGDPAEIKAKRVKKQKFDREDARLLLRLLRENNFPQIWVAGPENRDLRQLLWHRHRLVQMRTRIMNQLWALAMNENKCWKKKLWSERGRAELEKLPLGFWASRRRQDLLELLDRMNPKIEELTATAEQEAKKRPDALRLMTHPGVGPLTALAYVLIIGTPTRFARGKQIGTYVGMIPSEESSGGKQRLGHISKQGNSLLRFLLVEAAQAAARVHPDWRRRYLHLAMRRHKSIAKVAMGRRLAIKLYWMWRNGCAYSQSGKCGSYAGELGTGHGGK

SEQ ID NO: 335096 - protein, 348 aa, unidentified
MALTIVETRAITGGVDTHADNHVAAALDSIGGLLGVQEFPVSAAGYARLLGWLGGFGTVCLVGIEGTGSSGAGLARHVTAAGVRVVEVDRSDRQDRRRQGKSDPLDAVSAARAAQSGRARGAPKGRDGTVEAIRALMVAKRSAAGERTQTINQARALIVTGPDDLRARFARHTPAALVTGLAALRPRPGDVVGFATRIALRELGRRAQFLDAQLERLDELIIPLVTARAPGLLALYGVGPNTAALLLIAAGDHPGRLRSEAAWAHLCGVAPIPASSGKVTRHRLNPGGDRQANHALWRIVFTRLGSHPATRAYAERRAAEGKSKAEIIRCLKRYAAREVYPHLRAAAD

SEQ ID NO: 335097 - protein, 387 aa, unidentified
MSQTVTALTPAAVDYERTLVLAIELSNKSWVLAAQVPGLPHTKAKRTVNPEAEALLAAIAGYRARAAATGRSIERVIAVYEAGWSGFWLARRLMGHGVEVHVIQPSSVPVDRRMRRAKSDGIDAELLLRTLLAWLRGEPRVCSMVPIPDEADEDARRCVRERSELIAERVGLTNRIGAVLATLGVSDYNPLLRNRKRRLAELRTGLGEPLPRNAHAKIDRLLARLELVLAQIAELERERDAVVETEASDKASKMIQQLASLRGIGVQSATVLVREAFVRRFANGKALGSYAGLASSPFNSGRMEREQGIGKAGNRRVRTVMIELAWLWARYQPDAAQVCWFRERVGPTGRRVRKIMVVALARKLLIALWRFVTDGTVPEGAVLKPAA

SEQ ID NO: 335098 - protein, 346 aa, unidentified
MPIVGGLDIHRKQITFDYVDTVTGELQRGQIAPADRAHLARWLAVRFPVERDVEFALEGCTGWRYVAEELARAGVVAHVAEPADTAALRGRRRHAKTDKTDSRHLRQLLCDGRLPECWVPPSHVLECRALLELYRDLRVEHTAWVQRIHAVLFHHGATQLGEGGLRSEQGLAELRAIAAVQLSPAGQLQVATALDMLATLDEHLEAVHRRLLDAARHLTGAKILTARLYGVGPITALALTCWLAGAGRFSSARKAVRFTGLDVTVYSSAGKRAPGHLSRQGPPVLRWCVYEAGKTHARSTAPDHAYYAQVKERIDGKRAAISEARKIVRQACHILTELGEDALAAA

SEQ ID NO: 335099 - protein, 362 aa, unidentified
MCERAVLTNRPSLDLSPFVLEGHRACRGAWDRSGVFLKEGSWMMAQNDLIVAGIDVAKDKVDVCIRSLSLRRTFASTAEGRRELASWLRRKKVGKAVMEASGGYEREWAKALRDAGIEVRIVDPKRVRSFARSAGRLAKNDAIDAEMIAWFAETFGEAPGQAYDAAREKLAQIVNARQGLLDLQTKLQNRGEHAGPEPVQKMHARLLKAIAVEVAKLEAAIAAMIKANPHFAELAEIIESVPGLAGTTSASLIAKMPELGQVSNKIAPALLGAAPYDDDSGRRRGERHIKGGRRKVRNLFYMACLGAATRHNPVLKAFYRRLIAKGKEPKVALVACMRKLIVILNIMIARREKWDASRYAVG

SEQ ID NO: 335100 - protein, 312 aa, unidentified
MIICGVDVSSDTLDARVGAGDGPFRQFPNSAEGAASLAGFCRTHGVGLVVMEATGGYEQRPFAHLWAEGVPVAIVNPRSVRRFAEGMGLMEKTDRIDAGVIAWYAQTKRIAPQPPASQTQQKLAAWVTRLRQLTELRVMQTNQRRLLSCPVALSSVDEIVALIVRQIRSLETGIAELIADDPLWARLDAEFRTIKGVAKRTIARLMADLPEIGTLSSKAVAKLTGLAPIANDSGKRTGRRPIRGGRESVRSILFVVAEIVRRYDPDFAAFHARLNAAGKPKKVIRVALAHKLLTRLNAKARDVREDFNAKAA

SEQ ID NO: 335101 - protein, 284 aa, unidentified
MAVAEPDGTVVEYGAIPNDPSSVRRLVEKLSRDAQLRTAYEAGPTGYPLHRQLTGLGIENLVVAPSLIPRRPGDRVKTDQRDAVQLARLLRNGDLTPVWVPDEAHEALRDLVRARDDARAEGLRAKHHLSKFLLRQGVIAPARVGRAWSARHQAWLNTLTFHDRAAQVTFDDYLACVRAATERLRRLDAALLECGASSPQVELLRALQAVRGIGFLTAVTIVAEAGDLRRFRSAPAFMAYVGLVPSEHSSGGSRRRAATSPRPATGCSGMSWARPPITLASSQP

SEQ ID NO: 335102 - protein, 290 aa, unidentified
MTNQPCFAALDVSLEKTTICVMSLDGTILREVVVTTDPNAIATCLAVDQERLERIGLEAGPLSEWLVRGLADHGITAVLMETRQVRAALSAMIVKTDRKDARGMAHLLRMGWFRPVHVKTMDAREQRTMLSARSTLMARLKDIENSVRGLLRGFGLRLPLLLRGRWDAGVREAVAGHPSLLQILDPLLTARRVLREQLILLDKRVRDAARVDRVCRRLMTTPGVGAIVAMTFRAAVDQPDRFRSSKKVGACFGLTPRKYQSGETDRDGAISRAGDASVRVALEGLIDRLA

SEQ ID NO: 335103 - protein, 304 aa, unidentified
MSGIGIDVSKRQLDVGTTDGEILQVSNSASGFAELDLWLRKHPASQIVLEATGGYERPVLDFLHAAGHSVVRANALRARRLAQGMGQMAKTDRLDAYALAQMAALVKLPAYQPLEPWQQKMREFVRARRQAMHALTIARQQLEMVGDRELRRLLQANITRLQTLVERLGKQIAEQVTQQPQLAVLKSMKGVGPGLQAVLASYLPELGKISGKAIASLVGVAPMSHDSGTMRGKRSIHGGRAEIRQVLYMASMSAMRHEPRLRDFYQSLRARGKEGKVAIVAVMRKMLVILNARVRDAQGGSIPA

SEQ ID NO: 335104 - protein, 357 aa, unidentified
MVERETEAKSSGSGVTNPYHRTEHCEKIHEYRCDKGVGVIGIDVSKEHLVTSKGRVRKYENNKEGYEEILEMKPCTIVLEPMGVYAIRPSQYFKEKGIKVLQVSPNMLSREKEFRGKKTDFYDAEKLENMVDKAKEYEYNPLRELVTLYLFLKDIETKYKNRLKRALFLVSDNNKISKERLEKLAMGDFTQEELYQLEYTPIVVEEIKVLAKTLLETQERLKEVRRMIEEQVPDNHVLLTIPGIGRLAAGIIIGIVGDIRRFPKPESFVAYCGLDPVVERSGRAVISRGISKRGNKYLRSLFYFLAVRNYSRNPTLLKFYETHKDRLRGKKLYAALARKLARVVWSVWYNNKPYEAK

SEQ ID NO: 335105 - protein, 438 aa, unidentified
MSNKVIFNLDELFISVGIDVGADFSWMSIALPNQQFVGKPYKILHISIDSLTTAVSKIKEAEELYSLESRIFLESTGIYHYPLFCYLRDKGFNCPVINPIITKNSTNINIRKVHNDRFDSKKAALVGLKPDLKVSLMPSDLALNCRNLCREYYDLIDNRSAYVNKLQGELRMAFPQYLGIFSKVTINTSLTLLETYTSPSAFLKADKQEIIDIIKSTARFGLTYAQNKYNAIIQAATDANQFGYIIDSNIKRIRLYISFIRKYDEEINSILESLHELVDANEDSDFVKQIHLIETFKGAGFLSAVSIMGEIGDFSAFSKPKQLFAYFGLDPSVKQSGKFEGTKVQMSKRGSAIARRVIHTLTLQSISISRNREAKNPVLREYYLKKCDSKPKLVAMGAVSHKVCNMIFAILRDNKPFKIIAPQEHIKQYNSAKCDIAA

SEQ ID NO: 335106 - protein, 342 aa, unidentified
MKFYCGIDLSARDCHVCVIDEQLKIVIEQKLRNELGKICQLLEPYKADLKIVVESTFNWYWLIDGLQAEGFEVVLAHTLGLYLITGAKVKTDRRDAYALAKLLLVGAVAAAYIYPVETRPVRDLLRRRAHLVQVRAGEYGSLRRLLLRQGILSSKQQEIKTATETELEQWFEHPLVRLHASQELQRIELYSQQIAELEKTILALAKTERSYELLLQLPGVGQTIALTILYEVGELTRFANVKVFSSYCRVVPGIAQSGNVTRRGRASKQGNHYLKAAFSQAAVHAVRCYPKVRRYYERQLKRHQGRGRQMICYNIIAHKLAQAAFHVLKEQTEYREELLFGR

SEQ ID NO: 335107 - protein, 428 aa, unidentified
MLSERLMLPIYDKNWKRRIGIRLDRKLRAIDPVQEINSHLLPNDHLEARPQSLWPVISYRSLVWPFTPITGFRLLTMRSIAMSYIGVDLHTNSFTICRLSGDGTEALETYPLCKADLDRFCYSLSADDEVAVEATGNSAYFRDEVQSCVGRFVTVNPGQFQVIRKSVKKTDKHDARALALFLSKDMLPETRLKSATHRELASITQTRDLLVKQRTRLLNKIHGLYNGHGIKIKKAKLGSKRALLALDMAVFSDLEKLELTIVRDQALSLSASIRELDRHIAAYVATVEGYQGLTSIKGIGDRSAAVLLSAIGDVADFETADKLAAYFGIVPRVSQSNETDHRGRITKRGNKLVRTTLVQCTLVSIRYSGYLNSFYQKIKARRGAGKAIIATARKLLKIIFDTLKNGWIFEDFTRFKIAENHFTAGQTS

SEQ ID NO: 335108 - protein, 411 aa, unidentified
MQVVHRCCAGLDVHKETVVVCVRRVDDRGRATEEVRTFGTMTSQILTLGDWLVECGATHTAMESTGVYWKPIWHLLEGRVELMLVNAQHIKQVPGRKTDVKDCAWIAQLLQHGLLKESLVPPQAQQELRELTRQRTQLVGEQSRVAQRIQKVLEDANIKLASVASEVMGLSGRAMLRSLIAGETDPAKLANLAQRKMRGKIPALTQALAGRVTEHHRFLLKLHLEHYEQLEAYVERLNTRIGEALAPSVPVRELLETIPGIAQRAAEVIMAEVGTDVKPFRTSGHLASWAGLCPGNNESAGKRRSGAMRKGSVWLRTVLIQAAWAASRTKDTYLSSYFRRVSARRGRKRAAAALAHTLLVVVYHVLNRRRPYQDLGADYLDRLEPERLTKRLVKRLERLGLKVTLEPQTVA

SEQ ID NO: 335109 - protein, 343 aa, unidentified
MDHFAGLDVSVKETSVCIVDDTGRILREVKVASEPEALLQVLRNPAYRFKRIGLEAGPLSQWLFSALAEAELPVVCVETRHMQALLKAQINKTDRNDARGIAQMMRVGLYRPVHVKTLRSQKLRMLLTHRKLLQSKAIAIENDLRGTLRNFGLKVGMVGKVKFEARIKELVENLPDLAELVEPLLIVRRALSEQTLILHRRLLAIVRDDEVCRRLMTVPGVGPVVALTYRATVDVPARFRNSKAVGAVFGLTPSKYQSGEIDRSGRISRRGDEMMRMMLYEAAQVMLLRSAKWSWLKAWAMKIARHRGMKKAIVALARRLAVIMHRIWVDGTEFRWAREFAVA

SEQ ID NO: 335110 - protein, 450 aa, unidentified
MARRTNRFDEVQRYVAGIDLAGHADHYVCGPRKDDGTHDIEHFGTTTNEILRMVAWLKERKVVSVAMESTSVYWIYVYDMLEKAGIRCLLVDTRTVKMVPGRKSDVKDCQWLQKLHSCGLLRGAFRPPEEFNAVRSVIRESENVRQMRTQSIQSIQKSLDQMNVRVHHAVSDIDGVTGMRILAAIVGGERDPRVLAKLRDKRCRKSEAEIVEELTGNWREEHLFNLKQAYDTLCFLDERIADYDRQVRDMYAKIAAKFPPVEPPPGGTGPKKPKDKDDAKAKADLARICGGFDMTKIDGIGYDNAAAILSELGPCLDAFPTESHFVSYVGVAPALGKSAGKNVSSRKKHKNTSRVGLVLKLAASTLTRSESSLGARLRCTRSRTCSRTAMKDVAREMAKRIYRGLRFGQAYVDEGEQAYLERTRERTIKSMKKKILKLGISAKELGIFAA

SEQ ID NO: 335111 - protein, 488 aa, unidentified
MELLYGRCAGLDVHKKTVSACIRISNGNQTRKETATFRTFTVDLERLCKWLEKHQVNHVALECTGVFWIPVWNILERSAAGFKLTLINPQHAHALPGRKTDQKDCERIAELLQHGLLKGSFIPPPAIRELRDVTRRRTHLQSDRNRVLNRIRRLLETANFKLGSVVSDINGRTAHLILDEITHGNCNPQELAQLAKASLKNKKVELAASLHGFYSEHFRWLLSEAVQELADLDRKLGQVDKRLAKQLQPHSDLILRLCTIPGVDFTTAAVIVAEIGLDMSRFTDAAHLASWAGLSPGNNESAGKRYSGSTCKGNRYLRRILTQSAWSLLRKKNCYLTSLFRRVSVKGGRKKAALAVAHRMLIIAWHIIQNGTVYEELGGNHYDRLHPDRSARRLIKRLEQIGFQVTVKKAIPESAPVPMPKEPAYNGHLSRKSKPPITNAPSPDEGKKNPADPAVCRRCAHWRIPCIHARNAKLFSGATIPCNTTSTT

SEQ ID NO: 335112 - protein, 434 aa, unidentified
MNQQTTTSTPAPPPDYAAFVGLDWADQNHALSLSACGSTARERTTLEQTPEALAAWAHSLRTRFPNGKVAVALEQARGALLAGLSQYEHIIAFPVNPKTLARFREALYPSRSKDDPVDADLLLELVLKHRHHLRPWQPDTAQTRQLALLNEQRRHFVDQRTCLTNQLLAHLKTIFPQALQLLGEDLASPMATDFLKKWPTLQAVQKPKPTQLRKFYYGHNSRSEELITGRLELIQKAVALTTDPVLLATHSLAIQTLAAQLATLRPFLKQYDEQIAELFAAHPDAPIFHSLPGAGAILAPRLLTSLGTDRSRFSNAQAVGSYTGIAPVTEKSGKNQFWVHVRWSCPKFVRQSWHEFANSSVKYSAWAAIYYHQFRKKMDHHQAIRKLAGKWQRIVWRMWQERKPYDENHYLAALEKRGIKLVAVQATELAKGGE

SEQ ID NO: 335113 - protein, 316 aa, unidentified
MSGTAKFVGIDVSKDTLDVAVLPDGDVWHETNSEEGINRIFEKLLDFIPEMIVLEPTGGLEYPLAEKLMAGHLPVALINPRQVRDFARSMGRLAKTDKIDALVLAKYGEAIKPAVRPLPDAVTREIKAMLLRRRQLQEMLIAENNRLLSAGSKVRPKIKEHVEWLKQALAEVDKDLSDQVRSSPIWKAKAEFLRSAPGVGKVLSVTLIGDLPELGRLHGKEVSALVGVAPFNRDSGQMRGKRTIWGGRTHIRKALYMATLVATRWNPVIKAFYKRLLEAHKPKKVALVACMRKLLTILNAMVRHGTYWDPDYATSA

SEQ ID NO: 335114 - protein, 318 aa, unidentified
MNTKIDQSINVGVDTGKTQLDIHIRPLDLFFSVENNEKGIKKALKTIKSHNPERIVIEATGRLEMPFVLACAEAQLPIVRANPVHIKRFAGAIGRRAKNDRLDAELIAHYGEAIKPAFTVIRPKNIRLMSDLVIRRNQLLSMQTMEKNRIQILPASLHPTIKPMLTTIKNQITKLEEKLVKLIEDSPEHQAKNTILQSVPGIGNIAAASIISNVPELGYITNKQAASLIGVAPITRESGRYKGKRVIQGGRAQVRTVLYMAMMSAMQCNPVFKATYARLLAAGKPKKVAIIACVRKMVVTLNSMLRDGAMWDENTAKN

SEQ ID NO: 335115 - protein, 352 aa, unidentified
MDYYAGIDVSLECSSICVVDATGKIVREDKVASEPPALIAWFGALGYGLTRIGLEAGPLSQWLYGGMTKAGLAVELLETRHAHAAFQVMPVKTDRKDARGIAQLMRLGWFRPVHCKSVGAQETRAMLSARKLVQSKLRDIENSLRGILRGFGLKVGKTTQRGFAGRIQELVAGHPNLETIAQALLAVHAVLLREFNAFEKRVRSLARADAKVGLLMSTPAVGPIVALTYASAVDDPGRFKSSKQAGAHFGLTPKKYQSGETDYTGRISKIGDAAVREALYLAAHVMLTKPLKGCSELKGWAMRIARRAGHNKAKVALARKLAVIMHRMLADGTPFNPTTKAKAQTKTMAAAA

SEQ ID NO: 335116 - protein, 320 aa, unidentified
MSASEPLFAGIDVSKLSLDVWILPAGESRSIPNDAAGHGVLCQWLLSCAVRLIVLEATGGYERGCASALSLAGCPVMVINPRQAREFARSMGQLAKTDRLDARLLAQLAQVLDRSPKRASLLHAAPDAARADLEARVVRRRQLIEMRTAETHRLDTAAPGIRKSIQQIIKALDRQIEDIDHHIDTHLRTHHALARELLDSVKGVGPGTIATLIADLPELGHIPGRQLSALVGVAPLNCDSGQRKGQRHVWGGRPQVRAALYMATLSAVRFNPVLKRFYERLLARGKPKKLALIACMHKLLLILNAIMRTQQPWNPALHEA

SEQ ID NO: 335117 - protein, 320 aa, unidentified
MNQIPQEIGVDVSKDELVAATYGLESVVHLANRRAAIRRWLKQLPAGCRIGVEATSTYHLPLAELAHAAGHCVYVLNPRQVARYLGSLRQRGKTDLLDAQGIARFVRNETDQVHPFTPPSRAQRGIASLIRRRHLLVKQRAALRQSSRSEPWLQKAIQPLLTGYRCLLAELDEELETLLAQTPDLALQRQRLQSIAGIGPLVSLALSNRLSQTDYRRSDALVAAFGLDPRPRESGTYQGRRKLSKQGHPEDRRLIYLAAQGACRAGLWQTERTQWEARGLSKTAVNCIIARKLLRIAFAVWRSEKLFDPTLIGKQACART

SEQ ID NO: 335118 - protein, 359 aa, unidentified
MADPLMLSYETEPYRRPPVQAKLVCIRVVARIARGTGEVNVDILGIDVGKREMHAVLLQGDRSTSKSVANTTAGFKQLATWLRNRKVESLHACLEATGGWSEDIAIALADLGFCVSLVNPMRVKAFAQSEMLRTKTDQIDAGLIARFCRMHAPAPWVPPSPEIRMLQGLVRRYQSLVQMRTEEQNRLQAPIIADAVEESITSTLGHLDNELARVDREIRRLFDQYPPLRRKRDLLLSIPGIGSTTAARILGEMPNIAEFRDVKAVAAYAGLSPRHYESGSVRRPSRIAKTGNANLRTALYFPAISAMRFNPTLRSFANRLRERNKSNLTIIAAVMRKLLTLAYGVLKSGQAFDPSYGAS

SEQ ID NO: 335119 - protein, 342 aa, unidentified
MKKYFIGIDVSQKTVDVSFVESDFQRKPEYLAQYTNDKKGYSLMVKDLRTVLRGVSSGQWLFCCETTGGYDRPLCYWLVDQGLRIWRESALQIRQSLGIRRGKNDKADSMAIADYARRHPDKASLFTKPSEKLASLKDLYLYRHSLVDKAKSTKNRIKALDARGTAVSLSAKFIVRDALSEIKRLEQSIKQCEQAMKDVIQSDVELEKNYRHLKSVKGFGHVVAVALMVYSGNFTNIPTANKLATYCGIATFRCTSGTSIDFRQNVDYLSNRKLQGVLTMAARCAIRHDNGMRTYYQRKTAQGKPHGVAINNVKNKLLHIAYALVKNDCDYDPNYVNEWQSI

SEQ ID NO: 335120 - protein, 324 aa, unidentified
MSKVKAERFAGVDVSKDFLDAMVVPDRNHFRQDNNEAGPKRVAGRLKRLGVQLVVIEATGGYERRLVEELALAGVPTAVVNPRKTRDFARSKGVLAKTDRIDAEVLALYADRIRPEPTVLKSREELEYSSLVSRRRQLVSDRAREKTRLEKANFEWERDSVKSHITWLDEQITQIGGQISEYINHDDDMKERDRLLRSVPGVGPVASATLMASLPELGKVGAPQISALAGLAPLNRDSGKFRGRRSVWGGRPDVRCALYMAVISAMARNPAIKEFYDRLRASGKCFKVAVTACMRKLLVILNAMARDGSAWDERCMREFHAIAS

SEQ ID NO: 335121 - protein, 356 aa, unidentified
METAYDGRQVVGMDLHRRRSVLVRMTEDGQRLGTVRIVNTPQALRRELARAGKCPKVVLEATYGWYWAADTLAAAGAEVHLAHPLGVKAFAYRRVKNDARDAADLADLLRMGRLPEAWIAPAEVRELRELTRYRQKLVHLRTSCKDQVHAVLAKLGVPVTCTDIFGTAGSAWLDALALPQPYAGKVTSLRQVAGALTAEITMLSEVIADLVAGDRGYQVIRQLPGIGPVLAAVIVAEIGDVTRFGNAGQLCSWAGLTPRHRESDVKVTRGHVTKQGSRILRWALIEAIQHQPAGSRPRQAKDAIIARRGTQARNIAKVAAARQLLTLVFYGLRDGQIRCLSPRSGQPATTGAEPTA

SEQ ID NO: 335122 - protein, 339 aa, unidentified
MVRMITGGVDTHADQHVAAAIDANGGVLGTESFPADVAGYEALLAWLVGHGEIDRVGVEGTGSWGVGLARFLRSHEVVVVEVDRPNRQHRRKVGKADDTDAISAARAALSGSAAVTPKTRDGAVEEIRILLVARRSSREQRIQTLNQLRHLVFTAPEPIRARFKDRYKTGLISEVAKLRPRAGSDPITYTTLLTMRGLARRIKHIDSEMKAIDTRLRLLIDDTAPSLLELHGVGLDTAASLLVTAGDNPERLHSEGSWAHLCGVAPISASSGKTTRYRLNRGGDRHANAALYRIVLTRMSSDPRTRAYVTRRRAEGRSNREIVRCLKRYVARETFKHLT

SEQ ID NO: 335123 - protein, 343 aa, unidentified
MKLNRIGIDLAKNIFQLHGVDDQGQVVFRRRLSRDKWLRVLCQSVTPGCEVGIEACGGAHHWARQLQARGFVVKVIAPQFVTPYVKSNKNDANDAEAICEAMSRPNMRFVKPKTVSQQDIQAVHRIRQELMSHRTAKANQIRGLVTEYGIVAPLGLAALRSAIPCWLEDAENGLTVLFRSLLYGLWEDLRRFDERIATMDAEVERIAKSDPVAQRLQQLRGVGPLIATALVASVGNGAQFSQGRQMAAALGLTPRQHSSGGKDRLLGISKRGDPYLRSILIHGARSTVAHAKNKEDRLSLWMTGLAQRRHLNVAAVALANKTVRMAWAMMRNETDYDPDYVTA

SEQ ID NO: 335124 - protein, 338 aa, unidentified
MKVYAGIDLHSSNNYVGIIDEQDRRLYQKRLPNRLKPILEALSPFKKSLNGVVIESTYNWYWLVDGLQEAGYKVHLANPSAIKQYEGLKHTDDKWDSFWLAHMKRLNILPEGYIYPKEERPVRDLLRRRALFVKSRTTHILSMQGAMTRTLNLKMSAREIKRLGDSDAGRMFDDPFNSLFARSSASLIHFLDKRIKEIEEAVKGYVRLKPEFEYLLTMPGIGRILGLTIMLEVGDITRFPSVGDYSSYCRCVKSERISNKKKKGEGNRKNGNKYLAWAYVEAANFANRFYPRVKSFYQRKMSNRNGIVAIKALSNKLARASYYVMRDQVPYDENKLFR

SEQ ID NO: 335125 - protein, 432 aa, unidentified
MRFAGLDVHKRVVQACVLDANGAERASLRFDLSVQALVEFAERHLDADCAVALEATTNTWAIVDILEPYCARIVVSNPMRTKAIATAKVKTDKIDARVLAQLLRADFLPPVWQPDAPTREQRSLASRRSALTRQSIHLKNRLHSLLHQRLIQAPKDLFGKTGRAWLAALELPALARGEIDTLLRLLDALALEQHSLRREIDRHGFASEDIRLLMSLPGIDVTIAHALVAAIGPIERFDSPERLAAYLGLVPSVHQSAEHTYHGRITKQGNSNARWLLVQAAHIAGKHPGPLGRQFAQLVRRKNRNVAVVALARKLAVLAWHLLTKREPYRYATPAVLETKLQRLRVSAQAQRKRGPRPGYRRSRNYGTGVGTRQIKALNTVLTQECLPAATAPPAGERRVIRELGLDAFAQNIQTEGRKLRAKFSRPTSISS

SEQ ID NO: 335126 - protein, 344 aa, unidentified
MDKDTTVAVDLAKSVFEIAVSPRPGRVSERHRLSRGALLPFFAQRPASTVLLEACGSAHFWAREIGELGHRVVLLPPQHVRRYRPRNKTDRADAKALLEAFRNEEIHPVPVKSPAQQQLVALHRLRSAWLGTRTARINTLRGLLREQGIVIPVGARHVVPRAAELAGDADACLSDSLRFALFELAREIRELEQRLDGLEDRLEALARENALATRLRSVPGIGLLTATALAGFVGDLRRFPSARHFASYLGLTPRERSSGTIRRLGAISKRGDVYLRMLLIHGARAVLAAAPQMKQPDRLRTWALDLASRIGHNKATVALANKLARYAWAVATRDRDFAGQAAAA

SEQ ID NO: 335127 - protein, 416 aa, unidentified
MSRKFMRTNTCGKLSQLLNIFERWFSHMYSYFVGIDIAKNTHWASCLSFDGEIILEPFSFSNDNSGFQKFISKLESLDKTKILIGLESTAHYGENIISYLFNLDYNIGLINPIQTANLRRSNIRKTKNDKVDTKIIIKALTLGNYSLITSRDINNLKLKGLCRSRRNLVTMRSKAKIQLVSYLDQIFPELAQFFKGNLHLNVSYQLLKEYSSPKQISSLHLTKLSNILHDNSHGRYNKQDAIRLRELAKNSVGIDNPSLSLQIKHSILQIELYNEQIAEVEALYKQILDKMNTPILSIPGMSYNQAAVIIGCIGDINRFKHSCQLLAYAGLDPSVIQSGSFQAKSTRMSKRGSGMLRYSLVYSAHNVVKNIKTFRDYYELKRSQGKSHYCALGHVAHKLVRIIFKMLKDNVAFNLD

SEQ ID NO: 335128 - protein, 337 aa, unidentified
MQVLFARCAGLDVHKKTVVACLMLTFPTGEVRKAVRTFATTTESLLALADWLTSQQVTHIAMESTGIFWRPVFNILEGAFSVVLVNAQHIKAVPGRKTDVTDAEWLADLLRHGLLKASFIPPQPIRDLRDLVRYRQSLVQECTRESNRLQKVLETANIKLSSVVSAVMGASGRSMIQALMTGEHSAEVLAELAQGSLHKKIPQLREALLGRVDAHHQILLSHLLAHISFLDQAIFHLFFQIHSYLKPYDEAVELLVSIPGIAQETAACILAEIGADMSCFPSAAHLASWAGLCPGNQESAGKRLGGRITKGNKRLKAALAEVVWVLSHMKDNYLSAQ

SEQ ID NO: 335129 - protein, 418 aa, unidentified
MDQQFGWFVGLDWASTLHRVCVLDGEGERVAERDVDHSGAALAELCAWLCQVTGAAPAEIAVAIETPRGPVVEALLEHGFAVFAINPKQLDRFRDRFSLAGAKDDSRDALVLGHSLCTDRHAFRRVAVDDPLVIELREWSRMYDELKQEQNRLANRVRDQLWRYYPQMCAFSEDFASDWFLDLWHAVPTPDAAARATNKAIGRILKSHRIRRFDAATVRGILRQPPLAVAPGTVAAATAHIRTVAARLRLVNTQIKETERRLDELCAAIEAAAETAPGQICEQRDVAILRSYPGLGRINVATLLAEACEPLQRRDYHALRTLSGVAPVTKRSGKSCVVIQRHACNKRLQNAVYHWGRVAIQHDPTSRQRYTALRARGHNHARALRSVVDRLLYVLCTLLERQVLFDPGYAEAPTTAAA

SEQ ID NO: 335130 - protein, 357 aa, unidentified
MAIVAQTHPFVIGVDTHARNHALSILACPHGETIDQAMFPATSAGLARAVSWAGQRTGGDLDVLWVIEGTGTYGARLARAAVDAGYPVVEAPRMNARANRGIGKSDPLDARRIAQAALPLATTQLRQPRADAGVRAAVRILIASRDHMSTERTATINALIALLRVTDLGIDARRPLTAGQVTAVAAWRTRTEDLATATARWEANRLAKRVTALDKDLTTITTRITDLLHHSPAGTLLEEPGIGPITAAVALTAWSHLGRIRSEAAFASLAGVNPIPASSGNTIRHRINQGGDRRLNRALHMAVLTRMRMDPRTRTYVERRTTEGRTTKEIRRCLKRYLARQIYRHLNAAAQLTPDTP

SEQ ID NO: 335131 - protein, 377 aa, unidentified
MTRTAHRGESTAAALYVAIELSATEWLLTMSTTAAAKRQRIRVRPGDVAAVRRALAEGGARAGLAADAPVWSCYEAGRDGFWPHRLLTQLGVTNLVVDSSSIEVPRRARRAKTDRLDGEKLLRLLLRHGGGERGMWQVVHVPTREAEDARHASRGLTTLHAERTRYRNRIRGILVLHGILRVRLDARFAERLSDLTDWAGAPLPTGAVARVLEAYHLLQAVEHECRRARQQERERVRVRARAAQTCAQQLAQLRGVAARSATILADELLGRGLRNRRQVGAVSGLVSAPYRSGTMQRDQGLVRSGVPAIRRIAIEVAWAWRRYQPTSALTAWYERRFGGGGRVARRIGIVALARRVLIALWRYHTTGLVPAGALLKA

SEQ ID NO: 335132 - protein, 428 aa, unidentified
MNTNDTTNTNDKTDPSAQPPQAWIGLDWGDQQHSFALQARGGQIETGTIEHSAENLHRWLKELEQRFGGRPVRLGIETSRGAVIAALLQYPWLEIYPLNPVTSARYRSAFKPSGAKDDLPDALVCLELARDHAAKLRPLQPQDPQTLKLAGLVEARRDLVDRRTTLLNQLTSLLKSYYPQALALLENLNTPMAVAFLKRWPEVIRLKAARPAAVKKFFYQHNIRSEELVKKRLALIEQAVALTTDEARLSVAVLQLHALVDQLEVFQKHVARLDAEIKSAFAAHPDAHLFRDLPGAGPQLAPRLCAAFGADRAAYPDPAGLQKYAGLAPVREKSGGQLWTHWRWNAPRFLRQSFVEWAGQTVRYCQWARLYYQRMTRKGKKHAVIIRALAFKWIRILWKCWQDRTAYDETRYLKQLIHRKSPNAVTAP

SEQ ID NO: 335133 - protein, 342 aa, unidentified
MTTLPSVPRYCVGIDLADRTFTVTLLNSQTRAKHSAPPFEQSTDGFRAFLQWLHQRRAIRRSTVVAMETTGVFGERLCLHLRSQGYRVSVIDAARIAATRRRSQPKSDPHDSYYIADYLARHWDEVSLWKPREAVFAELDAMLGTRELFVKNRTQLANRLGAVKKGATPHAGMMVILQQQIEHLTEAVRTIEKQIRQTLADHAPLERAKELLDSIPGVNLLLAANVLIMVEDQQQTLNPRTLANYLGICPHERSSGTSLYKRARSSRLGPPRMRKLLHLAARSLVQHDDRFKQYYHRKVQDGKAKMLVLNNVENRLLKIICAVLRNQTPYTKNHHSVNPAWS

SEQ ID NO: 335134 - protein, 338 aa, unidentified
MKLYGAIDLHSNNNVTVLIDEQDQVVYQKRLPNDLPLIAQQLSGYRDALQGIVVESTFNWYWLVDGLMDQGHRVHLANTAAIQQYEGLKYTDDHSDARWLAHILRLGVLPQGYIYPKEERAVRDLLRKRGQIVRQRTTNLLSIQNLVTRNTGSSIRSNRIKTLDTEQVDELLPNPDLALAVKANLAMINCANGQIDILERTVIDRIKLREEFSFLKTVPGIGQILALTIMLETGQVQRFPTVGDYASYCRCVGSQKLSNGKKKGSGNTKNGNKYLAWAFVEAANFAIRYNARIKSFYQRKKAKSHGVVAIKAVAHKLCRACYYIVKDQVPFDIAKAFA

SEQ ID NO: 335135 - protein, 356 aa, unidentified
MSYDVKYIGMDVHKEAIVIAVLNEDGKQVMESVIETKASSILQFLHGLRGELHVTWEEGTWAAWLYDLLQPQVQHIVVCNPRRNALLKEGSKSDKVDARKLAELLRTGMLRPVYHGENGLRTLRELGRSYQTISKDLTRVMNRLKALYRGWGIPCAGTQVYAARCREEWLSKIPQAGVRRRAELLYQQLDGLQALRRDVRPEFLAESRKHKAAKLLRQIPCIGPVRAARLIGLMQTPHRFRSKRQLWTYSGLGIETHDSAQYRFVSGQLQRSKKPQQVRGLNRNHNHEMKEIFKSAATRASCGRGPFHDFYAGLLAKGMKPEMARLTLARKIAAITLTLWKKEERFDVEQLKTQAA

SEQ ID NO: 335136 - protein, 349 aa, unidentified
MRSFQPPADTRFYAGVDLHARALFLVVLDRDGQTRLSRNLPAAPAPFLQAVAPFRDGLLVACECMHCWYWLADTCRDAGIAFVLGHAWAMKAVHGCKTKCDRKDAEAIARLLKGGNFPPAYVYPKERRGLRDLLRARLRLVRQRAHLYGHVHTARRQANLPPVSSDVKYKGKRAGCTADISDPFVRRRVETHLGLLDPLDAAIRKLEADIEDAARQIFPTELAVLQSTPGVGAVLSLTILLEIDTIDRFDTRQQFCSYARLCGAVQTSDNKRAGEGNKKAGNAWLKWAFSEAAVLSAQKDERIGALLARLASKLGKAKAYSALAHKLGRAFYHLLHTREVFDVNRFVRH

SEQ ID NO: 335137 - protein, 399 aa, unidentified
MKKPAGIDVHKDFLEVAFRDLSDNVKVVKIEYTPKGLNKLIKLLRRYSITDAYMESTGDYYLPLYYALRGAGIKPHVMNAYKIRRPEANKTDEKDAVWLLEVGESELFSDSYVPDEDIQALRFLMRKRMKLVDRISDIKREINSILWRLGLHAAQFVKKLRSKRKRRLLLDLLEGRLKPSDISDSDVKALYEVLSKSEFRAYIFVLKSRLADLAHLESQLEEFDREIVALAKKFESAIRILMSVPGVSFVLAAGILSEIGDINRFPSPGHLASYAGLVPTAKNSGGKRRSGKPSKKTNKYLRRYMFLAGMAAVRSNSQVVREFFQRLLGHGKHYKVAVVAVARKLLCVIWYLLRRGELWREDSYFKGPRRLPRRRRVKISVREAIAILVRAGYVVRKRA

SEQ ID NO: 335138 - protein, 352 aa, unidentified
MARELNSVIAVIGIDIGKNSFHVVGLDERGAIVLRQKWSRGQVEARFANLPPCLIGMEACVGAHHLSRRLRALGHDARLMPAKYVRPYSKGQKNDFRDAEAIAEAVQRPTMKFVATKTADQLDLQALHRVRERLVRQRTGISNQIRAFLLERGIAVRQGLRFLRTELPGILATRCEVLSPRMVHLIENLAGDWRRLDERIDGLSGEINALARQDAGCERLMSVPGIGPIISSAMVAAIGAGDAFDKGRDFAAWLGLVPKQISTGDRTILGKISKRGNRYLRVLFVQAAWVVLIRPKSWERYGLKPWIEAARKRLHHNVLAIALANKLARIAWSVLARGRGFEARSIATAQPA

SEQ ID NO: 335139 - protein, 341 aa, unidentified
MKHYAGIDVSLECSSVCVVDTNGKILREARVASEPEALIAWFASLGFGLERIGLEAGPLSQWLFAAMRQAGLAVELLETRHVRKAFEAMPVKSDRNDARGIAQLMRLGWFRPVHCKSMSAQETRSLLTARKLVQSKLRDVENSLRGILRGFGLKVGKTTEREFAGRIEELVAGHPHLQVIAKALLSVRAVLRSEFAAFEKQVRKMARSDMRTRLLMSTPAVGPIVALTYASAIDDPTRFKSSKQAGAHFGLTPKKYQSGETDYTGRISKIGDASVRTALYEAAHVMLTKPVKGCSQLKSWAMRIARRTGMSKAKVALARRLAVILHRMLADGTPFNAAAAT

SEQ ID NO: 335140 - protein, 343 aa, unidentified
MDHFAGLDVSVKDTSVCIVDDTGKIAREVKVASEPDALLAVLKNPAYHFKRIGLEAGPLSQWLFSALAEASLPVICVETRHMRAVLKAQINKTDRNDARGIAQMIRVGLYRPVHVKTLRSQKLRILLTHRKLLQSKAIAVDNDLRGTLRNFGLKVGIVGQAKFEARIKELVEDLPDLAVLVEPLLVVRRVLREQIGVLHRRVLTVVRDDEVCRRLMTVPGVGPVVALTYRATVDVPARFRHSKSVGAVFGLTPSRDQSGEHDHPGAISRRGDEMMRTTLYEAAQSMLMRSSRWCWLKAWAMKIARHRGMKRAIVALARRLAVIMHRIWVDGTAFRWTRQAVAA

SEQ ID NO: 335141 - protein, 341 aa, unidentified
MSDYSYFGGIDLAKNHFSIHVVDSQGKVILHKSVTRSKLLPTLANMPPMRIGLEAGGGAHYWARTLHGLGHDARIMAVKYVVPHRTKGKNDLNDAVSICQAVQHTSTRFVLVKSPEQQAILWVHRMREHWVRERTALMNRIRALLSEFGLIIPVGRSSLMKQVPLMLEDAENELPHLARTVIADAYHHLEALNQRIADTEQVFDAFAKVSDNVQRIMKVRGIGPQTATAILASIGNGAQFDKSRDFSAWLGLVPKQYSTGGKPRLGRITKHGDKYLRTLLVHGARTVMANLGDKQDRLSQWCRSILERRGMNRAIVALAAKNARIIWSLLHNQTEYENYAA

SEQ ID NO: 335142 - protein, 386 aa, unidentified
MKAETFVAREYDVFAGLDVDKKSIAATFSSQQGFIRSLHMPYSVDYLLNHVRKHFGDHKVVFVYEAGPTGYGLYDGLVAQGFRCLIAAPSMIPRAPGQRVKTNRLDSRGLSESLRGGQLKSIHVPSPIYRELRHLTQLRDTVVREAAAHKQRIKALLLLEGIGFPPATAGRQWTLRVKAQLRKLRCSRTVRFKLDQLLDSLEFCEKQVVSSTKEIRRFCKEDAELFQSIEYLMSIPGIGWIVASQLLARIGDWREIDNVRQLGSFLGLVPTENSTGDSVDRGSITRAGDGRLRSKMIQAAWSAIRQDGELREFYRSVCQRNPRGKGARIAIVAVARKLSTRIYAVLKNQRSYIVREQVYSAPLTQEETSPQGTTRRCAEPGETDNS

SEQ ID NO: 335143 - protein, 327 aa, unidentified
MTASVSSHNHIFIGIDVGSASFEAAWHRGGTIQYQNRRDAIAAFVARLSVEKQIIRIAVEPTGGYEKPLVKALRGAGLPVEMVHTSRFAAYRSLIGAKAKSDTSDARLLAAYAAAPEEVRGRKAGYVLLPQDAVREQLAELAARRDQLKHMIHAETCRLSTVRSQSVRDEITAHLQALRQADYKTHDAMMQLVRQRDELRNAKRLLKTIKGIGDKTALTSIAAVPELGLISNKAAAALVGVAPFVRRSGTMIAPARIKGGRALVRSAFYMAAVTASRHNRVLAPFYVRLIAAGKPPKVALVAVMRRLVVYANAVLRSGQPWKGAEII

SEQ ID NO: 335144 - protein, 370 aa, unidentified
MFIGLDVHNDSIAVSLAPSDSTEVRRYGLIGSSHDDVLKLSKKLQAAHPGAQLRWCYEAGPRGYPLCRFIRAHGQECILVAPSKVPPKPGDRVKTDRRDADQLARLYRAGELSAIYVPDPQDEAVRDLIRARYQVSRQQHRGRQQLKMFLLRHNIRYAGTTSWTLKHLRFLATVKMPFAEQQFVFQEMVNVITEAGQRLERYEAQLPGVVAGWRWEPVVRALMSLRGLALLNAATLVAELGDLHRFEHPGQLMSYLGLVPSEDTTSDDRKQGGITKMGNGIARRALIEAAWHYRQPPRISRGVLARQEGLPKAVTDTAWAAQSRLYQRYKHLIGPGRKKPQVAAAALGRELSGFVWAIGRMVQPRPPKQS

SEQ ID NO: 335145 - protein, 258 aa, unidentified
MSKLLKNFVGIDISKTYFDAAIIKADHPSGSMHNQFSQCPDGFKKMLTWLQQQDVLLNTETLFCMEYTGIYNRGLVNFLIEQKAQLWVEMPLRIKKSAGFERGSDDKISAIKIAGYAFRYQDKMQLWRPVDSSIEKIKNLIAQRDRVVNAITQLSVPVKELSDCGCSKEAKELEKLQRSPLKALQKTKEAIEEVIVKTVQQDAVITKKVQQVQSIKGIGQVTAVAFLAYTKGFTAFSNAKELACYCGVVPFAKKSGTA

SEQ ID NO: 335146 - protein, 361 aa, unidentified
MNMKRIMVLKQALGIDVSKDSLSFCLGILKSNLDKEFIQGKDVGNDKKGFKELTKWLKPLSSKKELPAIIMEATGVYHEGVAYYLHTLGYKVCIMQSGRVKKYSQSLEQRSKTDALDSKMLSMLGCERNIKPWCPPSETLQELKFLSRERSALIKQRSIEKNRFHAMNAAEFAYKSAVKRYKKRTQLLNLQIIEIEEEMQKTVNKDSVLSDKINLLKSIPGLSFISVSTVVAETSGFSLFTSAKQLTSYTGYDVVLRESGNFKGKTRISKKGNKHIRAVLHMPSMTAVRLNPTLKPFYERLKPRKEKPLIALVAVQRKLLILMYSLWKSNEYYDSKHEIKKAARKQVLAAQDRNKNEFVTS

SEQ ID NO: 335147 - protein, 353 aa, unidentified
MRIVCALDVHRSQITYLTLDVGSGEVSRGRISPATRQSVRAWLAQFDGVDDVHFALEGTTGWRFVVEEIERAVHRAHLADPAETAARRGRKRRAKTDRADCELQLRLLLAAELPESWIPPAQILELRTRVRLRKALVDERTAWQQRLQAQLFHQGAPAGLKPRTRAGRDALASVELSPAGRELVGLALRMIEAIDRELVPLDRTLALYGRRQPGCRALIGRLYGVGPVTATAIVAELGDARRFGRSDDAVRHCGLDVTVHQSDSKRAPGHLSHEGPELLRWALFEAAQQACRPASPDYEYYRQVARRIDHNRACLSVARKLCRRAYHILRELGDEALAPIDAPTAEEVVAAAA

SEQ ID NO: 335148 - protein, 340 aa, unidentified
MKITTIGLDLAKSVFQVHAVDADGAVVWRKKVRRGALLETLAQVPACLVGMEACATAHHWAREISALGHEVRLIPPAYVKAYLRRQKNDAADAEAICEAVRRPTMRFVPAKGAERQAVLVVHRSRELLVRQRTMLINAIRGHCAEFGLVAAQGPSGSRDLAARIRQADSAVLPDMAKDAMVLLVEQLHALVRQIQALNRRLLVWHRQDQTSQRLATIPGVGVISATALAASVTDPSQFRSGREFSASLGLVPRQNSSGGKDRLGRISKMGDRYLRKLLVVGATSVVRRARTAHTTAANWVRSLLERKPARLVTVAMANKTARIVWAVLTRGETYRSPAAI

SEQ ID NO: 335149 - protein, 356 aa, unidentified
MKQISKKGYRGKEVSKRDAVYVGLDVHKRSIYMAIRINGKEVGTKSLTADWEAVVKVLAPYRAGLKKVVYEAGPTGFGLARRLREEGYPLDVIAPHKTPRVSQFETKSDRLDCSKLAEYAEKELLKAVAIPTLQEEADRQVVRLRNAMVEQKRKAKQRIKSFFLQYGLKTPRGLDYWTHEAIGILREMELPPALRFTLDRLLEDLFYFDRQLKDVNIRLRVMMKEKAYEKKAKILRTHPGVGEVTTLQVLTEIYQPERFENAKQVAAYVGLAPRIRQSGETRKEGHLQKAGKGTLRATLVEAAWSWIQKDTQAYRVFRRFVRNTGHVNKAIVAMAHKLLIHLWTMLVRKEVYRPML

SEQ ID NO: 335150 - protein, 355 aa, unidentified
MFNDSMLFIGLDLGDRMSDLILLDPEGELIEESRLPTSPASFQQKFSVLPAARVALEVGAHSRWASQLLQELGHEVLVANARKLRAIYNNPRKGDRTDAETLARLARLDPSLLSPIHHRSPQAQADLAVLHSRDALVRSRTLLINHVRSLVKASGARLPSCSADSFSKKVGPAIPEPLQPALLPLLETIASFTQQIRAYDRQIETLCQAQYPETRSLQQVSGVGPLTALAFVLTLEDPSRFPKSRDLGPALGLVPRRDQSGDRDPQLGITKSGNAFLRRLLVGSAHYILGPFGPDCALRRWGLELADRGGKNAKKRALVAVARKLAVLLHHLWKTGQTYDPLYPSQRSREPQLAA

SEQ ID NO: 335151 - protein, 449 aa, unidentified
MSKIKTKKEQVKRITHLVVINPTAAGIDVSDKEMMVAYPINSKQLEVRAFGCFTKDLHLLADTLKKNGITTIAMESTGVYWVSLFLLLQEYGFEVYLVNAKHVKNVTGRKDDESDAEWIQKLHSCGLLKASFQPDNMTRTLRSLVRHRKNLVQTSTTYLNRMQKALELMNIKLHTVISDIDGKTGILIIEAILAGERNPEILADMRDKRVKASREEIIKSLEGYWTTEHLFELKQCYQLYCTHRQMINECDKEIETQLIEQVASKNDGVIPVISKMKRKISGKKSRVPYNLTAYLNEILGTNVTEVAGISELSALSILAECGTDMSKWKTEHHFTSWLGLAPNTKISGGKEISSKIKKKKHYAGQAFRIAANSLYHAKSPLGEHYRRLRAKVGAGKATVATARKLAIIYYKMVSNKEAFNHQALEQYQQRYKEKKLNQLKKKIALLEAA

SEQ ID NO: 335152 - protein, 353 aa, unidentified
MKKYIGCDLHKKYAVFVAMDESGRKESPVRVATDTLELREYLKTLEAGTPVSVEAGGSWYWFVDLLEEYRLDVRLANPVELKKRLPGRNKTDNSDAGGSAMLLRNGTLPEVWIPPAGLRDFRGLLRTRLSLRCHTTTLKNRIHGAIRRYGQYDEEEPKTLFEGKGRVCLSRYVGGLPPSTRLATRHEWDVVDTIERHIGELEKQIRGSIGQIGYVRLLKSLPGVGEILSATIYLEIGDVTRFPSCDRLASYAGLTPTVYASGGKSRLGHTSPVCNHYLKWAFVEAANAIVMRKALYAGTHAVQLYERLQKSKGHGKAATAVARHLAEASWWMLTKKQPYREPAPASTSSSKNG

SEQ ID NO: 335153 - protein, 342 aa, unidentified
MTITIGIDPHKGSHTAVAIDSNEHVLDEIRVRSCSTQTARLRDWADRFEERTWAVESAHGLGYLLAQQLVAAGEDVVDVPPVRASRVRVLGSGKSQKNDPNDARSIAIAALRADDLTAVCADDHARVLKLLSKRHRDLGRLKNKASCRLHALLLEMVPGGAGFRITTVTRINTVIDSFEPADAMGRQRQDIARDLAGDIDRYNDLLDTSKQRIQTAVAASGTSLTTILGVGPITAAMIIGQAGNIDRFNSKHHFASYNATAPVEASSGSKVRHRLNQRGNRQLNWALHVIAISQLRHDTAGRQYFDRKVAEGKTTKEAIRSLKRRLSDVVYRHLVADASQQR

SEQ ID NO: 335154 - protein, 362 aa, unidentified
MRIIGCDLQTRQQTLAMLDTETGEVVKKTLTHEGNNVREFYSALPRPSCVGIEATGSMQWFVNLMEELGIECRVGNPAKIRAAEPRKQKHDRRDADLILSLLVENRFPAIWLPSKELQDLRALLRHRHQWVRMRTRVQNALQAIALANGMRRGPSLWSRDGPHAIASLPLAPHTAHRRSELQAMYVKFESDIEKLNQRVEEQAGQRPGARLLMTHPGVGPVTALATDVFLGDAKRFVDGKTLASYVGIIPREYSSGGRQKFGGLSKQGNPLLRFLWGEAGAHAARRDPELQRFYRRKMVQKGLGKARMAVARKLGIRLWIMLRNEIDYHEFCRRGQKQQNSGAACAGMPGTRYGATSHRPVD

SEQ ID NO: 335155 - protein, 311 aa, unidentified
MYYIGIDVSKKDLSVFDGKDLNFINKEGLKSFKKYLKKKYHLSEIAIIFEPTGIYSQYLKEFCAENSIKAYIINPKQSHNFARALGIRPKNDKIDARTLYKFHKLIETKDIKVPKIDQQAKTLSGYLVSYEFALKQRVALSNHLESLRDKRLIALMKKDLKRAKKLEDKLFHDILEYVSKNQNLKEDYQRLLTISGVGDKTAIALLTLFKTYQGTNRAQITALAGLDPVKRKSGTSVKYKVKISKNGKGIYRKIFYLPTVCATVHNQKIRVFYQRLLANHKIKKLAIIASMRKMLLIAHAMYRDKTEYVAI

SEQ ID NO: 335156 - protein, 425 aa, unidentified
MNYKQNEKINQVKESTLVVGIDIGSTTQYARAFDWRGIELGKVFTFSNSREGFEAFKAWMQHLQDKYRKSDVIVGIEPTGHYWFDLGAYLEDEGILLVMVNPYAVKQTKELDDNSQSKNDRKDPKVIAKLVTEGRYSAPYTPDGVYADLRIMVANRKRLIREMTQIKNRFARWFAIYFPEYTDVFGDYEAQSSMLLLKKVCTPEAIVELGAEKINQIWRDAKLRAVGMKRATTLCETAKRSIGLKKGSSAARYEMKLLLEDYEYKKAQMDAVMEEIEKLCRKIPESEQMLAIKGIGVITVAGFLAEVGDVRRFESPRQIQKLAGLSLRENSSGKHKGQTTISKRGRSKLRAVLFNAAIPLIAKNPEFKSLHEYYTTRANNPLKKKQSVIAISCKLIRVFYAILAKGVTYDAQKLISDIHRQPQVA

SEQ ID NO: 335157 - protein, 331 aa, unidentified
MFPVGIDVSKNTLDLCMLYDGIKGRIKTRNIQNNRHSVENILRWLRLQHCGPEDVHVVMEATGVYHEQLATELHDAGFRVSLANPHRSREFARGMGIMTKTDKVDAYMLACYAFLKKPHRWEPPAPEIRYLGALLRRRDVLLGDALREENRLEKYLSTDTPADIISSCRRMAQLLREEVSNIERQIKAHIKASPALRRDYTLLSSIKSVGPQQGMHMLVVLRSHNFVSAEQAAAFLGVVPIEKRSGTSVRRRPRMSKIGPPQLRAKLYMSALCGKIYNKRMRNIYDEMCLRGKPKMVAIGALMRKLVHWCYGVLKTGTVFNDESLKPVLST

SEQ ID NO: 335158 - protein, 373 aa, unidentified
MFHFTTLFIGMDVHKESFSLCYYDMMANQFKHSTKVGPNVSYIVNYVNELRRLYGQDAEVLCGYEAGCLGFTLYHQLQAHGIPCIVMAPTTVMKEGSKRVKTDKKDAAQLAKALAFRSYRPVHIPTVEDEQVKEYIRMRTDHKVALKKIKQQILAFCLRHDFRYTEGSSNWTQKHVRWLRSLNPDGLYAEILTEYLLTYEKLVDQIERYDARIEQLGQSDSYQEKVSRLSCFIGIKTLTALSIVTEIGDFNRFATAQHFASYLGLTPSENSSGDKERRGAITKAGNSHVRRLLIEAAQSLAKGTIGYKSKELKRRQSGNRVEVIAYADKANERLRRRYRTLVLGKNKKQNVAKTSIARELSGFIWGMMTGRIA

SEQ ID NO: 335159 - protein, 338 aa, unidentified
MALYCGIDLHSTNCWITIIDEDRKVVRESKFGNDLAAILRFFEPYRTELEGIAVESTFNWYWLVDGLMDAGYRLHLTNTCAIKRYDGLKYTDDRHDARWLAHLLSLGILPEGYIYPKQERAVRDLLRRRAFLVHKRTSFLLSMRGAFECRTGMRTTSNDIKKWTPADVEQHIADPLQALGITCLLDPMTAMDGQIKILEKEALKRGNLRAEFRGLKTVWGIGKVLGLTITYEVGDIGRFAKVGNFASYCRLVKSNRLSNGKPKGSGNSKNGNPYLSWAFSEAAHFAVRNHEPAKKFVQRKRAKTNGIVAIRALAHKLARASYYVMKDNVDFDPDKMLH

SEQ ID NO: 335160 - protein, 357 aa, unidentified
MTTTATAAGPILAIDLGKYKSVACTYRSAAGHAFQSVPTSRDELARLITRARPAVVVVEACTPAGWVHELCQELGVRCAVANTASDQWKYKHAKRKTDRDDALRLAQLFALGQLPEVVVPERRVREWRALIAHRQALVTRRVAAQNRIRAVLVGQGLPAPRGAKAWTVSGLAGIGQFARPLADCGPDELWRGLLDLALTDYRQAEALAAQAEARLDQLGKADPRVQLLETAPGVGPRTAEAVVAYLDDPKRFKSGRQVGAYGGLVPRQYQSGEDDRRGRISKRGPAGLRKLLVQCAWAGLRHSPWVAAVYKRLSRGKARKKQAIVAVARKLLVRLWAMLRDGVPWRADPVPGPAAAA

SEQ ID NO: 335161 - protein, 311 aa, unidentified
MPANVSPNYVGLDISKDQLDYCLSETAEGRCANTPAGRSELIQRIRSVPNPRVVCEASGGYEKLIVAELLQAGIEVCVVQPGRCRAFAYAEGLLAKTDRIDARMLRRFGEKMNPRLAVPADPASATLREMLEHRRQLTTQLVEVNARLSLAGPTLRHLLTTQQKFLAQQIAKVEKLIDQLIDQDPDLKHKSQRLQQVKGIGPVLAATVLAYVPELGQIESAQLSALLGVAPHAADSGHTCAPRHVRGGRAPVRHVLYMAAVSASRSNPILAAFYQRLRANGKPAKVCLVAVMRKMACLMNHLLQDPDFVLA

SEQ ID NO: 335162 - protein, 370 aa, unidentified
MSVRRILAKTIDTDLEYEAIGIDLAKNCVSAALITTEGEVVGIDRLDYSELEKSAQVLSPTTFVMEPCTEMNYLVQKLEAWGHRCLVIGGKNVQNYVENHYSGQKTDLNDAQALAFLAQDTQLRPIKAKDMEQQKYASLTTLREQYIKQYRQTIVSLKGICQSWGLNISKGISGKARLKDLIENHAAFPEELKESLVDMVTHAQTTQKALNKITKTLEELAKNDKLCQLIQTIPGLGPVCSCRLRATIGDIQRFKNPKDFPAYYGLVPRSIATGHNEKKGRITHRGDKTMRSLMVQGAGSVVNMATKGKLKSKQLTKWILKKQKEKMPWGKLVCAVAAKLLRIVRAVLISSKPYNPKIAGVAKCSLPKGS

SEQ ID NO: 335163 - protein, 422 aa, unidentified
MEGTESNYQWYVGIDWGAERYEVCVLDRQAQVVARRSIAHSGTGIAEFVDWLVKLCEGKPERVAISIETPRGAMVESLVERTFAVFAINPKQVDRFRDRYTVAGAKDDSRDAFVLGDSLRTDEHCFHRVGLDEAAILRMRELSRLEENLQQESNRLSNQLWEQLHRYYPQMLALSQAADEPWLWELIEWAPRPVEAGKLELARVQQLLGSHRIRRIRAEQVLEALKKEPLRLAPGAEEAASEHALLLLPRLRLAHEQRTQVAKRIQRMLREMSAAEPTEKADKREHSDVKILLSLPGVGRVVPATVLAEASGPLRERDYHRLRNYGGIAPVTRQSGKKKVVSMRYGCNMRLRNALYHWARTSVQKDAAAKKHYAALRQAGHSHGRATRGVADRWLAVLMAMLKAGTLYDPERRGKGQATKVS

SEQ ID NO: 335164 - protein, 405 aa, unidentified
MLVYIGIDWSEQKHDVAFMNEKGGLIERFTIAHTWEGLMQIERMCQRIGAGEQECLIGIETMHNLLLDHLLSSGYSKIYIIPPSMVKNCRGRFGASKARTDQSDAHLLADIVRTDLKRLHCWQVDSLLTRQIRAQVSQINFLTDQIVRTCNRLRAILLRYYPAALHVFSSLDSAIFLAFIQAFPTPEQAAQLSFSDFLAFARQHHYPAPKRLPACFARLQQPCPRSSQATTLIYQPQACLLARLIMEWIQAKNVALTELKTTFEDHPDYPIFNSLPGTGKFLAPALLAKFGDDRMRFPTPQSLQAVAGTCPVTYASGKRHVVTFRRACDQEFRSIAQQWAMESLFVSSWANSYYEMVLPHVRSKSQAYRCLANRWLAIAWKLWQDRIPYDEDLHLRQRALRSLPR

SEQ ID NO: 335165 - protein, 344 aa, unidentified
MLHVGLDLSRRRLDVCLLDEAGGLLAETAVPSDADGLRGLAGRLAGHQVRAVIESMNGARFVHDTLEELGWEVLVADAQKVKGLAPLACKTDRIDARVLAELSWRDLVPAIWLPDPSIRRERELARFRSHLVRHRTTLKNRIHATLITFGHPCPVSDLFGLAGRELLDRLEIPEPWRRNVDVSLGLIDDLELQIARLAFELKRLGADHRYIPLLVTAPGFGWINAFTVASEIGDIERFASPAKLCGYTGLCPRVIQSGSTDRRGPLSKHGPRYLRWGLFEASMNACKHPLYAERYQATTRRLGRQRGPKVAQIELSRKLTEAIWHMLTRNQPFAPAGAGIRLAA

SEQ ID NO: 335166 - protein, 413 aa, unidentified
MTTSPQPQSITSNVSLHMSMELAAASWKLGFADRLGRKPRVRSIKAGDFDQLHKEIAAAKKLFGLDPDALVISCYEAGRDGFWIHRCLVSMGIESHIVEPASIQVNRKKRRAKTDRIDAQQIVNALMRFKAGDRFACRMIRIPDVEAEDARNINREMRVIKTERTAFTNRIKGLLCTQGVTDVVIDGSFPRQLKSMRTTKGKQLEEHLRARLLREFDRLALATSQIRTLQMQQATMMRTAAKEIQMSDAERTSPKCAVVAEFLARLGGIGPVTAWTLSAEVFSWRDIENRRQLAALAGLTPTPNSSGDDEKEQGISKSGRGELRVLLIEIAWGWLMHQPQSDLTKWYQKRFNDGTKRNRKIGIVALARKLLVAIGKFVRFGEIPAGAKLKSKHQFKYLPSLKIPGTELDCLAG

SEQ ID NO: 335167 - protein, 429 aa, unidentified
MYYTQNERIKQVGKKNLIVGIDIGSEKHYARAFDWRGIELSKKAYSFSNDAEGFAGFIGWIDEFCKKFKKDGVIPGMEPTGHYWFDLAVFLQEHGMRTVLVNPLHVKRSKELDDYLPSKNDMKDPKTIAKLIVDGRYTYPYMPDGIYAELRTASKLRYQTETELTRVKNRIQRWFSIYFPEYKTVYKKFSAIGSIMLLKQAALPCDIINMGADKINQIWRDAKLRAVGKKRAQTLVEAAQQSIGYTRGLDMARREILMLLEDYERLQERSNDLLEQMAEFIKEVPNAEKLLRIKGVGLKTVVGFIAEVGDVSRFNDPKQIQKLAGQAFGGDSSGKHDGKSRISKRGRKHLRCLLFEVALAAVAKNREFKEIHKYYTTRKENPLKKKQSLVVLSNKLIRIFYTILTKGIDYDPEKLLEDIRRPAELTKAA

SEQ ID NO: 335168 - protein, 427 aa, unidentified
METERTSIERFRQLKKEIRGSEEYLIVGIDVAKDKHHAFFGTATGKTLLRRLVFENNKVGFEKLLTHVEAIRVQHALSKVVFGLEPTGNYHKPIGMYLIKWGFNVVFVAGSAVKNNRALIDGRWDKHDTKCAANVADLISQGKCLYYESPSATISDLRDLLSVRKRLKKEEHSLKMRIRNSLIAKHFPELDRYYNRCESENLAIVRWCLDPRTIVNMEFNRFFQIVTSRERGTAQRRRLFAIWNMAWDSIGCVTHEACEFEAKLLVEKLKQVRDFILETQQLIETVSRRVPEYRCLLTIPGFGPYVSSRVIATISNPYRFESQNQVLKMAGYDLSADRSGKNSDKAVPVISKKGNGDLRYALYQAALVASTRDCDIILYYTKMLRGRERERGIKTKMRVKLAAKLLVIAWTLMKKKESFNPDYLNIE

SEQ ID NO: 335169 - protein, 315 aa, unidentified
MEDLLERCAGLDVHKDSVVATVIVGKPGKRLVKETKSFGTMTPDLLELSDWLVSFECTHVAMESTGVYWKPVFNILEANFNVIVVNARHIKHVPGRKTDVKDSDWIAQLLRKGLLAASFIPPKPIRELRDLTRYRKKLVNQRTAERNRIQKFLEDANIKMGSVLSDIFGVSGMRILKALLSENPPTPEELAQTVHGRVKPKIPQLARSLQGNLSEHHRFLLRTIFEHLESIGSCIEQIESQIETMLTAYNEQIEHLDGIPGVSRDTAAIIVAEMGVDMSKFPSANHASSWAGVSPGNNESAGKKKVPERPREISH

SEQ ID NO: 335170 - protein, 381 aa, unidentified
MTTAATHHAQSNTTEAMLFVAFELSEKTWKLGFTTGHGQKPRERTVTARHHEHVLDEIAQAKRRLGLPETAPVVSCYEAGREGFWLHRFLQAHGITNHVVDSSAIEVNRRRRRAKSDGLDVRKLLSMLMRYEQGERHVWQVVKVPAVEAEDQRHLHRDLETLKQERASTMTRIEGLLSSQGLRVTSLTKLPEQLEALRLWDGSPIPPGLRRRVLRVYAHYTFLSEQIAEVEAERRAQLQTSSEASIDKVRQLMQLKGIGINGAWLLVMEFFGWRAFKNRREVGGLAGFTPTPYQSGERAREQGITKSGNRHVRWMTTELAWSWLRFQPDSALSVWFRERFGSGGKRLRRIGIVAVARKLLIALWRFLETGVVPEGAVLKEG

SEQ ID NO: 335171 - protein, 388 aa, unidentified
MQFAADRLEAPTAIRTDLGAIFISLELSRSSWVVTSLSPGGGEKMSKHTVRGGDVAGLLKRFAQLREKAKGRTGKVFPLIVIQEAGLDGFWIDRVLQNEGIESHVVDPASIATSRRRRRAKTDGIDGEALVRALLAYKRGEPRVCSMVRLPTPEDEDRRRLCRERKVLIMERVQHVNRIKGLLFSQGVSGYEPVRCDRRERLEALQTGDGRPLPLHLKAQVRRELDRLELLLAQIKAVEAERDALLAAEQTKAPVAPAMLLGVKGIGPEFAAVLWSEGLSRPFENRRQIAAYAGLAPTPWQSGSVDREQGISQSGNPRLRTTMIQLAWLWLRHQPDSALALWFHDRVKRNGGRLRKTTIVALARKLLVALWKYVTAGVVIEGAAMKTA

SEQ ID NO: 335172 - protein, 344 aa, unidentified
MKDVRILGVDLGKNSCSIVGLDGAGRVLLRRRTRREGVIALAAKLPGCVVAMEACCGAHHLGRLLVEQGHEVRLMSPEYVRPYVKAQKNDDRDAEAIAEAATRPTMRFVALKSEAQLDVQVLHRVRDRLVGQRTSLTNQIRSILLERGIVVPQGRRSLLEALAVLSSEPDGSRVGTRVQRLLDDMLDQWRALDARIKALDDEFAEMARNDPAARRLATIPGIGVLNATALVAAIGDGRTFSRGRDLSAWLGLVPHQATTGGRPKLLGITKRGSRYLRKLVIQGARAALPSLARTATPLGGWLRGLLARAHGNTVVVALASKLIRIAWALLRNETRFVAGGAAVA

SEQ ID NO: 335173 - protein, 387 aa, unidentified
MGKNKHFFCVMDQQTGEIISQPVSFSNDKEGFDFLVQKIKSYPKDSILIGMEDTGHYHFALLKYLLDLQYTVALINPKTTDFNRKMQGGITKNDKLDTINICDVLDTPERKKQYRITKVNSFDLYEQKQLTRHHHNLKEEENVYKNRLQKCIDIVFPEFNKLFNSKYGIVYMNILKMFGSAENIANTDIRTIRKCFEIEGRGNRISLTPERLKECARSSIGISSSAEVIQIKHLTAQIELIEEQLTEIDKKIEEFSIQNNSPILSIPGISHFSGTSILAELGDISNYSKPSQIIKFAGVAPLHYESSQFNAQHTAITKKGSKYLRKTLYQIILPVIRHNPVFNKYYQLKISQGKGHRCAQGHCVRKLLRIIYHLLKTNQQFDPQLLR

SEQ ID NO: 335174 - protein, 416 aa, unidentified
MNAVGIDVSSRKSTVAVLRPLGEVVCLPFDVTHDIVGLASLAEKLKTIDGETRVVMEHTGRYYEAVAKALHEAGLFVCAVNPLLIKEYGANSLRRVKTDKADAIKIARYALDNWADLRDFTPMDAIRYDLKTLNRQFQLASKQRTASANNLIALLEQSFPGIRKCFDSPVRSDGTQKWVDFAHSFWHVDCVRKQPFAAFCERYRKWCKRHAYLFKLSNAEEVYALAKRAVVLTPKSKVVKVLVQEAANQLISISRSVEVYRAEMDRLAAMLPEYPVVMAMYGVGKSYGPQLMAEIGDVRRFERKQALVAFAGIDPMPNQSGDKNVRSNKSSKRGSPYLRKTLFNVIRTYLQCAPQDEPVFQFLNRKRAEGKPFYVYMLAAANKFLRRYYAKLRDFFASLDTLQPVAPIPTILKATL

SEQ ID NO: 335175 - protein, 341 aa, unidentified
MDTVSLIGVDLGKHCFHLHGQDASGRMVFRKKLTRSQMFTLLGNFPSCTVVMEACAGAHWIARRLQALGHEAKLISPQFVKPFRQGNKNDFADAQAICEAASRPSMRFVSPHNEAQQIVSALHRVRGGLVRERTGTINQIHAFLLEFGISLPRGMAVIRRLPAVLEAESLPPRLVSVIERLHAHCKYLDEQIHQLERELLTQLHEDERSERLLEIPGIGPMTASVLMSELGDARQYGSARQFAASVGLVPRQYSTGGKPTLLGISKRGDKELRRLLVQCARTIMQRIEHRTDALGVWIRGLLARRHSNVVACALANKLARIAWAILAKGTHYRSTEAVPAV

SEQ ID NO: 335176 - protein, 312 aa, unidentified
MTISSYHSFIGIDISKADFVVAIHGLKITTIYPNTPLGWRNFLTEHQDLSEALVILETTGGYELGLALFLLEQGVKVHRADTRKVKNFIRSWGQLGKSDRIDALGLAGYGSERHAHLPLFQPRQEHHQQLYELIQRRLDLKQMLVQEKNRLHLPASPAILKSYQTLILCLETQLTEIEGLLEKLLQTDPVLSQRYHTLQEIAGVGPIVATTLLGLLPELGTLNRRQIANLAGLAPHPCESGKAVGYRRTKGGRVDVKRILFMAAMTARRTDSPLKAFYENLIKRGKKKMVALTALMRKIVIIANAKLKSLQT

SEQ ID NO: 335177 - protein, 412 aa, unidentified
MRIIGFDIHRAFAEAVAWEDGKLRRLGRVDMRRNLLTAFAVTLSREDIVVVEATGNAAAVASVIGPHVKRVVIANPIQVRMIAHAKIKTDTIDAGVLAQLYASGFLPEVWIPDEATQALRRQVTRRNQIVRQRTRLKNIIQSILHAHLIPSCPAADLCGSKGRAWLGKQVLPEDERFAVERHLREFDRLGEDLAVIERDLARSALADENVARLIAIPGIDMVVALAVIAAIGDINRFGEPEKLVSYLGLNPSARQSGPGPAHHGRITKQGRGHARGMLVEAAWAAARAPGPLRAFFLRVRAKRGQHGAAVATARKLAVLIWHLLHKKENYAWARPALQARKIRKLELKAGHPAKRGQKGSAHAYNIKGHREQERRFVEQAEAAYAHFVAGWTPRGSKPASKARTGAANEERR

SEQ ID NO: 335178 - protein, 501 aa, unidentified
MVYQSAVRQLKHIHERSLTMKKPSIYSDRSQELLVLFEKAGNLSKLMCVPIDYAKKDHLVMFCNGNGEVLRKPFSVNNSVDGVKYLLDQVSRSCRFRHIQFNHVFFGGEDVNSYAENFANTLRAKGWLVANVNAHDAKKQRENLQASTDRLDLMGIATMLLSRRANCCPAQTGVYRNLRTLVRHRKKLVKMKTEVRNRIHTIVDRLFPGFLNEKKSGIRPFTNSSLYLMQERFSAPQIRRRQRGALIRNLEKRGTKKTEQVAAKLQEYASQVLTTPDEYTATLQVSLTNHVIHYRCLFDGAQQLVNEMAQLLAQTQGAFLTSIKGIGIVLASGVTAEIGNPLVQRSTDQLASYAGIVPKVKQSGGRQGSSITGRVSKRSNHILKDFVVQSAFHIGRYGPKDLHDDFSRREAAGQHAEFGIARRFIRMAMCMMRTSQVYLPPDKRSTYTKPERRADYYLAMWPYLRDKWSKASTLNVAFAKDKPLGQWRYIVQEVYGIKLKM

SEQ ID NO: 335179 - protein, 480 aa, unidentified
MARTRSRPASPPVPGDAGAEVTDEPVQVISRAAAIDVAKGSGMVCMRLPHESRAGRRTQKVREVTATFAAVVALMDHLVCQGVERLVLESTSDYWRIWYYLAEAAGLEVWLVNARDVRHLPGRSKSDRLDCVWLCKLNERGMLRRSFVPPEPIRDLRALTRLRANLTQDRVRHQNRIEKILEDALLKVSAVISDLMGASGRRFLQALADGERSPAALAALGDPRLRATQAELKAALTGRFRDIHAFEIGMLLELIDDLTGKITRLDERIAAQLEVVPGLDGVCTSCGQAGPAGPCAGCGDPVLGVIDRLDEIPGVGRDAAQVIVAELGTDMSQFPTPGHAAAWAKLTARTIQSGATRKTGRTGKGNPYLRGTAGAAVMAAARTGTHPGARYRRLARKRGKQKAIVAGSRAIIETAHRIIADPGFRYIELGSGYHDQLDAGRQTRDKIRQLEKLNPGMTVTLTPREPTAPPGESAARAPAA

SEQ ID NO: 335180 - protein, 424 aa, unidentified
MNLTQNDRLKQVTSDTLIVGVDVGSQIHFCRAFDWRGFELSRRVFKLSNTGMGFLTFLRWTEELMNKTEMKKVIVGCEPTGCYWLTFQKFLQDHAIQLVTVNPFTVNRSMELDDNSPEKSDIKDPKTIALLVKDGRYSTSYLPSGVYAEIREASVCRDQIMKQHVRLSNQIQGWLQKFFPEYFECYAEWDSTSGLMLLKEAPLPQDILKIGAGGINQIWRDAKVRAAGIKRAQTLVEAAQNSVGLEAGEAARLEIWVLVNDYILKAEQLKRLDEYLEEKVKEVPNVEKLLAIKGVGMSTVIGFIAEVGDIGRFTDPKQIQKLAGLEIVKKSSGKKKGQPRISKRGRRKLRRTMYESARALMTWNPAFQDVFLYYRNRTRKPLGSMQAKIAVACKAIRVFYVVLQTGCDFDEEKFRRDIIRPEAA

SEQ ID NO: 335181 - protein, 354 aa, unidentified
MKYFAGLDVSLEETAICVVDETGQILKEARAASEPEALDALFSTLGLPLERLGLEACSLTAWLHGELKAAGWPAICIESRRAKAAMGAMPNKTDRNDARAIAQIMRTGWFRAVHVKTTTCRSWRSLLIARRTVLNEMRSIENVVRAILRETGLKLGTPARKDFIVRARELIGGEDALARMTEPLLEILGVMLREFARLTKQILDVVRDEPICRRLMSAPGVGPLTALAFRATIDQPERFGKSRNVGAHLGLTPRRYQSGETDVQGRVSRCGDELARTALYEAAHSLLVRSKKWSALRAWGMAIAKRRGMARARVAVARKLATILHRMWIDGAEFRFGKESAAAVGAPKLIAAIA

SEQ ID NO: 335182 - protein, 354 aa, unidentified
MPCLPVEVILGVDTHRDTHAVVLVDLLGRLVATASFPTTRPGLRALIKWAQQRGNVRRAGVEGTGSFGAGLTRALRQEGIEVVEVTRATRVGGRHRGKNDTRDAEAAARSVLSGQATAEPKARDGIVESIRVLRNTRASAIKARTQAILHIKNLIVTAPDELRETLSPLTNRQLVKRCARMHRSSRRDSLAATRHALRSLARRHQDLDAEVAELDQLLGELVAQAAPRLLKQPGIGPEIAARMLLVAGDNPTRLRSDAALAALCGASPIEASSGKTIRHRLNRGGDRQGNSALWLIANNRMIHHPETREYVKRRTTDGKSTKEIRRCLMRHIARGIYPLILADLHDAHQQPVLT

SEQ ID NO: 335183 - protein, 411 aa, unidentified
MRVIYERCCGLDVHKRTITACVLKWLGGEWQKEIRQFGTMTKDLLALSDWLVGEGCTHVAMESTGVYWKPVYNILEGQLELLVVNAQHLKAVPGRKTDVRDAEWIAELLAHGLLRGSFVPPPKVRELRELTRYRTSLVCDCARTINRLQKVLEGANIKLASVVSDIRGVSARLMLEALLAGERDTEQLASLAKGRLKEKRPQLMEALSGRLQPHQSFLIAEHLAQIDYLEGAIERLSGEIEERLCPFEQQIAWLDTIPGVNRRTAEVLWAETGGDMSRFASARHLASWAGMCPGNNESAGKRRTGRTRKGSPWLRHCLIEAAHGAAHTKNKYLNSQYHRLAARRGKKKALVAVGHSILVIAYHLLTRKQPYADLGANYFDERDRLAVTKRCLNRLQKLGYKVALEKISLAA

SEQ ID NO: 335184 - protein, 357 aa, unidentified
MNYTQNQKIEQVTESTLVLGVDIGSSEHYVRAFDYRGRELTRKVFRFSTDINGFNSFYDWVTQICIKHGKNEAMIGCEPTGHYWYTFYQFVKDHGMKLAFVNPASVKKAKELDDNSPKKTDLKDPKTIAKLVIDRRYSFPYVPEGIYAEIREVTSSRDRIMKELNAASNRIQRWLKIYFPEYLTVYKKFDTTTGMMILEEVPLPTMVTALGVDNIIKIWREHKVRGKGASFNRAKTLVDAAHDSVGKSGGQGAVMEIQMLLEDYKVKKQQLEMVTSVMEELTMQIPNAEKMLSVDGVGLVTVAGFISEVGDISRFKNPKQIQKYAGFELVENSSGKHKGRTTISKRGRKKLRKSYIR

SEQ ID NO: 335185 - protein, 347 aa, unidentified
MTDLMLEKTVRVAGGVDTHLDVHVVAALDQLGRVLGTASFEATACGYEQLGAWLESFGVVACVGVEGTGAYGAGLARHLAGTGVRVVEVDRPNRQARRLKGKSDPLDAIEAARSAWAAPADSAPKSRSGQAEAIRALLVAKRSARRTRVRTIVQMRHLSFTAPEALRCRLRGLGTSRFVSTCARLRTVSVDPVLVATTTALRVLARRVQRLDEELASLNADLSPLVRSLAPALLARPGIGIDTAAALLAAVGDNPKRLHSEAAFARLCGVAPQLASSGKVSRHRLDRGGNRQANEALWRIVMCRLAHDPATRAYMERRVKDGRSKREVIRSLKRYVAREVFNLLATS

SEQ ID NO: 335186 - protein, 417 aa, unidentified
MKVVHQICCGVDVHKSFIVATIIKTEGLMPRYTKKRFSTFNNDILRFKQWLLENDCRDVCMESTGKYWIPVYNLLEDEINVVVASPKWVKAVKGNKDDTKDSKWIGDLFRLGLVPGSFIPPKPIRVLREYTRYRYKLVSCKSSEKNRFQNSMTVCNVALDSVVSDMFGVSASKITDYLIETDEFDPKHVKSLLHGRMKSKADAIIESIQGYQLSKAQKYRMSVINSHLDFVEKSIEKLDAKLDSLVEPYESHIALLCTIPGIRRQSAITIISEIGVDMSVFSNSKKFCCWAGLTPGNNESAGKKKSVRITRAGVYLKPALVQVAHAAVTAKDFPYYKNKYERISKRRGKKRAIIAIARMILTAIYYMLSAGEVWNPTDLFKVDMPCAIQERQKRKAIKNALSLLHREGVIDSSVIPA

SEQ ID NO: 335187 - protein, 315 aa, unidentified
MTKQLLPVNAGVDVSKDKLDIYLLERDLSLSVPNDEQSIASLVRRLARYRLERIVIEATGRLEHAFVSAAIAKGLPIVVVAPLKVRRFAQAAGQLAKTDAIDARLIARFAAALKPATRPTIDTKSQISKDLVVRRRQLTSLRTIEKNRRSVMPEALTPSIDRIIESLDREITSLEQLIQNAVEQHATWRHKRDLLTSMPGIGPTVASTLIGDLPELGSLSRRQIAALTGVAPFNRDSGNFHGKRRIRGGRAHSRTALFLSAMVAIRYNPDIKRFYERLLQTGKHKKVALTACIRKIVTALNAMLRDNKPWQSSFA

SEQ ID NO: 335188 - protein, 347 aa, unidentified
MNFYTQQHKHYCGIDLHAKAMYVCILDQAGTILVHKNLPTTPEAFLRIIAPYREDLVVGVECMFTWYWLADLCSKEGIAFVLGHALYMKAIHGGKAKNDKIDAHKIAVLLRAGMLPQAYVYPAEMRATRDLLRRRCHLVHKRAELLAHIHNTNSQYNLPEIGKKLAYKANREGVEEHFPDPSVRKTIEVDVSLIDHYDQLLGEVELYITRSAKAHDGQTFSRLQSVPGIGQILALVILYEIQDIARFPRVQDFVSYCRLVKCAKESNGKRLGTSGKKIGNVHLRWAFAEAAVLFLRHNQPGKEYFAKLERKHGKAKALTVLAHKLGRAVYYMLTREQAFDLNRFVTA

SEQ ID NO: 335189 - protein, 353 aa, unidentified
MVTIGVDPHKRSHTAAAVLPGGHEVAGEITVQADQAGYRSLLRWADGFGSDRCWAVENAHGLGQNLAQWLIGCGETVVDVPATATARVRTLSRGHGRKTDGLDAAAAASVAAGRGDASVVGADGEAEVLALLDERRTNLTAERVRIANQLHGLLRDLVAGGAPGRIKADAAARIVDSVEPGNVADTTRKRLAEDLVADLRSVDGRLAANRREIEAAVAVVDTSLTDIVGVGAVVAGRLVGRTGDPDRFPTESHFASYCGVAPVEISSGPQVRHRLSRAGDRQLNSALHTAAIAQIRMVGSEGHTYYQRKITEGKNPKEARRCLKRRIAARVWRMMKADKDRHKRKNEKMTAVA

SEQ ID NO: 335190 - protein, 408 aa, unidentified
MDLTPMHKRVIALDVHQAKITACAVIEHDDGRVEVTKRDFGAFKRDRRALAQWALEMAPEVVVMESTGVYWKSPFAALEAVGLIAWVVNARHVKAVPGRKTDMADAQWLATLARAGLLRASFIPPVQMRQLRLVARQRQKLVGMCSAEKNRLHKVLVDAGIRINVLVADIHGQSARAMVKALIEGQPMHEGLNHKGRLRASRQELCEALSTEQFSAVHRFVAQEIVQHIEQIEQRIARMDQYLLQGLQPWQPQLRLLQTLPGIDEQGAAMLLVEIGADMSVFGSAERLASWVGICPGNNESAGKRKTGRIRKGNAWVRRLLCEFAQAAARTRCALKAKFDALTIRKGHKKSVVALAHKMLRTIYAMLSNGSHYQDKEVDYEALNVQRNAPRWIKMLRKHGFIATPAAA

SEQ ID NO: 335191 - protein, 409 aa, unidentified
MDVLIERCAGLDVHKRTVVATIRTPGLADKRQSQTQSFATTAAGLDALRRWLTEAAVSHVAMESTGVYWRPIYAALEDAMQVLLVNPRTVKHVPGRKTDVRDSEWLAQLLECGLLKASFIPPPLIRDLRDLTRYRKVLIRERAHHVNRIEKTLEVAQIKLGSVVTDLMGKTGRAILAALIAGETDATRLADLAQGLLKKKRLALQEAVQGGLRPHYAFLIRQQLETIDHLGQQIAALDAQVTHTLAPIADACVLLCSAPGVATRAAEAILAEIGTDMTRFATPGHLASWARVCPGTHESAGKRHAATTGKANNWLRATLNEAAWAASRTKRSYYHALYHRMKPRQGPKKAIGAVQHALLRAIWHMLSRHVPHQDLGADYLASRDPARLKRHHVHRLEQLGYRVVVEPAA

SEQ ID NO: 335192 - protein, 411 aa, unidentified
MQVLYPRCSGLDIHKASIAACVLVAEGQTKQKYLLRCRTMTCDLLALADWLAGFGVTHVALESTGVYWKPIWNVLEGKFELLLINAQHFKAVPGRKTDMKDCEWLAELLQHGLLRASFVPPTEVRDLRDLNRNRAILVQERASVSNRIEKVLEDANIKLASVASHVLGQSGRAMLHAMSTGEEDVDKLAEMARAKLRNKIPELRVALTGKVRDHHRFALQQWLQQLKAVEKQIAEFETEIEQRNRPFQAAIELLMTIPGVDRITASAFVAEIGTNMAQFPTAQHLASWAGICPGNHESAGKRLSGQTRKGNPWLRRVLCQAAWAASHTKNTYLSAQFHRLAARRGKKRAIIAVAHSILVIAYFLLSRGERYRDKGSDYFDRINSEGLKRHLIKRLENLGHRVKLEPITAGA

SEQ ID NO: 335193 - protein, 422 aa, unidentified
MLAESHDEEQIIARVAALDIGKAELVCCVRVPAPAGGKRRLQEVTTYSTMTKSLTELANRLVEMRVERVVMEATSSYWKPVFYLLEAHGLDPWLVNARDVKHLPGRPKTDVLDAVWLCKVAERQMLRPSFVPPWPIRRLRDLTRYRTDLVAARTAEKNRVEKLLEDACIKLSVVASDIFGVSGRAMLAALVAGERDPKVLAQLARARMRGKIDRLEQAFDGHFADHHGFLLSRMLSRIEALDADIAAVDAQIETQLAPFAEAAVHLDEIPGIGPVAAAAIIAEIGVDMARFPTAGHLCSWAKFAPGISSSAGKTKRSVSSGHGSPYLARVLGEAAVSTSKTNTFLAAHYRRIARRRGQPRAVVAVGRSILVIIWHLLNDPDARYQDLGSNHYDRHVNSSTKKHSHIRQLEALGYTVTLTPAA

SEQ ID NO: 335194 - protein, 320 aa, unidentified
MAKKKSKSFIGIDVSKQHLEVAVHESDCQFRCANNVNAFGKLIVELIDWRPALVVLEATGGLEIRVVNALHAAGLPVVVVNPRQVRDFAKALGQLAKTDRLDARVLAHFAAAIKPPLRPLKSKEEQELAALTGRRDQLIEMLIDEKNRRAAAASDTVRDQIKAHIDWLEECIAELDEQLKALLQSSAPWQAKDDILQSVPGIGPVVSFSIIADLPELGTLNRQQISKLVGVAPLNRDSGQQRGTRHIYGGRAELRRVLYMAALSASRHNLVIKEFYERLCAKQKPFKVAITACMRKLLSIINVMVRDNTCWKSPQQTVSA

SEQ ID NO: 335195 - protein, 350 aa, unidentified
MSTVRIAVDLAKNVFEIAVSVHAGQVREGHRLSRPQFERFWSTRAPCRVILEACSSAHFWARYLISRGFDVVLLPPHYVRPYRRRSKTDRSDCDALLEADRCAGIHPVAIKSPDQQALVALHRVRSQWLRSRTARINAMRGLLREFGVTAPAGAQRFMNELHPLRCARQASLPPQIRGAVVSLWEEVRDLEERIDCLEAELQAVASQEPAVQALLKIPGIGPLTATALFATVADIHAFRNGRQLACWLGLTPREFSSGGRRRLGRISKQGDPYVRMLLIHGARAALNAARRAKAAEKPLTHLQAWALERARDAHANKAAVALANKLARIAWAVWYHEREFTGNHVVRLAA

SEQ ID NO: 335196 - protein, 334 aa, unidentified
MENIALIGIDLGKNSFHIHCQDRHGKAVYRKKFTRPKLIEFLATCPATTIAMEACGGSHFMARRLTELGHIPKLISPQFVRPFVKSNKNDFVDAEAICEAASRPSMRFVQPKTESQQAMRALHRVRESFVQDKVKTTNQMHAFLLEFGISVPRGPTIISRLSTILEDNNLPLYLSQLLQRLQQHYHYLLEQIKELEAQLKQKLNEDEVGQRLLTIPCVGTLTASTISTELGDGKHYASSRDFAAATGLVPRQYSTGGRTTLLGISKRGNKKIRTLLVQCARVFIQKLEHQKGKLADWVRELLCRKSNFVVTCALANKLARIAWALTTRQQTFAS

SEQ ID NO: 335197 - protein, 430 aa, unidentified
MKSNTQNAKIEAITEKTLVLGIDVGSETHYARAFDYRGIEYSKKPFKFSNTEAGFVTFKEWILDIKERHEKDKVVLGMEPTGHYWFNLGKFLQDNEMKPVLVNPHHVKKSKELDDNNPTKNDRKDPKVIAGLVREGRYMIPYLPDGVYADLRTASNIRFQLQAELTRIQNRISRWFNIYFPEYKTVYGKPDAKSGILILKAAPLPEDILTLGIDGVNQIWRDAKMRAVGKARAKTLMEAAEHSVGSKEGAVSARMEIRMLLEDYESRNVRLQEVMALIEELVKQIPMAEKLLEIKGVGIKTVSGFLAEVGDISRFNNPKELQKLAGLALVENSSGKHKGETRISRRGRKRLRYLLFEVAMSLVSKNAEFKELHIYYTTRRINPLKKMQSLMAVAAKALRIFYAILTKGVAYDPKKMINDIKRPKIYLQAA

SEQ ID NO: 335198 - protein, 355 aa, unidentified
MNQEKYIGMDVHAATISAAVKNAEGKLLMECVLETKAATILEFIQGLRGTLALTFEEGTSAAWLHDLLKPHVSRLVVCDPRKNALLRDGNQNDRVDARNLAELLRTNQVKAVYHGEHGTRALKELGRSYLTLTQDTTRVMNRIKSVYRSWAIACAGTSVYSRRHRAEWLAQLVEPGVRIRAEHLYQQLDSLEPVRQAARRELLRESGKHAAVKLLRQIPAIGPIRSALLVAILQTPHRFRTKRQLWAYGGFAVQTYDSGEYRIVRGKLQRNRERITVRGLNHNHNHDLKNLLKGAAVSAIERPGPLQDFYAALVEKGIRPSMARLTLARKIAAIILIIWKKGVSFDPKQLPRQAA

SEQ ID NO: 335199 - protein, 360 aa, unidentified
MTTTMTWVGMDVHARSIEAAAIDVLTGELRRARFDSALEPVVEWLDALPQPVHACYEAGPTGYGLYRAAQAAGIRVDVVAPSKTPRAPGDRVKSDRKDAQLLVRLLMAGALTAVAVPPAEFEAARDLTRAREQVRRDLMRCRHRVSKLLLRYGRVYEGGSTWTQAHRRWLASQGFAHTASELAYLDALAAVDGLASRKAALEERLSRLALEPQWWATVARLRCFRGLDTLSALVLQLEVHDWERFRRAPQVAAWLGLTPSLSQSGESTSQGPITKTGSGYARRILVEAAKHYARAPRIGVTLANRQTGQPDHVLQIAWRAQHRLYRLNRRLRERGKPANVVTVALARELSCFLWAAAMAP

SEQ ID NO: 335200 - protein, 387 aa, unidentified
METAYDGRQVVGMDLHRRRSVLVRMTEDGRRLGTARITNSPAGLRREIAKAGKSPRVVLEGTYGWYWAADTLAAAGAEVHLAHPLGVKAFTYRRVKNDERDAADLADLLRMGRLPEAWIAPAEVRELRELTRYRCRLVGLRTSCRNQVHGVLGKLGVPVTCTDIFGVAGSAWLDALGLPQPYAGKVTSLRQLAGELTTEITMLSEVIADLLAGHRGYQVIQQLPGIGPVLAAVIVAEIGEVTRFKNAAQLCSWAGLTPRHRESDTKVTRGHVTKQGSRLLRWALIEAIQHAPAGSLPGAVRQRIIARRGKQAKNIAKVAAARRLLTLVFYGMRDGQIRCLATPSGSPPAPPRAQAACPPRPAARREIAGHSAPPRPSGVGAPVIDPA

SEQ ID NO: 335201 - protein, 353 aa, unidentified
MNATTVAVDLAKNVFELAIADVHWKILERARLTRAQFERWFDNREVDLVVMEACGSAHHWARTLRARGIEVRLLPAQYVRAYVKRNKTDAADCLALLEAARAQDIKPVAVKSIEQQGLQALHRTRSGWMSTRTRRINTLRGFCREFGLVVPEGAATGLAQIARYLADERSGLPAMLRPSMRLVLEEIRLMEARIGQLEQQLAALAKQSPACQVLLSVPGIGLLTSTAMVAAVADPRSFDSGRRYSSFLGLTPREYSSGNTRYLGRISKRGDRYIRMLLTHGARSILRAATVARRAGRQIDRLKTWALQVQARTNHNKAACALANKLARIAWAVWVKHEKYRAEPAPATPSFSD

SEQ ID NO: 335202 - protein, 351 aa, unidentified
MMLIGVDYHPSFQTIAFFVEETGEYDEQELNNSDGQAEKFYRDLKRRGICVRVGMEATGYSRWFERLLAELGFELWIGDPAEIKAKRVKKQKFDREDARLLLRLLRENNFPQIWVPDPENRDLRQLLWHRHRLVQMRTRIMNQLHALAMNEGYRWKKKLFSELGRTQFEKLALGPWASRRRQELLELLDRMNPTIDELTAAVEREARKRPEAMRLMTHPGVGALTALAYVLIIGTPTRFQRGKQIGTYVGMIPCEDSSARKQRLGHISKQGNSLLRFLLVEAAQAAARVNPHWRRRYMHLAMRRHKSIAKVAMGRRLAVRLYWMWRNGCEYSPSVEFGSYAGQLETRNGVK

SEQ ID NO: 335203 - protein, 400 aa, unidentified
MNIIGIDVSQGKSHATLISKEAEKVTFKFEHNKSGFQILNSYIKSDTVIIFETTGVYSAQLTAYLKSKKVRFYELNPLEAKLRMASLRRNKTDKNDSFKLALLGATQLSEIKNHCNKQSTSPYDSLRILSLRYRQLIKCRTRIINFLRSGLEITFPELNKIFKNAYAVLALQMFRMYCHPDFLVGLTLKEMTNRVYQAVNKRIHKDVIQNYCAQVWLTAKNSYPAVPADSLEVEIISEYCDEIENYNKEIAYIQNKLIKTAASLDNFKFISSIPGAGQLNSALLLGFAGDISRFDNYKQLNAFLGLDLNRYQSGKYLKNDTINRRGSSQGRVVETDMIRSMLRNQGRIQNHLINYYYKLKKPPFNKHDKVALIACANHLNRTIINLVHTHQFYNYSKAIH

SEQ ID NO: 335204 - protein, 413 aa, unidentified
MKYYTSTTQYNCGIDLHARQMYVCVMDREGKKLVHCNVKDNDFKFFLKLVEPYKHDLTVCCECMFGWYWLADACQDAGLKFVLAHALNVNPIHGVKNKNDRVDSEKLTHLLRSNLIPPSYVYPTQQRPLRALLRQRIYYVWRRAELLARIYSHQLAHNRTPAKQTRRTRDAWEERLLAAENHPQRQFALRNDLAMIRSFDRQISVIEVELQHLTKHLPLSRDYTLLQSVPGIGESLGLTILYEVGDINRFPTVKDFVSYCRLVKGTVASAGKIKGLRGAKLGNPYLRWAFGEAAVIAKRDHYLVGPLSQRLEVQMGGNKFKANTVVAIKLARAVYFMLKNQTVFDPERLVGSLQKCFRPGRSQPAGLTGGAKKAMPSSVAESVSCASSTPPCVGQASTPAPSIGSCGQVPVAN

SEQ ID NO: 335205 - protein, 349 aa, unidentified
MNITTIGMDLAKNVFALHGVDERGNSVLRKSLRREQVEPFFARLLPCVVAMEACGSAHFWARKLQSLGHTVRLIAPQFVKPYVKGNKHDAADAAAICEAASRPSMRFVSVKTADMQAVLALHRVRNGMIKARTAQANQLRGLLAEFGVAIPQGMARLMSQVKILLSHDDNGLPPLMRDLTQRLLSHLQVLDRQVQEIDNQIKQLARQSQACRILEQVPGIGPITATALVATVGGSINEFKNGRQLAAFLGLVPRQHSSGGKERLLGISKRGDGYLRRLLIHGARSVLFHTLRKPERTSTWLAQLASRRNSNVACVAQANKTARIVWAMLAHNQEFRYDLAACSTQAIPV

SEQ ID NO: 335206 - protein, 315 aa, unidentified
MSDVPCFIGIDVAKAQLDIALRPSGERWAVPNDASGVATLVDRLQALHPTLIVLEATGGLERAATAALATAGLPVVVINPRQARDFARATGQLAKTDALDARVLAHFADVIRPTPRPLPDAQTQELRALLGRRQQLIVMRTAEQNRLAGTSARLAKDIAAHITWLNAGIATLDDDLETMLRASPLWRENDDLLQSAKGIGPVCARTLLLELPELGTLTRQQVAALVGVAPLNCDSGTMRGRRTIWGGRAHVRTVLYMGTLVATRFNPVIRAFYKRLLAAGKVKKVALTACMHKFLTILNAMLKHRTPWKAQEVQS

SEQ ID NO: 335207 - protein, 373 aa, unidentified
MPDYDAYIGLDVHKDSISVAIADAGRSGEVRLFGTIPNEPEAVAKLVKKLSSRHGQVEFVYEAGPCGYNVFRQIEALGFVCRVVAPSHTPVRPGSRQKNDTRDAMMLARLLRAGELTFVWVPDAVHEAMRDLVRARSVASHDARKARTLIQLFLLKHDLRYSAKSWTTRHRTWLRNRHFQHYAQQIAFQSYLNRLEQAEARKRELEEQIAVISPTWSLARTVINLQAFKGVGLVIAATLVAEVGIFSRFDSPRKLMAYLGLIPGEHSSGGSVRSRGITKTGNSALRALLFEAAWSYRVQAKVGNWMHKSRPDIPQAIVDIAWKAQVRLSSRYRKLVGSGKKSNVAITAVARELVGFLWDVGRRSEGDVTSPAA

SEQ ID NO: 335208 - protein, 338 aa, unidentified
MSEITTIGLDLAKHVFHVVCCDEQGKVIRKNMLKRYQVLAYFANLPPCLVGMEACASAHHWARELGVLGHQVKLIPPQYVKPYVRGNKNDYNDALAIAEAVTRPEMRFVTVKTTAQQDIQALHRLRERCLADRTALCNQLRGLLAEYGLIFPKGVNLLRRRLPELLEDGENGLSDLFRRLLAQGYQQLQELDGHIDHYTQEMKQQSQQNEACRRLQTIPGYGPIVAGVFHSVVGHGEAYRRGRDVSAALGLVPRQQSSGGKEVLLGISKRGDRYLRSLLVHGARSVVIRAAKKDDPLSRWINKVKAARGFNKAVVALANKMARIGWAVVVNKTVYQIA

SEQ ID NO: 335209 - protein, 351 aa, unidentified
MRFYRGQHRFWCGVDLHAHTMFVCVLDANGETVLERNLASSPEAFLAAVAPYREELVVGCECLFTWYWLADLCAKEQIPFVLGHALYRKAIHGGKAKNDRIDAQKIAGLLRGGMLPQAYAYPAGMRETRDLLRRRLHLVRKRGQLLAHLQNLTHTYQRGAFEKRIAYPSNREGVVAHFAGEPMVQANAALDLALLAKYDALLVELEAELVRKAKREAPTGFHLLRSIPGIGKVLAMTIVYELHDVARFERVQQFASYARLVKCAKESAGKRKGTSGAKMGNVHLKWAFSEAAVLFVRHSAEAKALLARLARRHGKGKALSILAHKIGRAAYYVLKREKPFDAKKFFATANA

SEQ ID NO: 335210 - protein, 341 aa, unidentified
MDEYIGLDVSLKETAISVRREGERVWRGKCPSDPRLLAEVIRKRAPLAKRVVFETGPLSVWFYHALSAEGLPAICIDARHAKAALDMAPNKTDANDADGLAQLAEVGFYREVRVKSFDSMLTRTLVAARTRLVRITVELSNQIRGLMKTFGLVVPPSKGGKFEANVRRLLADHDGLEAIILPVLEAWRSVRIRAADLGRQLLAGARRSRSCQLLMTIPGVGAITATAFTTAIEDPANFKTSRSVGAWLGLTTRRYQSGEVDYDGHISRRGDAHLRGLLYEAATVILTRTHADSSLRAWGLRLREKIGFKRAAVAVARKLAVIMHAMLKSDALFNRSAGAMA

SEQ ID NO: 335211 - protein, 346 aa, unidentified
MKILKQVLGVDVAQKELVVSLGKLPEDLNVNIYSHRVFANKESGFKALLKWLLKNTDDDIPIRIVMEATGVYHQKFANFMVENGVEVSVVLPNKISNFMRTLQIKTITDRTCGDAIARFGLERNLDVWEKPDPIYAQLQQLTRERDQIVDQRTMTKNRLHAEKSEACPNQGSIKRMNSLIKFLDKQEQEIKSEIKRLISSNTQIKEQVDRMTTIPGLGELTAVIILAETNGFELIRNKKQLTSYAGMDIKEKQSGTSVKGKPRLSKKGNKHIRRAMHLPSLAAVRHCLFYKEVYARLVSKHGVKMKALIAIQRKMLELSYILVKNQSQFEPDYEQKRELQKLANSL

SEQ ID NO: 335212 - protein, 344 aa, unidentified
MQWNLGVDTHKGSFDAGVVDDAGREVAVASFTHDRAGLGQALSWIQGHEGSRVIGVEGSGSFGAPLVRILAAAGEDVREVPPMLTHRERRRSPSKGKSDPVDAIAIARVVARGEGLSTPKLSDIYEELKLLVDERKTLVRAKTQMANQTHADLVILRPGYQDRIPKIVRKIHVGKVRKLIRGEQSVRGMLIRDRLTDIDRVLNRISNLERLIKQKVLESGTSLHEQRGISFIIAATILGETGHPSRIHSEAAFAMFNGTAPIQASSGKSNHHRLNRRGNRQLNYAIHTVAMVRSRIHEPSRAFIAKKRAEGKSSKDALRCLKRHISNWIYRQLIADSELMKSAA

SEQ ID NO: 335213 - protein, 343 aa, unidentified
MEKKRWLGVDLHRNGFTCCIRLENGRNYLSQWKLEELGQFVKKLRPSDEVAVEVTSNTRLFYQAVSSQVKRVVVVDANQFRVIAHSVKKTDPNDARNLALYLEKDLLPEVRMKDPQRAQIASLTQTRDTMVKLRTALKNKVNNLVSAQEINLSKESLASEKELAAVLKFRFDALMELELRVIVDQIRSLNGSIAELEETIAREGQKLEGHSNLTSIKGIGKLSGSILLSIIGDVNDFAEEGKLAAYFGIVPRIHHSNETQHSGRITKRGTKLGRTTLVQCALIAQRYSPYLKSYYEKVKKRRGTGKAIIALARKFLGIIYRTLKYKWTFADFPNFVLAQETKR

SEQ ID NO: 335214 - protein, 421 aa, unidentified
MDKERRWFVGIDWGSQEHVVSLCDDTGKKIGQRKFAHGGTGLTDMIIWLLKASGGKPGEIHVAIETPHGPIVEALLERDINVYSINPKQLDRFRDRFTVAGAKDDSRDADVLADSLRTDMRAFRKLSIAEPIIVELREWSRIDEELKVEHVRLANRLQHQLWRYYPQMLELADDVGANWFLDLFEAVPTPEMAANVREKTIARILKDHRIRRFGAAHVLSELRKPALAVAPGTIEAATARIRGLIERIRLINGQLADAGRQLDRLCKMLSEPVAEQDGETAPGQKNEQRDAAILDSLPGVARTVLATLLAEATDTLRRRDYHALRALCGSAPVTRRSGKSCIVVRRYACNRRLRNATYHWAQNAIQHDATSRAKYDALRAKGHGHARALRSVIDRLLSVACAMLNSGTLFNPEFASKQTTG

SEQ ID NO: 335215 - protein, 361 aa, unidentified
MDVSRDEPHTTAGLDIGDKYSYLCLIDQQSGEVIEEGRLRTSPEAFKRRFASERPPMRIAIEAGTHSPWASRMLEECGHEVLVANARKTRLIYANKRKTDEVDAENLARLARLDPKLLYPLKHRGEDSQAHMAIVRSRQVMIGCRTQLVNHVRGAVKSFGARLPKCPARSFHKRAAAHIPEALRPALEPILQQIASLTERIRDFDRRLVAVSEEHYPHETELLRQVEGIGPLTALSFVLTLEDPYRFERSRSVGAYLGLVPARDQSGDRDPQKRISKEGDEMLRRLLVGSAHYILGPFGSDSDLRRHGEKIASRGGKNAKKRAAVAVARKLSVLLHHLWVSGEVYEPLYNAHRRQEREEAA

SEQ ID NO: 335216 - protein, 342 aa, unidentified
MSIVGAFDVHRRQITFDYLDTDTGRLLRGRIAPACRAVLYRWLAERFAGRTDVQFAVEACTGWRFVVEELERAGVEASLAETADTSAARGPKQRAKTDAADTALMRELLAGGRLPTSWIPPEQVREMRAVLELYKDLRDEHTAWVQRIHATLFHHGVPQLGVDVTSAAGRVRLQAGDGLSPAGRQAITVALRVMDALQTELDALHRQIRAFANHQPGCTALQAQYGVGPITSTAIWAMMGDTRRFSASRQAVRHTGLDVTVYSSDGKRSRGHLAKQGPPRLRWALYEAACMASHTRAPDHDYYTTLKDRIDHKRATISVARKIARRSHHILRELGDKAYAAA

SEQ ID NO: 335217 - protein, 346 aa, unidentified
MRFYTGQHRYYCGIDLHARTMYLCILDQEGEVVLHRNMRCDPELFVEAVAPYRDDLVVATECIFCWYWLADLCTREGITFVLGHALYMKAIHGGKAKNDKIDSRKIAVLLRGGTLAQAYVYPPEMRATRDLLRRRLFFVRKRGELFAHVRTTSHQYNLTIPPGQLLYQCNRARVPEIFDDPIVRTSVEADLEMAGHYDGLIRSMERTVLEQAKIDDVSSLDLLQSIPGVGTILSLTLLYEIHVIARFKTVQDFVSYARLVKCQKGSAGKVLGTSGAKIGNAHLKWAFSEAAVLFLRKNPRGQKHLNRLRARHGKGKALSILAARLGRASYFMLRRRTAFDMDRFMN

SEQ ID NO: 335218 - protein, 342 aa, unidentified
MSQVSVLGIDIAKQVFHVVGMDDTGTIVWRKRLTRSALIPFIARIPPVVIGMEACGGAHYWARRFREHGHIVKLMAPQLVKPYLKSNKHDMADAEAIGEAVTWPTMRFVPVKELAQQDFQALHRVRERLVKARTALINEMRGLLSEYGIVLPQGVTKFRQGLLPILEQEQEKLTARGRAIFKQLDAEWRALEERLAYSNEPLESIGQAHPVCQRLMTIPGIGPLTATALVAAVNDATHVKNGRQLAAWLGLVPRQHSTGGKPHLLGISTRGDRYLRKLLVHGARATLRWTKLKHDRRSQWVHALIARRGTNRAVVALANKNARIAWVLLTTDQVYTPEYSGA

SEQ ID NO: 335219 - protein, 349 aa, unidentified
MTKVSMIGLDLAKNVFQAHGIDAAGKVVVRRQLRRRQVEKFLAALPPGAVVGMEACSGAHHWGRVVQKLGHEARIMPPAYVKPYVKRNKNDGRDAEGICEAMGRPTMRFVPVKSLERQAVLVLHRTRRLLVRQRTMSGNAFRSALAEFGIVAAQGLKGLRSLMELLADPASAVPDAARLPLRVLARQWETLNADICKLETEIVGAAKTDEVARRLMAIPGLGPIGATAILAAVPDIRVFKTGRDFAAWLGLTPRQFGTGGKHSSGGISKQGDRTLRTLLTVGATAHLRYERARDIKDPWLQALLAQRPFKVAAVAYAAKMARIIWAMLVTGEHYRAPNRHHSGSVQVAA

SEQ ID NO: 335220 - protein, 409 aa, unidentified
MRIIGLDIHRAFAEAMAWEDGKLNRLGRVDMRRDLLSAFAARLSPEDVVVVEATGNAASVAAVIAPHVKKVVIANPMQVRIIAHAKIKTDTIDARVLAQLYASGFLPEVWIPDEPTQALRRQVTRRNQIVRQRSRLKNIIQSILHAHLIPSCPHQDPCGPRGRDWLAVQVVPEDERLAIERHLREFDRLGEDLKVIERDLARSALADDGVKRLMTIPGVDMVVALAMAAAIGEATRFDKPQKLVSYLGLNPSVRQSGPGPAYHGRITKRGRGHARGMLVEAAWAAARAPGPLRAFFLRVRARRGQHVAAVATARKLTIIIWHLLIKGESYTWARPSLHAKKLRDLELKAGHKAARGQKGEAHAYNVKSHRDEERRWVEQAETAYTRFVAGWNRRGPKKVRAGAAKEERL

SEQ ID NO: 335221 - protein, 408 aa, unidentified
MTVVGIDVSKGKSMVAAMKPGGELVAAPYEVRHSDIELSRLALDVLCMEPDTRVVMEATGRYHEPVAALLHSEGIFVSILNPLLIKQSGAGSLRKVKSDPKDALKIAKYGLDNWSTLREYTPTEAIRQQLKLCERQCDLYSKNIVMLTNNLISLSDKTFPGVNELFSSPEKADGHLKWVDFYRTFWHCDCINRMSPDAFGERYKKWCKRKGYHFSADATDALYAASCGLYTTLPRDNNAKLLVTVAADQLIALRENQSKLEAEMLNLCKQLPEYEAVMAMYGVGKSTGPHLMAELGDIRRFPHRSSIVAFAGVDPGVVGSGKMQLSSVATSKRGSPQLRKALFQVVSTYVKRKPENEAVYQFYAKKRNEGKPFFVCTTAAANKFLRIYYARVKECLNAAESAVQTEEG

SEQ ID NO: 335222 - protein, 389 aa, unidentified
MFNYQNFKAMRNVCGLDVHKDNVFVCIDKENGDKIQFKCGILTRDLDALRDKLVEEQVGEIAMESTSVYWCPIWRVLESDFKLYLANPLAIKQLPGRKSDVKDAEWIATCLRKDLIRGSYVPVDTIQQLRQYNRRVFDLNHQTVYIQNKMDALLQRCNIRISNYVSSIDSKSYRDIVSKIAGGETRGTELVKEVHGRTINRCGRDTIVAALDGVIRETDIELLKQYKEELDMLRRHKAVCLLKMREICEGHYKEELERLQTVPGIGGQSAMQIIAELGVDMSTFQTSAMLVGWAGLKPRNDESNGKFKSRRTTHGNKYLRKTLIEVSWAASKKKGCFYNKFSYHQVVVRRKGKLKVQVAIARKILVAIWNILSKGMPYIEYEKQDGNKS

SEQ ID NO: 335223 - protein, 401 aa, unidentified
MQQRLWAGIDAGKTAHHCMVVDADGQRVLSRRIDNDESALLGLIRAVTSLAEGGHLTWAIDLNAGGDALLITLLLAHDQELLYIPGRTVHHAAGSYRGDGKTDAKDATIIADQARMRRDLHPLRRGDELVAELRILTSRRNDLSADRTRTINRLRDRLGEYFPALERAFDYSNNQAALILLTGYQTPAALRRIGTARLETWLQNRHARKASSVAASAVAAAHTQYTVVPGEQLAADLVARLTQEVIDLDAALKEIDVMIEDRFRRHRYAEIIVSLPGFGPRLGAEFLAALGGDIALYDSADRLAGVAGLAPVPRDSGRVSGNLHRPRRFNRRLLRASCLAAQLSIRHDPASKHHYDRKRAEGKRHTQAVLALARRRNNVLWAMLRDRTHYQQPTGDPATAA

SEQ ID NO: 335224 - protein, 424 aa, unidentified
MAGVVIGIDPHKGSHTAVALDVHERQLGRLRVRASSRQVDGLLEWASGWPRRRWAIEGARGLGQLLAQQLIASGERVLDVPPKLAARVRLLDSGQINKNDPNDARSVAVAALRAHELPELAAEDHAMVMRVWARRYHDLARLRTQVVCRLHAVLCELVPGGVRKYLRASQATDVLDRIVADSPVAQAKLELARELVADLERIDAQRREAKRRTARAVAATRTSINDVYGVGPIVAGTLLGYVRDIRRFPTRDRFASYNGTAPIEVSSGDRKIYRLSRRGNRQLNHAIHMAAISQIRHHDSEGRAYYERKIAEGMTGRTALRALKRKISDALYTRMIDDARRLAAKDPGGHTGNDSASSAAGSHPETPALRKSHSRATANSKTGTGQRPLTLRPAPDRRRTSRRAAGVQVEPRPGPHRGRGQDRP

SEQ ID NO: 335225 - protein, 389 aa, unidentified
MKIFVGIDIAKLNHFAAAISSDGEILIEPFKFTNDADGFQLLVSKLESFDKNSIIIGLESTAHYGDNLVRYLVAEFYQVCVLNPIKTCQMRKNNVRKTKTDKVDTFVIAKTLMMQDDLRFITFFDLDMMDLKALGRFRQKTIKQRTRLKIQLTTYVDQVFPEIQYFFKSGLHQNAVYALLKEAPSPKEIASMHIDSSGKSAQSELHGHFTKEQAKELRVLAQKSVGANDSAISIQITQTIQQIELLDSQLEKIEAEMTDIMKFNDSVIMTIPGIGYINGGMILGEIGDIHRFSNPNKLLAFAGLDPSVYQSGNFQAKTTRMSKRGSRVLRYALVNAAWNVVRNNATFKAYYDAKRAEGRSHYNALGHCAGKLVRVIWKMLTDEVEFNLE

SEQ ID NO: 335226 - protein, 343 aa, unidentified
MTVIIGVDPHKATHTAVAVDQAEQELDRVLVRATRRQLEQLQRWAQPFGDRVWAIESAGGLGYLLAQQLVGAGERVVDVPATLASRVRLLGTGRSDKNDPNDARSVAIAALRAPRLAEVQPADHAAVLRLLAKRNLDLSRERNRTANRLHVVLCELVPGGIAKELTVSRAVSLLETVEPAMAVDQARYEMARELLDDVRRLDAKKKEMNHRIASAVDASGTTVTEVFCAGPVVACLVLGYTGDVTRFRDRHHFAAYNGTAPVEMSSAGRRVHRLSRRGNRVLNYAVHIVAVGQIRQAHSEGRAFYDRKVKEGKTKREALRALKRRISDAIYRQLVIDAARTHS

SEQ ID NO: 335227 - protein, 391 aa, unidentified
MSMYFVGIDISKYKHDCCIISATDQQIISKFTITNDKDGFEQLLTALNSLSNPEDIKIGFESTAHYALNLELFLENAHHSFMEVNPVLIKEYKKSTTLRRTKTDSVDCESIARWLMTVEYKPHSKGFYHAYSLKSLTRLRDRLIRQRSFYLVKITNVLDHTFPEFKPFFNERLSKTALYLLENYGSAEKMARMNSASYDKLRCISRGKFSIQQFLRLKELAANTVGVNNSIFDLELNTLLTLYKSLSDEINTLETEIIKLIEEVHPHYMSIPGIGPISAAVIYAEYGDISNFSNPGQMLAFAGIEPGINDSGTESHGGRMVKHGSSQLRYVLLNSCLPLIRFDLTFATYYAKKRAEGKKHRVAITHVAKKLIRVIYALERQDVDFNVQKLR

SEQ ID NO: 335228 - protein, 388 aa, unidentified
MRPVVGVDVAKGTSMLQAFTDRNKPYSKIISITHTEEGCERLGGLLEELRQITKLEPAVVLEATGHYHRSLVAYLEREGYCHYIVNPLQSKRAKGTQLRKVKTDAVDAWHLAEMFYRGDVLPHRTRTEEMAELQHLTRQHEFMTSLLVQAKLNARALLDQVCPAYESVFHNLFSTTSLHALRRRLSGGTITVETIRETAGSSHGKAWAQAKAEQIQALPTLSQPSKAQQTALLCMVEMILAQQEQLRQLEHAIEETALALPEVELLRTIPGVGDKLAAAIAAEIGDAAQFEDPKQLVAYAGLDPGVHSSGKFTASSSRISKRGSKRLRRALYVAVQCGLRKGVNERLKAYYDKKRKEGKPYKVVVIACANKLLHHVHAILVKGEPYKA

SEQ ID NO: 335229 - protein, 425 aa, unidentified
MKRVVGMDIHRTFAEVVFWEDGRLRCHGRVDMTRSGLEGFARDLTKDDEVVVEATGNAMAVVRVLSPHVARVIVANPLQVRAIAHAQVKTDKIDAGVLASLRAAGFLPEVWVPDAETERRRRLVARRNQLVRHRTRLKNEIHAIPAAHLVPRCPHASLLNGPGRAWLAKQALPDDERAAIDRHVRELDRLGADLAELDRDVGEAIIDDPGVKRLLTITGMNVTVAAGLVAAIGEVGRFASPQKLVSYFGLNPRVRQSGLGLAQHGRISKIGRAHARALLVEAAWAAAKAPGPLHAFFLRIRARRGHQVAAVATARKLAVLVWHLLTKQADYLWARPALVAHKLRALELQAGRPMQKGNRRGPAHAYNVKALREQEMAVATQAEHVYQQFVGQWRAKPGKRSAATTRPAASLDGTADQAASAPPRL

SEQ ID NO: 335230 - protein, 345 aa, unidentified
MNKLSVVGLDLAKNVFQVHGINTDGEVAVRKQLRRSEMRKYFAQLAPCLIGMEACGGAHFWSRELTRLGHTVRMMAPAFVKPYLKSNKNDCNDAEAICEAVQRPSMRFVQPKLPEQQAIMHLHHGRQLLVRQRVALSNHMRGVLSEYGIIVPQGVKVLSRQLPEILEDAENALPMLARHLLAELKAEHDQLIERVDRFEQQLKAWHVNSTVSQRLAGIPGIGVLTATALAATVGEGQDFKNGRQLAAYLGLVPRQASSGGKDRLLGISKRGDGYLRSLLIHGARAVIHHIRRRLKAGRPGGNPWIEQLLLRCHVNEAAVALANKMARTAWVLLARNETYCVARPV

SEQ ID NO: 335231 - protein, 391 aa, unidentified
MFAGIDVAAEWHVLARLDDAGAPVGRPTAFAEDAAGYCTMLEALGPRPVLVVMEATGHYWKNLYATLTAAGHDVVLLNPLVARRFQEAQLQRTKTDAVDATALARLGFEKRPAPTRLFDEAAEALRELVRHRDRLRQDFDDRVRQLHRLVDLGFPEFTRYVKGMDSMLATALIAECPTAAAFARAQSRRLAKLRYDGRHEVGEDLAEDLVAAAKRSVGQHHGPVYEMQARHICQDLDLWRRRLKEIEGDIDRLLDAHEVGRLLTSIDGVGPHSAARIIATVGDPAHFRSAAAFAAHVGVVPGLRQSGKRTGARAATSPFGNARLRRALWMTVLSAVRCNDWLRPFYERLRAAGKPPKLALIAAMRKLLHAIYSVAKNRRPFTVMPEQARAA

SEQ ID NO: 335232 - protein, 370 aa, unidentified
MSQSRTLFIGMDVHKDSIAVAYVAQDHGAEVTYLGASGTRQCDIDQLVRKMQSKAKHLIFVYEAGPCGYWLYRYLPRKGSDCWVVAPSLIPHKPGDRVNTDRRDARQLARLARSGDLTVVSVPKVEDEAIRDLSRAREDAISDLKDAKFRLKAFLLRQDIRYVGRAHGGPAHLRWLSEVVCPTPAQQIVFQEYIRAVQEHTERLQRLEQELQAQVQSWRLNPVVEALQALRGVQFTVAVTMVAEIGDLTRFDTPRELMKFLGLIPSEYTSAERRRQGSITKAGNTHARRALVEGAWAYRYPAKVSRHLQLRLEKLPKVIQDISWKAQVRLCQRYRRLVSRGKHANVVTVAIARELVGFMWAIAKQVPVTA

SEQ ID NO: 335233 - protein, 419 aa, unidentified
MSFKILKNNCCGLDVHKTWIYACIGITDSNGRTEYKQARFSSFTKGLQELCDWLVKYNCNDVCMESTGKYWIPVFNILEKNNLWVTLSHPKYTKPQKGNKTDRKDAKWICDLYMCGMVKPSFIPPADIRQLRDLVRYRFKLTCMITGEKNRAQNCLTVSNFKLDDVFSDVFGKSSRSITEQILQHPGETFDVAPFVDGRCKTPIEEIQAAVDGAISTEQAVKLGQCLNHIDELEKHQAEIEREIFRLSDKYESILNLIRTVPGFDKNPLTAIQVLSEIGGDMSVFPTAKNLVSWAGCCPRNDQSNHKIKSTRISRAGSYFKPVLVQVANALIKSKKHPEFTTRYRRIKARRGHKKAIIAICRMILTAIWHILTDLKPYTPEGFLESRPVNDSKVLTTSQALNLLKQRGYIIKDDIVPIT

SEQ ID NO: 335234 - protein, 320 aa, unidentified
MSASIEPVYVGIDVSKAKLDICLLPSGQTLVVDNNPAGIRQLINLLKQQPRVERCLLEATGRYERRCAADLLEAGFAVAVVNPRQARDFARSLGRLAKTDTIDAATLAEFAKLGHVRLSEKTPENRAILDDLITRRRQVTQMLAAEKTRREGLSHKKALASVDKVIRLLDQQREDLDREIARLIESDDDWKNRRDLLASVPGVGNTTASQLVANLPELGKLNRQQIAALVGVAPLNRDSGNMRGRRTIFGGRADVRTGLYMATISAMRCNQIIKPFAERLIAAGKAFKVAMIACMRKLVTILNVMVRNNEHWRQPVLQNP

SEQ ID NO: 335235 - protein, 392 aa, unidentified
MLYVGIDVAKSKHDCCIIDSDGSILSDALRISNSLDGFELLCSTILSHLQDDDLDNVKIGLESTGHYSTNITNYLYAKGFQITTLNPLATNLFRKAHTLRKTKTDKTDAMVIASMLFTDEPKSYSPVSYQIQELKSLTRHRYRMIGYRSKLKLSITRLIDIIFPELPSEVWSIHQNSSYQLLLECPTPEAIETCHLTKLSNILKRASKGHYGKDKALALKSLASKSIGSNNRSLAFELKQTIRLIQSVQHEINELELQIKIVVDELNSPLMTIPGISYTLASVIIAEIGDIERFSSPAKLLAFAGMEPSTYQSGNYKATNTPMVKRGSTYLRWAIMQAARTVSMRDITFANYLHKKRCEGKHYCVAINHVGKKLTRVIYYLMMTNTAFVPQT

SEQ ID NO: 335236 - protein, 347 aa, unidentified
MRFYNKLHPYYCGIDLHARMLYVCIIDDKGNKVEHQKIKACPTALMNLISPYLKGLVLGVECMHCWYWVSNFCKQHLIDFVLGHALYMRAIHGGKAKNDKVDSYKIANLLRGGNFPVAYDYPETMRSTRDLLRRRTRIVRHGADLKAHVSNTFSQYNMPAHDLNLRYPSDREKLRNVFEDSSVQRNIDMDLNLVDFYNKELSQVEQFILKNAKQHNPQDYQILNTFPGIGLILSLTILYEIGDIRRFDTVQKFASYSRLIKCKAESNDKIYGTQGNKIGNAHLKWAFSEAAVLYLRGNDKAKKYLDKLQKRMSKGKALSALAHKIGRCVYFMLRNKTVFDETRFLTS

SEQ ID NO: 335237 - protein, 350 aa, unidentified
MKKSIAWKPSLTLGLDVGDRWIHIARVDADGEDAGEERLPCKPDAVRQYFERLERSRVVLEVGAHSRWLDRMLRELGHEVFVANAGRLESIRASRQKCDRRDACELAQLGHLGPKYLHPIVHRPEHMQEHLGLLDARDVLVRARTMMVNQVRGTLKACGHKPPRCTTSAFVRRLRESSISNVSFEALAEAIVDLSVRIKALERRIAEAAEQYPAVALVRQIKGVGPVTGLAFVLAVFDPKRFRRSRDVAPYLGLVPAKHQSGGRDPQLGITKTGNPFVRRLLVQSAQYILGPRRPDCELRRYGERLVGRGGKAAKKRAVVAVARKLAVLMHHLWVSAEVYQPLRPALAAP

SEQ ID NO: 335238 - protein, 316 aa, unidentified
MLKIVYPNCCGIDVHKTFVVAVIAITNNQGITEYHRKHFSTFTNGLTQLRDWLEYYSCFDVCMESTGKYWIPVFNILEEQTNVCLAHPKYVKAIRGKKTDKKDAQWIADLFKHDLVASSFIPPLKIRQLRDLFRYRMKLTQLQVGEKNRYQNCLTWSNLQIASVVSDVFGKSAQAIIKSILDNPQDKPNIEQLVHKRMKNKVQDLEIAMEGALTPEQAEKIRVIKAHYDALAICKEDLEQMIRELGQDYQHQVKLIQTVPGFKEDLSALRIISEIGCDMTVFDSAAKLCSWAGLVPANNESAGKKFSTRISKGENT

SEQ ID NO: 335239 - protein, 340 aa, unidentified
MTITTVGIDLAKDVFAVHCVDQNGRTVLVKPKVSRAALPELIAGLPPCVIGMEACSGAHYWARLFRQYGHEPRLMAAKFVSPYRMAGKSGKNDAADAQAICEAVRRPHMRFVPVKEESQQAMQCLHRTRQGFIEEKTATYNRLRGLISEFGIIAPQSTDALRHIVSEQKNSLPLQVQQCVDDLLEHINRIEDNIAEYDRILSRMAKSDHRSQRLMELKGIGPTTACALVASIGNAHDFKNGRQLAAWLGLTPSQYSSGGKSKLGRITKAGDSYLRTLLVQGARSVLIGAEKRTDSFSRWVCSLIERRGYWRAVVAIAAKNARLCWASLHYGDDFRLYSAS

SEQ ID NO: 335240 - protein, 337 aa, unidentified
MEQQRQYVGIDLHRRRSVIVRMNEDGQVLGVDQVMNDPVEFAVAVAKAGADPEVALEATYGWYWAADLLEANGARVHLVHPLGLHWDTRRVKNDVRDSTELANRLRRGDLPEAFIAPAEQRELRELVRYRAKLTSLRTSAKAQIHAVMAKEGILPTLDDMFGPGGRALIDQMPFESAYRLRVDSLLKLLDHYAGELVVVEAELAARLAGHKGYEAIQAIKGIGPIMAAIFVAEIGDTSRFPTARHLCSWAGLTPSHRESDTKVQRGHITKQGNHLVRWAAIEAVARYHGGDPIAPTYQRVARRRGRNIGRVAAARKLLTLVYYGLRDGNIRCLAETT

SEQ ID NO: 335241 - protein, 405 aa, unidentified
MGKYSEAFVAFDVAKKKHAVAIAEGGRAGEVRFLGDIENSPLPIERTIKRLAERFERLHVCFEAGPTGYGLYRQVQALGHECIVVAPALIPKRSGERIKTNRRDAVTLARLHRAGELTGVWAPDAAHEAVRDLVRAREAAADDLRRKRQQLLSFLLRHSRIYSGGGHWTLTHRRWLADQKFEHAAQQIVFQEGIDAIEDALQRLRRLEKQLALIVPDWSMAPVVEAYQAMRGASFLVAVTFAAEIGDVRRFDTPRQLMSFLGLVPAESSTGDTIRRKGLTLAGNRRARRALVEAAWTYRYPARVSDTLRARLEGLPKLVRDIAWKAQVRLCARYRRLSATGKKLPIVVAAIAREMAAFLGYRSRGRAGIRGRSLLSAAQSRERRTKGGELPSLVMWPGSRPTPVL

SEQ ID NO: 335242 - protein, 333 aa, unidentified
MDPILGIDISKDEFHVALIPAEWPDGGKPKKPKQGRFDNTQAGFERLQAWLKRQGAPRVWACLEATSTYGDALAECLWDAGHAVSMVNPRLVRHYAKCELQRSKNDQLDAGVIARFCRSQRPHLWTPPAPELRQLRALNRRLQDLDRDCTREKNRLSVPGLDETVRASIEEHLAHLQQQMVDVHSRVEALLEQHESLRRRCELLDTIPGFGEDTAVAVVAELADIARFETSRQAAAYAGVIPAERKSGKYKGQTRMSKCGNAALRKALYFPAVTAATVGPAPAFGTFYQRLLAKGKTKLAAIGAVMHKLLRIAAAILRSGKPFDPHHRPAAVQ

SEQ ID NO: 335243 - protein, 354 aa, unidentified
MNKGKILDFSGETIYCGVDVHKTNIKVNARIGGIEVDSFSQNPDAILLKKHFDSKFPGAKLKVVYEAGFCGFVLQRSLTALGVDCIVVNPADVPCSDKDRKRKDDKRDARKLCLALSKGEMEAIYIPDKLMEHARCLVRYRGRIVENQTRSINRIRQLMNCQGLKLDDPNERFSLRLVAKLQKIDWGSPILNQTLKYALDDYLQTRNLLKKVTVEIHNLSKEEPFARVQEILRTVDGIGPISAMVIQTEIGDINRFEKLDKLCGYAGLVPDIHSTNDKNANRGITKRSNGFLREVLIESSWMLTRKDPAMYLKYKEYCSRMNANKAIIRIAKHLLARIRYVWIHNEGYRRNIVA

SEQ ID NO: 335244 - protein, 349 aa, unidentified
MILAGCDLHTRKQQVALLNTDTGELWDQELLHAGDDVERFYAALPPPVTVGIESTGYSVWFHALLQRLGHTLLVGEAAKIRAMVVRKTKTDRRDARHLRDLLKEDRFPRVWIPDPTTRDLRALIKHRLRLVRIRTMVKNGLHAIALNQRLALGPSLWSRQGLAQLQALELLPHTRRRRDDSLDLLQWLNRHIEELDLQMATAAAADPEARRLMTHPGVGPVTALATVLVLGPVERFPGSKHVVSYIGLAPTVNASADKCRLGHISKQGSALLRWVLGQAAPLATRGDAGLKRIYFAVLRRRGRPKAKVALARRLLVRLYVMLRDQIDFAEFCRRGRARPGGLELTRTPG

SEQ ID NO: 335245 - protein, 342 aa, unidentified
MIDTMIGVDLAKNVFQLHGASMSGEVKFRKKLSRPQFRKFMEEQPACIVVFEACGGAHYWARELEGQGHQAKLIAPQYVKPFVKRQKNDAADAEAIVIAAQRPEMRFVEPKNNEQIARGVVFRSRDRLVRQRTEQINALRSILYEQGLVFPTGVHQMKKIAEFLEQTDNGLLRLIREECEELLGSISDLTTRIEAKTLKLKKLSKQSEVSRRLQTIPGVGPLTAMAIEAFAPSMEIFRYGRDFAAWLGLVPKQHSSGGKARLGKVSKEGQVDIRRLLIIGAMSRISWMGRKSIQDGSWLNRMMKRKPKMLVAIALANKMARTIWAVLTKEEDYRDPAKTAAA

SEQ ID NO: 335246 - protein, 406 aa, unidentified
MMTAQDRHVTGGVDTHADVHVAAVFDSVTARSLAVAEFPADTAGYVLLHGWLASFGVLDAVGVESTGAWGAGLARSLRAAGVAVIEVDRPDRKARRFEGKSDPIDAEAAARAVISGRASGVPKTADGPTEAIRAIEIVCHGATRDRTRAINQFKALVVTAPADLRERLNRDPFRRQLELARRFRNDYDSLVETQLRFALKALAAKIGFLEDQIAELETRMNELVGQAAPALAGTFGVGPHVAAQLLTTVGDNPDRLKSEAAFAKLCAACPIPASSGKTTRHRLNPGGDRRANNALYTIVLVRMRYHAPTRAYVARRTTEGKTRPEIMRCLKRFVAREIYHVITNPPDDVPSGPEIRRRRLQADVTQAALANALNVAPIQLSRLERGLTHSNNLAYQAQDWLTQNTP

SEQ ID NO: 335247 - protein, 335 aa, unidentified
MYVCVMDRQGKKRVHTNVKDNDFRFFLKLVEPYKHDLTVCCECMFGWYWLADACQAAGLTFVLAHALYVKAIHGGKNKNDRVDSEKLTHLLRSNLIPPAYVYPADKRPLRALLRQRIFYVWRRSELLARIHSHQLAHNRIPARQTRRTRDPWEEQLLGAEDHPLRQIALKNDLAMIRHFDQQIFALEEELQRQTKKVAGRDYALLQSVPGIGENLGLTILYEIGDINRFPTVKDFLSYGRLVKGTVASAGKIKGLRGAKLGNPYLRWAFGEAAVIAKRDHFRIRPLAQRLEEQMNGNKFKANTVVAIKLARAVYFMLKNKTVFDPDRLVAALARN

SEQ ID NO: 335248 - protein, 346 aa, unidentified
MEHLAIDLGKRESQICLRDDRGEILKESRVDTCEIGEVLRRQSKPTRVVVETCAEAFSVADEVLEMGHEVRVVPATLAKALGVGERGIKTDRRDARALSKASVQMDLGSVHIPSQRARDLKAACGHRDVMVRTRTLLINNARGYLRTRRIRLNATTAKSFVNRTRKELQGRPEGLPLALDRVLRSIESLSELIAEADKELGMLAKADPVCSNLMSMPGVGPVTAISMRAGIDDPHRFPNGHRMQSYLGLTPGERSSSDTKRITGITKAGPSHLRWVLIQAAWSFWRSQPKDPNVLWAKALAAKRCNAVAIVALARRMSSILRAMWFSREPYRFDYAMRREQPALNR

SEQ ID NO: 335249 - protein, 343 aa, unidentified
MTAYVPIDLHRHRSVVMNMTATGEVLGWVRIANDPETLVAEVLKCGETPEVAIEATYGWYWAVDALQTAGANVHLVAPSRLSAFEGRRVKNDQRDCQVLGDLLRANMLPEAWISTPEVREWRELVRYRAKLVGLRAGLKAQVHAVLAKHGVHVPMTDLFGVGGRDLLAHLCAADPRFHSAYGQRVESLLLLIAAFGPHIDELNGTITATFRDQAGYHAIQQIPGIGPTIAAILVAEIGDVHRFASAAHLASWCGLTPRHRESDITIRRGPITKQGSRLVRWAVIEAAQKLRTDSWLREERERLAQRRNSRNIAKTATARKMITLVYYGLRDHHIRCLQPADAA

SEQ ID NO: 335250 - protein, 402 aa, unidentified
MNAVGIDVSKGKSMVAIMRPFGEIVSSPFEIKHTTSDINSLVELINSVEGESRIVLEHTERYYEVLAHQLSKANLFVSAINPKLIKDFDNDSLRKVKSDKADAVKIARYTIDKWQNLKQYSVMDELRNQLKTMNRQFGFYMKHKTAMKNNLIGILDQTYPGVNTYFDSHARSDSSQKWGDFASTYWHVDCVCKMSKNAFINHYQNWCKRKKYNFSQSKAEEIYGKAKELVPVLPKDDITKLIIKQAVDQLNSVSTTVESLRTLMNETASKLPEYPVVMAMKGVGTSLGPQLMAEIGDVSRFTHKGAITAFAGVDPGVNESGSYEQKSVPTSKRGSSILRKTLFQVMDVLIKTHPQDDPVYQFIDKKRAQGKPYYVYMTAGANKFLRIYYGRVKEYLSSLPES

SEQ ID NO: 335251 - protein, 323 aa, unidentified
MNTAPIVYVGVDVAKASLRFDAGDGYSKNVGNQPAAIKRELARLRKSVPAGSALQVCFEATGCYTRKLKHACVEASVAASTLNAYKVKQYARAMSVSAKTDPIDARMIRLYSEHRKPGPDAPLTEGQEEMKELAGLRALYQKQEGMLRGALESAGSACAVKSVKASLASVERQISRLEARLEELRDADAKLAAVCAELAKIAGVGDLTALLVTSLVPELGTLSRRRSASLAGLAPHPEDSGTIHAPRHIKGGRFHVRRTLYMAALSASQFNAVLKVVYERKIKEGKPFKVAIVCIMRKLFVHMDRVAAKVLKDLAATPPLATA

SEQ ID NO: 335252 - protein, 366 aa, unidentified
MKKISTMRINGNTIFKGHKLTIGLDLGDRWSYCCVLDEAGEILLEQKVATTPEAMKQIFEKIPRSLIAMETGTHSPWVSRLLTELGHKVIVAHAQKVQLITKSSRKDDRHDARTLARLARIDPELLGPVRHRSAKAQIHLTVIRARAELVSARTALVNAARGMVKSYGQRLPKCGTQQVSRELTAGLKAELREVLEPLLQEIESLNERIKEYDVRMEKIAKESYPQVELLKQVKGVGTQIALTYILTLEDPHRFPKSREVGCFLGLRPGRRDSGESQPEMHISKEGDPYLRTMLVQGAHYILGPFGADSDLRRWGLKLAARGGKSAKKRAVVAVARKLAILLHRLWVSGEVYEPLRNSQKAMRAAA

SEQ ID NO: 335253 - protein, 362 aa, unidentified
MAQVRSWAGLDVHAAKVVAAAVDRESGELVVRRLSGRTGDVVAFCAGLPGPTRVAYEAGPTGFTLARALAGAGVGCVVAAPGKIERPVQDRVKTDRRDAERLVRLLMVDGLRPVRVPSGEEEALRDLVRAREDVRGDLMRARHRLSKLLLRHDVRFDGTARAWTIAHRDWLAKLDLGDRGAQVTLHDYLGAIDALLVRRDTLEATIGELVPASPWADTAARLRCLRGIDTLSAVGLCAEIGDWQRFPRAGHLMSYLGVVPSENSSGEKRRQGAITKSGSRHARRLLVEAAWHYRRAPAKGDALRRRQAGQSAHVIALSWKAQQRLHRTWRRLDSERGKRRTIVAVAVARELAGFCWAIANAD

SEQ ID NO: 335254 - protein, 406 aa, unidentified
MDPTASNNLLEVIPMIIVAVDVAKDKHDCFITNSDGEVLYDSFVIQNNQVGFDDLFQKICSVTDSLQNVKVGLEATGHYHLNLLGYLLDKGLTTCLINPLQTSLFRKSLSFRKTKTDPVDARAIARLLMSDRTLQPYSLTSYQNEELKSLTRYRADKVRERAKLKSSLSRLVVILFPELEKLVPTLHMATVYDLLHEFPGASSVASAHLTRLSHLFSDASKGRYGKEEAVRIRDAARHSIGAVFPSKSLELRHTIDHIRFLNDEIDEIEAQIFVFLEKNPPKMLDIPGMGPRMAAVIVAEIGDFKRFSSPDKLLAYAGLSPTTYQSGQLTSTYAKMEKRGSRYLRFALFNATKYVCVWDPTFRAYLAKKRSEGKHYNVAISHAAKKLVRLIYHLETTGETYISKAC

SEQ ID NO: 335255 - protein, 408 aa, unidentified
MEVVHPRCCGIDVHQASLAVCVTIKEEGKSEKYKLRCGTTSAELLRLADWLHGYQVTHVAMEATGVYWKPVWHILEGQFELLLANPTQVQALRGRKTDLKDGERIGDFLQHGLLQGSFVPPRPIQELRDLTRSRTTLKQEQVRIGNRIRKVLEDANMKLSSVMSDVMGVSGREMLRAIVGGQFDPAALAQLARKRLRGKIPVLQQAAAGTLNQHHRFLIEQWLALWDELAVRIAKFEERIEEQMRPFATAVETWTSIPGIDRITAWTIVAEMGPDMASFPTAAHAASWAGLCPGQEESAGKRHSGRTRQGNVWLRRALTQAAWGASMRKGSYFKAFYRRLATRKGKKRAIIAVAHALLTTGYMLLWTGKSFADLGEDYFDRLDRDRLTKRLVKHLERLGHRVSLQPAA

SEQ ID NO: 335256 - protein, 342 aa, unidentified
MQITTIGLDIAKNVFQIHGIDAKEKVVVRKQLRRSQVIAFFAALPPCLVGMEACATAHYWARELRKLGHEVRLMPAKDVKAYVKRNKNDAADAEAICEAVRRPTMRFVRIKSAEQQGQLMQHRTRDVLIRQRTQIINALRAHLAELGIVAAQGDAGVSELRAIVADDRDERLPIDARASVIVLAAQLEALQTLIGSIEKRIKMQHRSNEASQRVETIPGIGVLGATAIVATVADPMIFRSGRDFAAWIGLVPRQDSTGGKQKLGPISKQGDRYLRRILVVGAIAVLRRAQENPGKYPWLTQLLARRPFKVVAVALANKMARTAWALMVHGGTYRAPELAEAA

SEQ ID NO: 335257 - protein, 345 aa, unidentified
MPIVGGLDIHRKQITFDYLDTGTGQVRRGQISPADREHLRAWLARFAGREDVAFAAEGCTGWRYVAEELAAAGIAAHLAEPADTAFARGRKRHAKTGKTDCRHLRMLLAEGRLPECWIPPGHILECRALLETYHDLRAEHTAWVQRIHAVLFHQGAPALGEGTLRTGPGLAALREAAADWLSPAGQLQVATALEVLEALEARMHAVRHQLLDAARHLAGAKILAARLYGVGPFAALAMTCWLGGAGRFSSSRQAVRFAGLDVTVSSSDRKGPPGRLSRQGPPVLRWALYEAGKTHARASAPDHRYYAQVKDRCNGKRAALSGARKLLRQACHILAELGDDALAAV

SEQ ID NO: 335258 - protein, 388 aa, unidentified
MTQSNILYVGMDAHKESIEIAIAEGDICGEVRRYGRIGGTKEAFMRFLRKLISRGKTLHFCYEAGPTGYELYRLITGLGHTCIVVAPSLIPKKPGDKVKTDKRDAEQLARLYRAGELTAVYVPDAEDEAMRDLVRAREEAMHTRTKAKQRLKAFLLRHDIRCPHSENWSEAHLRWLAEIKLPHPTSQIAYQEYLDSVTEAAKREERIMKEIDKHIRHWRLWPAVEALMSLKGVRMITACTIITELGDLSRFDNPKKLMAFLGLTPTENSTSDRIKRGSITKTGNNRVRRVLIEAAWNYRFNPKVNKDIQRRQEYLPLKIRSISWEAQLRLNHRYKSMMQKGKIKNIIVVSIARELSAFIWAIFQELNLGSKQILESPEDCVLVDNATR

SEQ ID NO: 335259 - protein, 369 aa, unidentified
MSERTRFVGLDVHKASIAVAVAEAFGDPEDHGHIANDPSAVRRLMQRLGGPDLHLEVAYEAGPTGYALHRQLTAMGISCLVVAPSLIPIKPGDRIKTDRRDAAKLARLLRSGDLTPVWVPDEAHEALRDLVRARDDAKADLLRAKHRLSKFLLRRAIHPPVGVRAWSRAHDAWLARLTFEHAADGVVLEHYHAVVREAAERVRRLETALAQCAAASPHAELLAALQAIRGIGFLTAVTIVAEAGDLRRFPTARQFMAYVGLVPSEHSSGDSRHRGHITKTGNRLIRHVLGQAAHNARYRPNVSTSLRARQRRVLPAVVELDRRAQARLHARYRHLAGRIGTNKTIIAVARELAGFVWATGQLVPTALAA

SEQ ID NO: 335260 - protein, 350 aa, unidentified
MDYFAGLDVSLETVSICIVNAAGDVVLERKVEAEPAAIAAVLQHVGRPLKRIGLEAGPTSSWLYSELRGIGYPAICLECRHVKAGLSAMRNKTDRNDARGIAQLVRLGWFRQVHIKSGQAQRVRMLLVNRQQLLTKALDLENSVRGSLKVFGLRVGTVTRQTFEARVLELVAEDHSLRVITEPMLRVRRALIAEFERLDRFCRQVARQDPVCHRLMTVPGVGTVVALTYRSGVDVPERFAKSRDVGAHFGLTPQRYSSGQTDYDGHISRCGDAMVRTALYQAANVLLHHGRWSSLRSWAMRIAKRGSTKVAKVALARRLAVVMHRMWVDGTDFRWSAVAPPAPTTPALAS

SEQ ID NO: 335261 - protein, 343 aa, unidentified
MQTVTTIGLDIAKSIFQVHGIDAAGQVVIRRQLKRRYVLAFFERLPPCLVGIEACASSHHWSRELHSLGHTVRLMPPAYVKPYVKRQKNDTTDAEAICEAVTRPNMRFVPTKTIEQQSCLMLHRARHLFIRQQTAVINSIRAYLAEFGIVAPVGRRGVEQLLEVVADAADRRLPEIARVCLAALGSQLRKLKAQILEFDRRIMAWHRSNSTSKRLDAIPGVGPALATALVASIADPRAFRSGRDFSAWVGLVPTQNSSGGKDKLGSISKQGDRYLLSLFTAGALAVIRYAKIHGTRHRPWLTALLARRPTKVAAIALANKLARMAWAMMARNERYKEPAALTA

SEQ ID NO: 335262 - protein, 347 aa, unidentified
MRFYNQQHKNYCGIDLHARKMYACIIDQKGKMKVHQNIKTDPELLFEIIFPFLDDIVIGVECVFCWYWVSDLCAEHKIPFVLGHALYMKAIHGGKTKNDKIDSYKIAALLRGGNFPVAYTYPAKMRATRDLLRRRMYIARRCSELVAHIQNTNTQYNLPEFGKKISRKYNRQGVAERFDDPAVKKSVEVDLALIDSLNEILKKLEWHIEKTARQHDYKTLYLLRSIPGVGQILALVILYEIHDINRFPRVQDFSSYARLIKPVKESNGKWAGKSNKKIGNHHLKWAIKEAAILMLRSSDQAKEFVAKIEKKSNKGKALGIFTHKLGRAMYFMLKNSEAFSMECFFNK

SEQ ID NO: 335263 - protein, 338 aa, unidentified
MDKLDFSGIEVSSQELVVALQRDGRRKDLKTFPNTAAGHQALIRHLSCPGRTVRAVLESTGLYGLDLALALRRAGIEVMVANPRAVRHFAQALMQGSKNDRLDAWVLLEFAARMPFQAWQPPATPALQLHALARRLQALTEMQTAEKCRRDALPATQTTPPALRRDLERSLRSHRRAIARLSGEALKIIESHPDLKLHFDLLVSAHGSIAGTSAIQILAELAVLSPDFDVRQWVASAGLDPRECSSGSSLRKKARISEAGNAHLRRALYMPALVAIRHQPQLRAFYQHLRAQNKPKMVALIAVMRKLLHAIYGMFKHQQPFDGSKVYRLSEISTGAAA

SEQ ID NO: 335264 - protein, 366 aa, unidentified
MNKRVMPTVMPTAQDPTPMPLDQVDPCGTEVSAEELIVALRRKGVEQPLKSFPNTPEGHRDIVGYLARQGRWVRVCLESTGVYGLDLALALAAQAGIQVMVANPRAVRHFAQALMERNKNDRVDAGVLREFAARMPFQSWQPPARPARHLCALARRLEAITDLCAAEKNRLHASQATEALPAIIRQDLERSIRFHQRAAQRLSREALKIISEDSNLQQRYTLLVTVPGIAQTSALRILAELVMISSDLDVRQWVAYAGLDPREYSSGTSVHKKVRISKAGNRHLRRGLYMPALVAVRHDPHLRAFYQHLLALGKLKMQALVAVERKLLHAIFGMFKHQQAYDGTKVYRLPDALTPASSAPVRTEAA

SEQ ID NO: 335265 - protein, 426 aa, unidentified
MNTTTTFAATIGLDWADQKHDLWIRPASGEKAQHLRLEQTPEALHEWVAKLRQRFGNQPIAIAIETSRGPVISALMAYDFIVLFPVNPKAMKDYRAAFSVSGAKSDYTDAQLLEEFVRLHRDKLKALEPDTELTRKLAGLVENRRHLVDERTRIVNQLHSILKTYYPLAETLLGRQMNQPMAADFLARWPDLESLQKAGPKALRAFCYKHNSRNSVKIEERLTALEKAIALTTDQAIITPARLLVEALANILKPLHQAIARLDKEIERAMDQHPDAAIFRSLPAAGSALAPRLLVAFGTNRDRFENAGEVAQFYGLAPVVVQSGNSKTVHKRYRCPKFGRQTFHENAGCVAKLEPWARCYYVQHKQRHDDKHHQACRALAFKLIRIYFACWKHRTIYDADIYLRALEKQGSPLHKMVQIPTPAHGE

SEQ ID NO: 335266 - protein, 312 aa, unidentified
MTQEALVVGIDVSKDMLDVAILPTGEALRLPNTGKGWGKLIRRLVGKPVAVVAFEATGGYERGLLKALHAAGLPAARINPRRVRDFAKACGALAKNDRMDALIIARFAASLPPRLTEHDPAVDALAELVCARRQLSEDITRAANQAEHAVSAVIRRVSGRRIRALQAELKLVEQEIAKAIAAEARLADKDRLLRTAPGVGAVTSATLLALLPELGQLDNRAVACLVGVAPFDHDSGKLKGQRCIQGGRRPLRDALYMAALGAIRTRHSIFRACYQRLVANGKKPKVAIVAVMRKLITTLNAMLRDNHAWTPT

SEQ ID NO: 335267 - protein, 344 aa, unidentified
MPLSGSSVLIVVQTKIMQKIYVGIDISKDWLDVAVCDQKGHFLNEGSRFDNSKRGIEKALRLVNSYSKESHICFENTGNYGLLLTFLIEHNHMCYSVIPPIEIKRSIGLTRGKSDVIDAHRIALYAATHHQKLQLSRLNSMLLLKIRHMLRYRNQLVDISKKLKCSLKSFQVSLLTVDVSNIVDSITHKLAEMKADIKQAEKEIEELIESDRQLAKNHHLAKSVRGIGPVISAYMLVYTNNYQAFDNPRKFNCYAGLAPFESSSGSSIRGRTSTSHLRHKKIKALLFNAANSATLYDKQLKSYYKRKTAEGKHRMLILNAIAAKIVYRVFAVIKRQSPYIEFAQ

SEQ ID NO: 335268 - protein, 356 aa, unidentified
MYGLKHQMEKRSMEHFAGLDVSVNETSVCIVDEMGRIIREVVVASEPDALLAVLKSDVYHFKRIGLEAGPLSQWLYSALAEANLPVVCVETRHMRAVLKAQINKTDRNDARGIAQMMRAGLYRPVHVKTLRNQKLRMLLTHRKLLQSKAIAVDNDLRGTLRNFGLKVGLVGAARFETRIKELVENLPDIAALVEPLLIVRRVLREQIAVLHRRLLVIVKDDEVCRRLMTVPGVGPVVALTYRATVDVPARFRNSRAVGAVLGLTPCKYQSGESDYTGAISKCGDEMMRVMLYEAAQILLMRSTQWSWLKAWAMQIARRRGMKKAVVALARRLAVVMHRIWVDGTTFRWTREEAAAA

SEQ ID NO: 335269 - protein, 312 aa, unidentified
MKMAHPVSIIAVDVSKAHLDCFDAARGEAFRVDNARPGFTALARKYQGQSVVFAAEASGGYERGLLRELGAVGFSVRLLDPRKVRLFARASGRLAKTDRLDARAIAAFAQAIPGEPQAINPAQEALAELATYRRQLIAEQTLVANQAEGLRDPELLRVTRRRLAMLKTQIVRLDLRLAEAIQASETLREKSRLLLSIPGVGPVLCSALLAFLPELGQISRHQVAALVGVAPFDNQSGKTDRPRRIQGGRTALRTVLFTAALAATRCNKTLAAFYDRLRAAGKKSKVAIVAVMRKLVVLANALLRDQRPFASP

SEQ ID NO: 335270 - protein, 318 aa, unidentified
MQEREKKMENYVGIDISKRYFDLYSLPQGKQHHFENTPEGIRRCLEVLTETKPVLIVMESTGGYEVALATELYLAGLTLAVVNPRQIRSFARAVGQMAKTDKLDAKIIARFAATVRPPARAIMEGKTRQLKDLVARRDQLVELHVAESNRLEHAVDKNIAHSIRQVMKAIERQMSKIEQQIAGHIEQDQQLKHKADIVDSAPGIGTTTASMLVTHLPELGTLNRREIASLVGVAPMNRDSGAFRGKRMTGGGRVSVRCGLFMPTLVAIQHNPVIREFYQRLLLMGKDKMTAVVAAMRKLLTILNTMVAKNEFWKPNLA

SEQ ID NO: 335271 - protein, 427 aa, unidentified
MKPHFFIGIDRSDFRLDLCILSANGEILEQTSISTDPEAMLAWARKIEAMLPSGARAALCIEQPCPGLLNFFRQFEFLALHLINPLTLKHYREAFNTSRAKDDKKDAFHLARLILEKHDLLKAWQPDDEQSRQLTILTQKRRQLVDLRVSATNRLTQILKDCFPQALQITGRDLHARLALAFLEKWPTLQALQRARPATIKKFYHQHGSRRPKPIEERLALIASAVPICTDPITLDCSTEFLHALVRQLREFDQSIRRFDTLIEASLHSHPDVVIFASLPGAGANLSARLAAFFGTDRAAYPDPISVQNHSGVSPVTKQSGKMHFVHRRYACCKFWRQTFVEWAGQSVMKSRWAKAYYEQQKQKGQRHHTILRGLAYKWIRIVHRCWQNNEVYNEDRYLAVLEKRQSPLIAIIRKLAELPEPEAISS

SEQ ID NO: 335272 - protein, 343 aa, unidentified
MQAITTIGLDIAKSVFQVHGVDANGQVVIRRKLKRRYVLAFFQKLPACLVGIEACATSHHWSRELQALGHKVRLMPPVYVKPYVKRQKNDAADAEAICEAVTRVNMRFVETKSVEQQSCLMLHRTRHLFIREQTAVINVIRAHLAEFGIVAPVGRKGVEELLRVIADPADKRIPRIARACLAALGTQLQRLKEQLVEFDRMIMAWHRSDETSRRLDEAPGIGPMLATAVVATVADPKAFRSGRNFSAWVGLVPKQHSSGGKDRLGHISKQGDRYLRGLFVAGALAVIRYAKIYGTRHRPWLTALLARRPTKVAAIALANKIARMAWAMMVKGERYKEPVALAA

SEQ ID NO: 335273 - protein, 413 aa, unidentified
MLKIVYPICCGMDVHKSFVYACIASTNEQGVTTYKSRRFSTFTKDLRLCAEWLAANNCKDVCMESTGKYWIPVYNILEQSCNVVLAHPKYVKAIKGKKTDKKDAKWIADIFKHDLVSGSFIPPADIRQLRDLVRYRLKLTNFVVGEKNRAQNCLTVSNIKLDDVFSDVFGKASSNIISQLLENPSDKITDVAEFRTKGMKATNEELLAAVDGEFCPEQAEKLRIIRSHMDSLELCKLNVESLILTVAEKYLPQFDLVSTVPGIQTFAAIGIISEIGVDLSVFPTSKHLCSWAGLTPQNNESAGKKKTTRIGRAGDYIKPLLVQCALCAIRKKSNPEIRNRYLSIKKRRGHKKAIIAIARMLLTAIYNILKKNEPYNPDLYTRSNNPPTHRTVSVDEAIFILQPQGYLVTPATS

SEQ ID NO: 335274 - protein, 361 aa, unidentified
MKKVGKQPQDMEATHGKPAMTMGLDMGDRFSHYCLLNGDGEAIEEGRLQSSEAAFRRHFENEPRLRIALECGTHSPWASRLLKQLGHQVIVANARRIPAITGSESKNDRNDAEKLARFAACDPKLLSPVQHRDSERQLDLNLIHARSTLVRARTMIVNALRGLVKSAGGRLPACSTESLPTRVAASIPPALAAVATPLVEQIALLNRQIGGMDKQVEKLSAKYAEMGLLRTVPGVGPIVAAAYVLTLDRPDVASNRSAGAFLGLRPGQSQSGDSDPQQRISKAGDGCLRSLLVQSAQYILGRFGPDSALRRWGLKLAGSGGKRGKKRAIVAVARKLAVLLHSMWRSGQRFQAFPQVPAAAA

SEQ ID NO: 335275 - protein, 347 aa, unidentified
MRFYTKQHQFYCGIDLHADAMYVCVLNSVGEVVLHKNIPTKPKAFLRLIKPYRERLVVGCECMFSWYWLADLCADENIDFVLGHALYMRAIHGGKAKNDKIDSHKIAVLLRGGSFPLAYVYPKELRATRDLLRRRNHLVRKKSELIAHIQNTATQYNLPPLGRIAKPTERAGLLGKFTDPVVRRMVEVDLLTIEHYEGLLNTLEWQLERITERQAPVELALLKSISGVGRILGMVMLYEIESIERFPRVQEFVSYCRLVKPEKQSNGKSYGHSGKRIGNAHLRWAFGEAVILMLKGNKPLQAKRQRLASKHGKGKALAILSHRLGRAVYFMLKNQEPFDQEKFMRGL

SEQ ID NO: 335276 - protein, 411 aa, unidentified
MQVMYDRCAGIDVHKKQVTVCVMVTEGKAVKTELKSFGTTTPELLAMSDWLNSFGVTQVGMESTGVYWKPVYNLLEGHFELWLVNAQHIKAVPGRKTDVKDAQWLAQLLRHGLVRKSFVPPLPQRQLRELTRHRSNLVGRRGQVINEVHKILESANLKLGDVATDITGVSARLMLDQIVGGQTDAEVLADLAKGRLRHKMERLKLALQGKVEAHHKIILAQLLAEMDGLEEQILEVGSEIGQRLSAEQELIERLDGIPGVNQRVAQVLIAELGTDMSRFGSAPQLVAWAGMCPGHNESAGKRRSGRTRHGNRQVKAIAVEAAQAGVRKKGSYLGARYRRIAARRGKKRAVVAVGRTILEAYYYMVSRKAKYQDLGEDYFDRRDPERLIKRLSKRIEKLGYSVTVEPMKVAA

SEQ ID NO: 335277 - protein, 341 aa, unidentified
MDDVEDEPLFAERVAGIDIGKAAIMVTIRVPSDTRRGRRQQETREFRAVLKDLLALAGWLGCWGVTRVGMEATGDYWKPVYFLLAREGFDCVLYHASQVKVLPGRPKTDRLDSVWLAKITERGQLPGSFVPPEDIRRLRTHTRYRRHLIQARTAEKERCEKLLEDAHLKLSSVIRDIHGVSGRDMLTAIIAGQRDPHVLAQLARGRMRIKIRELEEALDCSFFTEQHAFILQMMLANIDYLTRQVDELSAKIQALCEPYARQIAQLDGIPGFGVITAQDIIAETGADMTVFPTAGHLCSWARQAPQVSQSAGKRKGKNATGRGNPYIGAALGEAAIGAAPM

SEQ ID NO: 335278 - protein, 430 aa, unidentified
MEIVYPRSCGVDVHKSFIVAVICISESVKPKYIKKRFSTFNNQLIQFKDWLIENNCQNVCMESTGKYYIPVYNALEGYISNVVVANPKWVKAIKGEKDDNKDAKWIADLFKFGIVRSSYIPEKDIRILREFTRYQYKLVNMRSSEKNRFQNALTTGNCKLDLVFTDIFGKSATAIVDTILSNDPYTSEDILSKVHGRCKASHEDMLSAIDGTQLNQFQKARIQIVQKHMEYLDSLLDEIQHHIDLMVANYEDYIQLLCTIPGINRKSAITIISEVGTDMSQWSSHRKLAAWAGLSPGCNQSAGKKKSVKISKAGVYLKPCLVQVAHAAIKDKKCDYYATKYNKISKRRGKKRAIVAIARKILIAVYHLLKTGEVFNPTDMADVETTKKQRIEYIKNNLRNAFNQLSRTGLSEEEILQFIRKEPTNSPQIE

SEQ ID NO: 335279 - protein, 338 aa, unidentified
MELYAGIDLHSNNSVVTVLDQQDRTVYAKRLPNDLGCIVAALRACAGEVRGVAVESTFNWYWLVDGLQAAGFTVHLVNTAAVKQYDGLKHGGDFSDARHLAHLLRLGILPVGYVYPRKERAVRDLLRKRSQLVRQRTTQILSIESLIARNLGARVSGNEVKRWDAKCIDAMELLDEHKQAAKANLVVMNCIDGQVVELERSILAKVKLREDFKGLKTVSGIGEILALTIALETGDIGRFAGPGNFASYARMVDSRRESNGKKKGVGNAKCGNKHLAWAFIEAAHFAVRFDATIKRWYQKKCASSLSVVAIKAVAHKLARACYHVIKDGEPFDAAKAFG

SEQ ID NO: 335280 - protein, 466 aa, unidentified
MENNYILYVGMDVSKGKADAAILKVSDRRSVKPKFLRKKLSFKFVKSEVASFLETVRSYSDVNCTSICFALEVTGIYSTNVYDYIKANLYENESIKFLNTDFVNQWRIAHNIAKSDPLDAQTISTIIGTDSDVQFVNDNVFENKNGYQDLKALVHRHYQIKKIYSQEINRLIAQCDCLFPELQYVFEPKSAAFIAVLSSYPTTHDIINASRVEVFDVVYEATKHRCSMDKVDKLFELCQDTLVPNDISSYGKSIILDLVENIKNIKGQLKSIERYIKDIASLNPAYKLLLTITGCGPITAATVIAETGNIRRFKNADCFVSYSGTSPRNKRSGTSVETMGKISKKGSRYLRHAIYMIAEFARRHNPVLKHQFERIKNGNKKRHKLANIAIANKIARYIYSIMKNKSSFVILHDHIMRLPEETRDTFFNSISLDFPKNTRKQIYQYSDINGELHRFVYIKTDEMIPA

SEQ ID NO: 335281 - protein, 324 aa, unidentified
MKLQKSDYQRYVGVDVGKAKLEIDDSKRLIPRSVDNDADAIVELIIQSIDSPESTLVICEGTGGYERKLACAMHAAGVPIVIANPRQVRDFASGNGILEKSDPIDASVLRVFGEDARNLTLATPKSEDHEKLGAMARRRKQLLEMINQESNRLQQTTDPEITELIRENLETLKKQLKTVDQRLTKMINEQAENNQTVRVLQSVPGIGPVSVATFLSELPELGKLRRGEIAKLVGVAPLVNQSGRKDGQRSIFGGRGYVRRVLYMATLAATRHNDIIKRFYKRLLAKGKPKMVALVASMRKLLIILNDMVRNGECWRYANLSESK

SEQ ID NO: 335282 - protein, 460 aa, unidentified
MACDPDKQSGPRYIEVPFFVAPGNGEHAWQCLDYTCGVTVAFLWMEAKMQVIIERCCGLDVHQETVVACVLIGAPGERPRKEIRTFRTMTRDLEALRDWLQELGVTQVGMESTGVYWRPVYAVLEGHFDLIVGNARHIRNVPGRKTDVKDAEWIADLVRHGLIAKSFVPPAPQRELRELLRYRRKLVESQAAERNRLLKLLETANIKLASVASDVFGVSGRAMLKALIEGGASAEAMADLARGQLRRKRDDLVLALEGRMEEHHRFLLATQLRRLEAAEHDIAALDDRIEAKLAPYCVQHALLMQIPGVDWVVAAALIAEIGVDMSVFLSVYHLAAWAGVCPGNHESAGKQKSGRARKGNVHLRTMLVGAAISAARTKGSYLKDKFHRLKARRGAMRAALAIAHKILVAAYHMLAKGSPYRELGEAYLDQIARTRTVANLKRRIERLGYNVTLEPKAEPA

SEQ ID NO: 335283 - protein, 397 aa, unidentified
MKVVYSTCCGVDVHKTFLVATIIKTTKGVQPSYQKKRFSTFNSDIRRFKQWLLDNSCFDVCMESTGKYWIPVFNLLEDQINVTIANPKWVKAVKGNKDDAKDSKWIGDLFRLGLVPGSFIPCKEIRILREYTRYRFKLTCCKRSEKNRFQNAFTVCNVALDAVVTDMFGKSASSITDYLITSDEFDPETCKSFLQKSLKKKADAVIESIEGYQMTSSQKERMLMVRSHLEFVQQSIDSLDSKLDELTAPYENAVSLLCTIPGVDRASAITIISEIGTDMTQFNSSKRLCCWAGLTPGNNESAGKKKSVRITRAGVYLKPALVQCAHAAVKSTATPYYKNKCERLAKRRGKKRAIIAIARMILTAVYHMLSTGETWNPCDLYKIDMPKEMQDKQKLKL

SEQ ID NO: 335284 - protein, 448 aa, unidentified
MHAPEAAKEEVEYAALVSLDWADQEHAWALQPNGGGAVEQGTLQNTPEAVEEWAQMLARRFGGRLVAVAIEQRRGAVIAMLSKYAHLALYPIHPSTLANYRKSFYPSGAKSDPGDTLLQLELLLRHRDRLLVLKPDTVETRTLQFLVEQRRKRVNEKTAYSNALTSWLKQIFPQVLCWFNKPASPAVAKFLERWPTLEHLRQARQATVRKFLREHGRRNEERIEQQLAEVECAVEATHDQALLKAGVLAVRQLLGLIAQLHQAIAECDRQIHEVAEAHPDFAIIKSFPGAGAAMAPRLLAALGTQRDRFASANDLQCYSGIAPVKSSSGQQTWVHWRWACPKFIRQTFHEWAQHSMKKCTWAREYYQQQRDRKKSHHAALRALAFKWLRILYRCWKAHRTYDELSWLSAREQRRPVPTNAAKCSPNSRGLEIQWKKVAGFSKPEAASS

SEQ ID NO: 335285 - protein, 339 aa, unidentified
MRLYTAFDLHSNNSYLGINDENGNHVFKKKLPNDPAVIIESLKPFKANIVGIVVESTYNWYWLVDLLMAEGYKVHLANPVEIQKYKGLKYADDQHDAFWLAEMLRLGILPEGYIYPKEDRPIRDLVRKRGHLEKVRTSLIISLQNIISRNNGIRLKANHIKALRTDRVAPFLEQNEDLALAGKVSKESIDFLTRRIKSIEAVVEKKVELKEPYDRLLTVPGIGKILGITIMLETGPISRFEKVGNYVSYCRKVSSKWISNDKRKGKGNKKNGNKYLAWAFSEAAEMSRRYDENARAYFNRKAQQTNRMVAHNALAHKLARAAYYIMRDGVSFMPEKCFG

SEQ ID NO: 335286 - protein, 523 aa, unidentified
MARTRRPRQARRFCVQKPTGSRTPRVQAVGPEHFGVVSIDCAKARSKFCLCDFYGQVLIAPTFLEHTQAAFRAALDQLRAALRQHDLRDVVVAIASTGTYHRPVQHACRAAGFDTRLVHPFASKHFRQPADPGNKTDDTDLAAIFRAAVNGFGLVQPCWPAPYLELQQLCRQRRDLVHKTTALRCQIQETVHQLLPGYTALFAAHFFDTPVALPLARATGSAQAIRDAGRAGLRRLLPAGLPCKLTTLAKVLDWARTAPPPQEPSALYRESLDRLADDFLQKTREIRGLEQRGARLLAQTPFVRLLALPGICVVSAAELAGEQGPPEHYANANHLTGRAGLCPSRYQSDRVDRAAGPLRRRAHRRLRAALLQIADNLVRHNHHFGARAARWQHQGQDPRWVRVKVAKGFSRLLFVLLRGPGVVPHPACQPRHSICDKLLGFHFDHRTDLAMALEDIDHATRQLSGRTCREEAELLGQQLDRPRSRHGCGRHRGPVPLAQLIPLVLARLGVRLLPSGAEGEGPS

SEQ ID NO: 335287 - protein, 382 aa, unidentified
MKCLYSNVACSGMDVHYKFSNVTFRDSAGNVVRRERLEHPQRDQLRARIARWPKGMPVVLEASFGWGWLSDLMAEAGLDVHLSNCYKVEQMRKARGLVKTNKKDADLTSLLPLEAANWWEVWRAPQDVRNRREQMRFRSDLIALQTTVKNRIHAMFHRHGIFHEFSDLFNGKGRLFLADICIKGSDYLSSQALQAFRGHILLLAHVRKQLASLERILKRQLEKTLLVRRLKTIDGFGLILSHVMMAEIGQIGRFRNHKALASYSLLAPRANDTGEADPERTPLGRHLGTRGNKTLKWAFIEAAHGAVRHGGKWRQMFDRVTGGGKKDRNRGYIKVARELVKAVYVVWKKDVDYIDNPLPRPGQGSKKSRSGTGQLCRTMVHA

SEQ ID NO: 335288 - protein, 376 aa, unidentified
MKKVRFVGFDVHAQTIAAAVAEPNGEVRNLGTIANRAESVRKLLKKLGTPGELKVCYEAGPTGYVLYWQLTQLGVKCEVIAPTLMPMKAGDRVKTDRRDAERLARSYRAGDLTAVWVPDQAHEALRDLVRAREAAKKDQLRARHRLSKFLLRQGRRAPEGTTAWTGKYMKWVHEQRFEHATQEATMNDYLHEVEHAAGRIERLERAIDTAVQSVPEPMRSVIEALQGLRGIAKVSAVSIVAEVGELSHFARARQLMGYSGAVSSEHSSGERVRRYGITKTGNAHLRRIIVEAAWAYRHRPACGGALKERQKNLSETVKEIAWKAQHRLHGRYTRLLARGKNKQQAVTAVARELLGFIWSIGVQVEQSLRQGERRAA

SEQ ID NO: 335289 - protein, 325 aa, unidentified
MANIALKVGIDVSKSKFDVCYRSGNGTVSKTYSSGARSVKEFVSSLPEGSHCVMEATGVYHTRLAYALHEAGIIVSVVNPLVIKNFSRMRMARTKTDRADAELIMEYAEREDPPAWEPAEAECIKAHNCLVTIDLYQRQITAMRNEVEALEQSAVCDGKVMNSLKKSAQSLEKEIAKLEEEMLGLVKAFAPKQAEELQSIPGIGKKTAATLITATKGMRGFSNYRQLSSYFGLCPRIYASGTSVRGKARICKMGQARMRQMLYVCAWSAMRYNKACAELAERLYEVGKPKKLILVAVANKLLKQSFAIIKNDTYYNDNYKSTLAN

SEQ ID NO: 335290 - protein, 355 aa, unidentified
MKNLKYIGMDVHTATISVAVRDAAGKLIMESVIETKTSTILQFIQGLRGDLYVTFEEGTWAAWLYDLVKPYVTNIVVCNPHRNALLKEGSKSDRIDARKLAELLRAGLLRPVYHGEKGLRALKELVRAYLTIGKDLTRVMNRVKAIYRSWGIPCGGQSVYHPGHREEWLSKITHSSVRRRAELYYQQLDVLVLLRKQARQELLAESKKHKAWKLLRSIPALGPIRVAVLMAIVQTPHRFRTKRLLWKYSGFGVVTHTSADHRYVNGELQRSKKPVSVRGLDRDHNHQLKDLFKSAAIQACTSEGPFREFYNALVAKGIRADMARLTLARKIAVITLTVWKKGVAFDAKYLKPQTA

SEQ ID NO: 335291 - protein, 402 aa, unidentified
MNCVGIDVSKGKSMIAVMRPFGEVVVSPFEVLHTDSELSELARLLKSLDGETRVVMESTGNYHAPVAWLLHDAGLYVSVVNAMLVHDYGNNSLRRAKTDKKDAVKLANYGLDHWLTLPRYVPDEDTRLMLKTCYRQYQQYSKVQTMLKNNLISLLDTAFPDANRLFTSPPRADGSEKWVDFVAAFWHCECVCGLSKKAFTTKYQKWCRKHGYNFSEDKALDIYVSACGRFGVMPKTKTAKLLVEQAISQLQATSAALAALKQEMQSLAASLPEYPVVMGMFGVGPTLGPQLIAEIGDVRRFHSKKALVAFAGIDAPPYQSGQMDVRSRSISKRGSASLRRTLFLVMSVILQRAPMDEPVYQFMNKKRSEGKPYRVYMMASANKFLRIYYASVKAYLDSLEHN

SEQ ID NO: 335292 - protein, 372 aa, unidentified
MKQNIIYVALDVDDTQYHGSALDKNTGEVITFKCRPTLKGLLNQLDKLHKCFPKSTFRLCYEASYIGYTLQRDLVAKDYHCDVVAPTSIPSPRGKQVKTDRIDAAQLVQFYANNLLTLVTIPEPEQEQDRDLIRSRQKLLEQQTKLRKHIQALLRRNGRHYKAETQNKSHWTLHHYGWLDRTTEASSGSFKVNLELLVRQLKDINSILAEYGQQIETLAKTSRYEPLVQALTCYKGIKNLFALTMITEIGNVKRFPHPRQLVSWIGMDIREYSSGGKHNRFGMTKHGNRYLRTAFIEANQRGYRTARISKDLKARRKNTDPGIINIADRCLRRLNKKGNRLLLAGKHPNKVKVACAREMVGFVWESLHKAAA

SEQ ID NO: 335293 - protein, 416 aa, unidentified
MDAIVERCAGLDVHLDTVVACVLYGKLDIKPKKEVKTFSTTTKGLLELLDFINQKECTHVAMESTGIYWKPVWNILESGAFELIVANAKKIKNVPGRKTDVKDAEWIASLLRCGLIEKSFVPPERIRDLRDLTRLRKELLGEVNRNKNRIHKVLQDANIKISSVLSDVFGETGKSILNQIIGNQCITEEFIYSLYEGRGKSKLKSTPMEMYEALNGKIRGHHVILLGMHNSNIVFLEKQINELEKEIDILLQKERDSLELLETIPGISKISASSIIAEIGTSMDVFKTEKHISSWAGLCPKNNESAGKKKRSGIKSGNNWLRSMLCECAWSATKKKDSRFKNKYWSMVPRMGRKKALIAIANMMLRLIYHLLKTKSTYKELEIQYFIDKDKRREDRIIKELKSKGYLVEKDSLQMA

SEQ ID NO: 335294 - protein, 310 aa, unidentified
MERIFVGIDVAKEHLDVHVRPTDESFRVTRDDAGLSGLVDRLHGLAPVLVVLEATGGYEIAVAAALGSAGLPVAVVNPRQIRAFARATGTLAKTDALDARVIARFAEAVQPEARPLPTAQAQALAELVARRRQLVDMLGAEHNRHQQARDPRVQRRIASHIRWLTKALADIEADLDDCIRSSPLWRETDNLLQSVPGVGDITAYTLIAELPELGRLERRKIAALVGVAPLNRESGTWRGHRMIAGGRPTVRCVLYMATLTAIRFNPVIAHFYQRLTAAGRPKKVALTAAMRKLLTILNAILRDQRPWQPA

SEQ ID NO: 335295 - protein, 400 aa, unidentified
MPLAVGFEPAERMTVRDESASMCLEHEEMDVRALPIGEQGGPVRFLGIDSHKHYLVVAVLEQGKVVERFRVELPHELDSFRLKLRPKDQLVVEATSNCFRLHDELAPHVDRFVVANPAQTRGAAAHAAKTDNRCAETLARLLAAGFTREVWVPPPHVRSLRHLVEQRRHLSVLRGSASQRVRAVMQQELLEPFKGSVFNDKNLGFLAGALARDPHMRKCFDSQVLTHDSLDREIVALDKHLAEWCKHSEEAQLLLTAPGIGPVVACTLIAQIGDIARFASPGHLCSYAGLVPRVELSGMSSRRGPITRAGRSTLRWAVSIAAMNAIRVPGPLRDFKLRLQERRPKGVAMTAAARKFLVIVWRILTYCEPYRDAPADRTRRKLHRCLSWGRRGKRRDRPKL

SEQ ID NO: 335296 - protein, 422 aa, unidentified
MNSQPQSLSPVEPSFGAFVAIDWADQQHVWSLQAADSDQREHGEIQHTPEAIEAWVGGLFSRFPAQPIALAVEQSRGALVFMLSKYEHLHIYPIHPRAAAQFRAALYPSGAKDDPVDANLLLDLLVHHRGHLRRLSPDTEQTRLVQQLVEARRKLVNEKTRQGNRLTSKLKLYFPQILTWFDEVDSALVGAFLERWPTLEALQKARQATLRSFFTQHNCRRAELIEQRLEQIRQAIPAIRDAAVIQSAVAMVSVLVSLIATLRQGIAALDRQIEQAAAAHPDFAIFDSFPGAGPVLAPRLLAAFGSQRDRYQSAAEIQQFSGIAPVLVRSGKTAWVHYRWACPKFLRQTFHEWAGHSIGFCDWARAYYEQQRNRGAGHHAAVRALAFKWIRIAFRCWKDRVPYDDSRYLQSLRQRGSPLAVR

SEQ ID NO: 335297 - protein, 456 aa, unidentified
MSKLSKANVGLAEARPFAGMSQVHEHAAGVDVGAHEIMVCVSGAEGMQMVRSFGSYTVDLQAIGKWLAEHGVETVAMESTGVYWIPLFEELEHRGFHCHLISSRSLRRVPGRKSDVVDCQWIQTLHSYGLLESSFRPEADLVALRTLLRHRAQLIQHRAPHILHMQKALLQMNIQLSQALSDVSGETGQAMIRAIVAGERDPHKLAALRNYRCKKDEQEIAKALTGTWREEHLFILKQSLELYDFYTRQLEACDAEIEHAYSLVRPEWEVEEKQDMPESKRNSHSKNAPKKVQVRKHLKRICGVDLTAVHGVSASLAQTIVLEVGTDMSKFPNEKHFCSWLGLAPKKEISGGKVLKNNTLKTHHRAGQAFRMAAGSVMRADCAFGAFYRRQKARLGPAQAAVATAHLIARIVYRMLKHKVEYEPLSLAQYEQHYREQQLKYLHKKAAKLGIQLTPI

SEQ ID NO: 335298 - protein, 348 aa, unidentified
MTTNQWNEQAHFAGLDWARSHHDVVIIDRHGNVQEKLHFEHTAEGWQNLKALAARYPGLAVAIETSQGTVVEHVLEVGWRVYPINPKAAERYRERNAPSGVKDDDRDAWSLADALRLDGGGWRALTTQDPLVAELRLLCRDEIALIEQRTALINQMRQCLHEYYPAALQAFEDWTCPSAWAFVLAFPTPAALVTAGRRKWEKFLHVHKLWRPETTEKRLAIFAQAQALSGTASTVAAKSLLAVSLARLLQTLERQLDEYRERIVAAFARHPDHDLFGSLPGAGQKLAPRLLAEIGDNRASFANAEGLQCIAGTAPITIKSGKYCCYQCLRFACNETLRATVHLWADHR

SEQ ID NO: 335299 - protein, 321 aa, unidentified
MTYIGIDVSKDSFVVAYSPDKNSKTKTFKNTTRGIHEFIRTISKEEHHCVMEATGNYSALLVYLLSEAGITTSLENPLKVKNFARAMLSTVKTDEIDARLIALYGEKMQPAPYKLRSDAILTLKQKRTVIRQLKKQLIATRNLKGSMEALPFFDAKCRKAVEKTIAFLEKQVKDLEEDLASLAKSEYKKQMDLLTSVKGIGITLAAALIMATGGFTYFDNAKQLTRHLGLSPTYQQSGTSVNFKGHINRNGDSSLRSQLYVAAFSSIRCNTECRACYDRLRSKGKPGKVAVIAVANKLIRQAFAVVTQEKPYVDGYISSKK

SEQ ID NO: 335300 - protein, 396 aa, unidentified
MEEFQIPHRPEGFKHFFSCIERQQRKRGCPVAVAMEGYNGYARPLDGMVRARGYRLYNINNLKLARFKEIFPGAAKTDPIDARKGLELFQLRDHLPLAKEVLQEVGTVPHENEVLKRLSRRRRRLVNERGRVLNNLQGDLQAVCPGLLEITNDAGNQWFLRLLVSADTLPQVARLRRSSVLKIPTVGVKYAGMIREWQKRAYFSGEVDWVGEMIQEDAHRVLELEEKIKTLEAKIKEVAKGSKIAKVLLSIPGFGSVCTSELAGEIGTVERFGKEGSLALYLGMATLDNSSGKHQGSKRPRQVNTRAKAAMMTALDRHRKYVPESQRYYEKKRAQGKRHNQAIRALGRHLSRIIYKMLKEEREYQLRSAKGGTQAKVRSRSSLKRQIRRPKISANT

SEQ ID NO: 335301 - protein, 328 aa, unidentified
MRLIACDVSKATLDAAWFDEDQQRWFERSNLANTRRGWQQLLSWAKKYCGCAASEIQLVVEATGVYHRPLAEFAYAHGMQVIVVNPGRAAENARSHNRLNKNDQLDARGLQCFGRELKKVHPYVPDSPEINVLRALLSRLRQLDVDLRREQNRLEKCPFIAQSRGLAASIRRQIKSLNREKTRIQQDIDQLIRDHVELKLMRQLLCSIKGIGPITSQWLLPLLYRQQFESARQLAAFLGLTPIQKTSGTSLKKRPHLSGRGNRYIRSRFYMPAVTAINHDPAMRAFHDNLIRRGKSPKQAITAVIRKLVHVCYGVVKNDQPYRCPVTA

SEQ ID NO: 335302 - protein, 406 aa, unidentified
MEVVHERCCGLDVHKKTVVACVITPKARQVRTFGTMTQDLLELGEWLVAEGVTHVAMESTGVYWKPVFNLLEGCELELLVVNARHIKAVPGRKTDVKDAEWIADLLRHGLLQASFVPNREQRELRELVRYRRTLIEQRSHEVQRVQKVLEGANVKLSDVATDIMGVSGRAMLRAMIEGEQSPQALAEMAHGRLKRKRGSLEKALRSSVGAHQRYMLRHLLEHIEFMEREIAALDRAIEERMRPFEVGIGMIDEIWGIGRRTAEEILAEIGLDVSRWPTHKHLASWAKICPGNNESAGKRKSGRTGKGNRWLHSILVEAANNVSRNRASYYGAQYHRIARRRGRQRALVAVAHSLLTAIYHMLRDGTVHQDLGAEYFDRLDRERATHRAVQRLRRLGYEVTLQPVAA

SEQ ID NO: 335303 - protein, 352 aa, unidentified
MTKSRLWAGLDVGAKTTSVCVINCSGEVVHEGVCPSSSKEVRHELTVFRKDRYAAVSLEAGTGTHLARALRTFGYPVILYETRQLAKFLRVRRNKTDAGDAKGVAEASRIGASVVSKVHVKDLRCQSLQSKLAIRRHLIGQRVATVNLIAHQIELFGGQLHLNGKTNELRRAVEMEMKNVFKGEPRTLIDEMRYLVDHCERLRAHEQSFNRDLRALAFESEACRRFMEIPGVGPITALAFYAAVGEPNRFVRTSRVGSYFGLTPRIHQSGLTSRSGRISRMGNTSVRSLLVQAAISFLKYCKVECDLRSWALSIEARRGKGKARVALARKLAIVMLAIWKAGSHYEHNHQPA

SEQ ID NO: 335304 - protein, 375 aa, unidentified
MTFKEWILDLKERHEKDKVVPGMEPTGHYWFNLGKFLQDNEMKPVLVNPHHVKKSKELDDNNPTKNDRKDPKVIAGLVREGRYMIPYLPDGVYADLRTASNIRFQLQAELTRIQNRISRWFNIYFPEYKTVYGKPDAKSGMLILKAAPLPEDILTLGIDGVNQIWRDAKLRAVGKARAKTLIEAAEHSIGSKEGTMSARMEIRMLLEDYESKNMRLQEVMVLIEELVKEIPMAEKLLEIKGVGIRTVSGFLAEVGDISRFNNPKELQKLAGLALVENSSGKHKGETTISRRGRKRLRYLLFEVAMSLVAKNPEFRELHNYYTTRRLNPLKKMQSLMAIAAKLIRVFYAMLTKGVDYDPKKMVSDIKRPAVYLQAA

SEQ ID NO: 335305 - protein, 354 aa, unidentified
MATTSKRNTVTLASVGIDIGKEVFHVVGFDTDGKIVLRRKIKRLALVSEFEKLPPCIIGMEACLSAHFVSRALRKLGHEPRIIPAIYVKPFVKGQKNDYNDAEAITEAALRPNLKFVTEKTQDQLDLQALHRVRSRLVSRRTATINQIRAFLIEQWITVRTGAHALRNSLFAILENRKDEISPRMNDLIVSLYKDWQGLDERIETITGEIEMISKSEENCQRLMSVPGIGPIISTAMVAAIGTGDTFGRGRDFGAWLGLVPRQYSTGGKTVLGRISKRGSKYLRTLFIQAAHVILMRPKNWEKFSFGPWLTEAATRLHRNRLATALANKLARIAWSVLASHKNFDANRNKVTTI

SEQ ID NO: 335306 - protein, 436 aa, unidentified
MEKTENLPIIYSHAAGIDIGSEKIFVSVDGIEVVNFRTFTAEYRKCVEYLIQRGIQGVAMEATGVYWIALHQMIEENNIKVCLVNPKEVSQVKGRKSDVSDCQWIQKLYSSGILRESFIPAGKLKELRLIVREREDIIEMGSAYVNKMQKALELMNIKLTEVISQIHGVSGLRMIEAIIHGEHNPQKLLELCDARIIKAKSKDVLSALEGNYNPTYLFMLKSSFQMWKLHQQELVNIDKKVESLLNELNINRPHIDDDAKPKAIRHHKPDVKDLHQKMLDLYGVNMCSLSGLNDYSLLRLVGETGNDLERFPTEKHFVSWCQLSPKHKQTGRTIKKIKVRTKNPAGQIFRDAARSLLNSKYTAIGAFMRKIRSKKGSAIAIKAGARKLAIAYYNIIKKGEAYVEEGIANYQKKLKEREFNLLQKLALKYNVEVILQ

SEQ ID NO: 335307 - protein, 353 aa, unidentified
MTSTKYIGMDVHKESISIAVRNAAGKLVMECVIETKASVILDFIHGLRGELQVTFEEGTWGTWLYDLLKPHVTKLVVCDPRKNSRQGNKNDRIDARELSDRLYMNKLSSVYHGEAGVRTLKELARSYLTVSKDLTRVMTRVKAIYRSWGIPCAGKQVYAPRHRAEWLAKITEVGVLRRAEFYYQQLDALRSLRQEVRRDLLAESKKHPATKLLCQIPSIGPIRAALLIALIQTPHRFRTKRPLWKYSGFAIEMHSSADYRKVKGQLERTKKRISVRGLNRDCNHDLKNLFKSAATIASAKPGPFQEFYAALVAKGMRPEMARLTLARKIATIVLIVWKKGVSFDAQHLKPQTA

SEQ ID NO: 335308 - protein, 388 aa, unidentified
MEVSNQPVAATPHSWKGLPMLHATTFVGLDVHARSIKAVALDAMTGEVRSASFGYDACAVADWVRSVDPGAKCAYESGVTGFDLQKGLSALGIDCVVGAVSKMIKPAAERRRKNDRNDAEFLARMLSVGNIVEVWVPDDECEAARDLVRALADARDEVQRSKQMLSKFLLRHGYVFDEVGPTGARRGNWTAAHWAWIKRVKFDEGADAEVLAYYIDRARQATEDKKRLEKLVAAEASKARWKRRVDGLRCLKGVDIMTAADLVFEAGEFSRFKNARSFAAWVGLTPSEHSSGESVCRGGITKAGNKHLRRVLVEAAWHYLNAGQCSKDLAKGQSPDPAARRHANKGVRRLVRRRESMLERGVHKNKANVATARELACWCWAVGCMAEA

SEQ ID NO: 335309 - protein, 471 aa, unidentified
MSTTPTRGKRRREVSIVAKRKVPLPPQLKRVNLNAAGIDIGSEEHWAAVPPGRDSEGRDVRGFGAFTGDLCALADWLKQCEIETVAMESTGVYWIALYELLVERGFEVLLVDARQAKNVPGRKSDVLDCQWLQELHTYGLLRGAFRPVDQVCILRSYLRQRSMLVTYASHHIQHMQKALEQMNLKLAHVVSDITGLTGMGIIRALLSGERDPVKLAKLRDPRCKSSEATVARALQGHYREEHLFALQQAVELVDFYQHQITACDRQIEACLQQFEEKSTEAPVAARSRKHRRGGITFDARSYLYRMTGVDLTQIDSIEANTALTVIGEVGLDMSRWPTEKHFGSWLGLAPGSKVSGGKRLSSRTKPSANRAAAALRLAAQSLNQSQSALGAYFRRLKAHIGAPKALTAAAYKLARILYRMLKYGAGYVDQGEVAYEERYRDRLLRNLKRRAAELGFQLTAIHSNAAQLVLT

SEQ ID NO: 335310 - protein, 310 aa, unidentified
MDVIIDKGCGLDVHKESVVACVMGAGIKKEIRTFSTMTGDLLRLKNWLIDLGITHVAMESTGPYWKPVFNILEDSFEVILANARHIKNVPGRKTDVKDSEWICKLLRSGLLTASFVPPQAIRDLRDLTRYRRKLIQAISAEKNRIQKVLEDANVKLSSVASDTFGLSAGKMVRAIISGNTDPASLADLAVGRLKGKKEKLKEALQGHFRDHHGFMIQASLDHIEYMEKVIASLDQQVNEKLKDYHRERELLESIPAVKEQGSASILAEIGADMSVFLSADHISAWAGMSPGNNESAGKKKVAKQPTAIKI

SEQ ID NO: 335311 - protein, 341 aa, unidentified
MNITTVGLDLAKSVSHLVCCNQAGKIVRKKMLRRNQVLHFFSELSPCLVGVESCASAHYWAREIAKYGHQVKQIAPQHVKAYVRGNKTDFNDALAIAEAVVRPEMRFVRTKTQTQQDIQAIHVMRKKCERDRTANCNEIRGLLNEYGIIVPVGINHVYKSLPELFDRQVENGLSELFKELLERHYQKLVELDEHLDWYTKKIKQLSQHEACRRLQSIPGVGPIIASALYQHIGNGSEFKNGRAVSASLGLVPKQHSSGGKHNLQGISKRGDSYLRTLLIHGARAVMRVSKHKETPLSQWIKRIEQTRGRNKAAVALANKLARIAWALLAQGGDYQPELTTA

SEQ ID NO: 335312 - protein, 368 aa, unidentified
MIKQTIVHHEGAAALTVAGHQIKATPGTIKLGVDVHSQLYVVAVQYDRALPKPPRRFAPQEFLPWVKSLLGTGHTVHVVYEACGFGFGLYRQLLAAGAHAYVIAPQKLDERRSGVKTDARDAAALCQRLSRYLEGNTRELALIRVPSEAQERARQVSRQRAQLVHHRQKLEAQGRGLLVNHGLPAPAHWWKNQTWSRLVVLLPEWIVPPLEIYRPILLELHRQIMALSGQLEAAAPTALPQGLGKLTSVILSREVCDWQRFENRRQVSSYTGLCPGEYSSGGKRVPGSVTKHGNPRVRAALVECAWRMVRFQAQYPPVKKRLAILAKGSRATGAARKKAIVAVARQLAVDLWRLHTARCTAAQLGLNP

SEQ ID NO: 335313 - protein, 354 aa, unidentified
MQQFVGIDWATRRARWCAVTAADLVIDEGWIPADEDGLALLVGRLGPEALACIEMMSGAAWVRERLQAAGWTVQIADARKAKAVGSLAAKTDKLDARVLAELARRDLVPQVHVPTFADRELKERLGRRMHLVRLRTSAMNRAHGVMSQFGVKLAFNRLRQPDRDGLLTERGVPDVWRRSIAEAVAVVSALDERLFPLEQELRPIARADPRVQLLVTIPGIGDLLALTIASAIGDVSRFPTARKLVGYSGLTPRVYQSGEKSRTGKLSKTGSTMLRWAAIEAAQQAWRPNNPWHQLYGDVKERCGGKGNPAKAAVARKVLIASWHVLALQQPFNPSRPRGAAAPVPANSSCVLAA

SEQ ID NO: 335314 - protein, 355 aa, unidentified
MNDAKYIGLDVHQATISVVVLDSTDRLVMESIIETKAATILQLLHGLSGSLHVTFEEGTCAAWLHDLLKPHVTKVLVCDPRKNALLKAGNKNDRIDARKLADLLRSGLLSPVYHGEKGVRVLKELARSYLALTRDTTRVMNRLKALYRSWAIPCAGQRVYAPRDRSEWLAKITEAGVRRRAEIYYQQLDALRSLREHVRRDLLAEGRKHSAMKLLRQIPSIGPIRAVLLIALMQTPHRFRTKRQLWAYCGLALKTSTSGEYRIVEGQLKRSRKFLAICGLNANHNHDLKNIFKGAATRAAAVPGPFQEFHAALVARGMKPTMAHLTLARKIAAITLIVWKKGVGFDAEHLKQQAA

SEQ ID NO: 335315 - protein, 381 aa, unidentified
MLYVGIDAAKNKHDVTVIDNTGKMVLKPITITNCKQGFELLHNTLKQLNQNCLIAMEDTGHYALNLLTFLHQNNYQIYTYNPLLIKEFTKSISLRKTKTDKKDARTIALKLLSDPNRALFMHDNKQEELKIMTRHMNRLKKHQSDWKVQYTKCLDIIFPELHQVVTKHSDYVYELLKRFPSPEKMVTAGFDKLIEIKRLTAKHALDILELAPNSIGTTSLAREFELIEIIKNIQHYEKLIKQTEKKIDELMAELNSVITTVPGISNRLGSVILAEIRNINTFNHSAQLQAFAGLEPAIYQSGQLDAQGKMVKRGSSHLRWALIQAAIKVARYSPEFKAYFKTKLAQGKHYNVAISHVAKKLIRVLFYLLKNNETFDEDKLR

SEQ ID NO: 335316 - protein, 343 aa, unidentified
MKHYAGLDVSVEETSVCILDETGRICREVKVTSHPEDLRRILQDPIWHFERIGLEAGQLSQWLFDALADAGLPVVCIETRHAKAFLKAQVNKSDRNDARGIAQMMRVNLFRPVHLKTLTSQKRRVLLTARKLLQEKAIAIENDIRGLLLNFGLKVGVVGAAKFEERIHELIRDMPDLAEIVERLLDARRRLREHFAALHRKLLDLARGDAVCRRLMTIPGVGPVVSLAFVATIDTPARFRKSKAVGPVLGLTPVRSQSGNTDRVGRISLCGDGMMRTLLFEAAQTMLRQTTRWSWLKAWAMRVAQRRGSRKAVVALARRLAVIMHRMWCDGTEFRWTREAPVA

SEQ ID NO: 335317 - protein, 394 aa, unidentified
MSLIEDCAGLAGAEPQTWGTSLMNDTIFVGLDVHKETIAVAVAEGRRGGEVLQLGNFLNRPDHIEKLVARLAKGNRTLSFCYEAGPCGYGLFRQLVALGHDCMVAAPSLIPVKAGDRVKTDCRDAVMLAKLHRAGELTAVWVPDDAHEAMRDLIRARATAVRVLSKARQHLQGFLLRNGRVYAGKKGWTQAYRRWLTTVRFGHVAQQVVLQDYIHVVTDAEARVERLLRQIEDLAQSWSQAPIVEALQAMRGVAFIVAVTLVAEVGDFSRFASPRQLMAYLGLVPSEHSSGRTVRRAGITKAGNALARRALIEGAWTYRMQPRVSRKLHDRIEALPQVVRDIGWKAQVRLCARYRRLAAAGKPKVVVTTAIAREMLGFVWAIARSVQIAPLRTV

SEQ ID NO: 335318 - protein, 408 aa, unidentified
MNTLYVGIDVSSKSNVVYLMLPNGDKHSNFSIANSHEGSTQLVKRIHSALTSHSLDTVLIGLEATSVYGDNLVYFLREDATLASFNRKIHVLNPKQVKKFHDAYNDLPKNDYVDSFVIADCLRFGRINKEVYLGDYRYKALQNLTRARFFAVQNLVKEKQRFMNVLFKKYSTMTQEKVFSDTFSTTALAVYDEFESAEALANMDLQELTDFIMEKGKNRFPDPDAVAKAIQKAARSSYRLPKTVNDSVNQVLSISITSMKALESQIKEFDKAIAAQMELLPNVLISIPGIGPVYSAGIMAEIGDINRFDSQAALAKYAGLAWKQHQSGGFKAEVTRLIPSGNRFLKYYLCEATFSLVRCDKEYSGFYHLKYKEVNRYQHKRALALTARKFVRLVFRLLKDNRLYCPAK

SEQ ID NO: 335319 - protein, 345 aa, unidentified
MAYYTGIDVSLRSVSICVVDDKGEVCLEAKVAAEIDAIVERLRRFSSEVKSVGFEAGTLTQYLTYGLQAAGFEVICLEARQVSVTLAAMRNKTDRNDARGLAQILRTGWYSRVHVKSLQSHQVRALLASRKAILTKCVDLENELRGLLKVFGIRLPSRVGHGSFDAELRETVCSDEMLACALVPLLDARTVLYKTYLKLDNAVKGLVRVDPICRRLMSIPGVGPVTALTFKAAVDDPNRFKSSRTVAAHFGLTPRRFQSGETDNPGHISRAGDADVRSALYVAAHSLLTRNAQWSTLKAWGVRLAKIRGHRRAVIAVARKLAVILHRMWIDGSEFRWGSQPQTVA

SEQ ID NO: 335320 - protein, 320 aa, unidentified
MTSRGAEKMNNDTIGVDVSKDHLDAHRLADGASRRFVNDTSGRKAFLKWLAEKPVERVVFEPTGPYHRAFESALGAAGVPFAKVNPRQARRFAEATGKLAKTDRLDAAMLARMGALLELEARPARSNALLELKELHIAREALVKDRTAAKNRAKTLTLSLLRKHNAQRLDQIERQIQAIETAILAAIEADADLASRFAILTTIPGVSAVTAFALLIAMPELGALDAGQAASLAGLAPIARQSGRWTGRSLIRGGRADVRQALYMPALVAARFNPDMKAKYTHLIDTGKPAKVALTAIMRKLVVLANALLKANRPWTPRIA

SEQ ID NO: 335321 - protein, 430 aa, unidentified
MSSTDSTNQKPVAAFIGIDWADQKHAIVLRAAPNAARVEHRSIGAEPDALAEWVLEVRERFASAGRILVCLEQSRGALIHFLMGYECFELYPINPKQLASYREALRPSGAKDDPIDAELLCRFLSLHYPQLRPWHPDDVLTRKLALLCEKRRQAVDARTALSNQLKSELKQYYPLALAVLDNDLTTALAADFLLQWPHFESLKKTAPHKLRKFFYGHQSRSEQKLQARLERIQAAQPLTRDAAIIEASTLTVQMLAQQLKALVPYIARYEKEIAQLFDVHPDSALFNNLPGAGPTLGPRLLAAFGTDRERFQSPLDAVTFFGVAPVTEESGKSKWIHFRWACPKFLRQSFHEFAGQSIRFCDWAAVYYQQQRARGKGHHAAVRALAYKWIRILFRCWKTHQPYDPQLYLTALLQRGSPYSSPVKNSSPKT

SEQ ID NO: 335322 - protein, 338 aa, unidentified
MELYGGIDLHSNNSVFAISNEEGAIVSRKKLPNEPEVILNYIRTFKAKLAGLVVESTFNWYWLVDMLIDNNYCVHLANTTAIQQYSGLKHADDNSDAAWLAEMLRLDILPTGYIYPKDERALRDLMRKRMQLVQQSTKNLLSIQGAYMRHLSYKLSNNKIKQLTLLKIQQDFESDNIVLATQTNLSVMSCLKAQINTIEHAIVKQTKLRTEFQELTNIDGIGMILALTIMLETGSIDRFEKVGNYASYCRCVSGARFSNGKKKGSTNSKNGNKYLTWAFVEAANFAIRYNSTVKSYYQKKLAQTNKTVAIKTVAHKLSRACFYVLRDQVPFEVRRAFA

SEQ ID NO: 335323 - protein, 375 aa, unidentified
MDNHSEAFVAFDTSKLSNAVAIAESGRAGEVRFFGEIENTPAATAKLVKKLAAKYQRLTFCYEAGPTGYGLYRQITQLEHECIVAAPSLIPKKPGDRVKTNRRDAVSLAKLLRAGELTAVWVPDRHHEAMRDLTRARETAVTDLRRTRQRISAFLLRQGLPYPDNKKTWTKAHLNWLMSQQLDYPEQRLVFEEMLLAERQGRECLERLEQAIRNAVPDWSLAKVVTGLMALRGLDLTSASTFMAEIGDLSRFQSPRELMGYLGLVPSEDSTGDTIKRGPITKTGNWRARRTLVECSWSYQHPPRVGRAKQHKVEAAPPAVRRIAWKAQCRLSGRYRALVRRGKRKTVAVTAIARELAGFIWAVSREITTARAATS

SEQ ID NO: 335324 - protein, 338 aa, unidentified
MAIIAIGIDLAKNVFAVHGVDATGKAVLVRPAVRRDALLELIAKLPPCLIGMEACSGSHHWARQFQQFGHQVRIIAAKFVAPYRLSGKRGKNDAADAQAICEAVQRPQMRFVPIKSEDAQGRLSIHRVRQGFIEQRTATINRIRGLLSEYGHVLPQRAEVVRREAGQCLEDLPGWANTAIGDLLSEVHRLDERIAEYDRHIEVMAKADERCRTLMAIPGIGDKTATALMASIGSAHDFKCGKQLAAWLGLVPSQYSSGGKQRLGRITKAGDGYLRMLLILGARAVVAAAKKKQDRLSKWVTELAERRGYWKAVVAVAAKNARMAWAMLSKGEAFRPMT

SEQ ID NO: 335325 - protein, 353 aa, unidentified
MLIIGCDFHPGFQQVAIFDNLTGEMQEKRLGHREEAEQFYRSLAGQEVRVGMEACGHYPWFERLLGELGIELWLGDAAEIRAKVVRKQKTDRRDAEHLLQLLMEDRFPRIWVASLEERDVRQLLVHRHKQVQWRTRVKNQLQAMALSQGVQKKRKLWTQVGRAELEKLELLPYAAERRKQLLQSLDRLEAEIEQLNRRVEEEVKQRPTAMKLQTHPGVGPVTALAMVLTLGPAKRFPGGKQVGSYLGLIPSEYSSGGRQQLGHISKQGNSFLRFLLVEAGQSAVRYDPELGRFYRRLAARKNRALAKVAVARKLAVRLYLMLREDWNYAQLCRAVVQVSPSHSVVARKNRPLE

SEQ ID NO: 335326 - protein, 491 aa, unidentified
MRPVNELGLIAIRGYFTDRPQRRMMDPFPRGILAKHSPAVGRHRERPCIVSYRRRRRRTRYDLQPGPAKPKTTMKNDDYAALVALDWGDKTHAFARQIAGAEDMERGSMEATPEALHAWLEQLRESCGGRPVALAVEAGRNALLHALLEHPWLTVYPVHPATSARFRKAFTPSGAKDDGPDAVVILIRLRLHRAQLEPLVLDTPATRELAALVAARRRLVDQRTRTANQLGSVLKSYFPQALTLAGDDLTTPLARAFLRRFPELAVLQKARPATLSAFYREHHGRSAERIAERLDLAARARPLIQDRAVIAPALLEVALLVDLLEVYAGHMVLLEARIAEVFAAHPRAELFATLPGAGPALAPRLLVAFGDLSARYPSAASLQKYAGVAPVREKSGRQTWIHWRWAAPKFLRQSFVEWAGQTVPRCAWAQAYYHQQEQAGKAHHAILRALAFKWIRILWRCWHDQKPYDEQHYLAALHRHGSPLATALQIT

SEQ ID NO: 335327 - protein, 386 aa, unidentified
MPQLNDLSRSLVILEQDATLIAVIEMGQSNWLVAGIVPGVERSPLKKLAVDESALLKLLNRWREEAEKAGHRIEGIAIAFEAGRDGFWLARWLRARDIEAHVIHASSIAVSREHRRAKTDRLDTELLKRAFLGWLRGERDHCKMVAIPTLAQEDAKRPNRERESLVGEQSRIVNRMKAALARLGIRGFNPKLKKAVERLDGLRTPEGEPIPPNTLAELKHDMERRRLVRSQIRDIEGTRLERLKQAPGDGPHIMVRLLARVIGVGVETADMLVQEVLSRNLRDRRAVARYGGLTGSPDESGKKRREKGLARSGNARVRRGMIQLAWRFLMFQKGSALAHWFYARTKNAPQTRKTMIVALARKLLIALWRLAREGAIPEGIVLRPAL

SEQ ID NO: 335328 - protein, 342 aa, unidentified
MGYFAGLDVSLEETAICIVDEAGHIVREARSASEPDALVAFFGACGLEMERVGLEACSLTAWLHAGLTEAGLAAICIETRQAKAAMGAMPNKTDRNDARGIAQIMRTGWYRAVHVKSPSCRSWRALLTARRMLVNKRRDVENGVRALLREAGLKVGTPSRRDFPARVRELTGDNPVLAELGQSLLSVIEVIDKEVVRLTRRALDEVKAEPICRRLMTVPGIGPLTALAFRATIDQPGRFRKSRDVGAHLGLTPRRYQSGQTDVQGRISRCGDELARTALYEAAHSLLIRSSKWSALRAWGLSVAKRRGMARARVAVARKLAVILHRMWADGSEFRWGKQAVA

SEQ ID NO: 335329 - protein, 428 aa, unidentified
MADHLNNKPFGAWIAIDIAKDFNAVLSETKAGKRQHFRMANSAADHDRFIAFLKSLPPPCIIGFEATGNYHRALGHRLVAAGFEVCFISSVASARYREVMFNSWDKNDPKDAAVLLELLKQGITQRYVDPLIAGHHDLQELSKTYYQVTLSRTRLQHSILTHYLPLYFPEMGKWWNSTRADWWINYLLHFPIPSAVTKHSQEAFCEIASPVIGRKVNKAAKLIELYETALHSIGLPVEADSLACKTFQIQLRRYQEINACRKQLEETAQAVLADNPDSAILQSVPGIGPINALTILAEGGDLRRFSHHRQFLKYCGFDLAKNQSGNYRGQEQISKRGNARLRLALWMAVNTAIAQPENSFQQKYSRYIKGAPQDKDLQRKARTAVAAKMARVVYGLVKSKQMYQGYYEKALPSGSIPLCRAVEAARTS

SEQ ID NO: 335330 - protein, 438 aa, unidentified
MSNNVIFNFDELFISVGIDVGADFSWMSIVLPNQQFVGKPYKILHNSMNSLALAVSKIKEAEEMYSLESRIFLESTGIYHYPLFCYLRDKGFNCSVINPIITKNSTNINIRKVHNDRFDSKKAALVGLKPDLKVSLMPSDLALNCRNLCREYYDLMDSRNAYVNKLIDELRMVFPQYLGIFSKVTIDTSLILLETYTSPSAFINADKQEIIDLIRSTARFGLTYACNKYNAIIQAANDADEFGYILDSNIKRIRLYIGFIRKYDEEINSILESMHELVAANEDTDFVKQIRLIETFKGAGFLSAMSLMGEIGDFSAFSKPKQLFAYFGLDPAVKQSGKFEGTKIQMSKRGSAIARRVIHTLTLQSISASRTGESKNPVLLDYYLKKCESKPKLVAMGAVSHKVCNMIFAILRDSKPFEIITPQEHIKKYNAAKCDVAA

SEQ ID NO: 335331 - protein, 348 aa, unidentified
MLADQLDYVVGVDPHRDSHALAVVHVVSGAVVFESTVVASSDGYAHALKLVDQHAPGRRAFAVEGTGSFGAGLTHFLTGRGEQVLEVGRLRRERRSGGKTDALDAVRAARSVLAQNRPATPRAGGERQALQALVAAREGAVNAKRAGLCQLRDLLITTPEPLRGELRPLTRARLLQRLAATRPGGGRDPELRGSMLALRSIARRVLQLTAEERELAREIETLTRRLAPQLLDQPGVGPHAAAQLLLSWSHQGRITSEAAFARLAGAAPIPASSGQTIRYRLDRSGDRKLNRALHMILVTRKRSHPATIAYIERRVQEGKTRREANRCLKRYLARNLYRLLEHGPPLAT

SEQ ID NO: 335332 - protein, 400 aa, unidentified
MLSIGIDVSKGKSTVCGMKPGGEIVYTPFEVQHTREGMSELVSLLRSSGEEVRAVLESTGSYHCPVVTALLENGIFVSVVNSLRMKRFCSQSIRKVKTDRIDAMQIALYGLAYWQELQPARLPEDTYRELQLLARQYYQMTSLLIKAKVDFNAICDQVLPGMQELMNDHAGRHKLSDFVLRYHHTTHILEMGETRFRKDYCKWAEKKGYRNCERMAALIFATAQNGIPVLPNAPSTQIVITEAIRVLHTVEASRDAILTQMQALAKTLPEYSLVREMPCIGDTLAPRLIAEIGDVRRFHSKRALIAYAGIDAPPYQSGKFCANNRHISKRGNRYLRKTGYEVMQSYVMHKPANDPIFTFIEKKRSEGKCGKLAMVAGLNKFLRVYYGKVTELYRSLPAIE

SEQ ID NO: 335333 - protein, 393 aa, unidentified
MICVGIDVAKDKYDCFILSSEGEVLADVFTIPNNAEGFDTLLQTIRRCARPEDKIKVGLEATGHYSYNILGFLLNEGLDTYVINPLHTNLYRKSLSLRKTKTDRVDARTIAAMLMSDVDLKSYTDTAYHNEELKSLTSNRFDKVRERAKLKQSVSRLVTILFPELEKLVSTLHMASVYALLSEFPGAKQVSEAHLTHLKAVLYDASKGRYGSDMATTLRDAARCSVGSVMSAKSLELRHTIRLIHELDAEIEDIEAAIQSMMGEIQSPITTIPGMGVRMGAMILAEIGDFSRFDSPDKILAYAGMSPSTYQSGQFSLSGTYSHMDKRGSRYLRYALYNATKYVCLWNPTFAAYLAKKRAEGKHYNVALSHATKKLVRLIYALEKSKRPYSTAA

SEQ ID NO: 335334 - protein, 376 aa, unidentified
MNEFTNVFVGLDVHKDTIAAAVARVGRQEPEYLGTIPNTDAALKKLLKRINPDGEVLNVCYEAGPCGYGLYRDLTAQGHECAVVAPSLIPRKAGERLKTDRRDALLLARLHRSGELTPVWVPDLEQEAIRDLTRAREDMKSVELKCRQRLGAYLLRHGQVYAGKSRWTQAHFRWLEKVKFDSPWQQLVLQEYIDAVKAAQKRVEDLEQYLRDALPGWSLRPVVEALMALRGVGLITAMSTLAELGDLTRFDSPRELMAYLGLIPSEHSSGGSRRQGGITRTGNGHVRRLLVEAAWNYRFPARKTRVIEKRAEKTPERVQAMAWAAQKRLCTRYRSLIEAGKQKKQVTTAVARELAGFIWAMACEVMGKAHGSKALA

SEQ ID NO: 335335 - protein, 402 aa, unidentified
MAAVMIGVGPHKATHTAVAVSAAEEPLGELQVRACAAQAERLLAWAAAWSQRTWAVEGAGGLGHLLAQQLLAAGERVLDVPPRLGARVRLLAAGDVNKNDPSDARSVAVAALRSPGVAEVRPDDHAAVLKIWSKRYRDLGRTRTQVVCRLHAVLCDLVPGGVSRPIYASRAARILQQITPADAVAAARCELAAAFAEDLRRIDAQTRGTRKKLAAAVAATGTSLTRLSGVGPVIAAAVIGDVRDVSRFPGRDHFAACDGTAPIEVSSGPRKIYRLSRRGNRRHGHAIHMAAVTQIHHRHSDGRACYDKKLAEGKTPKRPCARLSGRSATPSSPACRPAPAAPQPVPRAREGSRGTTLSQRGRIAPQAPALRTSHSRAPPPPYDRGQPPAARASQEGQILPAP

SEQ ID NO: 335336 - protein, 310 aa, unidentified
MDIIAVGIDVSKDRLDVALRPSGEIFAVERNASGLDRLIERLRQLAPRIVALEATGGFETVAAAALASASLPVVVVNPVQIRAFAKALGQRAKTDPIDAAVIAHFAEATRPEPRPLPDEATRLLADLVARRRQIIEMIGAERQREKRTSMPRLRKSIGRVVGMLEKELAGLDADIDDAVRGSPAWREKEDLLASVPGIGTTIARTLIADLPELGTLSRKQVAALAGLAPFARQSGQWRGRSFIGGGRASVRTALFMGALVAMRHNPVLKGFFERLRAAGKPKMVALIAVARKLLTILNAMVRDNKRWQNA

SEQ ID NO: 335337 - protein, 333 aa, unidentified
MNPANLIGIDVSDATFDAKRRCGDVVSHRRFDNTAAGRRQAIRWMRHGADEARVCLEATGIYHLQLSLALAEAAGIELMVLNPRASRRFAEAQLTRAKTDKVDADGLLEYLKRMPFRPWTAPDEEILELQSIAHRLAQLGKEKRREQSRLHAACRAGEHTRIAQRDIGEHLRQLESRVKAMEGEAIALMTRHESLAEDLRLVDTAPGFAELSSMKLLAEIKVLPANLRAAQWVAQAGLDPQPKESGNKKGPRQISKQGNSRISSALFYPAMTAKKHDPNVKAFYESLIARGKEPMQAIVAVMRKLLHAIWGMLHHRQPWDGNKFYRLNPVKST

SEQ ID NO: 335338 - protein, 372 aa, unidentified
MDDDSITYVGFDASKAKHAVAIAESGRTGEVRFFGEIEATPAAVEKFVRRLEKKHRRLHFCYEAGPTGYGLYRQIVAMGHACEVVAPSCVPMRPGDRVKTNRRDAITLARLLRAGELTGIWVPDDVHEAMRDLVRAREAASEDLRKKRQQLQSFLLRHGRIFTGRRQGSAACLRWLAEQKFDHPAQQIVFQDLVDAVRDATERLARFERHIEELVPVWSMAPFVAAYQALRGVSLIVAVIFAVEIGDVRRFDNPRQLMAFLGLVPSERSTGDSVKRGGLTLAGNRRARRALVEGAWGYRHPARVTETIRKRLENLPKVVRDIAWKAQVRLCKRYRQMTLAGKKAPIVIAAIAREMAAFRWAIGRTISLQLTA

SEQ ID NO: 335339 - protein, 530 aa, unidentified
MVTRIKKRKFAGSKKRFIGKPTGQIQERVQAVGPERFGIVSVDCAKRRSKWMLCNFYGKVVVEPTTVEHTTGALRGMTQLVAEACRAEALSDVIVAVEMTGIYHKPVQRAFRKAGFDTRIVHPFASNHYRRPLHPDDKTDDHDLEAIFHAAVNGYGLATLPVGEAYQSLQAVSRHRHNLVKQRSRLMVQMRRLLHQTMPGFADLFEDDKLFHKSIALPIALEFSSAEAIRQAGAAGIQSRLSKTKVRFQTRTIERIVAWAGAAAEPSELASMHTRQWKQLNEVRQLFDDQVAAAEREMASFLVKTPYVLLLSVTGINVVSAARLAGEAGPIEHYASARAINGRAGLHPSRYQSDEVDRADGGLVRQCNRKLRGAAMLVAENLIKCHPYYRGLSALWAQRKVDPRDRRCRIANRAMRMVYQLVGGRQVWRGRGVDREYLLAKLQEFHRLRHTPIDQAIRDLNEAFAWLPKTAYAAEAKPLMGFARRKRRGPQSIGDLLIPLLIRLGLSREELGAPGEETVQSNASEARSSG

SEQ ID NO: 335340 - protein, 343 aa, unidentified
MNSTTIAVDVAKAVFEVAVSEHAGQVRERHRFSRERFRRYLGEQPPATILMEACGSAHYWGREAQTRGHRVVLLPPHAVRPYVVRNKTDRTDAKALLEATRNDEVRPVPVKSETQQALAALHRLRSTWLATRTARINTVRGLLREFGVVIPIGARHVVPALGSLEDDDGGVPSLLRPALAEAAREIRELEGWIRTVEHQLEAVAEQTPVVSRLCSIPGVGLLTATALVAAVGDVQRFPSGRHFASYLGLTPRERSTGQRRQLGAISKRGDAYLRMLLIHGARAVLCHAKTKTAPAPDRLRAWALHLERFRGHNKAAVALANKLARIAWAVWKYDTDFAAAPAA

SEQ ID NO: 335341 - protein, 331 aa, unidentified
MKKQNWVGVDVGSRELVVAVEQNGKRGEALAFENTTEGHRKLIHFITKRGASARVVLESTGVYGLDLALALERAPRVEVMVANPRAISHFGRASLQRSKSDVLDAEIILEFAKRMPFEPWVAPAREILDLRAISRRMEALTKTATQEKNRLHASNQSAELSEVVREDIALSIEHLAMRIAQLRDQALQLIASHPHLRDAFGHLTSVKGIAEVAGIQILAELAILPKDMNVRQWVAHAGLDPRQYQSGTSIHKPARISKTGNTHLRRALFMPALVAVQHEPHVAAFYEKLLGRGKTKMQANVAVMRKLLHAIYGMITHEQDFKGEKFFAIGA

SEQ ID NO: 335342 - protein, 430 aa, unidentified
MHNKNYISVGIDVSSAFSFMTILAPDETVILKPFKITHNNKDSLERAVSEIKKAEELYSLESRIFLESTGIYHFPLFCYLVDCGFNASIINPIITHSTKNGNIRKVKNDKIDSKGIAKLGLSKDIPVSQFPAKLVLELRSLTRKYYDLTDERSAHINKLKGDLHTVFPQYLDVFCDVTGKTSTMILRQYGTPDKILRGHKKTMIEKISKASRKGLAKASERYEKLCAAANAAKTFGCQIDSIYFNIFLTLDLVEKLDSALDSILNRIRQLITFNKNEKFIQQIKLLNTIPGVGFLTAVTIMCEIGDFSAFRNPKQLFAYFGLDPEVNESGKFVGTQLHMSKRGSRIARRAIFAVALASIRTKRNGEGINPYLRKYYELKSGQKPKMVAIGAVMHKVCNIVFAVLRDEKAFELRSPEEHCKQYQRPALAAA

SEQ ID NO: 335343 - protein, 380 aa, unidentified
MKTHDKFVGLDVHKDTIVIAVADAGRDGEVRALGTISSDLHALERALTKLRADGATLHVAYEAGPTGFVIQRHLQKMGIDCLVVAPSKMPVPGGKRQKTDRRDAELLARLLRAGELTSIAVPDEVDESVRDLTRTRSDAVDDLRRAKQRLKSFLLRQGYHYHGTADWSDKHLRYLRELSLPHAAHRAVLEEYQLAFDQCVSRVARLDDLLAAQVPKWRMYPAVQALMTLRGFQLVAATVLVSEIGDIRRFDHPRHLMAYLGLVPHEHTTGETRRLGGITKAGNVHARWMLVETVQSALRPPKVSKELTDRQAGQPAERKELSWKTQCRLHKRGWALINRGKLKPKVTVALAREMAGFVWAMLRLVPAPATPPDGPVLRRA

SEQ ID NO: 335344 - protein, 341 aa, unidentified
MPGPRARIRKVGQPDVPSTSRKEPVKSESEVFVGIDVSKARLDIHVLPSHQAWSTANEGPHLDALVARLAALKTTLIVLEATGGLERRALALLLAAKLPAVAVNPRQVRDFAKATGHLAKTDTLDAAVLALFAERIRPEVRPPLDEQTQELDALMVRRRQVVDMITAEKNRLAAAPPSKRVVRAIRKTISCLQKQLDEIDTDINSAIRNSPAWKAKDDLLRAVPGVGKVVARTLLAQAPEIGSLTRKKIGALIGLAPLNCDSGTYRGRRRIWGGRAQVRAVLYMGTLSAIKHNPVIAAFHTRLIAAGKLPKVAIVACMHKLLTILNAMLRSNSPWSPEISS

SEQ ID NO: 335345 - protein, 403 aa, unidentified
MDVLYQSCAGIDVHQANIVVCILHGPLTSTRPKREMATFDTTTKGLRACHDFLSQFHVEAVGMESTGVYWRPVWHALCDDFKLILAQPAHMKAIPGQKTDKKDAHWIAKLTRIGLLPRSFVPDETIQELRELTRQRKHYVESRNRETNRIHKILQSGGIKLTTYIEDIMGLSGRNLLQLLIDETPITPRIVHQSVYTSLKKKVPQLLEALDGYFSDHHRGWAKSPAPLLRVCVNISAQWLIGRFVRVLHSKSDNNQLCGGGKTNSSMDGRVLSHSQSLEIYDFYQKQIELLEERMNVYLSQYENHVEILDSIPGIDVITASVIISEVGVDMSQFPTAGHLASWAGLCPGNNESAGKKRSTKIRHGNSYLKKCLCQAAFAVKKQKGRPLANVIKLTNLSRFVVG

SEQ ID NO: 335346 - protein, 384 aa, unidentified
MKVVCGLDVHKDSVFCCILCANGEKIQHKFGVLTEELVTLRDLMVSEGVEECAMESTSIYWIPIWRVLEGSVKLHLVNPYFIKQLPGKKSDVNDAEWIATCLSKELIASSFVPDDKIQRLRQYDRRIFDLNVSISRNLVKLDQCIQRCNIRISNYISTTDSKGYRSIVKLISQGVTDAEVLVKELHGRTINRHGRETLVKALTGVVSETDIDMINQLVEEIELQQRHKDEAQEKMTALCMEWFPQEVENLQTIPGVKERSATSIIAEIGTDMTHFQTPKKLVSWVGLRPRNEESAGKIKARGITHGNRFVRKTMIECSWGAARMKDSFFAEFSYRQCIERRKNKMKVQVAIARKILVAVWYVLSQGTQYIKPTDHYTAAHMTAV

SEQ ID NO: 335347 - protein, 403 aa, unidentified
MAAGKVWVGIDVGKGFHHACAVDQTGKTVFSRKVVNGQAAIEQMIARTSAKAGEVVWAVDMTSGAASLLIALLLATGQPVVYVPGRLVNRMAGAFAGEGKTDAKDARTIAETARMRQDLTVITSPDQIVADLQVLTARREDLMADWVAGINRIRELLASIFPALERAFDYSTRSALVLLTGFQTPVAIRDAGSDGVVAYLSDNGAWLKGVPSMVDKALVAAGEQTVVLPGESVTAPLIARLARRLLDLDREIKDLDKQLGERFAEHPHARHITSVDGFGPVLGAQLLADTGGDLRAAFGSPGRLAAYAGLAPVPRDSGRVRGNLHRPTRYHRGLRRVFYLAALSAIKRVDGPSRVFYLRKRAEGKIHTQALIALARRLVDVIWALLRDGREFHHSPPLTAHVA

SEQ ID NO: 335348 - protein, 455 aa, unidentified
MGKRNGLSRGDARRNARLIRLRGVVRHDRAILAIDLADTKQALALCDHDSRVLARRSVRGHAWQLEEALRWGRGVAVQHGFAGIVVGCEPTGHRWRIVAELCDRLGMDLVCVQPLLVARAREGEDLTGAKSDPKDAVVIARLVGELRCYLPERADQIWARLRQLGARRVQLTTTAGACRQQLRDLLECAWPAVLDTAAKPLDSVTFRAAVSVVLARDQGDPAGIGRLGYARFARQVTSQLARWGGRRRCQRIMRAVWTAATDPGMLTDGVLAQRPGALERARLTLGDWHHALGQLAEAEQRMTGILDQLQLTGLVGSIQGLSAVGAAAILAESGDLARFDTARALVKHAGLCPRANESGAYAGTTRISGRGRPGLRLAAWRAVWGALAHNPVLAARHAHLTSRDHNQLTTAQARTALAAALLRWLWVVVTKRIDWQAAIAAGALDPRKEVTAPAA

SEQ ID NO: 335349 - protein, 355 aa, unidentified
MENIAFIADQIKLYIGIDVHKRQWNVTLLSTHVHLKTFSQRPEAEVLKLFLDKYYPEADVTCAYEACKFGFWIQRKLAGFGYHCSVVNPADIPTSNKESNNKTDPIDSRKIAKTLRAGLLRGIHIPSETTEGDRQLFRYRKKVWSDLVKVKNRIKDKLLFAGIALPTKYDNAFWTIAFIKWLEKVKFSSASARLTLDLLLEQYDLLFGHFKKVSIQVRKLQREQRYKSDAKLLLGIPGIGPLTTIQLLTEVEDINRFPNFKHFNSYIGIKPTTHASGEHDWRGRMTYRQHKGLRSAIIESSWMTIRKDPAMLSRYEQLLSKHTAKRAIIIIARKLLSRIYFVLKNKQNYELGIVK

SEQ ID NO: 335350 - protein, 424 aa, unidentified
MDAKNQNSWEQHRYYMGLDWAKKEHAIAVVDGHGRIMVETTIEHTAEGWHRLREKLVDLAGPDLSFVAATIETNRGPAVERLLELGCVVYPINPNAAQCYRTRKTPSGSKTDRLDALSFADALRTDGHGWRPLNPEDPKTQELRLLCRDEMSLIEQRTTLVNQLQQALHEYYPAALDAFDDWTSPSSWAFVERFPTPQALKKAGKRHWEKFLHTHRLYRPETYRKRIEIFASATEFCGSQAVTNAKSMLAVSLAKQLRLLEQQLKAYRERIDALFQDHCDYSIFASLPGIGQKLGPRLLGEFSDDRDRFPAYEGLQCYAGTAPVSFQSGQIHRVRFRYACNKNLRAAVHLWANLSRKKCAWAQVYYHQKRLEGKSHACALRCLGQRWLKILWKMWQTKTPYDEQMHTRNQIKHGSWVLALTASK

SEQ ID NO: 335351 - protein, 336 aa, unidentified
MKSWSVTIASEHTVLKRFTQPPSPEALYSFLTREYPDAEYKSVYEAGFCGFWIHERLMELGIDNIVVNPADVPTTTGEKLRKTDAIDSGKLARSLRAGELKGIYIPDKVSLEIRSLIRLRDSVTKDQTRQKNRIKSHLRYLGIEIPQEYCERGRCWNKSFVAWLRSVESTCEYGRQTLDQLICQYEDLRKRRLEMIRLLRNLSRTERFAEPLKWLMSVPGIGQLTGMAFISEIDDISRFKNADQLASYIGMIPMCHSSGEHDGTGDLTLRAHSKLRCVLVEAAWVAIRQDATMTQAYTEYCRRMKPSKAIIKIARRLVNRIYFVMKHKKEYVNNVA

SEQ ID NO: 335352 - protein, 376 aa, unidentified
MERGSLMLNTTTFVGLDVHARSIKAVALDAMTGEVRSATFAYDAAAVAEWVRSLDPAAKCVYESGVTGFDLQKRLAALGVDCVVGAVSKMIKPSADRKRKNDRNDAEFLARMLSVGNVVEVWVPDDECEAARDLVRALDDAREDLKRCKQRLSKFLMRHGYAFSETTPTGRRKGNWTAAHWTWIRSISFPEKADGDALAYYVDAVRQAMEDKARLEKLVEAEASKPRWKRRVDSVRCLKGIDATSAADLVFEAGEFSRFKNAGSFAAWLGLTPSEHSSGESVRQGGITKAGNKHLRRVLVESAWHYLGCSPHSKDLAKGQVPDPAARRHAAKGVRRLVERRRAMLERGVHKNKANVATARELACWCWAVGCMVEGA

SEQ ID NO: 335353 - protein, 344 aa, unidentified
MDHFAGLDVSVKETSVCIVDDTGKIVREVKVASEPEALLAVLKNPVYHFRRIGLEAGPLSQWLYSALAEAELPVVCVETRHMQALLKAQINKTDRNDARGMAQMMRVGLYRPVHVKTLRSQKLRMLLTHRKLLQSKAIAIENDLRGTLRNFGLKVGMAGTVKFETRIKELVGNSPELAALVEPLLVVRRVLREQLVILHRRLLAIVRDDEVCQRLMTTPGVGPVVALTYRATVDVPARFRKSKSVGAVFGLTCSKYQSGEIDRSGRISRCGDEMMRVMLYEAAQSMLHSKKWSWLKAWAMQIARRRGMKKAIVALARRLAVIMHRIWVDGTEFRWTRGQTAAAA

SEQ ID NO: 335354 - protein, 351 aa, unidentified
MNNPFVVFNPCGIEVSQLTLVVALRGPAHDEPLREFPNTGEGHQAVLRLLERSGRPVRVAMESTGLYGLDLALTLHQAGVAVMVANPRAVRHFAQALLQRSKNDQRDAEVLREFAARMPFQAWRPPSAAALKLVAVARRLEALTDMMAAEKNRAHAASLSEALPALIRRDIQRSIQTHQRAIDRLTRAAQEFILADPELARRYELLLSIPGFGATSAVHTLAELTLLPADMDVRQWVAYAGLDPREYSSGTSVHKKVRISKAGNKHLRRALYMPALVAVQHQPQVRAYYEHLLARGKTKMQALVATMRKLLHAIYGMFKHDQLFDGQKVYTSRAAVLAPTLANSEVVCSQT

SEQ ID NO: 335355 - protein, 347 aa, unidentified
MKDVTTIGLDLAKQVFQVHGADADGAPLFNRKLRRAEVLRFFEKLPPCLVGMEACASAHYWAREIAVFGHNVKLLPPQYVKPFVKRGKTDAADAEAISEAVTRKTMRFVPVKTAEQQAAVMVLKTRALLVRQRTQAINALRAHMGELGIIAPIGIANVKALAVIIRDEADSRLPPAARFALTEMVDQIELLAARIDKLEREIVVQARQDSDMRRLATIPGVGAIIAMAVKALVPDPGGFKSARHFAAWIGLTPKAHSSGGKERLGRISKMGNPELRSLLVTGAASVLRHVRTNDKARPWLKDLLGRRPFKVVAVALANKTARMIWALLTRGGVYRNPMETRANEIPA

SEQ ID NO: 335356 - protein, 412 aa, unidentified
MLFIGDDWAEGHHDVVVQDEAGATLARRRLAEGADGIARFHELVASCWGEDAEPDPARVVVVIETDRGPWVKALAASGYRVYPVNPEQAARHKETIAMSGKKDDFFDAACLADMGRTRRHQIRELAAGSDIAEAVKVAARAHQKLVRERTRHLLRMRSALREYFPAALEAYAGLSLSGPDALELLGRAPDPASAARLTIAQITAALRRARRRGDLAQRARDIQAALRAPHLAQPAVIAEACAASAQAAAAVITALNEQVKVMEAKVSELFHRHPDAGIYLSQPGIGDITGARILGELGDAPGRYASAKARKNYAGTSPLTIESGKKRAVHARYIRNRHLIDALHAQALSALTASPGARACYDELRARDIDHDEALRRLAGRLTGIPHGCVKTGREYDEAVAWSHRAASRQAA

SEQ ID NO: 335357 - protein, 378 aa, unidentified
MRPAPAVTWLDRGVCQPEVRLPVAESVVRRDERSSVITIGIDPHKRSLTAAALDPHSRLLGQLRLPVTSQAAAQLLAWAQQWPERRWAVEGASGLGRPIAQLLVAAGEQVLDVPAKLAARARLLGTSSARKTDLADACSVAAAAIHHRQLRPVALEDQTVVLRLLSDRRDDLVAERTRTLSRLHVLLADLHPGGAKRELTAARAAALLRQLRPITAVDVQRKRIAHQLLADVRRLDRQVKTASQTIRIAVGEHGTTLTEVFGVGPVLAAKLLGHAGDITRFPDRDHFASYTGTAPVEASSGDIRRHRLNRGGNRQLNTALHVIAVCQIRDPSPGQAYYRRKLDQAKTPEEARRGLKRHLANVVYSHLIADHRCRIRAC

SEQ ID NO: 335358 - protein, 361 aa, unidentified
MNATTVAVDLAKSVFQLAVADGSWKVIESHRLTRSQFERWFQNRDVRLVIMEACGSAHHWGRWLNGLGIEVKLLPAAYIRAYVKRNKTDAADACALIEAARASDIQPVRVKSVEQQALQSLHRTRSLWMGTRTSRINALRGFCREFGLAIPQGARTGVEAISRVLADPNTAVPGLIRSSMKLLVEEIRLLEARIAQLERELSAVAKHSPACTTLLTIPGVGLLTATAMVAATGGSVSHFKDARHFASWFGLTPREFSSGSSRVLGRISKKGDRYLRMLLTHGARSVLRAASTSRNVGRKLDGLRSWAIAVQARTNHNKAACALANKMARICYATLRDATPYGQPSPRAQRKIERQTFAVAA

SEQ ID NO: 335359 - protein, 416 aa, unidentified
MGQIVTKNRKTINGDTVIGTIDVGSMANYGYYRSKEGFETEPFEFSNDRAGFDKYWDAIRGFRDSQKLREIIIGIESTGVYSGPAINYFKDKPVKMVQINPKHTKRAKEITDNSPNKTDRKDPRVIADIMEIGKYLEIVKHEGAIAELRTLTLARERAVGRRTGLNNQMHALVFEIFPEFVQMMNLNGKCATYILENMPTPTDIVAYGEERLLNKLREIGRSKLKEEKIKALYAAAQKSAGIREGRESIVMEINEILLERSIIAKHISAVEDKMCHYLKAVPASRYILSMKGIGEVTAAGIIGELGDFSNFSHSDGVLKFSGLNLCEASSGKHLGNKRISKIGRSLVRKHLYYAAISMVRKGGIMHDKYSGYIARGMTKMKALVAIMRKLLVIMFALVKKHVEFQKDYFVSIVQAA

SEQ ID NO: 335360 - protein, 373 aa, unidentified
MPASIVYLGLDVHKESVTIAVLPADAPAPTLVERVPYDLRKLERFCARVAQDGTALRACYEASGAGYVLQRAMTRWGHGCDIVASSLIPTKPGERRKYDKKDAANLARLYRAGELTPIHVPTEAEERVREIVRCRETLQREILRSRHYLLKLLFRRGLVYHAGVHWTGRHLQWLDEVRRAGVLTEGDAVAFDEYRALLDYKLARRAALDHQIEALALSSAYAPTVARLTCFRGISTLAAMVLATELGDWQRFARPTQLMAYLGLVPSEHSSGGRERRGAITKAGNSRCRHILVQAAWLARRPPRRSRVLTRRQQGQPPALVAQAWHAQRRLYTLYHRLAQRRPAPVAAVAVARELVGFLWAAMQDSAPMPLAA

SEQ ID NO: 335361 - protein, 344 aa, unidentified
MDHIGIDLHKRESQICMELADGELIERTIQTTRDRFAAVLGGRARARILVEASTESEWVAQWLEALGHEVIVGDPNYAPMYPERRRRVKTNRRDARTLATACRLGAYRPAHRVSVEQRRMRQQLIVRDLLVRSRTRAIAMTGALVRAEGLRVPSGAPEQFRARLDAVPLPPLLHTTLTSTRALLTTLDAEIRQADAAIQQVAVHDPVVARLTSAPGIGPVTAAAFVATLDRADRFAGAHQVESYLGLVPGEDSSADYRRRGHITKAGNPRMRWLLVQAAWAVWHSKQPDAQPLRAWAQRIAHRRGQSVAVVALARRLAGILFAMWRDATPFEAARLGRPTRPAP

SEQ ID NO: 335362 - protein, 355 aa, unidentified
MNKINSNFEGQIIFVGMDIHKSSWNLGIHLGDLFVKNVHQKPNPHIMASYLKQHFPGAQYKAAYEAGKFGFWIQRQLTALGIECLVVNPADIPKSQKDTLQKTDPRDARNLSLRLQSGVLNGIFIPDEKQEADRLFFRHRKRIWKDLCRCKNRIKEMLAFSGIDIPGQYDNASWSHNFISWLKALDCKQHSRRRALDYMIAQMEYLRKELLSVSNELRKMMREKRYNKNYYLLRSIPGIGPLTAASILVEIGDVKRFETFYHLNSFVGLLPMEHSSGEVDNKLRLTVRKHRQLRSDLIESAWTAKRTDPAMALYFQQHIKHKDSKIVIVKIARKLLNRIRFVLINQQPYEMGIVK

SEQ ID NO: 335363 - protein, 361 aa, unidentified
MNEYIAFDSHKHYTLMEREAVGSGRVAQQRIEHSAGAIREALAGCQPGTTVAVEAMGSWYWIVQEIEQAGLVPALVHPRKAKLMMGMINKTDKLDVHGLNRLQRNGTLPTVWIAPADMRDLREVTRTRMVLTQHRTRLKNRLLATLSKYGLDIDDCSDNFGAEARRQWPELQAKLPDQTRWCSELLWDQLELVNRQIGQQEKRLEELMEITPQIGLIQTLPGIGLILAGVIAMEIGDIERFARAERLASYAGTTPRVHSSGGKTRFGRLRPDVNRYLKWAFIEAGNCVALHASRKPERHVSQLYRRLRYKRGHSKAVGAVGRHLAEATYWVLKLNEPYRDPSLGRAQEGVSANAACLSGGE

SEQ ID NO: 335364 - protein, 416 aa, unidentified
MNEEPISIPIERYIAIDAHKHYVMVGGLNASLETVLPVRRVQMEAYPAWAQAHLRPGDAVVIEATTNTWTLYDVTLPHVSKVVVAHPLEVKQIANARVKTDRHDVFCLARLLVAGLVPEVWIPPQPVRQLRTLIAHRRRLVKMHTLTANRLHSVIHRHNLVRPEGSFFAASNRSWWEALPLSEVDLIQVRQNLTLLDQLGKLTSQIDQELARLSTLDPWKDQAPFLLQLPGFGLINTMTVLSAVGDITRFPTSKKLVGYAGLGGGVHDSGQTHRNGPITKQGRKELRWTLVEAAWRAVDHHPFWKQQFQSLSHRMCSSKAIVAIARKLLVAIWQVMTERVADRKAEPSMVAFKLMRWSWQLNEAQRGGLSARQFVRYHLMQLNLGQTLQSVGKAHPLPIPSVEELISLRPELGATT

SEQ ID NO: 335365 - protein, 455 aa, unidentified
MVRKPGRAAPTTLPTIHAQAAGLDVGSTFHVVAVSPDLADVPVRTFRSFTADLHALAAWLQEVGVTTIAMESTGVYWIPVYEILEARGFEVLLVNARDVKHVPGRKTDVIDAQWLQQLHAFGLLRGSFRPQERVVRLRTLLRHREGIVADAATHIQRMQKAMMQMNVQLHHVVADITGTTGLRIIRDIVAGVHDPTQLAQHRDARCKQSLATIQQALTGHYQPEHLFALRQTLALYDFLQAQLSECDHEMAAVLASLNADREPPATALEKVRRTKGRNEPDFDVRRARYVLLGTDLTRIHALGPHTLLRIISECGTDMQKWPTVKHFTSWLTLAPGNKISGGRVLSAKTRRSSNRVAALLRIAAVSIGRTQTALGAFYRRLGARIGKAKAVTATARKLAVLFYNALRFGMEYVDPGIDYYESKYRERMIEGLERRAKQFGLEIIRPPATLNNGVS

SEQ ID NO: 335366 - protein, 363 aa, unidentified
MPKVLYVGMDVDKLKIVVAELASSASVAEERVIANTPQAVRKYFTALTREGHVVAAYEAGCFGFGLYHQLTDLGVAAVVAAPGLIPRKPSDHLKTDRRDARTLAFALRAGQLTAVHVPTHQDESVRDYLRMCEDLRDDLRKCKQRILHLLLRRGIRYEQGGPWTVKHKNWLATLDLGSELDRQTLDSYLARLQELESTCSQLASEVESIAQGDRYRDAVRTLSAFKGIKTLIALSFIVEIGDFRRFSSAAQFMAFLGLVPSERSSGPKHRQGGITKAGNSHLRRLLVEAAWHYRSYHPTSRVLIHRRREVDPRIINYVNRAGRRLNRKYLRLLLRGKRSQLAVTALSRELAGFIWGAMVGQVA

SEQ ID NO: 335367 - protein, 400 aa, unidentified
MQENQQHSSVDVFVGVDVGKGHHHAVALDRRGKRLYNKALPNDEAKLRALITELKTHGQLLFVVDQPATIGALPVAVARDEGVLVAYLPGLAMRRIADLHAGEAKTDARDAAIIAEAARSMPHTLRSLRLADEPLAELTMLCGFDDDLAAQITQTSNRIRGLLTQIHPALERVLGPRLVHPAVLDLLERYPSPAELASASEKTLANRLTKLAPRMGKSLAADIVQALSEQAVIVPGTQAATIVMPRLAQQLASLRKQREEVASEVERLAHAHPLWPVLTSMPGVGVRTARLLTEVAHKAFASAAHLAAYAGLAPVTRRSGSSIRGEHPSRRGNKVLKRALFLSAFAALRDPISRDYYARKVQQGKRHNQALIALARRRCDVLFAMLRDGTFYQPKSAPNA

SEQ ID NO: 335368 - protein, 375 aa, unidentified
MTKPLLYVGLDVHAASISAAVAEAGRSGEVRLYGKIPGDLHAVDKFLTRLGHPDKELHVCYEAGPCGFVLARHLRAKGIACTVVAPSLTPRAKGDKVKTDRRDARMLARLHRAGELVAVHVPDPDDEAVRDLCRARTDAVEDMRRTRSRLRAFLLRNGHPPAGGKAQWGEAHKNNLRKLGLRHPAMGVVLEEYIGATDATCERIARLEKAMEEQLESWTQKPAVEALMGLRGFRVVAAMITVSELGNVHRFTHARQLMAYVGLVPGENSSGESRRLGAITKTGNVHLRWLINECAQHYRLPPKISPALGERQKAIAAEHRATVKEISWKCQNRLYNKGRKLTGRLKMRQKVQIALARELCGFVWAVLKAVQPAAT

SEQ ID NO: 335369 - protein, 353 aa, unidentified
MPIVAEEYAFVIGVDTHAATHSLALVTATNGAVVDQAVFPNTRQGLDRALNWISRRIGEQSTLVVIEGVGSYGAGFAQRVTDAGLLVAEPSAMPAAQRRGVGKTDALDAVRIACSVLAIDTGRLRWPRATGQRVVLRVLVVAREQMVAERTRAINALTALLRTIDLGIDTRKALSRSQIKVIAGWRDRREAVDVRTCGQEANRLAKRIVALDTELVDNRKAIDAAVEDVAPELCELPGVGSVVAACVLTAWSHPGRVRSEAAFAALAGTCPIPASSGNTLRHLLNRGGDRRLNRALTTIALVRMRTHPPTRTYVARRRSEGRTTKEIMRSIKRYITRQLFRTLAAAHPVPATP

SEQ ID NO: 335370 - protein, 400 aa, unidentified
MMTPDDIDVWVGLDVGKSAHHAHALDHDGNTLYDKPLKQDEKAIRTMLGKLSKHGRVLLVVDQPNTIGSLPLTVARNMGIAVAYLPGTAMRRTAQLLPGDAKTDRRDAHVIAWAALKLPETLRDAGPDDETLAALKLLAGHDEDLAHESTRHVNRLRSLLLQTHPAFERALKGERITRDATLALLERYGGPMGVKRAGIEDVKDWAKSNGLRAGRIIDDMFKAIGEQTVTVPGTLMAETIIPSIAHDIKTIRDRRREVDRQVEKLLEDHPLLTVLTSMPGIGVRTASNILLGIGGDIANFKSAAHLAAYAGIAPATGQSGTSIKGERPSRRGNKRLKNALWQTAFVASTKHPPSVAYYKRKREQGKHHNAATICLARRRCDVIYSMLKNGVLYQEPALVA

SEQ ID NO: 335371 - protein, 347 aa, unidentified
MKEASTIGVDLAKSVFQVHGADAAGHMVFQRRLRRCDVVSFFARHPACLVGMEACGTAHYWARQLGALGHRVKLIAPKAVKGYIGRGKSDAIDAEAICEAVTRPRLREVAVKTVEQQSTLMLHRARDLLIRQRTQTINSLRSHMAELGVIAAVGDAGAAALVVTVADAADPRLPPLARLALSSLTATLQSIRVQIGSLDAAIQAAHEADATSRRLASIPGIGPLTASAIVATVGDARVFKSGRAFAAWLGLTPRISGTGGKTTLGPITKQGDRYLRRLLMQGATSALTRIRRQPDRNRWATQLLDRLAFKPAAVALANKAARIVWVLMTRGGTYAPGHQPAPFAATA

SEQ ID NO: 335372 - protein, 343 aa, unidentified
MKLTRVGVDLAKHVFQVHGVDRAERAVWCRRLKRNRWIEEIEQNVEPGAEIGMEACGGAHHWARLLQSKGYRVRLIAPQFVKPYVKSNKTDANDAQAVCEAMSRPSMRYVAVKSIEQQDIQAVHRVRTSLIRERGAKANQLRALAYEYGLVAPQEIAALRRAVPTWLEDASNGLTARMRALLSGLYADLRALDERVRELDNEIRKIGEESEAVGRLQQVRGIGPLIASALVAMIGDARQFKNGRHVAVALGLTPRQHSSGSKERILGISKRGDSYVRTLLIHGARSALRTAAGKNDRMSRWALALAKRSHANVAATALANKMARVAWAMLKHGTPYEPNGLAA

SEQ ID NO: 335373 - protein, 401 aa, unidentified
MVRCIGMDVHREFAQLALLEDGLVRDEGKIGVTPEALREWASELRPDDQVALEATGNSDAIANLLTPLVGRVVVSNPSKTRAIAEAKVKTDKVDARILAQLLAADFLPPVWLPDDRTRRLRRQVMRRAHVVRQRTRIKNQVHAILARNLAPTPPVSDLFGKTGRHWLSRQELPADERSSVAALLRQLDFHGGELAIVDKELAIVALADPMVARLMTMPGIDAIAGISIVAAVGDFSRFDDPDKLVAYVGLNPRVRQSGNSAPVHGRISKTGRAQVRGVLVEAAWSASRAPGPLRAFYQRIRARSGFQKAIVATARKMTVLAWHLVTKDQDYAFARPALVTHKRRKLELAAGAPSRRGNDRQPGAAYNDKQRRDEERIAVERAERAYEVLVAHWQPRRPSRA

SEQ ID NO: 335374 - protein, 345 aa, unidentified
MNSSKLIAVDLAKNVFQLALANTHYHVTQTKRLTRTQLHTFFFNHPPVQVVMESCGTAHYWARTLHAMGHQVSLLPAQHVRPYVRRNKTDANDAMAIIEAARNREIKAVPVKSEYQQALQSLHRLREQWKATRVARINALRGILREFGVLVPMGPRAAIATTRAAVDTLPTLLHASVFGILEELTDLQTRITALEKQLKQVVKDDPVIQQFMQINGIGLLSATAMRASVQSPTQFKNGRQLSAWLGITPREYSSGDKRYLGRITKKGDKYLRTLLIHGARSVMARNKIRLRDNEKLTHLQQWASQLEKRVGHNKATVALANKMVRILWATWMHQREFDGNYMSQH

SEQ ID NO: 335375 - protein, 422 aa, unidentified
MLEETQDREEIIERVAALDIGKAELVACVRVPSPQTPGRRAQEITTYSTMTHSLLRLADRLRELGVTRVVMEATSDYWKPVFYLLEAQGLDPWLVNAKDVKHLPGRPKTDKLDSVWLCKVAERQMLRPSFVPPPEIRQLRDLTRYRADLVAVRTAEKNRVEKLLEDAQIKLSTVVSDIFGVSGREMLAALIAGESDPKALAQLARTRMRVKIPQLEEAFIGHFTHHHRFLMRTMLARVDQASADIAAVETRIEELITPFVHAVEQLDEIPGIGVTAAHVILAEIGPDMTRFPTAAHLCSWARFAPGIQESAGKKKGRGSTGHGNRYLAAALGEAAVTAGRTDTFLGERYRRIARRRGKKKAIVAVGRSILVIVWHLLADPGARFHDLGPEFYDTRIGPDRKKRNHIRQLEALGYKVTLEPAA

SEQ ID NO: 335376 - protein, 348 aa, unidentified
MSITMIGLDTAKSVFQIHAVDAAGKPQLKRKLRREEVIPFFEQQERCTVVLEACGAGHHWARILTELGHEAKLLAPEAARPFVKKGKKNDAADAAALCPAASRPEATFVPVKSPEQQGVLALHSVRTLLVKQQTMLANAMRGLATEFGLVVAKGIHKLDELEAQVQAEASMPATAKQAFAELHGQSQATATRIAGLEAQIVAHARQDATARRLATIPGIGPITASLITATVGDTIGSFKSARHFAAWLGLVPRQHSTGGKTRLGRITKAGNGEIRRMLVLGATSMVHRAAQWNSAVGAWLRGVLERRPVRLATVALANKMARIAWAVMTRGETYQAKGRAPAAAAAVA

SEQ ID NO: 335377 - protein, 396 aa, unidentified
MISVGIDVSKGKSTVCIMKPCGEILESPFDIGHTADELDSLISLIKSFDEETRVVMEDTGHYHLPVATYLSSHNIFVCCVNALRMKKFCSQSIRRAKTDKIDSIKIASFGITYWNELVKAYPSNVIYDELKFLARQYYQVTGMLVKSKVNFSNLLDQVMPKINDVLSNQGENHKLTEFVSRYIHFQNILDMGEMKFSSDYCKWAKKKGYRLNERKAAEILALAQNGIPTLPNSQSVKIAVSEAVKLIHSIEESRNTILAQMQDLCNTLPEYSVVKEMDCIGDTLAPRIIAEIGDVRRFKNKHSLIAYAGIDAPPYQSGAFHASERHISKRGNSYLRKTGYEIMQSLIKHKPADNAVYDFIQKKRSEGKCGKEAMIAGLNKFLRVYYGKVMEFYSEH

SEQ ID NO: 335378 - protein, 318 aa, unidentified
MNIIGLDISKDTIDATLHKTNGSIHYIKFKNNDDGLKQFRLWIKGNRIRKVYIGMEATGIYYEKAADMLSSYYTVYVINPLKIKGYGKSRFNRTKTDKADSNLIADYIKRHQDTLIPYQIPKNKALQKLINLKNQLHQHQKQIKNRLHSTEEDFIRNIHQDLIDTIQDKMEQVKIAISEQIKKQTDNNHYRNLQTIPSIGKDTASVLYAQLTEKHFKTANQFVSYAGLNPAIIQSGTSVRGRGRLSRYGNRRLKSTLYMPALCAYRFNAFPKLINNLKKAGKPKMVIIVAIMRKLAKLAYYIVKTGQPYDAERHRLNQ

SEQ ID NO: 335379 - protein, 401 aa, unidentified
MSKKNTRNALDTSLSYAVIGLDLAKADCAVAAVPCSDDELGLIDRMDYESLFEQAEKLGPTLFAMEPCCGYSQISLRLQNMGHEVKVISGHAVKNWIATHKSNQKTDLNDATALAKLALYDHDLQPIRVKNVEECRIASVQAIRIQLRTQATKSLVCFKSLCQCWGIVIRRGSLNTKKMTEAVAAVEKLLGAEVVSSLMILRDAYKFTMKQINALDKLLDALVEANEQARTMKTVLGIGTQTAARLAVTTGDIKRFPMPRSYVAYFGLALRNIITGHSGTPSPSKRGALKPVSSRGQGKVSRRGDRVARSFIIQGAATIYMLYCKDMLPECQLRRWLHEQIMRGKPYGKIIVSLAAKLLRIVWALLTYGEKFDSHKAGVPRSVLAAMEKPLKHDAAAESAA

SEQ ID NO: 335380 - protein, 334 aa, unidentified
MENIALIGIDLGKNSFHIHCQDRRGKAVYRKKFTRPKLIEFLATCPATTIAMEACGGSHFMARKLEELGHSPKLISPQFVRPFVKSNKNDFVDAEAICEAASRPSMRFVQPRTESQQAMRALHRVRESLVQDKVKTTNQMHAFLLEFGISVPRGAAVISRLSTILEDNNLPLYLSQLLLKLQQHYHYLVEQIKDLESQLKRKLDEDEVGQRLLSIPCVGTLTASTISTEIGDGKQYASSRDFAAATGLVPRQYSTGGRTTLLGISKRGNKKIRTLLVQCARVFIQKLEHQSGKLADWVRDLLCRKSNFVVTCALANKLARIAWALTARQQTYVA

SEQ ID NO: 335381 - protein, 354 aa, unidentified
MKGEFQNSKVLVRGKEVFIGVDVHKESWHVTARVDEEEVFHGRIPSQYHALRRLLDYFKDCGVKVAYEAGPCGFWLHDRLSQDGIEVIVVPPSLIPVESGNKVKTDKRDSRKLAKLLESNMLKRVYVLSEEDRADRELLRTRRQVLEHRSDVARQIKSKLLFHGISSPLATERWTKGYIRWLRELTLGRKVLKVSFESLIELYEYLTEHLIKINQEVIELSQSRKYLHKVKLLKSVPGIGTLVGMELLVELSEMERFRSADELASYIGLTPSEYSTGQYVRQGRITRCGNKRVRTCLVESSWILIQKDPLMRLKYNQLKQFKGAKRAIIAIARKLIIRIRRILLNNEPYVIGVC

SEQ ID NO: 335382 - protein, 352 aa, unidentified
MITIGVDAHKRLHVALALDEAGREIGQWQGKNSAAGWRDLEQWAGAIAANRQWGIEGAWGYGRGLAQHLVALEEIVYEINPRWTAQGRRRARKPGKTDRLDARAVALMVRQEASTLPQVAPEDQTAVLDLLTRERDAAVGEATRLRNQIHALLVYLDPEYESRLPTLKSRAGLAALETYVSFSHDSLSKARAAAVRRLAQRLRLALSQAEELAVQIKDAASFFSSLTQLCGINLLTAGAIAGVLGPGHRFHTDAQLASYAGAAPLEASSAGLVRHRLNRGGNRRLNAILYRIVLTQAHHSEEARTYLNRKVAQGKSKREAMRALKRYIARVIWRLWQECYPIGLTRQEALVA

SEQ ID NO: 335383 - protein, 353 aa, unidentified
MKTYYVGMDVHRASIMIVVLNGAGKVVMQSVIETGAERVRGYLKQLRGKVYVTFEEGTQADWLHEVVRPLVTAVVVCDPRHNKLLQSGNKSDRVDAQKLAELLRNGALKAVYHGDHGVRTLKELVRTYDCLVSDTTRVMNRLKAIYRGRAIGYAGHDIYRQDRREQWLEKLRERGARQRASFLYQQLAALKPLRHEAKRLMVQEARRQTAYPWLLSVPQFGSVSVAQLLAIVGTPHRFRSKRQFWTYIGLAVVTRTTADHEVVNGVLRRSQRPVSTRGLNRNHNHVLKRVFKNAASSACHSGPFKAAYDVRVAQGMVPSLARLTVARQLAATTLALWKRGEQFNPERMKQQAA

SEQ ID NO: 335384 - protein, 356 aa, unidentified
MSRILAIDLGKFKSVTCLLDSDTNQTEFWTMATDRHYLLAVLKNYHPDLVVIESCGLAGWVHDICTEEGYEVLVCNPNQEAWKWKHIKRKTDRDDALKLAKLAALGQLVPVYIPCRRQREYRRLVKYRQVVVGRINRVQNNIRAIFAQRGMEMVRGQKAWALERLELIAAHRKPLAECSLDDLWRGELDLELIQLEHLRQHQHEVHKQLQALARADERVQLLETIPGVGRKTAEVVVAYLDNPHRFQNARQVSSYAGMVPRRYQSGEMDRHGRIHKRGPRQLRSALVEAAWLMLRYNPWAKSVYERLTSGQRTRKKKAIVAVARKLLVRCWVMLLRKEPWNKETMIGQPAGIAVAV

SEQ ID NO: 335385 - protein, 342 aa, unidentified
MLIIGCDLHTRYQVIAMLDTGTGEVITRRLEHEGGEAKGFYAGLEKPALIGIEATGYTQWFERLMAELGHELWVGDPAEIRARAVRRQKTDTRDAEHLLDLLINERFPRVWVPTPEERDFRQLLKHRDKLVKMQTSVRNQLHFLAMSQGVCRKRKLWSERGRRELEGLELGEWGSRRRQELLELLDRLGPRIEELDKAVKAEAGRRPEAAELMQQKGVGPVTALAFVLTVGPIQRFPSSRKLVSYLGLNPREDSSGGHQRLGHISKQGNEMLRWLLVEAGHTAARLDPLLERRYLRLKFRRGAKVAKVAIARRLAVGLYWRLRRCAAGSHVQQPVLAHGGGE

SEQ ID NO: 335386 - protein, 345 aa, unidentified
MKITTIGIDLAKAVLQVHGVDKHGKVALRKQLKRKDVLGVFANLEPCLIGMEACGSAHYWARKLSELGHTVRLMAPQFVKPYVKTNKSDRNDAEAICEAVGRPNMRFVPVKTAPMQAVLALHRARQGFVKARTAQANQIRGLLAEFGIVIAKGIGHIAKRLPEILEDVENGLPGMMRELLLRLGENLKDMDRQVGELERQIMLWHRANEPSRKLEAIVGIGPITASALVATLGDANSFKNARQVPAWLGMVPRHEGTGGNVKLGGISKRGDAYLRTLLIHGARAVIAHTERKPDHTNEWLRKLLARRNKNVATVALAAKNARIAWALVAHERSYQHDYVATRMAA

SEQ ID NO: 335387 - protein, 344 aa, unidentified
MKSQKVTSWNEFGKCQAIGIDVSKKYLEAAGYCGNAEFSVGRLDNTIDEIGKFIEALSGHSFHGTILCEATSHYHLVLAVMACEAGLDIRVVNPLLSSKHSKSAIRKTKTDRVDAQVLATMVFTEPNLPPRLHLTRHHCLVRHTLGLIQTLEKHLQGFTRSLDSYRERIGQLGLEAAKGFNETVDSVKQLRKSHEELLSGLTSMLIENAPEQTENIKRVQALPGVTRSNAALFTFVLDPRAHSAKSWIAYTGLDVAVKESGTWRGHGKLTKRGPAWIRKRLFQAAWGAALNYPQVRLYYDMLKAKGRKHKEAVVIIAKKLLSIMYALIVRQECFNHAQAFQIKT

SEQ ID NO: 335388 - protein, 372 aa, unidentified
MAIVAHAHPFVIGVDTHARNHTYAILAAATGERLENQEFPATPAGVKRAMAWVARRTGGDLAVLWVIECIATYGARLAHAVADAGYEVAEAARMDARAHRGVGKSDPLDADRIAAAVLPLDTTQLRRPRTDEGIRAALRVLTTAREQMTTERTAYVNALTALLRAVDLGSDARKPLTTAQISEVAAWRTRTEEIATSVARAEARRLAKRIHALSEETVENLAQIKSLILSSKAAPLLDKIGIGPVTVAVAYSVWSHPGRVRDEAAYACLAGVNPIPASSGNTSRHRLNRGGDRRLNRALHMATVTRMIHDPETRAYVERRRVEGRTTKEIRRCLKRYLARQIYRTLEALHAEPSPAVVPHVNMPAKSDWCLN

SEQ ID NO: 335389 - protein, 367 aa, unidentified
MSVGIQFNRDQVVIAVDPHKGSWTAAAVDASLQPLASIRVPVSRDGYRALRRFARRWPDACWAIEGATGVGAPLTRRLRADNIEVIDVPAKLATRVRVLSIGHGRKNDDADAVSVGIAALTSPTLNTARTDAHTTALRAIVDHRDDLVKIRTQTVYRLHVVLTHLVSGGAARNLTADRAADLLRGLRVRDPAAKTPRALAMDLISEVRQLDRRITKAANDIQTAVAASGNSLTALYGVGTLTAAKVLAHVGDVGRFRSAAAFATYTGTAPIEVSSGEVVRHRLSRAGNRQLNYCLHVMAIIQARQDTLGRAYYLRKRSEGKSHNEALRCLKRRLSDLVYRQLTHEANTQKAGPGGHSGAALSSRAAG

SEQ ID NO: 335390 - protein, 370 aa, unidentified
MKNTIVHHEGAASLKVAVKKIGLCGSVIKIGLDVHARLYVAVAQYDQLLPKPARRLAPSQFVPWVRQLLQAGHTVYVVYEACGFGFALYRELKALGVHCYVIAPRKLDEGCTRVKTDPRDATTLCQRLSRYVEGNTRELAVIRVPSEAEEQARHVSRQREQLVRHRQKLEAQGRSLLINHSLPSPAHWWKNQTWSRLSKLLPAWICVRLKVHRPALLTLEQQISALSAELEAAAPADVPAGVGKLTTVVMTREICSWERFSNRRAISSYTGLCPGEHSSGTKRVPGSVTKHGNPRLRAALVECAWRMVRFQPNYPPVKKRLSVLAPQARGARATGAQRKKAIVAVARHLAVDLWRIHTGRCSAVQLGLAI

SEQ ID NO: 335391 - protein, 421 aa, unidentified
MIPAVIERCAGIDVGRKFVVVCVLVGDANATPTQEIRKFSTLNEGLEQLREWLHQNECTHVVMESTGSYWKPIYNILDEGKVDVILANSQQVKNLRGHKTDPNDARWLAHLLRHGMIRPSFLPDRDTRELRDLTRRRKPVIGCATDERNRVQRVLQEANVQLGIVLSDGFGQSGLSMLDALMKEDASPEQIANLAVRQARKKIPEIRKALEGHRMTEHHRRLIRHSMEHLAFLEEQVAEWDREIADQVQASAALKSATELAQSIPGIQQTAAAALVAETGAEMSHFPGGGKLASWIGICPGNNQSAGKRKSGQTRKGNPWAKRILVECAWSASRKKDSETQRYYERLKPRLKHKRALVATAHLITLKLHEVLSTGEPYQVDQQPELTTAKLQRLARHHSRRLTHLHKWLQDHKKRCAQSAY

SEQ ID NO: 335392 - protein, 362 aa, unidentified
MVYLGVDLHRKVSHVVALDEAGETLLSRRFEHSPDAFRRVFGELEPEPVSVAFEATYGWGWFADLLADAGIEAHMAHPLATKAIGAGRVKNDAVDAATLAHLLRTNLLPEAWIAPPEVRELRRLVRMRASLVRIRSRLKCQVHALCADAGIPVPASDLFGRKGREHLATLTLPPISASRLAAHLRLIDDLAREIIAADREIVVAFKGDDRVRRLLPIPGIGILNAATIVAEVWDVGRFPSADHLASWAGLTPTERSSADHVRRGHISKQGSRWLRWAMVEAATKIGSSRSAKLHRFADPIAERRGTKIARVALARRILTLAFYALRDERGCRDYPPLPRPSRRPVTARSLPVMASPDGRRSD

SEQ ID NO: 335393 - protein, 476 aa, unidentified
MVKSVGIDLAGTGEHKVRCLDERAQLCDGFGFQTTPDGLAKLEERVFSDGSNPVIIFEPTGLAWVLMAVYLRARHPDCRLVRVQSHKVAALRKYLRRSSKSDRIDALTLAKMPFIDSERLEELYLPPAKIYAIQRLARQRKRLESEIATRKKRIGSILSGYLPGLREAFADPWSPQARVFLSTHLNPMATIREGESVLNTFLAKAKPRGKRDKVECHRVYLSCQNAAALCASASSAGVVNDDFFAYLQEEIAREIRLMEFAETESEAIAQHIERLYEELHTSDNLRTIPGVGQHTAPIFLATVGNPSRFRSQSAFANYTGVVPAARQSSDTEAKGLRMTKAGPAIMKWALYQASQIGRRCDPQLAWVYYRQVVYHGKNHKQAMGAVMSHMGARILTVLREDRPYELRDIDGKLISREEAWKLIQSNYKVPEEIKRERRRKTTAAMLKPRIKNQEMATHRTNEAATAPQPVSLSAIS

SEQ ID NO: 335394 - protein, 342 aa, unidentified
MTAIGIDTHKATLAACAIDELGRAIGEATFANDPAGHDAFIAWARLTAPEATIGVEGSSSFGAPLARSVQLAGLAVREVPPHLSRAERRRTRRPGKSDPGDALAIARVTARETNLPPIRLSDRTSELHLLLEAREDLIGEATRARNRLHAHLLVLAPGYGGTVTNLVAVRHRATVGRLLRGNHTVQAELARALLTRLPRLERETAALTRRIGALVEGHPLLGLPGAGPITVARLIAEVGDVRRFRSPDALAALAGVAPIPASSGQTQRMRLNRGGNRQLNRALYVIAVSQSRFHPPAKAYVTRRMETDGKTWREAIRALKRQLVRPVFKLLVEGAEVLRAAA

SEQ ID NO: 335395 - protein, 319 aa, unidentified
MDKVTHPAIVGIDVSRDWLDIHRLPDGQRLRLPNTSDGHARLVDLAHTIAALVCFEATGGQEWRLWAALDAAGVETRQLPPAQIKAFAASRGTRAKTDRIDAELIARFMSFRPDAGRALPHEKLRLLRALTSKRGQLVETRKRLLAQIKAAEKLGTADMVADMDGDLRALLDRQIAQLEARIEKMISSDDELASTARILRSVPGIGPVASTMLIAEMPELGQITGEQAAALTGLAPIAHDSGRLRGRRAIGGGRRALRHVLFQAALVASHHNPALKTFADRLRKAGKPHKVVIIAVARKLVTIANALCKTRKSWDDQAA

SEQ ID NO: 335396 - protein, 351 aa, unidentified
MPSKTDAVVARTIGIDTGKNTLHLIGLDEKGAIVLREKVSRGRIVARLANAPRCLIGIEAGMATHYVARELIALGHEVRQVPPAYAKPFRQGHKNDFRDAQAVAEAVQRPSTRCVPVKTDDQLDLQALHRVRSRLIGERTAVTNQIRSFLLERGIPVRQGLCFLRQQLPDILAKRVEVLSPRMIRIIEDLIGEWRRLDERIDHVTTEVEVLARSNEGCRQLMTVPGIGPIIASAMVAAIGNGTAFATGRDFAAWLGLVPKQMSTGDRTILGRITKRGNRYLRTLFMQGARVILLRPANWAKHSFGPWLTAAAKRLHHNVLATALANKLARIALTVLVQGRGYETRVTSEAA

SEQ ID NO: 335397 - protein, 378 aa, unidentified
MNRIIKIGMDVHTTNYTLCIFEPSFEHDGTVHCITQVKPEIKKIIHVIETFKKKHENEELNIVCGYEAGCLGYSLYHELKEKGVECVILAPTTMKTEKGGRKLKNDYRDAKMIAECLAYGGYSAVHVPTELDNSVKEFIRMRDDIKENLKSIKQQIIAFLTRNGKQFEGKSYWTRKHIDWINTVSFSGPLLQDKLKEYMIEYNHLCDRVETLDRQIEEISLKEEYVEKVQQLQCLIGIKTHTALSLIVETSDFNRFKKGNMYSAYLGLIPGDDSSGGHEKELGITKAGNNHLRRLLVEAAQGYTRGRVGFKSKDLKSRQEKCSSEVVAYADKANERLRRKYYRMILRGKKYNVAKTAIARELACFIWGIMTDHIALCS

SEQ ID NO: 335398 - protein, 410 aa, unidentified
MLFIGDDWAEAHHDIEIEDESGRVLARRRLPEGLAGITMLHELIAEHLDPAAEPDQVLIGIETERGPWVQALLAAGYVVFAINPLQVARYRERHSPSGAKSDPGDAHLLAEIIRLDRAHHRRIAGDSEIAEHVKIAARAHQSMIWSRVRQVNMLRSLLREYYPAALAAFGSDLAGRDALAVLTVAPSPELGRRLSQSRLETLLRRAGRQRNVSSTAAKIRAALTSEQLTARPGVIGAYTASASALLAVLSTMAAQTEVLAGQVEQGFGQHPDAEIYRSQPGLGDILGARVLAEFGDDPGRYVDAKARKNYSGMSPITKASGTKRVVLARYARNRRLGDALFLQAFAALNNSAGARAFYDRQRSRGATHYQALRTLANRLVGILHGCLRSHTLYDEHLAWHTEPDKLSPAA

SEQ ID NO: 335399 - protein, 353 aa, unidentified
MDKYIGIDVHAASCTIAVVDARGKQTGSHVVATNGQEIVECLRAIPGQRHVCFEEGTQSGWLYEILEPHAVEVVVAGVEAGRRGPKDDKRDAFGLAEDLRQGAIKTRVFKNGGPYKALRELARTHRMVVRDVVRTKNRIKSMYRSRGVAVAGKSVYSSAGREPWQEQLPEACRGPVRTLYAELDALEEVRNDAEKALVQEARKFPITKLLSTCPGLGPIRAAQLVPIVVSPHRFRTKRQFWSYCGLGIVMRSSSDWVRDKNGQWQRAQVQQTRGLNLTHNHHLKAIFKGAATTVIAQHPDEPLNAVYQRWLAAGTKPNLAKVSLARKIATIALVMWKTEEEYDSSKHNKTVSP

SEQ ID NO: 335400 - protein, 410 aa, unidentified
MESLIERGCGLDVHQATVVACLLISLAKGKVKKVIRTFGTTTRELLTLRDWLLSEGCTHVAMESTGVYWKPVYALLEGSFEIVVANAQQIKKVPGRKTDVKDAEWIADLLRHGLLRPSFVPPQPIRELRDLLRYRRKLVESQTGERNRLLKLLEGANIKLASVATDVFGVSGQLMLDALLEGTQTPQEMAELAKGRMREKIPQLELALEGRLQEHHRFLLRLQRRRLQQVEKDLAELEQRIFEKLQPYAPQHTLLLEIPGVDRILAAVIIAELGIDMSVFGSASQAASWAGVCPGNDESAGKRRSGRTSPGNIYLKTALVEAANAAARAKGTYLREKFYRLKARRGHKRAAIGIAHKILVAAYHMLSDQVSYNDLGDAYLDKLTKTQLTRSLVRRLDRLGYQVSIRPKAA

SEQ ID NO: 335401 - protein, 312 aa, unidentified
MQVTTIGLDIAKNVFQVHAIDAAEKVVVRKQLRRSQVLEFFKALPACLVGMEACATAHYWARELTKLGHQVRLMPAKDVKAYVKRNKNDAADAEAICEAVRRPTMRFVQVKSAEQQGRLMLHRTRDLLMRQRTQLINALRAHLAELGIVAAQGNAGLKELLKIIAAERDARLPAEAHMSLVVLAAGLHTVQTMIGSIDKRIMIEHRSNEASKRLRSIPGIGIVGASAIVATVADPMAFRSGRDFAAWIGLVPRQDSTGGKQKLGPISKQGDRYVRRILAIGAHAVLRHAKQNPENIPGSHNCWRDDPSRSWR

SEQ ID NO: 335402 - protein, 335 aa, unidentified
MNEFWIGIDVSKRKLDVACLDVRDKIKSRVFANDAAGHAALKSWLIDRGARIEITHICMESTGPYSEPPAIVLVDAGWKVSVVNPARPKAFAETTGVRNKTDQSDAALLARFCAKLAPDLWQAPSIEQRKLRALVDRLQALKDMHLQESNRLEGQELLGQESSVKSIHEHLAWLDARIAELKREIDDHIDSNPTLKRDADLMTSVPGMGATTVAKFLAYVGDLRRFSNAKALSAFIGVTPRQRQSGTSLRGRTMLSRAGHAYLRSALFMPAMVALQHNPTIRAFGERLGSNGLARKAVVAASMHKLVHLLYGVVRSGLPFDPIRARSRIDIQVSI

SEQ ID NO: 335403 - protein, 411 aa, unidentified
MPKIVYPVCCGIDVHKSFVVACIAMTDENLVTTYSKPKRFSTFTGDLRRLSEWLVQHNCCDACMESTGKYWIPVWNILEPTCNLVLAHPKYTKAIKGKKTDKRDAKWIADCFKHDLISGSFIPPAEIRQLRDLVRYHTKLTSYATGEKNRAQNCLTVSNIKLDDVFSNVFGKAASAITARLLENNEPFDVTPYLTKNIKASPEEIQAAVDGVMCANQAEKLRIIRSHMDSLNLCKANLESEILTVSEKFLPQINLVTTVPGIQAFAAIATIGEIGADMSVFETSRHLCSWAGLTPQNDNSAGKKKTTRISRAGAYIKPLLVQCALAAIKSNKHPEIRNRYLSIKKRRGHKKAIISIARMLLTAIYNILKKNEPYNAELYRQSDKPPVQREVSVEQAIFILQRQGYLVTAST

SEQ ID NO: 335404 - protein, 412 aa, unidentified
MKDLLEISCGLDVHKEKIVACILIGPLGKPTRSEIREFSTLIPDMIALRNWIVSKNCHHVAMESTGIYWMPIYEILEDAFSGDITLLVVNARHMKNVPGKKTDMRDSEWISTLLRAGLLNGSFIPEKRIREFRDLNRYRKSVIRDITSQKNRIEKFLQSSGFRLSSFISDIFGASGRNIILHLIEHGQIDKTALDSCLKTKTRNHIDEILMSVNGTLSEHQKAFLRILMTHYDSLKKHLAEIETSLEEDMAPFALQVEQLNSIYGISTTASCAIIAEIGIDMKPFKTAEHICSWAGLCPGNNESAGKRKSTSVTKGNPYIKSMLCEIAWVIAGKRNTYLSAWYWRIKQKKGAKKAIVALARKLLVIIYTMLKQGTLFDESCFETRRKRCEQKQLSRYIRELEKHGYHVEAQS

SEQ ID NO: 335405 - protein, 345 aa, unidentified
MKKVIAGMDLHSNNVVIGVMDMDGQRLASRKLPCELKEVVRFLTPFKRRLERVAVESTYNWYWLVDGLQALKYPVVLANPAGMEQYSGIKHADDTNDAFFIAERLRLAILPTGHIYDAELRPVRDLLRRRLMLVHQRTALMLSFKSLYTRTTGQELTLSKLKALEIKEAQEIYEHPANQMIAGMQIKHIEQLTESIEKIEKAVLGSARELPYYEKLATLPGVGRILGMTITMEVGDIKRFADPGHFASYCRTVEAKRMSNNKKKGENNSKCGNKYLAWAFVEGANFARRYDEQCRKWFERKAARTGNVIAIKALACKLAKAAWYLMAEATDYDPQRMFGQPAKAK

SEQ ID NO: 335406 - protein, 335 aa, unidentified
MSKSEAGKRCYVGVDVSARELVVAISDGGEAKIERVSNDAAGHERLQARLRALAAPVTICLEASGTYSLDVALALAQPAAGWQLSLVNPRLARRFAESLGQRSKTDPVDARMLAQYAARMQPQPWQPPSAAALHLRTITRTIAALVRQCVQHKNRQHALSASAALPALLVRELEVQVAFVDKRIRYLRRQALRRIEQQPELRRCWQHLQTIPGVGEASGLSILGELAVLPATLDERQWVAHSGLDPKQHRSGSSVEQQTRISKAGNRYLRAALYMPALVALQHDPWLRGFYQRLVARGKAKMQALVAVMRKLLHAAWGMLHHDQPYDGAKLCPQI

SEQ ID NO: 335407 - protein, 338 aa, unidentified
MKLYGAIDLHSNNNVTVLTDERDKVVYQKRLTKHLPLILEQLSPYASSIEGIVVESTYNWYWLVDGLMEKGHRVYLANTAAIQQYEGLKYTDDDSDARWLAHLFRLGVLPEGYIYPKEERAVRDLLRKRCQLVRQKTANLLSIQNLYSRHTGQSISANRIKQLTSEKVDALFTSSDLALAVKANLTVMRSLETEIAVLERVVRERVKLKPAYRYLLTVSGIGQILALTILLETGDIRRFPKVGNFASYCRCVGSEKLSNGKRKGIGNTKNGNKYLSWAFVEAANFAIRFEPLIARYYERRKAKTHRVVAIKAVAHKLARACYYVMRDEVPFDVNRAFA

SEQ ID NO: 335408 - protein, 355 aa, unidentified
MSSEKYIGMDVHQATISVAVLDSQGKTLMECILETKASTLLEFVGGLRGTLYVTFEEGTWAAWLYDLLKPHVAKVVVCNPRKNALLKHGSKSDKIDAHKLADRLRLNDLKPVYHEESGVRMLRELARSYLTIVKDLTRVMSRVKAVYRSWGIPCGGREVYYTRHRQQWLNKIQEPGVRRRGERLYQQLDMLQLLRQQARRELLAESRKHTITAKLRKIPSIGPIRSALAVALIQTPNRFRTKRQLWTYSGLGLETRDSGEYHYVKGQVRRRKKQKFIRGLNRDYNHDLKALFKGAALRATILPGPFQDFYQRSLAKGIKPTMVRLTLARKIAAITLTVWKKGANFDVDKVKPQTA

SEQ ID NO: 335409 - protein, 372 aa, unidentified
MNQIIRIGIDTSKNVFQLHGVDAAEQPVLRKKLRRRNMLGFFAKLAPTRIGMEACGGAHYWGRELTALGHEIMLLPPQYAKPYVMRGKNDAADAEAICEAMSRPRLCRRFVPIKSAEQQAAQMLIGMRDRLVAQRTRLSNTIRGYAAEFGVVIAKGLDKIEPVLERIASDPKVPGLAKELFAAHGREYAQLKAHLREIEAKLLAWHRSNELSRRLAEVPTIGVIGACRLAIKVTDPHAFRSGRDFAAWIGLTPKDHSTAGKQRLGVITRAGDEAVRQALVVGATAVVQQVRKGRGDPSPWLDGLVKRKPPKLAAVALANKTARVVWKLMVSGERYNPHLPPRRFVPPTGSVAPCSHRQGRFAPPPAVACGQP

SEQ ID NO: 335410 - protein, 377 aa, unidentified
MDTLNTTSFTAFIGIDWADAKHDICIQSADADEREFDVIPHKVELIDEWACTMRQRFGSPIAVAVELSKGPIVYALQKHDCFVIFPVNPTTLARYREAFQPSRAKDDPTDAELAVDLIIRHHERFKPLQPQSVDIRMLVSLVEQRRNLVADKIRITNRLRVALKQYYPQMLEWFDHIDTLLFCDFLTRWPTLLQVKRARQSTLRKFFHEHSMRFEHVLEQRLIAIKAATPLTLDEAVVVPHRLQALVYVEQLRVLLDAIKRFDIQIESVAKQHDDYALFTALPGAGASLAPRLLVAFGEQRERYKSAAEVQKYSGVAPVTERSGKKHWVHWRWQCPTFMRQTFVEWAAQTINKSYWAGEYYRQQREKGSTYQAAVRL

SEQ ID NO: 335411 - protein, 370 aa, unidentified
MLDTTTFVGLDVHARSIKAVSLDVMTGEVRCATFGYDAGAVAEWVRSVDPKARCVYESGVTGFDLQKRLSGLGVDCVVGAVSKMIKPSADRRRKNDRNDAEFLARMLSVGNVVEVWVPDDECEAARDLTRALEDARDDLSRAKQRLSKFLLRHGLAFDERTPTGRRKGNWTRAHWSWIESIRFAEGADNDVLAYYVDAVRRAAEEKARLEGLVEAEARKPRWRRRVDSLRCLKGVDTATAADLVFEAGEFSRFGNARSFAAWVGLTPSEHSSGESDRRGAITKAGNKHLRKALVEAAWHYLTCSGRPKDLARGQAPDRGARRHAAKGVRRLVERREALLARGVHGNKANVATARELACWVWAVGLMAEEA

SEQ ID NO: 335412 - protein, 364 aa, unidentified
MNKCHLNTELSSLEGTRSEFNRSKAVIKLGIDVHQDFYVVVEQMEGTNPKPAQRFQKQVFLHWAAKLSKSGSKVHAVYEACGFGFGLQRQLTALGIRCHVVCPQKLDERDKRVKTDGLDAKALCLKLDRFVQGNREALALVRVPTEAEEQKRAIHRQREQLVKARKGLEAQGRSLLVNHGMEPASNWWKGRTFAQLQVPEWMKELLQNSQPILLALEEKIRALTAQLQAAAISKQPRGLGLLSSVVIDREIGSWTRFKNRRQVGSYTGLCPGEYSSGNTRVQSCVTKHGNPRLRAALVETAWRLVRFQPNYKPVLKWRKILAKGALATGAARKKAIVAVARQLAVDLWRIRTGRVATETLGLIN

SEQ ID NO: 335413 - protein, 336 aa, unidentified
MRYIGIDLHTTQLTVCYLKTGEDYQFKKYRLDEMEKFLADLAATDEAAVEATGNTRWLVNLVKEKVGRVVIVNPREFEVIKQSVKKTDKADALSLARFLAVDMLPEVRAKSEIAETVQRMNETRTKLVRLKTSLLNKIHALAVSKGRKLKKESLGSERGLEKVLAQAWTATERVELEIIIEQIRSLKTGIGKLDKALEEQSKQMSGFENLITVTGIGARSAGVLLSVIGEVKDFPDENKLASYFGIVPKVANSNEKVLHGRITKRGSKTGRTTLVQCTLVAIRHNSYLKKYYEQVKARRGHGKAKIAAARKYLGIIYNTLKNNWVFADFNNFVLAE

SEQ ID NO: 335414 - protein, 343 aa, unidentified
MAIVILGIDLGKNVCSLVGVDEDGAVVLRRRMRRQTVLTFAAKLPSCVVAMEACCGAHHLGRLLTAQGHTVKLMSPEYVRPYVKAQKNDDRDAEGIAEAASRPTMRFVDLKSQEQLDLQSLHRVRSRLVGVRRTLLNQLRAILLERGHIFPQGRRKFEAAIDTLVADPAYEISSRIRQLVIDIRSEWQALDSRIEALNGEFVAIARHDETARRLVTIPGVGVLNATALVAAVGDGAAFRRGRDLGAWLGLVPKQHTTGGKPKLLGISKRGNKYLRMLFIHGARAAMPSLSASQSPLGEWLRGLLARTHRNVAIVALANKLARIAWVTLRRKTSFDLRHLAVAG

SEQ ID NO: 335415 - protein, 435 aa, unidentified
MTLINFVAANQKYYAFNLLSVFIMVFWSVQYLLQHLLVQTQVSHQLLQPLILILQFPQAPQFRHARPGKFFLPVNGMDYFLPLRLTVRNVLTRRITMNIVFLGIDLAKNVFQLCGLNQAGKPVYTKRTGRKELLQTLANIPACLIGIEASTGAFYYWQREFEKLGHKVKVISPQYVKPFVRGQKNDGNDAQAIAVALMQPTMQFVPPKSPEQQDIQALHRARQRIVNHRTATVCQIRGLLLDRGIPIGSAVSRARRAIPLILEDAENGLSSRMRRTIAELYDLFNDLGRRIHFFDKEIETVFRQSEACQRIAKVKGIGPETATAVVAAIGKGTEFKNGRHFAAWLGLVPRQHSSGDRQVLMNMTKKGDKHLRTLFIYGARAVVRVATNNNDGHMNQWVNQLKERRGFNKTTVAVANKNARIIWSMLRNDTGYQVV

SEQ ID NO: 335416 - protein, 430 aa, unidentified
MKFNTQNAKIEAITEKTIVLGIDVGSEMHYARAFDHRGIEYTKKPFKFSNTEAGFMALQAWILDLKEKHEKDKVVPGMEPTGHYWFNLGKFLQDNEMKPVLVNPHHVKKSKELDDNNPTKNDRKDPKVIAGLVREGRYMIPYLPDGVYADLRTASNIRFQLQAELTRIQNRISRWFHIYFPEYKTVYGKPDAKSGILILKTAPLPEDILTLGVDGVNQIWRDAKLRAVGKARAKTLVEAAEHSVGNKEGAVSARVEIRMLLEDYESRNIRLQEVMALIEELVDQIPMAEKLLEIKGVGIRTVSGFLAEVGDISRFNNPKELQKLAGLALVENSSGKHKGETTISRRGRKRLRYLLFEVAMSLVAKNQEFRELHVYYTTRKLNPLKKMQSLMAVATKLLRVFYAMLTKGVDYDPKKMVSDIKRPAAYLQTE

SEQ ID NO: 335417 - protein, 474 aa, unidentified
MARTRNRPASPPVPGDAGAEVTDEPVRVISRAAAIDVAKGPGMVCMRLPHESRAGRRTQKVREVTATFAAVVAVMDHLVCQGVERLVLESASGYWRIWCYLAEAAGLEVWLVNARDVKHLPGRSRSDRLDCVWLCKLNERGMLRRSFVPPEPVRDLRALTRLRANLTHDRVRHQNRIEKILEDALLKVSSVISDLMGGSGRRFLQALADGERSPAALAALGDYRLHASKAELAEALTGRFRDIHGFEIGMLLELIDDLSAKITELDERIEAQLENVPGLGGVCTSCGQPGPDGPCTGCGEPVPGVIARLDEITGIGRGAAQVIVAEPGTDMTQFPTPGHAASWAKLTPRAIQSGATSKAGRTGKGNPYLRGATGVAVMTAARTETFLGARYRRHARRRGKQKAIVAGCRTIIEIAWRVIADPGFRYIELGPDYHDQLDPRRKTRDKIRQLEKLNPGMTVTLTPRPEPGGQAPAA

SEQ ID NO: 335418 - protein, 391 aa, unidentified
MTMYFVGIDISKYKHDCCIISAADQKVVSKFTFKNDKSGFEQLNLILNSLSTPEDIKIGFESTAHYALNLELFLENANHSFMEINPVLIKDFKKSQTLRRTKTDSIDCELIARWLMTVEYKPHSKGFYHAYSLKSLTRLRDRLVRQRSFYLVKITNVLDHTFPEFKPFFHERLSKTALYLLENYGSAEKIARMNSASYGKLRSISRGKFSPQQFIRLKELAANTVGVNNSIFDVELNSLLTLYKSLVDEIKTLESEINRLVDEVHPHYMSIPGIGPISAAVIYAEYGDISNFSSPNQMLAFAGIEPSVHESGTEAYNGKMVKHGSSQLRYVLINCCLPLIRFDVTFATYYARKRSENKPHRVAITHVAKKLVRVIYALESQDIDFDPKKLR

SEQ ID NO: 335419 - protein, 456 aa, unidentified
MAKPAKTKNKTKGEWEEGLAALNRNAAGIDVGNAEHYVAVPEGRDPEPVRTFGSFTADLHRMAQWLKACSIETVVMQATGVYWIALFQILESYGFQVNVVNARHTKTLPGRKTDVLECQWLQKLHTFGLLNNSFRPTEEIQVLRTYLRQRENLVAASSTSIQHMQKTLTQMNVQLANVISDISGVTGMAILRAIIAGERNPERLATLKHNRVRASREEIARSLEGNWREELLFVLEQSLELYDLYVRKIAVCDQRIERHLKMMASKREPGQQSDPAALPAAKQQPHFSLKDQLCRITGVDLTRVAGLQVQTVQTIISEIGVDMSRWKTEKQFASWLGLCPDNRISGGKVLKSGTRQVVNRAATALRLASWSLIRSQSALGANFRRLRSKLGAPKAITAMAHKLARLIYRMLKFGTEYVDKGMAAYESRYRQQQMKRLAKQAASLNLQLLPVPEVTG

SEQ ID NO: 335420 - protein, 332 aa, unidentified
MISHVGIDIAYKTFDVVVRQDNKSSKVETYNQHKDDHKKLINKLKKLNPESVVMEATGIYYFDLAKALFKAGLPVSVINPKSFKSFSETLLKRSKTDSIDASLLAEYGQRMTPVLWTAPEDIMMELRDISRQINRLVYMNTQAKNILHAMTATQGTNKYVIEDEKEGIRFNEKRIERMRDLALELISNHEVLKRQLSNITSATGIGENSAICMMGELNILPKTLKAPQVCNYAGLSVRLKQSGTSVNGPGRLSKAGNAYLRSAFFMPAMSASIHDSNAKAFKEVLLSRGKKKIQVICAIMRKYLMGVWACIKTDTPFDSSKLFSEEHKIACA

SEQ ID NO: 335421 - protein, 387 aa, unidentified
MFYCGIDVAKLKHAVSMMDERGQVVRTAFMITNTRAGFDQLLETLRGQPEPVSVGLEATGHYWLALYDELTRQGYPVTVLNPLQIAAYRKTGIRKLKSDASDAIWIADYIRVSNLSPTTPDLPVLLQLRELTRFRFRLSEQIGDVKRKLLSILDRVFPEYERLFSSVFLQASRAVLQEAVSAHEFADFDLHELAALLFQASHGRFGQEKAKLLQQQARQSVGVAFLADAARIEMGCLLAQINLLEEQRSQLDLAIAERMQLIPQHITSIPGIGPATGAAILAEIGDIQRFETLDKLVAYAGIDATVYQTGQFQASEAHMSKRGSPYLRQALWLAAVAALLHDPSLKAYYQKKRDEGKHHGTAVGAVCHKLLARVFVILKEQRPYVIR

SEQ ID NO: 335422 - protein, 333 aa, unidentified
MNYIIGCDAHKHYSQFAVYEGDQTRGKQVRVEHERGAIREFLSQFPEDTPVALESIGNWYWIVDEIEQAGCQALLAHAAKAKVMMGNVNKTDKLDARGLAMLLRNGTLPTVWIAPSQVRDERELPRTRMALCKIRVALKNRIHATLAKYNLLLPTESDIFAPKWSSQLNEVIEQLPSETQKCLQQELELLEDVQRQIQAMEERMKECISLTPDMQLLKTVPGVGDILAIVIGTEIGRIERFASAEQLASYAGTVPAVKSSGGKTRYGHTPKESNHYLKWAFVEAANGPAQYRQKPRWQHRHVTHLYEREACAKVIRWRWVLWHVISRKPHFGS

SEQ ID NO: 335423 - protein, 339 aa, unidentified
MQQERQYVGIDLHRRRSVIVRMTGEGEKLDLVRIENDPVALAIEIAKAGPNPEVVLEACYGWYWASDVLEACGARVHLAHPLGNNWGHRRVKNDERDAVDLVDLHRLGRLAEAWIAPPEVRELRELIRYRAKLVALRSGLKAQIHAVLAKEGVRVPMTDLFGVAGRVLLGSCPLGDAYAIRVESLLDLIDLYNREIEMLEGRIGQRLDGHRGYRAIQAVPGVGPVLGAVFVAEIGDVTRFPSPDKLTCWAGMTPRHRESDVVVKRGSITKQGSKLVRWAAIEAISRGRGGSFLQSQFRQLAERRDNRNVARVATARKLLTLVFYGLRDGEIRCIARHAA

SEQ ID NO: 335424 - protein, 341 aa, unidentified
MEHYAGIDVSLEWSSVCVVEANGKILREAKVASEPEALITWFRSSGFDLERIGLEAGPLSQWLFAAMREAGLAVELLETRHVRKAFEAMPVKSDRNDARGIAQLMRLGWFRPVHCKSMSAQETRTLLTARKLVQSKLRDVENSLRGILRGFGLKVGKTTDLRFAGRIEELVVGHPHLQVIAKALLAVRAVLRKEFAAFEKQARKMARSDTRARLLMSMPAVGPIVSLTYASAIDDPTRFKSSKQAGAHFGLTPKKHQSGETDYTGRISKIGDSSVRTALYEAAHVMLTKPLKGCSQLKSWAMRIARRAGMSKAKVALARRLAVIMHRMLADGTPFNAAATA

SEQ ID NO: 335425 - protein, 474 aa, unidentified
MAKGSGGSGMTRGDRRRNARRERLRGLLPRDGAVIGIDLAEDKQALAVVDHDVRVLARKTVRVKAFRLGEALDWAVAAAKLKGFAHVTVACEPTGPRWMQVQRLCAERGLPMVCIQPLVSHIAREQQDYTPHKTDESDCVLIGRLAAELHCYVPEELDETWAQLRHLGRRRGQLITAATASVQRIRDFLSVAWPVVTEACAGPFESVTWLAALQVVTSRCGGDPARLAALGLEEFTALVRAAVPAWGGKKGWAKICRRVFAALTDTEGVVTWSRRGLLRRVADELGDLARTRAQLRAVEADMVLVLGELGLSRLGDIPGVTAVGAAAILAETGDPRRYDSSSSLVKHAGLSPAGNASGAFEGQAHISRRGRPGLRLTAWRAVWPMLQFNPVMAAKYAALTQAADAAAAADAGSQQARAAAAAARARRAKARVACAASLLRWIYSMVVHGTSWDAEVASGAVGLEHAPRCQPEAA

SEQ ID NO: 335426 - protein, 391 aa, unidentified
MKSSHPIDTPAAEAKDGTLYVAFELSKSKWLIGTVLSGESKLSRHVVAGGDTAAVWQLISKKRAQAEKNLGRPVWVVSCYEAGFDGFWLDRWLAGQGVENRVLDPSSIEMPRRARQAKTDRLDLERLMRVLIRHEGGEPRVCSVVRRPSPEQEDARRRSRERERLIGERTAHGNRIKGLLHGQGVRDVEPRRKDFRARLAQARTGDGRVLPDRLVAEILREHARLLLIVEQLAEVEGLMKAEREATVADSRARQVNQMLRLKSIGAVGGETLANEVFWRDFQNRREVGAYFGLVGTPFDSGQSAREQGISKAGNSRARTLAIELSWLWLRYQPDSALSRWFKARVGDQKGRIRRIAIVALARKLMVALWRFLTQGVVPENAIVRAAPPAGR

SEQ ID NO: 335427 - protein, 585 aa, unidentified
MEHRHVQSTPLDHIGVGIDTARYGHRVSFLRPDRQPAAKPLTVLENQAGYQALQQRLQQLEQQHPHAHFDVRIDAAGQYAANLERFLRTLDLPMTLSIGEPKRNKDYQKAHFPKRTTDDTESQAMARFAVVEQPAATPPLPPPMVLLREVAGRLQAQVKQTTQAINRLHNLLARVFPELATIADDLAAHWVLQLLEQYPTAERIGQARLSSIEKIPYLPSDKAPVVHQAARQSVGSLRGHVAETLVRDLVAQVRHCVHAQQKMRQLLSAAFADLPASPHLQVVTIPGIGDATAAILVAMIIDIDRFPTPDHLVGYFGVFPEENSSGVDRYGNPLPLGTMRMSQKGNDLVRSYLWNAARAAICHNPAIRALYRRLKAKGKRGDVAIGHCMRKLLHLVFAVWKTNRPFDEHHFAWEQTAQTSMPTPTAPAASAATAASANDTAAGHKREIPAKQVVTTATSSVAPTAKPVNPPPPPTRSARPGVDYAFLRQQITLEQVLRHLGLFDQLHGRGQQRRGPCPVHARATDRKRTFSAHLGKNVFQCFHADCAAHGNVLDLWAAIHRLPLYDAALHLAQTFHLQRNREENP

SEQ ID NO: 335428 - protein, 343 aa, unidentified
MKLSRVGVDLAKNVYQLHGVDRHSKAIWKRRLRRGQWLQALLDNTDPGCEIGMEACTGAHHWARELQSRGYTVRLIAPQFVKPYVKSNKNDANDAEAICEAMSRPHMRFVTVKSVDQQNIQATHRVRTELKDHRNAKANQIRGLVGEYGLVAPQTLLALRRAIPEWLEDAENGLTDYFRSLLHGLWDDLLSLEDRLKELDKAIETLARNNEVTKRLQQLRGVGPIVATALVATVVIGEQFKSGRQMAASLGLTPRQSSSGDKRRLLGISKRGDVYMRTQLIHGARAVVSQAKNRDDPLSRWVTDIAKRRHPNVAAVALANKTARMAWAMLQNETDYDPNLAVG

SEQ ID NO: 335429 - protein, 418 aa, unidentified
MERMFEVAAGIDVHRDKLVVSVRRRRAGTTDSLETRTFETFHDGLMAMTKWLKEQGVEVVGLESTGVYWHPVVRAIQSSGPPAVVWLVNPVQVKKVPGRKTDVTDSQWLSKLVMYGLVSPSFLASSELQELRKLTRHRTKLTADQTRYKNRILKELESDGIKLATVCSDVLGKTGRALLDAMLRRETFDEQAIQKIAQGKLRKKTSDLLRAVHCPLTPSTIVVLTQLLRRFDDLSNDISQLEREIRPLLSPMIADVQRLIQIPGLDEVSAAAVLAEIGADMSVFPSAKHLASWGGLSPGSEESAGKSKKAPTRKGNKYFRTSLVQIATCASNTKGTFWQKKFRRLARLGPKKALVALARSLAGVIFHLLSTRTDYREPDTVPPPPHRIRTRVVTLTRQLEALGFSVVLAAKPAQVPIS

SEQ ID NO: 335430 - protein, 355 aa, unidentified
MENAKYIGMDVHKDAISIAVLNSSGKLVMESIIETKAITILEFVHGLRGSLYLTFEEGTWAAWLYDLLKPHVTKLVVCDPRRNDYLKQGSKSDRIDARKLAELLRSNLLRPVYHGEHGVRPLKELARSYLTITKDQARVMTRVKAVYRSWAIPCAGKQVYGQRHRLEWLGKIQEAGVRRRAEFYYVQLDALRSLRLVVRRELLLESRKHGASKLLSQIPSIGPIRAALLIALLQTPDRFRTKRQLWAYSGLAIETHDSAENQYINGQLQRSRKQASIRGLNQNHNHDLKNLFKSASAVAAAKAGPFQKFYDAQIGKGLKPEMARLTLARKIAAITLIVWKKGVSFDARYLNPQTA

SEQ ID NO: 335431 - protein, 334 aa, unidentified
MQLEIIRQNAGVDISKDDFEVALSCLTTDYNVVICATRKFSNSIKGFKELQKWVKTKQNPAIPPHFTMEATGVYYESLAYFLFEQEFEVHVVLPNRAKKYGESLGVKSKTDKLDAKTLAQMGLERKLLLWQPVSSALLELKQLTRERDAFVRTRTTTANRLHAYRHQGKPNKVSIERSKSIICYLDKQIKQIEKEIKAFVNNDKSLKTKMEYLLSIPGVGLITAATIVAETNGFAAFESIKQLTSYAGLDVRIAESGKWKGKSRISKRGNSHIRKALFMPSLSKKKHDPATALFYERLKDKKGIKMVAVVAVERKLLGLMFSLWKKEEMYKKVS

SEQ ID NO: 335432 - protein, 428 aa, unidentified
MKYARIYVLPETPPGGLTAGIDWGSADHAVCVAGAAGQVRARFTVAHDRAGIGKLIAGLRAAGVREAAIERSDGVLVDALLEAGLTLVVITSRQMKNLRSRYGSAGAKDDRFDAFVLADVLRTDRARLRPLVVDTPATAALRAVVRARRDLVAHRIAACNQLRAHLAAVFPGAVRLFAALDSQISLAFLARFATQDAVDQVSEEELAVWLGTLPRRGNAPRPGQLHARLQAAARGTAGADGAARAAITGALVATLITLAAQIKALEAEIAAQLAAHPDAHIFTSLPRAGTVRAARLLAETGDCRARFPDPESLAGLAGVAPVTRQSGKHISVGFRWAVNRQLRDAVCDFAADSRHASCWAAAIYDAARARGKDHPHAVRILARAWIYVIWRCWQDGTAYDPAKHNALQRVLEQQQAAQAEAAGPGPDR

SEQ ID NO: 335433 - protein, 361 aa, unidentified
MKTNTKELSYRAKEVFIGIDVHKKTYAVVARMDGEVVKKWTTAASPQALAQQLLKYFVGATIHTAYEASFSGFGLHRELEKHGIHNLVVNAAGIEVAVNDRVKTDKRDALKLSTLLEAKRLKGIRIPSEAEEAHRMLTRTRQQLVEDRTAIKNKIRMKFHQLGLIDNDENRRMTHTLVTELLTRTPSQELTIVINAYWSIWKKLDEAIHTIEDKLKHQAKEDPKEKTYRSAPGVGPLSARILSNELGDMSQFQNERQLFSFTGLTPSEHSSGDTIRKGHITRQGNSRVRAILIEIAWRAISKEQALAEFFDRLFPRTGKTKAIVAVARKLIGRIRAAFQKGELYQLNDSGTKAEAAEQPAQ

SEQ ID NO: 335434 - protein, 346 aa, unidentified
MDTHADAHVAVALDQLGARLEELHIATTQAGYDQLEQWAITFGQVDAFGVEGTGSYGAELARVLRRRGYRVIEVNRPDRATRHRRGKSDPIDAEMAARAVLSGVAAGTPKHADGDAEMVRMLKMAKDSAVKTRTQALNQIKAILVTAPAQLREALAGLSVGKLLDRCASVEPGELTTPTAVAQHTLRLLARRNLDLRAEVKALQADIARLATRAAPHLLDIFGIGPDGAAQILVTAGDNPQRLRSEAAFAALCGSNPIPASSGKTNRHRLNRGGDRQANATLHRTAVVRLRWHEPTQKYMTRRLAEGKSKAEIMRCLKRYIAREIYQVLCPTPRHGSAGKDLPQAA

SEQ ID NO: 335435 - protein, 320 aa, unidentified
MRNAVGLDISKTTFDATAIIGGIEKSAKFDNDSQGFEQFKGWLTELGCTDAHICMEATGNYYEGIADYIGSLYKVSVVNPLKISKYAESRFTRTKTDKQDAKLIAEYCQTAKAQDLVIRKPVINEGYKLKRLSALYAQLTADSTAQKNRLEAAKDTFVVKICQSNIKHLQRQIKAVKKELEKLTKQPALKDQTDRLATIPAIGRLTAVMLLNYLSGADFPTSNKFAAFAGLTPQIKDSGTSVRGKPSLTRYGNRRLRAMLFMPAMVAYRIKAFPDFIARLEAKNKPKKVIIAAIMRKLAVIAYHVHKKGEDYDPTRYKAA

SEQ ID NO: 335436 - protein, 417 aa, unidentified
MEELPSRIFVGVDWGNREHQVCSLVEGKPQQRRFEHSGKGIGALVSWLMELCDRQPATVAVAIETPHGVLVEALLDRGFAVFAINPKQLDRFRDRFSVAGAKDDRRDALVLASSLRTDPQAFRRLEPEDPLILQLREFTRANRNLERDHRRLCNQLRDQLNRFFSQVLELSNAADEPWVWSLLERFPSPDKVRHVHQSSVERILRAHRISRFTAAEVLDILKAPPLPVADGVVEAATQHIALLLPRLRLVDGQRRQCEQHMARLVKKVAETEDAPPGPKREHRDVEILLSQPGVGDIVAATVLAEAYQPLVQRNYHVLRTCGGIAPVTRQSGDTRNVSMRYACNHRLRQAFHWWGNTACQHDPKAHALYIEHRRMNHSHARAVRAVMDRRLNILMACLESGRLFERDYTPRKGLDRT

SEQ ID NO: 335437 - protein, 420 aa, unidentified
MTVDLERGYKRRELCGPKQYLNLLLRSVLMIYVGIDVAKDKHDCFITNSDGKVLFPVFTIQNNRDGFDVLFSRIQSSSSDVSNIKVGLEATGHYSYNLLGYLIDKGLHTFVINPLHTNLYRKSLSLRKTKTDKVDARTIALMLMSDVNLKSYSDTSYHNEELKSLTRYRFRKVQERAQLRQSVSRLVTILFPELEKLVPSLHIASIYALLSEFPSAGTIASCHLTHLTKRLENASKGRYSREKAIEIRNAARASIGSNMPAKSLELKHTLRLIGELDSEISEIESEIKRIMDEIHSPILTIPGIGYRMGAMILAEIGDFSRFDSPDKILAYAGASPSTYQSGQMESSYSHMEKRGSRYLRFALINATKYVCQWDETFGAYLQKKISEGKHYNVAITHAAKKLVRLIYAMEKSGKPYIKTA

SEQ ID NO: 335438 - protein, 421 aa, unidentified
MSKVVAELAATRFVGIDWASEEHAVCVLDEVGRSTSSFTIAHSSEGFENLVRRLASLGPVGAVPVAIERPDGRLVDCLLEAGHPVVAVSPNAIKAWREAEVASGAKSDAGDAEVIAEYLRLRQHRLVVLEPFSEATRALRAVVRCRDGMVHQRVAAANQLEACLDAYWPGAKQLFCDIFSNIALAFIEDYPTPASADRLGEKRMAAFLKRHGYTGGRPAAELVDRLRNAPAGIGEGPEAEARRANALSYVRVLRALNGSIKDLERSIVTQLGEHPDAVIFTSLPRSGHLNAAQMLAEWGDCRQAYDGPDAVSALAGTTPVTKKSGKHSTVQFRWACNKRFRNAVTTFAGNSRHSSPWAADIYARAIARGCDHPHAVRILARAWIRVIYRCWVDGVAYDPARHGAAARISNKKEALTEKSAA

SEQ ID NO: 335439 - protein, 312 aa, unidentified
MDGLFVGLDVSKDRVDGYVQPTAERFATGTDEPGLAALVSRLSSLAPSLVVLEATGGYEIPVAAALTTAGLAVVVVNPRQIRDYARATGQLAKTDALDARVIARFAEAVQPAVRPLPTPQAQALADLMARRRQVVDMLGAELNRQRQARQPRLQKRIADHVAWLQKALTKLDEDISELIRKSPVWREKENVLTSMPGIGDVTAHALIADLPELGQLDRRRIAALVGIAPFNRDSGQWRGRRMIGGGRATVRRALYMPTVVAIQHNPAIAACYHRLVQSGRPKKVALIAAMRKLLTTLNAMLRDHRPWQPQNA

SEQ ID NO: 335440 - protein, 347 aa, unidentified
MTIVENRTLITGGVDTHLNFHVAAAIDANGGTLGVETFQVGAKHYGELLAWLVGLGPVDKVGVEGTGSYGAGLARHLRQAGIDVVEVDRPNRQMRSRQGKSDDVDAIAAARAALSGTATGLPKDRDGNVEAIRVLMVARRSAVDERIQILNQMRHICFCAPDEIRTRFDGTSPKAFINATSALRPRQSDDDVVRYTTLMTLRELGRRVRNLHEENKRLNKLLRPLIRDTAPGLLEVYGVGFGTAAKLLVAAGDNPERLHSEAAWAHMCGVSPIQASSGKIQRHRLNRGGNRQANSALYTIMLSRMRHDQRTRDYVARRSAEGKTMGEISRMLRRYISREIYKELRPA

SEQ ID NO: 335441 - protein, 348 aa, unidentified
MSKHSVPASDVSGLRRRFAELRRKAAARTGRDFPIIVIQEAGLDGFWIHRVLQSEGIESHVVDPASILTSRRRRRAKTDRIDGETLVRTLMAFKRGEPRVCSMARAPTPQEEDRRRACRERKTLVGERVRHVNRIKGLLFAQGVFGYEPLRKGRRERLEDLRTGDGRPLPVHLKAQIIRELDRLEILLEQLKTVEAERNALLKPATVEAASPAAMLVQLKGIGSETAVLLWSEGLFRRFDNRRQVAAYAGLAPTPWQSGSIDHEQGVSKAGNPRLRATMVELAWLWLQNQPTSTLSLWFHERVQRLGGRMRKTIIVALARKLLIALWRYTTAGIVIEGAMMKPSPATT

SEQ ID NO: 335442 - protein, 400 aa, unidentified
MISVGIDVSKGKSTVCILKPYGEIVSKPFNITHTQKDLSELSSMLFRLNDEVKIVMEATGIYHLPVLTYLQEKGFFVSVINPYLMKSYRNESLRKAKTDKIDSRIIANYGIDHWFKMKEFQTSGEIYEELKLLGQQYRHYMKLHLLSLAELTHLLDLTMPGIKNLLASWNETNRKDKRSDFVERFWHYDVITSMSEQEFTEEYILWAKEKKYVPSQEKAKVIYTLAQESTPTLPSETSSVKILVTEAVRVLKEVDATLGLILSRMQEIAKTLPEYSVVREMGGVGNTLAPKLIAEIGDVRRFRNGKALVAFAGIDPPPYESGQFVGCNRKISKRGSASLRKVGYETMRSLKMRSRPEDPVYRYVVKKESEGKSKKSAKIAGLNKFLRIYYARVTELYKNI

SEQ ID NO: 335443 - protein, 370 aa, unidentified
MNSIIYVGMDVHKASFTLSCFSVTTQETFATVKISPNAKAIKKYLDGVSLSRSEECEFVCGYEAGCLGYTLYHQLTDMNIRCVIMAPTTILRNGKRVKTDRIDAENLARCLAYGGYKSVYIPTAQDEAVRDYLRMRDDHKLMLKKIKQQINAFCLKHNKIYPGNKSKWTQAHVKWLNVLEFDGYLQDAFNEYMITYRELADKVERLESQIEQLAELEEYRDKVKKLICIKGIKTHTALSLIVETGDFSRFQSAERYASYIGLVPGEHSSSEDQKRLGITKAGNRHMRMLLIEAAQCYSRGVPATKSKDLKSRQKGALPEVIAYADKASIRLRRKYIRMELVNKKKANVAKTAVARELACFIWGMMTDNIA

SEQ ID NO: 335444 - protein, 451 aa, unidentified
MVFVRGVDQAEFVSRLRGVSGDRVLLVPVDVGKRSAMSMVANQLGEVVVDPFEFLLDRSGVDLLLDRVADAEKAADAVVVRFGIEAAGHYHRTLTTALQAEQVEVVELHPGAVHKARAEMGKRRLKSDLRDLAAMVELMARGTGRSSRWEDNPIGIQAVWSMHRRRKVKARVTMSLQLSSQLDLVFPGLGDCFKDVIRAKGGHVILRYCPDPVRIETMGPEGLRSFVGNRGVRMARSKAALIVATAQRALLVPDGERRARMRVLQADMAIYDKICAEIDRAETELAKVIGDTPAAVLTSLPGVGITRASAYGAALGDPWRFASAGAAWRYSGLVPVEYESAGKKRAGMRISREGSTPLREAILEIGKGLSDHHPEFRAYKRRKIAQGKKKTVAAVAVAHRAHRLAFAMVNTQTLFDPQRWNDSTVGEPVTAARSGRHDVTRPPPLTMTAAH

SEQ ID NO: 335445 - protein, 410 aa, unidentified
MDVMFERVAGIDVGKASLTVCVRTPGARRGRHSETRTFKTTTGSLRVMRDWLIEQGVTIAAMESTSTYWKPPFYCLEDVMEVWLLNAAHMKAVPGRKTDVRDAEWIAQLLECGLLQPSMVPPPPIRQLRMLTRYRVQLMGDRTREAIRLEMMLEDASIKLSSVASSLTTLSARVMLQAMIEGERDPRVLAEMAKGRMRSKIPDLAQALDGHFDEHHARMAKTILGRLDMVEASLAELDEVISAKCAPWAHQIELLMTIPGVGEKVAQVIVAETGADMSRFPSAAHLAAWAGVAPAIYESAGKRSPSGKRHGNKWLTAMLVEAAGAVGRMHGSNYLSAQHARLAKRRGTGRAQVAVAHSILVSAWHMLTKDEPYKDLGADWLARRNDEAHARRLVAQLERLGHTVQLDSVA

SEQ ID NO: 335446 - protein, 428 aa, unidentified
MKYTQNEKILQVTEKTLVVGVDIAKERHVGRAFDFRGVELGKRIEFENRKEGMEKFLDWANKIMKANGKDNMIVGIEPTGHYWLCFEQYLRENGIKVVLVNPFHVKRSKELDDNTQTKSDIKDPKTIAMLVKDGRYTEPNIPEGIYAEMRVAMNIYERLQKRLSVLKNQIINWLDIYFPEFLEVFSDWEGKVALLTLKEMPLPCDVVEKGVEGIIECWRDKVDKRAISRKRAMELVEAAKRSIGKKEGRKLARQEMRYLLEEYELLRKQLEGIEDEMAKLLKDVPNGEKLLEIKGVGVKTAVGFISEVGDIMRYEDAKQIQKLAGLNIVENSSGKHKGQTCISKRGRGRLRSSLFKAMITIVAKNEEFKKLHMYYTMRQNNPLKKKQSLIALCCKLIRIFYAILKKGIKYDGNKMLSDIKREALATTA

SEQ ID NO: 335447 - protein, 337 aa, unidentified
MKYSGIDLHSSNSVVVVSDELDRVVYSHRLPNELNKVLAALEPHRDELAGVVVESTYNWYWLVDGLQAAGYSVHLANTAAMKRYDGLKRSDDETDAAHLAHLLRLGILPTGYIYPREQRALRDLARRRMQLVRQRSMHVLAVENVQARETGARMTGDRIKRLSVQAVDELGYVPEVAMGIKANVAVIGALNEEIRKLEKHLAQQVRLTPQYTVLATAPGIAKILATVIMLESGPIERFAAVGNYSSYARCVDSVRISNGKKKGEGNRRNGNKYLAWAFMEAANMARRWCPEARRFHDRKRAKTNPIVATKALAHKLARACYHMLKTGEPFDMQRCFG

SEQ ID NO: 335448 - protein, 344 aa, unidentified
MEHYAGLDVSVELTSVCIVDAQGGIVRETKIASEPEVLVHYLRTQELEIGSVGLEAGPLSQWLHAGLVGAGFDAVLLETRHVKAALSAMTVKTDRRDARGIAQLLRLGWYRPVHAKSVSSQEVRALLTARRLIQAKLLDIESGIRGLLRGFGLKVGPVSRGRFKARIVELVDGHAMLEAVIGAMLAARTALEAEFKCLHRALLTIVRADPVCRQLMSVPGVGAIVAITYKSGVDDPTRFKHSRDVGPHFGLTPKKYQSGELDVTGRITKVGDKMVRTALYEAAGVMLTRTVHFSTLKAWGMAVAKRRGMRKARVALARKLAVVLHRMWIDGTSFRWTNEETAIA

SEQ ID NO: 335449 - protein, 370 aa, unidentified
MGKSVLYVGLDVHKMSIDVAIAEAGPGAEVRFYGQIGGDLDSLDRVIRKLRATGAQLQFAYEAGPCGYVVYRHLTAQGWSCLVAAPSLIPRRPGDRIKCDRRDALSLARLFRAGELTSVKVPDADDEAMRDLTRAREDAISVERRAKQRTGALLLRHGRRYPGKTTWGRGHWRWLLQQVMDHPAQQIVLQEYLDAVREASARVQRLTGQIQELLPQWRRAPFVAAYQALRGVSLIVAATVVAELGDLSRFKNPKELMAYLGLVPSEHSSGASVRRGRITKTGNGHARRVLVEAAWAYRLRARITRPLLQRQEGLPENIRQISWQAQVRLCARYRRFLARGKHKNTIVTAIARELAAYIWAIGQAVEPLTA

SEQ ID NO: 335450 - protein, 355 aa, unidentified
MQKYNISFKGQNIFVGIDVHLKTWHVTTLTESGYKYSFAQHSDAKELFDRLNKRFPEAHFKSAYEAGFCGFSVHYALTELGIENIVVNAADIPTTGKEKAMKTDAVDSEKIAWSLKRGELTGIYIKDKHYMDDTNMMRLRQRFIKDLSRQKNRTKHLLYTQGVTYPERFKNSRTHWSRNFMQWLRNEVELLSQEKLTLLLLCDQVENTRKAILKVTREIRRLSTTEKYKNNFQLLISVPGFGLITSMTMLTEFDNNLMRFPNERKFISMLGLMPTCHDSGEKKVSGEKTFRGNKQLGPLVVESSWVAIQRDCELGSYYSKCCQCMKPQRAIIKVARKLACKAYAVVKTKKAYVLS

SEQ ID NO: 335451 - protein, 317 aa, unidentified
MNIQNQTEISVGIDVGKSQLDVAIYPLERHLRIPNSVEPISKLIQLLKELDVSRIVLEATGRYEHEFVFACDKAGLPVCVVDPVKVRRFAQALGIHAKTDKIDAGVIARFAATMKLEAKPIPDKQSRVIKDLLTRRSQLMEMSTMEKNRLQIMPKELHSSIKGLLKTLEKQIEAISNKVDGLVRQVKEWRVKTEILTSVPGVGKVLAYTLLSELPELGSLNSKEIAALVGLAPFNKESGRMTGKRRIRGGRPRVRTIMFMAMMSSIQCNPVFKRYYERLKAAGKLPKVALFEYSLTVRKLMDSPSVSNRVASKSVPS

SEQ ID NO: 335452 - protein, 415 aa, unidentified
MNSFCGIDWAEGHHDIANVDGEGKLVAKKRISDDSAGFTVLTEMLAAAGDSFDDAIPIAIETPRGLLVAALRATGRPVFAINPLAVARYRERHSVAGAKSDHADAMTLANILRVDSHLHRRMPADSELAQAIAVLARAQQDAVWRRSKASNELRSMLREYYPAFLDTFAGKSATNLAKPEARAVLAIAPTPAHAAKLIKTRVAAALRRAGRKRGIDGLAVNILEHLQAPQLRQPELVEKAMGRQALALLAMLDAACTGADELAQTAAEEFRKHPDYAVITSFPGLADLTGARVLAEIGDDRDRFADDRALKAYAGSAPITRASGKVTSITHRRIKNDRLAAVGWVWATYAYINPGPAQDHYRRRRDHGDRHAAALRHLFNEMLGQLHHCLQTRQTFDPIKAFGQPRTAPREPAAA

SEQ ID NO: 335453 - protein, 421 aa, unidentified
MTPPSHDTFAAFIGIDWADARHDGCLQAAGTAKRQCFQLEHTPEAIDAWVTTLRTRFNGQPIAVCLELNKGPLVSALRKYDFLVLFPINPLTLARYREAFTPSRAKDDPTDAELQLELLLTHRDKLQPLQPQSPTMRALAQLVEHRRRVVGDKVRITNRLTSALKNYFPQVLHWFQEKDTRIFCDFLSRWPTLKAAQLARRSILERFFRDHHVRTADVLATRLHAIKTATPLTTDEGVIAPNVLLVQTLVSQLRVTLDAIEAFDQAIAQRAQHHPDFPLFQALPGAGPVFASRLLVAFGEQRERYASAAALQKYAGIAPVTERSGKKAWVHWRLQCPKFLRQTFVEWSAESMRHSFWAQVYYQQQRDKGNTHQAAVRALAFKWIRILYRCWQEHTPYDESTYLQALMRRNSSLIQNRAKVS

SEQ ID NO: 335454 - protein, 353 aa, unidentified
MGHKYVGLDVHQSSTVAAVHDEQGKSVMESILATEAEAIRDFLRGLRGTIHVTFEEGTQAAWLYGIVKPVVAEVIVCNPRRNKLLAVGNKGDRVDAQKLAELLRFGQLKPVYHGTPGVRLLKELVHSYDSLVRDTIRVMNRVKAIYRGRAIGCAGRDVYYQRNREQWLEKLTEPGVRQRAVILYRQLDTLRGLRREAKKLMLQESRRHPAYRILKEIPVLGPIRIAQILAKVASPHRFRTKRQFWAYCGLAVVTRSSADYEFREGKPEKRKRAPMTRGLNPNFNHQLKYVFKSAAVDGIHQTPFEGYYAGLLLKGIRPEMARLTLARKIAAVTLTLWKRGERFDELKVSEQAA

SEQ ID NO: 335455 - protein, 332 aa, unidentified
MNMHPQGGVASRNQRPNAGIDVSKQHLDACWNSQDQRLVNDATGWDALIAKFKETNVDLVVIEASGGYERGLVSALQSADITVARVNPRQARDFAKSMGVLAKTDRVDARILRDFGDVLAHHKDRAKYITPMLDEQRQELAALMTRRRQLVDMRVAESNHLEQAGKRAVRSIKSVLRTLDKQLAAIDQDVDDHLDRHFKEQRTLLDSVKGVGPVTILTLTAALPELGRLGRRQIAKLVGVAPLADDSGPRKGKRRIWGGRSDVRTVVYMATMAAIKHNPVINVFHSRLIAAGKPKKVAIVACMRKLLTILNAMLRDQSMWDVARHLQTTKTA

SEQ ID NO: 335456 - protein, 370 aa, unidentified
MKKRITFVGLDTHKNSIEAALADGGRNTEVRLYGTIGGDLASLDKMIRKLQTTRVELRFVYEAGPCGYEIYRHLRAHGFHCDVVAPSMVPKRSGDRIKTDRRDARNLARLYRAGELTAIYVPRADDEAMRDLVRGRQDAIHAQRKARQQLGGFLLRHGSRYPGKTAWSLAHRRWMAEIKMPHPSQQVILEDYVHSVEECTQRVHRLTEQILQLMLDWRMHPLVTALQALRGVAPVVAATAVAEIGPMGRFERPRQLMAYLGLVPSESSSGGSTRRGGITKTGNGHARRALIEAAQAYSHPARISRVILKRQEAVPEPIRQIAWKAQLRLCARFRKLTARGKSRNRVVTAIARELSGFMWAIAKQVPVPQD

SEQ ID NO: 335457 - protein, 352 aa, unidentified
MAVYIGVDLHVRTQTVCWVDTADGEEHEITLDHERDDVRAFYSQFPAPALVGVEASGYSLWFHRLLEELGHRLLVGDALAIRQFARRRQKNDRRDARLLLDLLTHDDFPAIHIPAPSSREVLALLRYRHRLVRIRTMLRNGLQAVALSHRLRLGPKLFTARGQQQFAVLPLTGAFAVQRQHSLLLLASVADQIQAVEAQLDQRAQQDPRVLRLRTHPGVGLLTALAVVHALDPVTRFDRARRVAAYCGLDPREHSSGDTQHFGHISKQGNRLLRFLLIEAAHNAIRGDEDLRRFYYQLAARKNAAIAIVAVARKLVLRLYRMLRDAIDYDQFRRRGRDARRAREDASQVLPG

SEQ ID NO: 335458 - protein, 312 aa, unidentified
MFIGIDVAKAQLDFACQPSGETGTVPNDDGGIGVLVERLQEHQPTLIVLEATGGYEAAVVAALGTVGLPLVVANPRQVRDFARATGQLAKTDAIDAQILALFAERVRPAPRPLPDEAAQALDALLTRRRQLVEMLTAERNRLLVARTTVRRDLQQHIRFLERRLREADDDLHTAVKTSPLWRVKDDLLQSVPGVGRVVSLTLLAELPELGRLSHKEIAALVGVAPLNRDSGTLRGKRLVYGGRAPVRAALYMAALVASKCNPVIRAFYLRLRAAGKPAKVALTACMRKLLIILNAIARNGTPWQPPRTLVGT

SEQ ID NO: 335459 - protein, 338 aa, unidentified
MKLYVGIDLHSNNSVLVVLDENDKVIYSKRLPNDAQVILGVLAMYKEQIEAVAVESTYNWYWLVDALQDEGYEVRLVNTAAVVVYDGLKYSGDVADAKHLAHLLRMDLLPCGYIYPKKPRALRDLARKRAQLVRQRTTQLLSIKNLLARNCGRDTPSATIKRWAPEHIAQLPLLPEQKLAVQANCAVMQALEQQINAVETELLRQLKPCKAFQLLKTMAGVGDILSMTIYLETGDINRFNSSGNFASYARMVRSSRESNGKKKGEGNRKCGNRYLCWAFMEAAHFAVGSNEFIQRFYQRKCTKSLKVVAMKAVAHKLARACYNMLKDGVEFDVKRAFS

SEQ ID NO: 335460 - protein, 405 aa, unidentified
MNAVGIDVSKGKSTVTIRRPGDVILMPPCDIPHTQSGINDLIGKIRSLDGETKACMEHTGRYYEPVASWLADAGIFVSAVNPILIRDFGDDSLRSPKTDKADSKKIARYTLDRWAKLKQYGRMDKTRNQLKTMNRQFGFYMNQKTAMKNNLIALLDQAYPGANDFFDSPARSDGSQKWVDFVHTYWHVDCVRGRSLNAFTEHYQNWCRRKGYNFSADKAAKIYHLSSDLIAVFPKDNNTRLLIRQAVAMLNTASETVESLRQEMDAAASTLPEYPVVMSMNGVGPTLGPQLMAEIGDVTRFTHRGALTAFAGVDPGKNDSGQHIQKSVRTSKKGSPNLRKTLFQIMDSLIKRSPADDPVYAFMDKKRAQGKPYYVYMTAGANKFLRIYYGRVKEYLSTLPENEEM

SEQ ID NO: 335461 - protein, 412 aa, unidentified
MDVIHQRCAGIDIGKADVKVCLRVPGPGTRRRTEVRTFSSMTRDLLAMRDWLASEQVTLVGMEATGAYWKPIFYVLESEVECWLLNARHMKTVPGRKTDVKDAEWIAKLVEHGLVRPSFVPPQPIRQLRDLTRYRTEVVRERTREAQRLHNVLEDAGIKLTSAVSDVLGKSGRAMLEALIAGERDPHTLAELALGRLRGKHAVLIDALTGQFTEHHAFLVRAMLDRIEAATAMHNRLTTQIDQLLKPYRRHIELLASVPGVSEHTAQVILAEIGDDITRFPSAGHLASWAGVCPGNNESAGKHSSGTTRPGDPWLKSVLGQAAISASRGKDTYLAARYRRLMARRGRKRALVAVQHSILIAVWHMLTNNASYCDLGGNYFIERAGKGRATRRLIGQLNHLGYQVTLNPLAAT

SEQ ID NO: 335462 - protein, 345 aa, unidentified
MNKLVPTTQATAYCGIDVSARSLAVALIQVDHTVTHREFANSASGHRALLTWLERCDTRVRVSLEATGIYSLDLALALDAAGTVELAVLNPKLVNRFAQTLRRSKTDAADAVVLAEYSQRMPFSRWQRPAASHLGLRTMSRYIESLVVEQAGLKNRLRSAESTATTPRAVLADLRRALAAVERRVERMRGEALNLVETEVELRERYQLLTTVPGIASVSALRILSELVLLAPGMTVRQWVASSGLDPVHQQSGTSLHKPSRISRAGNRHLRAALYMSALSASRYDPHLAAFYRALRARHKTGLQALMAVARKLLHAIYGIFKSGTPYDGRRLFPNIQAEVELIAG

SEQ ID NO: 335463 - protein, 418 aa, unidentified
MDVVVERCAGLDVHRDEVVATVRVPGAGRRRWDQQTRTFRATLAGLSMLGDWLSGFGVTLVGMEATGVYWKTVFQALEERFECWLLNAHHLRNVPGRKTDVKDSEWICQLVQHGLVRPSFVPPVEIRRLRDLTRLRKAQINERARSIQRLEKVLQDVGIKLTSVASHTYSKSARAMLDALLSGVTDPEQLAELAKSRMRSKIPQLREALASRFEIEHHGVMVAQLLAHIDTLDAAIQNLNERIDLALAPHQHVVELLCTIPGVQAHAAQVLIAECGLDMGRFPTVGHFASWAGACPGHHESAGRRRSGQTRPGPRWLTDALTECAKAAARTKGTYLAAHFAQLRGRRGEPKAIGATRHDILVAYYHIVRDQVPFRELGADWQRKRYSAEHRARRLQRQLEALGYKVTIEAAAEAQAAS

SEQ ID NO: 335464 - protein, 331 aa, unidentified
MSNIIGIDVSKASLDCAYLRDADQKRAKRIGCYNQVRCFAALVAWAEARSALPITSLAFVIEPTHIYHEQLVQFLHNLGATVYLVNPGRVRKFAEGIGILSKNDLVDADLLVRYGLMARNLIAWVPVPQELNDLRSLLNRLDVLERNLRSELNRQEKIGKTMVFHRLEQQSIARAVKRLKAEIITFKRAIGQCIKSTSSLQHNFYLLCTIPGVGAKTAWVMIVILGSRTFRSAPEVASFLGLNPIEKRSGKSQYRRPRLSKSGSGNYRQQLFFPAMVATRKNPDIQALYERLLAADKTKMCALGAAMRKLVHICYGVVKNQTPYQAQTVQS

SEQ ID NO: 335465 - protein, 368 aa, unidentified
MKQQTSATTETNIKGRNIIDYTGKTIHVGIDVHKIDFQVAKVLGDICLGNHRMAANGQGLIDHLRRHYPGAGFKCVYESCAWGFTLQRQLQQAGIDCIVVHAADVSSSDKEKKRKTDKVDALKLARNHAAHQLTGIHVPNEEIQKQRNLIRFRKKIVGDLNRSKNRLKSLLKYQGINIPEQLGKKNNWSYNFMNWIEETAKKDVLLQDTLLLMLEEIKLLRQLLLKAEKALRKLRQDKYDEQSKLLMTAPGIGRTTAMLFLLEIGDIRRFGPFDKLNDFIGLCPDTDSSGDTERDTGITSRRHKQLRSALIEAAWTAIRIDPALMDAYQKLLKRMKGHHAIVRIARKLLRRMRAMLLTGQSYQKGVIA

SEQ ID NO: 335466 - protein, 363 aa, unidentified
MEYIAFDAHKHYTLASVVRPDGQLVREERIEHDRGSLREFLDRCERGSPVAVETIGNWYWIVDEIEAAGCVPKLVHARKAKLMMGEINKTDRLDVRGLNRLQRNGTLPTVWIPPGALRDQRDLPRTRMVLVRQRTQLKNRIHATLAKYALHDLEVSDVFGVRGRALLRERFDRLPPHAAYASQHLLEQVESLDRQVRAFEDRIQAAFNPTPAIQLLLTMPGVGLTLAVVIALEVGEVTRFATAEKLAAYAGTTPRVHASGGKTRFGPSRPDVNRYLKWAFVEAANAICITHGRAPQRHVSRLYVRIARRKGHAKAIGAVARHLAEATFWILSKHEPYREPKASAVSSTGDKRGWPLSSRRLDR

SEQ ID NO: 335467 - protein, 355 aa, unidentified
MSNAKYIGLDVHQATTVAAVIDGGGKLILEAIVETKASTIVELIDGIRGQLNVTLEEGTCAAWLHDVLEPHVHRVLVCDPRKNALLKQGNKSDKIDARKLAELLRADMLSPVYHRETGVRALQEAARSYLTLTQDSTRVMSRIKAVYRGRGIACAGETVYAARHRSEWLEKLSEPGRRRRAERLYAQLDQLRVLRQQARHDLLEESRKHAASRRLCQIPSIGPVRAALLIALMQTPHRFRTKRQLWAYSGLAVETRDSAEYCVRDGQLQRARKRVVVRGLNANRNPHLKQLFKSTALSASIKPGPFGDYYARLLEKGIKPALARLTLARKIAAITLVVWKKGERFDPAKLNTQAA

SEQ ID NO: 335468 - protein, 400 aa, unidentified
MKRLSGGIDIGSVSHHITILDEEDHILYNQKVSHNLNEFRKTIKQFKKIEKKEKGEISFALEGKNGYSAPFDRILINQGFTLYNIDNLKLKRFREAFAGEWRDDGRDALMLSKMLKLKKYINSKREKVFIKIERPSPVTESLKILSRHQQTLIDEKVRLTNRLSKKLLEVCPQVLELGKLKNKRIIAILAKYPDFSKYKRMTLKSLLKIKGIGKRQVPFLLKRLNNIEYTGLTDIYKTIILSYAKRISELQEEIKDIDKKLDKIGEKDKSVKHLKSLPGVATKLASRFIGEIGDINRFPSEKQLAVYCGIACVNNDSGKVTKAKAVYKANKICKQTLIIMAGCSIRFIPQCKCYYLKKRTEGKSHNHTLRCLARQLIKVIYKMLTEDRDYIVRKVLKKVA

SEQ ID NO: 335469 - protein, 425 aa, unidentified
MNSNTNHKINQVSENTLVIGIDIAKHKHYACAIDERGRVLQKSFPISQSRDGFEAFYTHLLALKSTHEKQDIIVGFEPTGHYWMNLAAFLTNYGIPFVMVNPFHVNRSKELDDNLQTKNDQKDALVIARLMRDGRFSYPRLLEGVEAELRNGATLRSKIQEDLNALQNRIVRWIDRFFPEFMKVFKNFGKMAYAVLEKTPLPVDVQGKSPEELLFLYRQVEGMKSPQLPKAKQLVEVAQHSIGLTEGLVMARIEIATLLKQHHLMQEQLDTLTGQLIELAKQMTDYEYLASVPGIGDVTIVDLLSEVGSLTQYEHPRQLIKLAGLTLRENSSGQHKGQKRISKRGRRMLRSLLFRVMMPLIRHNEAFKQLHEYYTTRTINPLRKKQSIVVLCGKLLKILHALCKKKVKFDEQHMMKDLYCLVEAA

SEQ ID NO: 335470 - protein, 459 aa, unidentified
MQVEYERCAGIDLHKKTAVTTIMITQSDGTVEQHTRTFSTMTSDLLALDDWLRAHRVQIVAMEATGIYWRPVFNILEEERQVLLVNAQHMKAVPGRKTDVKDSQWIADLLRHGLLSASFIPPAPIRQLRDLTRYRKMLVQERAQEINRLQKVLETANIKLAAVATDVLGKSGRDMLDALIKGGKNPDALAELARGRLRAKLPDLRLALEGRVEPHHQFLLQQILAHTDFLEQSIDAVQQEIDKRVIPYQEAVTLIQSLPFQLQAGAATVIAEIGVDMSRFPSDAHLASWAGVCPGNCESAGKRKSGKTTDGNPYLRGVLCEMAWIVSRMKDNYLSAFYHRIARRRGKKRAIIAVAHKILVIIYHMLKNNKPYEDLGGDYFDQLDAARIQRRAVQRLEQLGYAVTLTALELPDKATKELPDKTTRMPADKTEKSSPNKTEKSPANKTTKKKKEVTSLQNV

SEQ ID NO: 335471 - protein, 341 aa, unidentified
MKQEMHVLGIDIAKRVFHAVGMDDRGNVVYRKRLSRHDLLPCIAKLPPVRIGIEACGGAHYWARRFRAHGHEVKLMAPQFVKPYVKSNKNDSRDAEAIAEAVTRPTMRFVPVKDVDQQDIQALHRIRERLIGERTALVNEVHGLLHEYGIVIPKGVSKFRQVVVGKLESEKDKLTPLSQEMFWKLVEEFAALEKQLAYYQEKLEALATTHPECQRLMTIPGIGPLSATALVAAVSDASAFKNGRQFAAWLGLVPRQYSTGGKERLLGISKRGDSYLRKLLIHGARATLRWVGRKPDRRSQWIRQLVERRGKNRTAVAIANKNARIVWALLTSHQAYEPAKG

SEQ ID NO: 335472 - protein, 361 aa, unidentified
MAGTMTWAGLDVHARSTHAAAIDSITGELVRARFGPGVEEPIAWLMGLPGPVRACYEAGPTGFGLFRAAEEAGVAMQVIAPGKTPRGPADRVKTDRKDAELLARLLLAGSLTAVVVPPPELEAARDLMRAHDAVRRDLMSARHRVSKLLLRHGRIYPQDSTWTARHRAWLARQSFEQVGSELALLDALAHVDGLTARKAALAERLSQLALDEQWWPTVARLRCFHGIDTLTAFALHLELGGNWQRFARAPQLAAWLGLTPTLTQSGESSRQGSITKTGSTLARRLLVEAAWQYARKPGQGAKLRGRQAGQPDHILQIASRARRRLHRVHGRMRARGKPGNVTVVACARELACFLWAAATAD

SEQ ID NO: 335473 - protein, 410 aa, unidentified
MRLFVGDDWAEDHHDVEVMSEAGKVLARRRLPEGVAGIAQLHALIGGFLGEEADAEVVVGIETDRGPWVTALIAAGYLVYPVNPLQASRYRERHGVSRAKSDSGDAHMLADMVRTDSHQLRPAAGDSPEAEAVKVLARTHKTLIWERTRAVQRLRHQLREYFPAALEAFEDLDAPDTLELPGKAPEPARAARLTRAQVSAALKRARRRNIPDKATAILAALRGEHLGQPEVVTAAYAATARSLIAVITTLNEQVKILQGQVGEHFGRHPDAEIILSQPGMGAILGARVLAEFGDDPHRYRDGKARRNYAATSPVTRASGKKKVVAARFIHNDRLVDALRAQAFTALSASPGARAFYDELRARGIEHNDALRRLANRLVGILHGCLKTRTLYDEATAWGHRENLPQSSVPA

SEQ ID NO: 335474 - protein, 310 aa, unidentified
MESIIVGIDVSSDRLDVAVRPSGAAFVVERNARGLDELIARLRELTPAIVAIEATGGFETVAAAALAGGGLPVVIVNPAQVRAFATALGQRAKTDPLDAAVIAHFAEATKPQVRPLPDEATRLLADLVTRRRQIIEMIGAERQREQRVTIPRLKKSISRLLKALEKELASLDDDIDNAIRNSPAWRDKENLLETVPGVGPVIARTLIAELPELGSLGRKEIAALAGLAPFTRQSGKWRGKSFIGGGRTAVRCALFMGALVGKRHNPILKAFFDRLVAAGKPKMVALIAVARKLLTILNAIVRDSRPWQIA

SEQ ID NO: 335475 - protein, 404 aa, unidentified
MYNAVGIDVSKGKSTVAVLQPGGTVIRKPFDVSHTSQNLNELADYLSSLDGTTKIVMECTGRYHEPMIKALSEAGLFISIVNPHLIKNFGNNSLRKVKSDPADARKIARYTLDNWTELRQYSGMDNTRTQLKTLNSQFSFFMKQKVAAKANLIALLDNTYPGVNKLFDSPTREDGSEKWVDYAYSFWHADCVRKIGLKAFTERYMSFCKKHHYIFQQDKPEKLFNASKELVAVFPKEKTYKLLIQQSIQQLNLASEHVERLRREMNELASTLPEYSTVMGIYGVGKTYGPQLIAEIGDVSRFTHRETLTAFAGVDPGVDESGQHKSKSNRASKVGSARLRKTLFQIMTTLLQNAPEADPVYRFLDKKRSQGKPYYVYMTAGANKFLRIYYGKVKECLRNLEQTE

SEQ ID NO: 335476 - protein, 345 aa, unidentified
MSEFYEGRQFVGMDLHRRRSVLVRMSETGEHLETVGILNDRDSLAEVMSRAGESPEAVLEATYGWYWAADALAELGATVHLAHPLGVKAFSYRRVKNDQRDAADLADLLRMGRLPHAWIAPPETRELRELVRHRAKLVAMRSQCKAHVHAVLAKGGIWVPMSDLFGVEGNLLLDKVTMPAPYKARIASLRRFIEAFDAEIDLFSGLVQRRLTHDAGYTAIQQIPGIGPVLGAVFVAEIGDVHRFARAAQLTCWAGLTPSHHESDTTVHRGRITKQGSRLVRWAAIESVKILPKTSRIGAIREQVAHRRGNRNIGAVAAARKQLELVFYGLRDHHIRALHRPPRAA

SEQ ID NO: 335477 - protein, 364 aa, unidentified
MTTVHYVGMDVDKQKIVLARVGAGRDTRATEHVIANRPSAVKKYFVALLADAEVHATYEAGCFGFALYRQLSALGVSVVVAAPGLIPRKPADRVKTDRRDAHSLALSLRAGQLTGIYVPTLQDESVRDYLRMYDALRGDLRICKQRVLQFLLRRDIRYEGGGPWTVKHKHWLSSLEFPQSRDRQTLDMYLSQMQELEAKCAEVAAEVESIATQDCYRERTQKLTAFKGIKTLIALSFVSDIGDFRRFASARQFMAYLGLVPSERSSGNKRRQGGITKAGNSHLRRLLVEAAWHYRSYHPSSRDLTERRRGVDPAVLSYANRAGRRLNRKYMHMVLRGKRSQVAVTAVSRELAGFLWGAMTGQVA

SEQ ID NO: 335478 - protein, 462 aa, unidentified
MRRRDESETWENRREQLEGLPIIRRNVAGIDLGSERHWVCAPTPNAQGREITSFGATTPELIRMAGWLKERHVESVAMESTGIYWIAPHEVLEAQGLQVLLVDTRQLARVPGRDKKTDPTDCEWIQRLHSCGLLRGSFRPEEAVCMLRTLVRDKANLVAESGDWVRRMQKNLDQMNVRVHRAVSDIDGVTGMAILRAIVGGERDAQKLAKLRDRRCSKTEEEIAEQLSGHWREDHLFSLQQALKMYDAVQERIAAYEKEILRKLGDMERDEHHEQTAPPLPNPNKAKTIKHRGQEAKRQALYRMSGVDATHIDAIGVETVEVVLSEYGPDLSRFPTEQQFVSHVTLAPRVPKSGGKPVKKKKRNSASTRVAAALRMAALSLRHSQTALGAYYRKMAQRRSGDIAVFATARKLAILIYRLLRWGQTYVDEGAEAYEDRYRQRRIGHLTATAKQLGYQLIPVNA

SEQ ID NO: 335479 - protein, 340 aa, unidentified
MSIVGGLDLHRRQLTYDHLCLETGEIERGRIFPGDRENLRFWLARFAGEDGVEFAVEGCTGWRYVVEELTRAGVEAHLADPAELSVQKGRKQRAKTDRVDARQLRQLLSQRRLPESWIPPEHVLEARAWVRLYKDLLEERTGWWQRVRATLFHQGVPNFPLTTPEGRQRLEAEELSPAGWQAVEVGLRQVERLSSEMAPLRARLEQISRAQKGCRALREAHYGVGPISSVAIWAEMGDPRRFSSSSDAVRHTGLDVTVYASDNRRSSGHLARQGPSVLRWALYEAAMRASHPNSPDHAYYLRVKQRLDGQRAAFSVARKLARRCYHTLRELGDVAWLPAA

SEQ ID NO: 335480 - protein, 388 aa, unidentified
MQVVTGQAAAPTAIQTNLRAIFVSLELSRSTWLITSLSPGAAEKMSKHSVQAGDIAGLLRRLAQIKEKARARTGRDFPIITIQEAGLDGFWIHRVLQSEGIESHVVDPASIATSRRRRRVKTDKIDGETLVRTLLAYKRGEPRVCAMIKVPTPEEEDSRRLCRERKVLTAERVLHVNRIKGLLFCQGISGYEPLRRDRHERLEELQTGDGRPLPPHLKAQVNRELDRLELLLKQIKAVEAERDALLVAAHTPAAVPASMLLNIRGIGPEFAAVLWSEGLFRHFDNRRQVAAYAGLAPTPWQSGAVDREQGVSKAGNPRLRTTLIQLAWLWLRNQPHSALTLWFHERVSRNGGRLRKTTIVALARKLLVALWKYVTAGVVIEGAAMTAA

SEQ ID NO: 335481 - protein, 344 aa, unidentified
MEKIIRIGIDTSKSVFQLHGVNAVEQPVLRKKLSRREMVKFFEKAPPTTIALEACGGSHHWARLLSSFGHEVKLIAPQLAKPYVKRGKNDAADAEALCEAMSRPTMRFVPVKTADQQAALMLVGLRERLIRNRTQLANAIRGFAIEFGIVAATGMCRIEPLLERIAADQSLPELARELFAMHGVEYRDLLAETKAVEEKLTALHRSDECSRRLAEIPGVGPVGASLLMMKTPDPRTFKSGRDFAAWIGLTPKDHSTAGKVRLGVITRAGDEMLRSILVVGATALLQHVRAGRSRHASRWLTELLQRKKPKLVAVALANKIARVAWKLMVSGEAYRRREEHTQAT

SEQ ID NO: 335482 - protein, 429 aa, unidentified
MIEAVIERCAGIDIGKQFLAVCVMTGAANEEARSEIRQFGTTVGELKRLLEWIRQEGCTDVIMESTGSYWKPVFNILEGSVKVALANPHEVKARKGQQTDNKDAWWLAHLLRHGMVTRSFIPPRWQRELRDLTRRRRKLIQSAAAEKNRVGKVLEDANVKLGSVLTDLFGVSGQRMLEALLKGTADPAEIAAFAKNRAKKKIPQIMASLEENLMRDHHRMMVRFSVEHMRFLEEQILALDEEIRRKIVEAGYVKEWELLRTLPAVRDSAATILAEMGPDPAQFPSEKHLGSWSALCPGNNRSAGRSKSSHTKNGNPWLRGALCESAWAVSRMKQGHLRDKFWRIAAKGDPKKSRPIAIVAVAHDLLKLAYFVLQRGTPYEEERGKPMTEKQKQRLIRHHVRRLGKLGVALRPSPAPNTTCRRRKRSLPS

SEQ ID NO: 335483 - protein, 408 aa, unidentified
MQVLYTRCAGLDVHKDTIVACVRCVSPPMHQEVRSFGTTTSGLLALADWLAEHSCTHVAMEATGVYWKPVWHVLEDEFELVLANAAHIRNVPGRKTDVNDAMWIADLLAHGLIRASFVPPQAIQQLRDLTRTRKQLVREVSQHSLRIQKVLEDANLKLGSVLSDVLGKSGRAMLDAIVAGQTDPATLAALAQGTARQKTSELREALRGRITEHHRTMLRLHLQVVDALQRTLAELDAAVGKALAPIRQRARLLTTMPGISDLTANVVVAEIGVDMSRFPTAGHLISWAGLCPRSDESAGKRRSTRVRKTGTWIKTTLVTAAWAAVRVKTSYLHAQFLRIKARRGAKKAILAVAASMLTAAFHMLRDGVEYADLGADYLDRQDRSKTIRRLLKRLQDLGCDVPIELHAA

SEQ ID NO: 335484 - protein, 370 aa, unidentified
MSVRRILAKTINTDLEYEAIGIDLAKNCVSVALLTTDGEVVCIDRLDYSELEKSAQVLCPTTFAMEPCTEMNYLVQKLEAWGHRCLVIGGKNVQNYVENHYSGQKTDLNDAQALAFLAQDTQLRPIKAKDMEQQKYASLTTLREQYIKQYRQTIVSLKGICQSWGLNISKGISGKARLKDLIENHAAFPEELKESLVGMVTHAQTTQKALNKITKTLEELAKNDKLCQLIQTIPGLGPVCSCRLRATIGDIQRFKNPKDFPAYYGLVPRSIATGHNEKKGRITHRGDKTMRSLMVQGAGSVVNMATKGKLKSKQLTKWILKKQKEKMPWGKLVCAVAAKLLRIVRAVLISSKPYNPKIAGVAKCSLPKGT

SEQ ID NO: 335485 - protein, 335 aa, unidentified
MTITTIGLDTSKTWFQVHCVDADGRTVLRRKLARSKVLSFFANIPSCLVGLEACGGSHFWARELAKLGHDARLMPARYVRAYVKTNKHDAADAEACCEAVQRPGMRFVPVKTEEQQSMLMIHRARDLLVRQRTAAVNALRGHLAEFGIVAAKGTAKAHELMRLAGDDERLPAMAQEALRYIVAQIHDIEIRLKSFEQRILSLAKENEVCKRLMTVQSIGPYIATAIAATVGDPRNFASGRHFAAWLGLTPKQHSTGGKEKLGGISKRGDSYIRRLLIHGARATVARVRSGQMKSAWLSGLLGRRHFNVATVALANKTARVAWAVMSTEQTYRRAA

SEQ ID NO: 335486 - protein, 328 aa, unidentified
MTDVSTPQVIPFFVGIDVAKKVLDLARSDSGELLHVENTPAGIRQIVAALASPKPACIVLEATGGLEQPLLEALLEAELPVARVNPGHVRHLAKGLGILAKTDAIDARVLVEFARLALPRLAVKRSEKQAELDALVTCRKQLVAAKVDQDNRLESTASKPARKALNAVLRVLEKQIKTLDKQIAAIIDSDDDLRDLDRRLKSVPGVGPVLASTLISQLAELGQTSRQKLASLVGVAPFNHDSGKHRGKRAIRGGRDAVRNVLYMSANIAILHNPVLKAFANRLKATGKPPKIVIVACMNKLLSLINAMVRDKLSWDQLTVVKKLALAT

SEQ ID NO: 335487 - protein, 418 aa, unidentified
MQTELSQYTAVIGIDWADKKHDVCVQDMATGRRRASQVRHRAEDLDEWARSLHRRFGGPIAIAVELSKGPIITVLQKYDFFVIFPIEPAGLASYRRAFALSGAKDDPTDAEFALKLLLSHAEHFKPLQPQSVEMRTLMTLVEQRRQLMNDRVRITNRLRNTLKQYYPQPLEWFDHIDTVLFCDFIRHWPSLAQARRARVATLERFFREHNMNRKPLLERRIKAIKSAMPLTMDDAVIVPHRLRALSLVAQLEVALECIKQYDAKIASLAPQHPDYALFEPLPGAGPVFTPRLMVAFGEQRERFNNAAEVQKYGGIAPVTQRSGQSTWIHWRWQCPTFLRQTFVEWAAQTINKSYWAGLYYQQQRAKGCSHQAAVRALAFKWIRILYRCWKTRTPYDENRYLRALQERGSPLLKTAEVA

SEQ ID NO: 335488 - protein, 394 aa, unidentified
MFYCGIDIAKFKHEASVIDSDGKALFDSISFANSKDGCEKVLALFEKLGISNDLVVIGMEATGHYWLSIYEHLTELGFDIKVINPIQSDAFRKMYIRQTKNDSKDSFLIAQIMRFGQYSSTTLSDENIISMRQLSRYRLSLVDTCGDCKRRIIALLDQVFPEYDKLFSDTFGATSTELLLKCPTPEDMLNISSSKLTILLQKYSRGRFGKTKATELKAVAKGSFGVSFAKDAFSFQIKQLMEQLVFVEKQIKELEVQLSTLLNQTNQVITTIPGIGNTLGAIILSEIGDIHRFDAPNKLVAFAGLDVKVNQSGEFIGTKNKISKRGSPYLRRAIWLAAGVAAFNDSILSEYYQSLRARGKHHLTAVGAVARKLCNIIFVILRENRPYEAIPPKR

SEQ ID NO: 335489 - protein, 325 aa, unidentified
MDKFSNYYGIDISKDVFDVMDSEGRHFLCPNNTAGFKKFIKQIDTSGCFVMEATGVYHAQLADYLYSKSIFVSVVNPLVIKRFIQMNLRRIKTDKADAEMICKYAQQHEVKAYVPSPVYVKESRIICENIDLLLKSRTMFKNRLHAMKHKAAKHRAVLIKPLEKIISDLTNQIVKLETELKKLIQENEPDLFTRLQTIPGIGKSTAMFMIVLSDGFKKFESAKQFTCFVGLSPVEKRSGSSVRGRSGISKQGNGKLRNLLFMCSFNACKSNKACRDLYERILGKGKCKKLALIAVANKLIKQSFAIAKSGLVYDPEFRSIKPQLN

SEQ ID NO: 335490 - protein, 339 aa, unidentified
MELCCGMDLHSSNTVIGIIDEKRKPLIDRKLPNDPELIRSFLKPYKPDLKGIVVESTYNWYWLADVLQEEGYQVHLSHPVANEQYNGLKHSNDKHEAFWLAELLSLGILKEGYIYPRQVRSVRDVLRKRAHLVRVRTALIVSLQHMISRNCAVKVETGDIKRLTADVISPCLEKEEALLLAGKTSKDVIDCLTRQIDKIERWGLKRLCREGVFIQLVTLPGVGDILGMTILLETGPISRFREVGNYASYCRKVSSRWTSNDKVKGRGNVRNGNKYLAWAFSEAAEHARRTNEACRRFYDRKVRQTNTKIAHNALAHKLARAAYSIMKDQVSYKEDKMFS

SEQ ID NO: 335491 - protein, 360 aa, unidentified
MAGAVMGGSPQTPRSLQTAGETGAPSVSPLNPNSRLGRKVRSPIRQGRVAMDIIAVGIDVSKDRLDVAVHPGGEAFVVERNGAGLERLARQLVQLGPTIVALEATGGFETIAAAALGSAGLPIVVVNPAQVRAFAKALGQRAKTDPIDAAVIAHFAAATRPEPRPLPDEATRLLSDLVTRRRQIIEMIGAERQREKRAVSRHLKKSITRLVKALEKELVSVDGDIDDAVRGSPAWRETEDLLASVPGVGPVIARTLMAELPELGRLNRKQIAALAGLAPYTRQSGQWRGRSFIGGGRKVVRTVLFMGAMTARRHNPVLKAFFDRLVAAGKPKMAALIAVARKLLTILNAMLRNKTSWQNA

SEQ ID NO: 335492 - protein, 442 aa, unidentified
MKALPVLNPLAAGIDVGSEKLHVSIAGDAPVVFGTFTNEVYRLRDWLKTQGVTTVAMEATGVYWMYIYVVLEEGGLKVTMVNGRYVRNLPGRKTDMADCQWLATLHAHGLLRGGFVPPADIRRLQDYQRLRGDHIINAGAQVQKMQQALERMNIKFQDVISDLSGVSGLRVVRAIVKGERNAETLLALCDVQIQKNKRERVLESLLGNWANEHLFALGQALEVWDFYQKLLSECDQQIETVLKELAGPEPPPDSPKVQGGSNTLSKPPGKNAPQIEQLHQLLVRICGGKDATSLPGIADYLLLQLISETGVDLSAWKTEKHFNSWLGLSPGTRQSGKRKGSVKRQRNRAGRLFCTGARSLVRSVDKALGAFYRRLAARKGGLVAMKALARKLAALYYRVLRYGLEYAEKGLRDYESKYAEGQRRLLTKLAARQGFKLISLNA

SEQ ID NO: 335493 - protein, 322 aa, unidentified
MNPKNYGGIDVAKKNFVIGIYGQDKTKTEANTPKGHAKAVEYLQKHHVDLVVLESTGGLEVPLANALHAADIRVVIANPQRTHQYAASFSLGKTDHLDAKMLADYAQALDSRKMADDMCYAPPSEEALALEALVKRRSQLVEMRKMEKNRLEQTHASQKASVVAMIKHLGELIAALDKEIDQSNRGGFNGKGEILSEMKGVGRITCATLLSMLPELGKVPHKRAALLVGVVPPPRQSGEKEKKSGCVGGRMVVRNALYMAALTATRSEPKIKAFYEKLMSRGKAFKVALNACMHKLLRILNARMRDYLASLKETEECEPQSA

SEQ ID NO: 335494 - protein, 389 aa, unidentified
MLLDHLSDGLTAIRTQFGAIFVSLELSRSNWLITSLSPGKGEKMSRHSVTAGDVAGLMKLFADLRRKAEARTGESYPIITIQEAGLDGFWLHRVLQQNGIESHVVDPASIATPRRLRRVKTDRLDGETLLRALLAYKRGEPRVCAMVVAPSPEEEDRRRICRERRTLIAERITHVNRIKGLLFAQGISGYEPLRRDRRARLEALRTGDGRELPAHLKVQIGRELDRTELLLEQIEAVETERDALLAAARTPASEQAAPDAVTMLLALKGMGANFAAVLWSEAFYRQFSNRRQVAAYAGLAATPWQSGGIRHEQGVSKAGNPRLRTTMIQLAWLWIRHQPLSALTRGFKERSPQGRKRAIVALARKLLVALWKYVTQGVVIEGAVMKPAA

SEQ ID NO: 335495 - protein, 371 aa, unidentified
MIRSWTDSRRDWKPVAASVVGPRMSLVLRSFLPHPNSCLGTSPYQQGRDTKMAQRSFCGIDVAKDRLDVMVLPEELCWSVANDAAGWAELVAKLRGLRIAASGIEASGGYERGVVRALLAAGMSVRQINPFKLRQFAKACGVLAKNDRLDARMIALFVATLPTRSAQRYAPVERLAELVTARRQLSDDKVAAENASRLFEDAALRRLYGGRIARLAADIALLDKRLAEILAGDAMLARRYALLVSMPGVGPVLAVTLLALLPELGQMNRKQVAALVGVAPYDFDSGRLKGMRCIWGGRAPVRRVLYMAALIGCRCNPQLRAFHDRLAAAGKKAKVVLVAVMRKIITILNAMLRDNVPWVDHSIGRHILPAA

SEQ ID NO: 335496 - protein, 345 aa, unidentified
MRKVVKQVAGIDVAQKELVVTLGRMLDDFSIELFSYKVFKNNDSGVKLLVDWVNKLTDYEVPVRYVMEATGVYHQKLAYYLVDNGCEISIVLPNKISNYIRTLELKTITDKSCSQAIAQFGLERKLDKWAKPKSIYKELQQLTRERDQIVQERSVIKNQIHAEKTESEPNQKSLERMQARIRFLNSQEKEIKADITDIVSKDPDLKQVINNITTIPGVGELTAVIVLAETNGFELIRNKSQLSSYAGLDVKEKQSGTSVKGKPRISKKGNRNLRKSMHLPSLTAVKWDENFKNIYARLISKNGIKMKALVAVQRKILELIYILFKNETVYDKEYITKNSAQTQMV

SEQ ID NO: 335497 - protein, 313 aa, unidentified
MTQIKVGVDGSKAWLDAWIAPDHDLRCANTPEGIAALARFVRVHAGDNALVVLESSGGCEKLAFVQLWADGIPCAIINPRQARAFAEAMGYLEKTDRIDAQVLARFAEAKQLEPTPPPSEGQARLEALAARLRQVTRDIIVQKQRRSATTDPLTLEQIGEALALFERQAKRLATMITDLIAQDPLWRAFDETIRSVKGLADRAVAYLLADLPELGTLSNKAIVKLVGLAPIANDSGKRTGKRRVRGGRASVRSILFLVADIARRFDTSLADFRDKLLAAGKPKMVVRIALARKLLVRLNAKMRDKRRQLATTA

SEQ ID NO: 335498 - protein, 356 aa, unidentified
MEYGAIDLHKKESQVRIITADGAVIDRRILTTRDRLTAVFGGRARMPILIEASTESEWVAQHLESLGHEVIVADPNYGAMYARRSRRVKTDRRDAVALADACQHGNYRPAHRRSARQRIVQSMLNVRRELSDSRTRGISVARAITRAGGFRVRSGRAETFLERLAALELPASMTATLLPLRHVLDVLDDEIAIADDQFEKVAAEDPVTTRLMTVPHIGPITATAFVAALDDAARFDGAAQVTSYLGLVPREYSSGEHQHRGRLLRSAHPHVQSLLVQAAWRISRSSDAKTAGLRAWADAITHRRGKKVAMVALARRLARLLFAMWRDQTEYQAKRVPMIRRPAATIRDGAAAAAVV

SEQ ID NO: 335499 - protein, 390 aa, unidentified
MEARTVNNLLPAAPHHDAVGCLVAIELSKKSWIVAVNTPLADKISRHTLKPGDGKELLDLCERIRTRVARETKRRVEIVSCYEAGYDGFWLHRLLEAHGIRNYVIDPASLQVDRRARRAKTDHVDVERLLRSLMAYLRGEPKVWSVVCVPSVAEEDDRRLNRERGRLINERIQHVNRIKGLLAIHGIYDYQPLRRDRMLRLERLRTAADGQTLPPRLKAEILRELQRLELILGMIKTIEAERDAIASPKTETEHTNAKKIQDLAKIKSIGPEFATTLIGEVLYRSFDNRKQLASYVGLTPAHFQSGAMCRDQGISKAGNGKARTVMIELAWLWLRHQPDSPLSVWFRERVGKLKGRIRRITIVAVARKLLIALWRYLETALVPKGAILKA

SEQ ID NO: 335500 - protein, 384 aa, unidentified
MKQVIIGVDPHKLSATIEVVDQHEKLLGSGRFTTDRAGYAAMRKYAATWPERVWAVEGSNGAGRPLAQRLLEDGERVVDVPAKLAARVRLFDTGHNRKTDAHDAHAVAAVAVRTKTLRVLALDGELEALRMLTDRREALTRRRVQTVDRLQALLAELVPGQAKCDITTGQAKAMLASVRPRDIAGKTRRRIAAEELAELVAVEAKIKTATAELKAIVLARGSHLMDIHGVGPVVAARVLADTGDVTRFADRNRFASWTGTAPLDASSGEQNRHRLSRAGNRRMNHMIHIAAISQIRLDTDGRAYYRRKRAEGKKPLEALRCLKRRISDAIYRQLLTDAEAAAGTGPGGHCGATLQSSAVDLPPHIDTSDQPLPGPAGKTLRPTG

SEQ ID NO: 335501 - protein, 363 aa, unidentified
MEYIAFDAHKHYTLASVARPDGRLVREQRLAHERGAFQQFLARCEPGSPVALETVGNWYWIVDEIEGAGCLPKLVHARKAKLMMGQINKTDKLDARGLNTLQRNGTLPTVWIPPGELRDQRELPRTRMVLVRQRTQLKNRIHATLAKYALHDLEVTDLFGVRGRALLRQRLDLLPPHTAYATGQLLEQVESLDRQVTGFEHRIKSVFKPTLAIQRLTTVPGVGLTLAVVIALEVGDVTRFPDAERLASYAGTTPRVRASGGKTRYGRLRPDVNRYLKWAFIEAANAICLMRRRHPHRHVSRLYERIARRKGHPKAIGAVARHLAEATYWLLSKQEAYREPQAAAVSSTGDKRDFAMSSRKLEF

SEQ ID NO: 335502 - protein, 382 aa, unidentified
MFILAIDVSKSSLDYFSNFIGSGSVKNSPQGIFDLFSKASSCSNDFILVLESTGIYSFDVASYFYNNSIKVFFVKPDNLKSYRKLLNRPKTDKIDAQLIFDIALKFHDSLIPYVSYSEIITELRHLTRLYLKLNEDIARLKLRLYSYVSLYFPDLDFKLNKTFSSLLKDFTIEDIAEKPIDELFEYIASVSKHRVSANTLAQKLKDLSKNALRLRPKPSNSLRLSILSTLELINTYEFQIKSIKSEISKLIKRIPNTLTTVNGIGDITAAGIIAEIGDINRFKNASSLASYAGLTWSIHQSGNFVAQDTFLKKNGNKYLRTYLVLTANSLRIYNPIFKEYYRKKYKESYKHHHMRALILSARKLVNLVFYLLKNNVPYVPMK

SEQ ID NO: 335503 - protein, 347 aa, unidentified
MRFYTRQHKYYCGVDLHARSIYVCILNQEGAVLVHKNLRAKPDAFLAVIAPFREDLVVAVECMFTWYWIADLCAREGLTFVLGHALYMKAIHGGKAKNDRIDSHKIAHLLRGGNVPFSYVYPEAMRATRDLLRRRNFLMRKRAELLAHIQNTNSQYNLPDIDGALRYPANREDLSERFTDDSVKKSIETDLALIDVYDRNLKEVELYLTRHAKVDDPNSYHILKTVPGVGQILGLVLLYEIHDIARFPSVQDFVSYCRLIRCSKESAGKKLGTGGRKIGNAHLKWAFSEATCLFLRGNGAAQKYLARLESKHGKGKALGILSRKLGTAVYYMLKRQEAFDMNKFFET

SEQ ID NO: 335504 - protein, 388 aa, unidentified
MTGNRRCIGLDVHREFAQVAIWQGGTVTQAGTFATTPEGVREFAAGLGPADEVALEATGNTWAIATVLASRAGRVVVSNPARTRAIAEAKVKTDKVDAAILAQLLAADFLPPVWMPDAATSALRRQVLRRAHIVRQRTRLKNQVHAILHRNLVPRCPAADLFGIKGRTWLAQQDLPPDEQAAACALLRQLDFHAQELTLIDRDPGQAALGRPEVLRLMTIPGVDATVALSIVAAVGDFTRFRTPEKLVSYLGLNPRVRQSSGQPASHGRITKAGPAHARGMLAEAAWSASKAPGPLRAFYQRVRARRGMQVAAVATARKLAVLCWHLTIKGEDYAFALPSLIARKQRKLELRAGAPPARGRKGDAAPYSLAAVRAACFRWSDGQSDRR

SEQ ID NO: 335505 - protein, 339 aa, unidentified
MKKKPEKKSPAGGHLGLDLAKDKFDAVLRTARGTLQHKVFANTADGLGALGRWLSEHRTGKVICVMEATGIYWEEVTAWLHARGHTVHVLNPAQARRFAQSQLCRQKTDAVDAALLCRMAQIAVECEFTVWSPPAGEVLVLRRLSRARAALVDECAALRQQRLECREPAVRKAFDAVIATLVAQIARLLKAMKDHVAAHAALAEDIALLDSIAGVAFASAAAIRAELAPLPAEADARQAVAYAGLNPRQWQSGKSVHAQSRLSKTGNARLRKALYLPALTGWRCNPLLKAFAARLLSHGKKKMQVLGALMHKLLAHCRGVLKTRQPFDPAWLEAEHAGA

SEQ ID NO: 335506 - protein, 358 aa, unidentified
MKIIGCDFHPSYQQIAMLDTETGELWEGRLEHEHGQARRFYEALRGQTVRVGIEAVGNSQWFEQMLAELGHELWIGDAAQIRRLVVRKQKTDPRDAKHILDLLLDGRFPRLWVPSRQMRDVRQLLRHRQKLVEIRTQVKNQLQHLALNQGVRRKSRLWSVQGRAVLEQLPLEGWTARRRSDLLVMLDRLEEQVGELDRAVRAEAEQRPEVRLLMTHPGVGPVVGLAYALTIGPSSRFRRGKHVASYLGLIPGEHSTGGRQKFGPISKQGNTMMRTLLVEAAQTAARFDEELRRDYSRLKAKKHSAPAKVMVARKLAVRMYWMLRENKTYTQLYARRPVARMQGSSGHSVVAGGDRSLE

SEQ ID NO: 335507 - protein, 320 aa, unidentified
MAQQGRIVGIDVAKLKADACIRSLQLRLSQPSTAQGQQDMITWLRRNEVGLAVMEASGGYERLWAEALRAAAIAVRIVDPKRVRYFAKSAGRLAKNDPIDAEMIAWFAETFAAAAEPAHDADRDALNRLVTARRLLVRLATPIRQLGEHGQPRVVENAQRAILKTIKAQLAKLEAAIEAKIAANAQFLARRAIIASVPGFGDHFVAGALAWLPELGRISNKAAAGLVGVAPYDDDSGQHRGERHIKGGRRDIRTLLYMAALGAATRHNPVVMAYYKRLRAKGKKTKVALVACMRKLVVILNTMLARGEMWNPTPRTTAVA

SEQ ID NO: 335508 - protein, 369 aa, unidentified
MQDDITVFVGLDVHKDCIAIAAASAGRDAPRFVGTCGPELRELLKALDHQGERTHTLIAYEAGPSGFALARQLATHGWRCQVIAVSKTPRKPGERIKTDRRDALALARYLRSGDLTPVVIPDAHDEAIRDLSRARQDAVRARLKVRQQLKAMLLRQGKPFPGKTSWGAAHERYLARVAFDHPAQQIAFAEYRSAVMDNHERVERITAALREQVQHWRFRPVVNALMCFKGIDFIAAVIIVAELGDLHRFEHPRRLMAYLGLVPSEYSSGTARTQGSITKTGNTHVRRILVESAWCYRYSARLSRPVAERQLQQPKLVRDIAWRAQLRLCSRYRRLCGRGLHSNKICVAVARELAAFIWEAARHVQAPLH

SEQ ID NO: 335509 - protein, 316 aa, unidentified
MKNECWVGVDVCKAQLDVFTSSTDCVKGFANDDAGIAQLLSALMAVSPTLIVLEATGGLERALVAQLLAAKLPVAVVNPRQVRDFARATGQLAKTDGLDARVLARFAAAIQPAQRAIPDEAAQDFADQLARRRQLVDMLTMEKNRIQQTPNKAVRKDIKTHIQWLQNRLRATEEGLRRAVETSPTWQAQRDLLSEVKGIGDITALTLIGDLPELGRLDRKRIAALVGIAPLNRDSGTQRGRRGVWGGRATVRHTLYMATLSAIRFNPTLRAFHTRLRAAGKAKKVAIVACMRKLLTILNAMVRDKAPWREIHAQPT

SEQ ID NO: 335510 - protein, 431 aa, unidentified
MKEMERQIRAWIGVDWADEKHDVSLYEEGTGKTEQYEIRHSPEALQEWLGQLRSRYGNDGYVAVALEQGRGALLTALMNCEFLVLYIINPKSVSSYREAFYGSGAKSDPVDAELIREMVRHNPTRFRAWRPDDVLTRSLRLLTEGRRHLVDQCTALTNQLTSLLKGYYPQGLHWVSKLDTAWACDFLEQWPTLQHLQRSSRRQIIGFSERHPRPSIDLEQQLIEFRQAQPLTQDAAVLEYSALMIQALVPQLRALMASIGDFDRKIAEVFRKHPDRPIFESFPGAGAALAPRLLAAFGTDRDRFGAATEMQELSGIAPVTEQSGTKRWVHWRLACPKFVRQTFQEFAEHSLRWCGWAKAYYQLQIQRGKTHQAAVRALAYKWIRILFRCWKDRTPYRDEIYSKSLVKHQSPIAPMMVAVVDKRVRAAASTT

SEQ ID NO: 335511 - protein, 451 aa, unidentified
MAKAKKRKHRKLERNLPVMRPNAAGIDIGATEIFVAVPADRDTESVRPFPTFTQDLHELADWLQRCRVDTVAMESTGVYWIPLFQILEGRGIEVHLVNAQHVHHVPGRKSDVMDCQWLQYLHSVGLLRASFRPEQAVCEIRSLMRHRENLVQMACVHVQHMQKSLDQMNLQIHHVISDITGVTGTAIVDAIVAGETNPEELAKLRNYRIKASMETVRKSLVGDYRPEHIFTLTQSLTAYRYYQQLIADCDREIQERIERFQNHADPSAPAESCDKSSLTTNSTFDLGSHLERIFGVDLTLVPGFDVLRIQTVFSELGVDLSGQFPTEDAFSSWLNLSPKDGFSAGRRIRGPKIKTKNRVTQVFRMAAQSLHNSQSYLGHYYRSQRARHGAPKATKNTAHKLARIFFHLVTTHQPYDETVFAKLEARNHQRQFRKLQSLAKQMGYSLVAATT

SEQ ID NO: 335512 - protein, 422 aa, unidentified
MLGVGIDWAEAFHLVALGHPDEGVIQIRRVEHTPAAVDQLIAQIAALEPDPAEVRVVIETRHGLLVERLLDAGYVVLPVNPDLVARRRGPARKKDDAEDARIACLLALDRHTALRPLIPHGELAAELRAIARDDERAARDQRRLLNRLRQDLLVTYPTALAIAGDNLGAPTVLKLLERWPTRDLLAGTSRDELVAFARANRHGWPERLADKIITALTGDQFIPRDYLVRAKADTIRLAATQLLAIATQRRAWERRMGELLWGAPRAGRATQPREDQPGQALPGGKVYLSFPGLGDRLAARVAGEIGDHPQQFQSPNALACYAGKAPVTRRSGRSELVVATRLACNRYLADAVQQWAFCSLRCSRWARDFYDLQRARGKTHHAALRALGNRWLEILWHCLMRGQLYDEATHTANRNRALSKAA

SEQ ID NO: 335513 - protein, 315 aa, unidentified
MSDVPCFVGIDVAKAQLDIALRPSGERWAVPNDAGGVVMLVERLQALHPTLIVLEATGGLERAATAALATADLPVVVVNPRQARDFARATGQLAKTDALDARALAHFADVIRPTPRPLPDAQTQELRALLGRRQQLIGMRTAEQNRLAGTNARLTKDIAAHITWLNAAIATLDDDLETILRASPLWREKDDLLQSAKGIGPVCARTLLLELPELGTLTRQQIAALVGVAPLNCDSGTLRGRRMIWGGRAHVRTVLYMGTLVATRFNPQIKVFYERLLAAGKVKKVALTACMHKLLTILHAMLKHRTPWQPQEVQS

SEQ ID NO: 335514 - protein, 409 aa, unidentified
MVVHAAPVTRSTVVVAIDVGKNEFAVAVTDAARARLLKPRLGCPMTASSLRGVIETIQRVLPPGAQVRVGIEAAGHYHQPLLAAGFWPASWDLLELNPGHVTEQRRVLGKRTIKTDAVDLEAMTELLLAGRGLPARRRDTVLTELTAWSAHRTGRIQLRTATKNQLLGQLDRSFPGLTLALPDVLGTKVGRLVAAEFADPARLAALGSSRFVRFGATRGLQIRRPTADKLIGAAKNALPMPDAAIARAVLAADLALLADLDAQIEAATAELARLVPHSPFRPLLTVPGWAAVRAGNYGGAVGDPARFTTSRQVYRSAGLNPIQYESAGKRRDSVISREGSVELRRALIDLGVGLWLNDPAARQHATELRARGKKGPVIACAMAHRANRIAFALVRDQADYDPTRWIRED

SEQ ID NO: 335515 - protein, 405 aa, unidentified
MNAVGIDVSKGKSTVTIRRPGDVVLMSPCDIPHTQSGINGLIEKLRNLDGETKVCMEHTGRYYEPLATWLTDAGIFVSAVNPILIRDFGDDSLRSPKTDKADAKKIARYTLDRWTYLRQYGNMDKTRNQLKTMNRQFGFYMDQKTAMKNNLIALLDQTYPGANTFFVSPSRCDGSQKWVDFVHTYWHVDCVRNQSLKAFIAHYHNWCKRKGYHFSIDKAEHIYHLSSDLIAVFPKDDNTKMLIRQAVTMLHTASVTIESLRQKMNAAASTLPEYSIVTAMNGVGPTLGPQLMAEIGDVTRFTHRGALTAFAGVDPGKNDSGQRTQKSVRTSKKGSPILRKTLFQIMDSLIKRSPIDDPVYAFMDKKRAQGKPYYVYMTAGANKFLRIYYGRVKEYLSTLSKNEES

SEQ ID NO: 335516 - protein, 349 aa, unidentified
MKAEQFIGLDTHCSFSEMAVVNARGKLLERQTCPTTIPALVAALESVRRPRQLTFEEGPLADWLARNLRGHVDRLVVCDPRRNALVAKEGDKDDPIDAEKLANLFRGGYVKEVHQPESLDRTLLKQHVSFYHDRVRERVRQGHQLVAMMRRHGVFASIAAVADEDERRQLWKRLPQRKVLHQDLDYVLKVYQLLCEQEGQLRAELVRLARRQEPVRRFQQVPGFGWIRALTFYVYIDTPARFASKSALWRYCAIGLERRGSGKGAKKTRLAKGGNRKLKDVLLGAAKSAALRGDSPFADKYRYWTREEGLHPATARRNVARSLATTLWSLWKNGNQYDPAKVEGGGTRS

SEQ ID NO: 335517 - protein, 344 aa, unidentified
MENYAGIDVSLELSSVCVVDAHGKILKEAKVASEPEALVAFFRTLGFAVKRIGLEAGPLSQWLHAGLKRAGFETVLLETRHVKAALSAMTVKTDRKDARGIAQLIRMGWFRPVHAKSIGAQEIRALLVARKQLLVRLIDVELSIRGILRGFGLKVGPVTRKNFEARIRELVAGQATLERIAIAMLSARLALKAEYGRLHKAVLAIVRDDAVCRRLMTVPGVGPLVAITYKSAIDDPHRILKSKAAGALFGLTPKKYQSGEKDVTGGITLAGDEIVRTALYEAANVLLSRITRFSKLKRWGMDVAKRRGSKRAKVALARKLAVILHRIWVDGTTYRWAEAGSIAA

SEQ ID NO: 335518 - protein, 361 aa, unidentified
MKKVSKESPKMKAGIAKPEITVGLDLGDRYSHYCLLNGDGEVMEEGRVQSTEAALRRHFEGEDGLRIALECGTHSPWVSRLLNALGHQVIVANARQIPAITGSESKNDRNDAEKLARFAAFDPKLLSPLEHRSEERQVDLNLIHARSTLVRARTMIVNALRGLVKSAGGRLPACSTDSLPACARAAIPLALSAVATPLLEQIGLLNAQVDGMDKQIEKLSAKYPEIVLLRTAPGVGPIVAAAYVLTLGQPDAASNRSAGAFLGLRPAQNQSGAADPQRRISKAGDSFLRSLLVQSAQYVLGPFGPDSELRRWGLKLAATGGKRGKKRAIVAVARKLAVVLHAVWRSGQRFQPFPQQTAVAA

SEQ ID NO: 335519 - protein, 486 aa, unidentified
MAARKNAKAKADSAGDGVQAHGGEAAEVSDEVTQVVEFAAGIDVAKGSGMVCTRVPGSRAGRRRQKVWRVNATFSEVTALMDHLVCEGIQRLVLESTSDYWRIWYYLAEAAGLEVWLVNARDVKHLPGRAKSDRADCVWLCKLNERGMLRRSFVPPRAVRDLRMLTRTRSRLAQDQARHQARVEKILEDALLKVSSVISDLFGVSGRLFLDALVAGERSPAALAALGDYRLKASKAMLEETLTGQFRDIHAEEIAVHLRLIDAINAEITGLDAKIEQLLPQVPRTAPACTACGLAGGGHAPDCTDLGALVPGLADRLDEITGIGAVNARVLIAELGTDPSQFATPGHAAAWARLTSRMMQSGESSWNGRAGKGNRYLRGALGQAVMSAAKTDTRLGAMYRRIARKRGKQKAIVAVGRVICEIAWILICDPGARYIELGPDYYQPRNARQRTRSSIRQIEKDNPGKKVILIDDPATAPPAGPAERAA

SEQ ID NO: 335520 - protein, 430 aa, unidentified
MKSNTQNAKIEAITEKTLVLGIDVGSETHYARAFDYRGIEYSKKPFKFSNTEAGFVTFKEWILDLKERHEKDKVVPGMEPTGHYWFNLGKFLQDNEMKPVLVNPHHVKKSKELDDNNPTKNDRKDPKVIAGLVREGRYMIPYLPDGVYADLRTASNIRFQLQVELTRIQNRISRWFNIYFPEYKTVYGKPDAKSGMLILKAAPLPEDILTLGIDGVNQIWRDAKLRAVGKARAKTLIEAAEHSVGSKEGAVSARMEIRMLLEDYESRNTRLQEVMVLIEELVRKIPMAEKLLEIKGVGIRTVSGFLAEVGDISRFNNPKELQKLAGLALVENSSGKHKGETTISRRGRKRLRYLLFEVAMSLVAKNPEFRELHNYYTTRRLNPLKKMQSLMAIAAKLIRVFYAMLTKGVDYDPKKMVSDIKRPAVYLQAA

SEQ ID NO: 335521 - protein, 345 aa, unidentified
MKITTVGIDLAKNVFQVHAVDERGRAVLRKQLRRDQMTAFFVKLPPCLIGMEACASAHHWARTLHKFGHTVRLMAPQFVKPYVKSNKNDVADAEAICEAVGRPNMRFVPIKSVEQQSVLSLHRVRQGFVRARTAQGNQIRGLLGELGLIIPKGIVNVAKRVPTVLEAAGEELPASFRQLIERLTKHLKELDRQVDELEAQIKAWHRGSELSCKLEKIPGIGPLGASALVASIADANSFDNGRQLSAWLGLVPRQDSSGGKPKLLGISKRGDVYLRTLLIHGARSAILAAQRKSVNTNVWLAKLLDRRHPNIAAVALANKNARTVWALLAHGREFRADYASEVSAA

SEQ ID NO: 335522 - protein, 343 aa, unidentified
MQTITTIGLDIAKSVFQVHGVDAAGQVIIRRQLKRRAVLAFFQKLPSCLVGIEACASSHYWSRELQALGHTVRLMPPAYVKPYVKRQKNDMADAEAICEAVTRANMRFVPTKAPEQQSCLMLHRTRHLFIRQQTAVTNVIRAHLAEFGIVAPVGRKGVTELLQVVADPSDKRVPEVARACLAALGNQLLSIKEQIVEFDRMIMDVYRSNQTSKRLHYIPGVGPLLATALVASVPDPRVFRSGRNFSAWIGLVPKQHSSGGKDRLGSISKQGDRYLRSLFVAGALSVIRYAKIHGTKHRPWLTALLARRPTKVAAIALANKLARMAWAMMAKGERYRQPVALAA

SEQ ID NO: 335523 - protein, 356 aa, unidentified
MGKRITTSSGLTIGLDLGDKHTVGCVLSHEGEVLETFRMATTPAAVKRTMEGFAQSRVVLEVGTHSPWMSRIVEAAGHELIIANPRRVRLIAENDSKTDEVDAELLARLARVDPELLKPIVHRGEQAQRDRILLLARDGLVRARTQLVNQVRGFAKSLGHRIPASSTEAFPRRVRERFSEEVFPGQSAMLALIDRLNEEIAAMDREAERLCQERYPETAMMRQVKGVGALTSLAFVLTVEDPARFAKSRSVGAYLGLRPRSRQSGEQRPQLRITKAGDALARRYLVTAAQYVLGPFGPDTELRRCGLKLAERGSRAAKKRAVVAVARKLSVLMHRLWITGEEYEPIGYGQREREAA

SEQ ID NO: 335524 - protein, 315 aa, unidentified
MEQPPSTPSFVGIDVAKDRLDVHVRPAAETFAVARDGKGLEALVAALRGREVALVVLEATGGFELTVAAALAGARLPLAVVNPRQIRDFARATGRLAKTDALDAEAIARFAEAIRPEPRPLASEDAQALSELVARRRQLVEMIGMEKNRARQARTKRVKKSLAATLKVLEAQLATLDGDIDGAVRGSPAWRVADDLLTSVPGIGDVTARTLIAELPELGQLDRRRIAALVGVAPINRDSGQWRGHRAIAGGRVGVRNTLFMATLSAIRWNPVIRQHYARLVDAGRPKKLAIIACLRHLLTILNAILRTKTPWQNA

SEQ ID NO: 335525 - protein, 480 aa, unidentified
MAQHSKRKQKKVQSMPVLQPNAAGVDIGAKEIFVAVDGDRDRNPVRHFSTFTPDIHKAAQWLKEVGIESVAMESTGVYWIPVFEILESYGFQVLLVNARHVKNVPGRKTDVQDCQWLQYLHAVGLLRGSYRPPKEICAVRTLRRHRENLVKTAVSHVQRMQKALTQMNIQIHHVISDITGVTGLAIIDAILAGERDPRKLADLKDPRIHAEKKIIAKALIGHYLPEHLFTLKQALECYRHYQKMIVDCDHEIEKCLQKIENHGKSPQEPYTRPAPKARKKRSHDPNFDLGSYMARILNTDLTQVEGIGATTAHTFFTEVGTRIELLKFPTEKHFSSWLGLCPANKISGGKILSSRTRKVENKLATALRMSAQSLWHSQSYLGDYRKMKARHGTPKATTAAAHKLARIIYAMVKYQIPYDKSIIEEREKFNKERKLQYLHKQAQSLGFQLVPAWSYLKDTNYLITTHVTPNASISTDRLTL

SEQ ID NO: 335526 - protein, 386 aa, unidentified
MKTVAGLDVHKDSVYLCILRENGEKIERVYGVLTPQLDSMRDFIAENKVSEVAMESTSVYWIPIWRVLVDSFELKLVNPYFIRQLPGRKSDVKDAQWIAECVMKELIRGSFIPSPLVQRLRLYDRRIFEINAELVRKYSKIDAILQRCNIRLSNYVSNTDCKSYKAVVKQISEGVTSPQELLRHVHKRIINKHGEDTILAALIGVVSDAEIDMLAQYVAESAILEDNKNKCIEKMREICNSEFKEQMKNLQEIPGVSERSALTVLAEIGPDVNAFPSAKHLVSWCGFNPRNDESNKKIKSNKITHGNRFIRIASVQCAWAASRTKDCYFSKFYAFHTQVRKKFKLKVVVAVARKVLVCIWHILKFNVPYKDFEPQKSVTKDCTQFA

SEQ ID NO: 335527 - protein, 343 aa, unidentified
MTISILGIDIAKKTFQLHGADSTGKAVMKKRLPRHKLAAYAATLPTCTIVMESCGGANYWARVFQRSGHAVKLISPQFVKPFVKTNKNDANDALAIVEAASRPSMNFVPIKQVEQQDIQSIHRIRTRVVKNRTALINEIRGLCLEYGVMLTTGAAKVKPSLCAAIASCDNELTTSSRESMQDLYEELVDVEARLKKLDSKVRQLCRQSESCQRILKVPGVGELTATAIVAAVPESHEFRNGRHMSAWLGLVPRQSSSGDKQVLLGISKRGDRYLRTLLIHGARAVLSHRKVLDNNYDRWVANKKATLSHNKAAVALANKNARIIWSMLNTGEEFNYGVQRTAA

SEQ ID NO: 335528 - protein, 344 aa, unidentified
MEYFAGIDVSLEESSVCLVGAGGEIVCEAKVASDPAALVEFFREIGFSVSRIGLEAGPLSQWLHDGLRQAGFAVVLLETRHVKAALSAMVVKTDRKDARGIAQLLRMGWFQPVHAKSGAAQEVRALLAARKLLQSKLIDVELSIRGILRGFGLKVGRVSKGRFEARVRELAAGHVTLEGVTAALLRAREALRAEFFAVHRRILAIVRSCPVCRRLMTAPGVGALVAITFKSAVDDPGRFPRSKSVGAHFGLTPKRYQSGETDVTGRISRIGDVAVRTALYQAAHIILSKAVPFSSLKHWALAVARRRGLQRAKIACARKLAVILHRMWCDGTDFRWAKQTRAVA

SEQ ID NO: 335529 - protein, 343 aa, unidentified
MLHYVGLDVSLDQTSLCMLDAAGRIVRETKIDTDPDVIAAYLGQTALTVERVGLEAGPLSQWLHAGLVAHGLPTICVETRHTKAALGAMPVKTDRGDARGIAQLMRTGWFKAVHVKTQQAQEWRLLLTQRRLLVNKLIDVEAEIRGTLRGFGLKIGRVGRAGFAVRVRELLADRPSLLRVVEPVLLVQAALLAQREALHRMVLQTVREEEVCRRMMTVPGVGPITALAFRATVDQAERFTRSRDVGAHFGLTPRRYQSGETDRSGTITKTGDALTRHALYEAATSMLVHATKPSSLRRWALAIAKRRGLQKARVALARRLAVVLHRMWRDGSVFHPQGRPAMA

SEQ ID NO: 335530 - protein, 315 aa, unidentified
MSIVGGLDIHRRQLTFDYVDTASGELKRGQVVPADRRHLAVWLRRFDGVTDVAFAAEGCTGWRYVVEELQRAGVVAHLAEPADTAAARGRKKRAKTDRSDAKLLRELLEGDRVPECWIPPWQVLEYRALLELYHDLRREHTAWVQRIHAVCFHQGVEALGAGDINTEDGRARLSHLAAAGLSPAGQVQVATSLHMLETLETHLDDLRRRLVGVARHLRGAKALTDALYGVGPITALVLCCWLGGAQRFSSSRKAVRFAGLDITVYSSAGKRSPRAPVPARAPGVALVPVRGREDPRPHHRARPPLLRAGQGTPRR

SEQ ID NO: 335531 - protein, 315 aa, unidentified
MTERLIGVDVSKDKLDVAVRPDGERWQTANTEEAFPELIARLKALEPELIVIEATGGLERAVVAAMATADLPVAMINPRQAREFARATGRLAKTDQIDADDLAFFGEAIRPEVRPLPEADVQELSALNARRQQLVEMITAERNRLHTALPAARPSIREHIRWLQREKERIESKLQRHIDQNLTLRRKFKIMCSAKGVGPATSFSLLSDLPELGKVNRKEIAALVGVAPFNRDSGRWRGKRTTWGGRASVRSALYMAALSASRHNPVIRAFYERLLEAGKPKKVALTACIRKPLVILNAMIKNGTMWDPNYAVSGV

SEQ ID NO: 335532 - protein, 354 aa, unidentified
MIIIGADYHPGFQQIAFVDTDTGECGERRLEHREDAEKFYRDLAAQEVKVRVGMEASGHARWFERLLAELQVELWIGDAAEIRTKRVRKQKTDRQDAQLILRLLLENRFPQVWVPNWENRDLRQLLWHRHRMVQARTQIMNQLQAVALNEGLRCKKRLWRDAGREQLEAFRLAPWASRRRHDLLELLDRLTPTIAELTQAIEQEAEKCPAAKRLQTHPGVGALTALAFVLILGRADRFECGKQIASYLGLVPSEESSGQRRRLGHITKQGNSLLRFLLVEAAQVTVRSDQEWRGRYFHLALRRGRKIAKVAMARRLAVRLYWMWRKEWNYQQLTKFGSHAGEPGNPDGVQSSTE

SEQ ID NO: 335533 - protein, 348 aa, unidentified
MERYIGLDAHATSCTFAVLSERGRRLDSAVVETNGRALVKFLRGVPGNKHVCLEEGTQSAWLYEVLRGHVRELVVTHAHERNRGPKDDQRDAFHLANSLRLGALSPVYKDAGQMGELRAHADVYAKLVTDVVRAQNRLKALFRSRGVQVVGGAVYTQRDRQAYLDELARPYRGSALILYSELDALRAIKKEAEKQLIAQSHTHCISAVLQSCPGMGPIRVAETIPIIVSPYRFRTARQLWAYSGLAIVMRSSSDWVKTPHGWERAQTVRTRGLNRNYNRRLKNIFKGAATTVITQRLEPMVGDYQRALAQGTKPPMAKLTLARKISATVLAMWKNKEAYHPERYRPTP

SEQ ID NO: 335534 - protein, 340 aa, unidentified
MQVSTVGLDIAKHVFQVHGVDEHGRTILRRKVSRGQLLKLFAGLEPCLIGIEACATAHHWARELGALGHEVRLMPPAYVKAYVKRNKNDAADAEAICEAVTRPTMRFVPIKSAEAQSVLMLHRARHLLVRQRTAQASALRAHLAEYGVVAARGISRLRDLLPVLETRAGLIPELARQTLLLIAQLIEALTIQIRQIDTELLHWHRTNPVSQRLESIPGVGVITATALAATVLNAKAFRSGRQFAAWLGLVPRQNSSGGKDRLGGISKMGDRYLRHLLVVGATAVVRYTRRKTTAVSLWANRLLQRKPARLVTVAVANKMARIIWAVMARNEIYRRTPITV

SEQ ID NO: 335535 - protein, 346 aa, unidentified
MILGVDTHLDIHVGAVISQAGKQLGTHIIQTNQTGYLELLDWDRSFGILERAGTEGTGTYGAALTRYLIKNGIYVVEVNRPDRSKRRLEGKSDPLDAENAARTVLSGSSKAIPKMQSGACEALRIISVARRSAIKARTQAINQLRALLVSAPQDVRDKLWKSKPHECVTACINSEVSEYSPLRIALCSTLRSLAKRWKALTEELNKLDESLDKLTRKDASNLRSQFGVGPQTAATLLAVAGDNPERLKNEAALASLCGVNPLPASSGKTVRHRLNRGGSREANNALWTIALVRMRSDPRTRIYVDRRTGEGLSTKEILRCLKRYIVRELYPLILSDLAYANRPLLT

SEQ ID NO: 335536 - protein, 406 aa, unidentified
MKPTYFLGIDAAKHKIRAALSDRSEHVLFEKDLSVRATGLRQLLAAIKRQVNAPEQLLVLIEATGLLHLNWSAALTKAGYAVAVINPLIARRLYTLQNSIRDNKSDPIDARGLCTIGLLHGEKLLIHYRFSLRPEQFTLQRAQSVRKALRSALTNLKKTYQSLMDLSFPELGGLLQLDGVGIRQLLIQAPTPAAIAGKRLSTLEKNWMVRPKAAALKALAADSMADPDLAAASAPALVALLRSIATLEARLRLLDQQIQQLARTNMDPQTKALIETIPGFGPVNAAKTLAWLPTEILHSGSNRKVAARLQAFMGNDPRLRQSGQWKGHTKMSKRGVEMLRTAFFQSAFSAAHNDPELRTYYQCKRAQGKTHEVALSHLMRILTRRLVAVLRSGKPYQSHYNLKNAA

SEQ ID NO: 335537 - protein, 342 aa, unidentified
MRIVVLGIDLGKNLCSLAGLDETGAVILRRRMKRASVLPFTAQLETCTVAMEACCGAHHLGRQLVAQGHVVRLMSPAYVQPYVKAQKNDERDAEAIAEAATRPTMRYVEIKSEAQLEVQSLHRVRGRLVAERTALINQLRALMLERGIAVPQGRSKLVRYLPEILADERNGLGPRLRRLIEDMREEWRSIDGRIKGYDDELTERVRNEDTAKRLIKIPGIGVLTATALVAAVGNAQAFSCGRDLAAWLGLVPRQATTGGKPRLLRISKRGNGYLRMLLIHGARTALPGLAKKDTPLGRWVKALLARAHRNVVTVALANKLARIAWAVLARERQYVTVQAIGK

SEQ ID NO: 335538 - protein, 343 aa, unidentified
MEQYAGIDVSLESASVCVVDSTGRIMREAKVVCEPEALIAWFTKLGVSMARIGLEAGPLSQWLYARMREAGLLVELLETRHVRDAFKAMPVKTDRTDARGIAQLMRLGWFRSVHCKSLPAQELRAILTARKLVQNKRHDLEMSLRGILRGFGLKVGQTTPRNFEARVRELADGQPTLLVVADAMLLARAVLVEQLGKLQKRLVSLARQDTRARLLMSTPGVGVLVALTYVAAIDDPARFRSSKAVGAHFGLTPKKYQSGETDVTGRISKIGDASVRTALYEAANVILTRPVRGSLLKSWAMRVAKRTGMRKAKVALARKLAVILHRMLANGSAFVAGKAAAKA

SEQ ID NO: 335539 - protein, 357 aa, unidentified
MRFYTQQPPFYCGIDLHARTMYLCILDQAGETLLHRNMTATPEALLKAIAPYRDQIVLAAECMFTWYWLADFCAAHGIPFVLGHALSMKAIHGGKAKNDKIDAHKIAVLLRGGMLPQASVSPAEMRATRDLLRRRMHLARKRGELLAHVHNTNRQYHLPAIGKNIADKTNRDGVAERFAEPAVPKSIEVALALITYDDALLRDVELTIVKTAKHHDAHTLYLLQTVPGIGQILSLVLLDEIHQSDRFPRVQDFASYGRLVKCAKESAGKRSGTSGTKIGNAHLKWAFSEAAVLFLRDNPAGQKFLARLENKHRQGQALTILAHTLARAVYYMLQHKTAFDMPTFLHSSGRGVGKLDA

SEQ ID NO: 335540 - protein, 317 aa, unidentified
MTNVTFPQLIQRGCGIDVHLKVVVATIDGVGIQKETRSFNTFTSCLTEMKEWLLANGITHVAMESTGVYWKPVMRVLEEGIPNVWIVNARHIKNVPGHKTDKMDSEWICKLLLAGLLKPSYIPPKEQRQLRDLTRYRNKLIQTIAAEKNRMMRVLEDCNIKLSSVVANTSGVTATALIDMLCDGRKLTMADIESVYHKKLSASPQELLEACTGFVEEHHVYMLQMIRKSIAQTQGLVDELSKRIKDILIKYDNVLELLKEIPGFNTKVVEDLVSEIGLDMSAFPSEKHLASWAGICPGNNESAGKKKAEESLMVINK

SEQ ID NO: 335541 - protein, 336 aa, unidentified
MTHYCGIDLHSNNHVIVVIDDEDKRVLDKRVNNDLNSTLALLMPYQNSLQSIAVESTFNWYWLVDGLMEQGYDVQLVNTAAIKQYDGLKYSGDHQDAFHLAHLMRLGILPTGYIYPKEQRAIRDLLRRRLLLVQSAAQQQISIQSQIWRSTGHRLASHHIRHPEFQADMVDGYNRLAVDAGLAVLHSLQQQIERLEQAALSEVALSAPYQILQTITGIGKVLGLTIMLETGDIARFKRASHYASYCRTVDSLRTSNGKNKGKGNARAGNKYLSWAFSEAAHFCVRFDPLAKRFFERKKAKTNGIIAIRAVARKLARASWMMLKHQTPYEAKLMFPG

SEQ ID NO: 335542 - protein, 371 aa, unidentified
MNADINYDAYVGLDVHKDSIAVAVANPERNGEIRFWGNIDNTPTTLRRVINKIKKQTPNIQICYEAGPCGYQIYRQLTAMELSCLVIAPSRIPKSPTNRIKNDHRDAKELARLLRAGDLQPIWVPDKSHEAMRDLVRARTASKKDTKIARQRILSFLLRANRVYDKKNWTKRHRIWLANQSYSSASSQIAFQHYLQALEQAENRTEELEQEIMRLLPDWSLGELVTQLQALRGVALIVAVTVVAEIGDFTRFSNPKQVMAFLGLIPGEHSSGNHHRSTGITKVGNKEVRRLLYEAAWSYRSNAKVGNWMLSHRPDSLTQVSKDIAWKAQQRLCFRYRSLVAKGKKSQVAITAVARELVGFMWDIGRMPINH

SEQ ID NO: 335543 - protein, 346 aa, unidentified
MASRLLKQVVGIDVAQKELVVSIGKMDEQAVITVYANKIFPNNEKGFANLEVWINKQSIPQYPLRYVMEATGVYHERLAYYLAGKGYAVSIVMPNKISNFFKTLEIKTITDKSMSFAIAMFGLEKKLDNWVQPKRVFRTLRQITREREQLIAERTMIKNQLHAEQSEAFPGEDTIRRMMDRIKMIGEQLKEILTEIRTAVAQDKHLKQTLATITTIPGVGLLTATVIIAETNGFELIRSKKQLTSYAGLDVREKESGSSVKGKPKISKRGNKHLRKAMHLPALAAIRHSERYKAIFVRIVSRNSVKMKATVAVQRKLLEMVYTIYKTNKPFEKDYLQQNAQISENS

SEQ ID NO: 335544 - protein, 320 aa, unidentified
MRNAVGLDISQKTFDAAAIVNGQCKQALFDNSINGFESFKAWLDGFGCELHICMEATGNYFEDVADYIGQFYTVYVINPYKISEYGKSRFHRTKTDKQDARLIAEYCHTAMQKDLPARQKISIGHYRLKRLLALYEQLKTQKTAQKNRLKVAKDEFVRKIHQAQIQELDQHIQQVEAEIQAITNSNQDLKAVSDRLQTIPAIGKLTAAILTNYLLSGDFKTANQFTAFAGLNPQQKESGTSVKGRSSMTRYGNRRLKSALFMPAMVALNRNYFPDFVKRLNAKNKPKMLILGALMRKLLVVAYHVYKTQKPYNPQHYKPA

SEQ ID NO: 335545 - protein, 387 aa, unidentified
MPQANDLSRCLTTLDQDSTLIAVIEMSQSSWLVGGIVPGVNRQPLKKLAAAEGELLRRLHRWRDEATKAGRMINRIAVAYEAGRDGFWLARWLQKQGIEAHVIHPTSVAVSREHRRAKTDRLDTELLKRAFLGWLRGERGHCSMALIPTPEEDAKRPNREREGLVGERTRIVNRMKSTLARLGIRGFKPTLRRAPERLVTLRTPEGAPLPPNTLAELLRDMARRRFVIGQIREIEATRLQRLEQQHPEQGPHAMVRLLAQVVGVGLETADLLVHEILSRTLRDRRAVARYAGLTGAPDESGARRRENGLAKAGNARVRRSMIQLAWRFLMFQKDSALARWYRARTADARGTTRKTMIVALARKLLIALWRLVTTGEVPQGVVLRAAV

SEQ ID NO: 335546 - protein, 485 aa, unidentified
MKNKNIFTAQNQTLINLFKDAGHPDKVLCIPIDYAKQTHMALCCNGSGKVLKKAFPVKNTPEGITFLLEVVDKICRKHHIAREHVFFGGEDCGTFSLNFIYDLRAAGFLVMGVNAKDAKKQRENMQASTDELDLLSIATLLLNLKGSVAGGDLGAERALRVLTRHRKAQVRLCTATGNRIHQIVDQLFPGFLDETLSSIPPFSEASLYLMGDRFSPAQIASRQDKALLKQLKALGLQHAETALGKLKAYAKQVLVSPPELAGLLQTSLAGEINLYRCLNTNVSQIEREIAQQLAKTPGAILTTIRGIGITLASGVAAEIGPVETQSSTRRLSSYAGIIPRVKQTGGPEKGAKTGKVSRRCNHILKDYIVQCGNHLGQHGPVDLKEDHRRRGANKQHADFGLARRFLRMGMRLMRNNESYVPPELRSGATLEELQNYYRTLWPKLLDKWVKAGAVHTAFSEDNPLGQWRKRIEAIYEIELPLPKKN

SEQ ID NO: 335547 - protein, 386 aa, unidentified
MNHLSTFSVPDRTGICGDCATLFVSLELSRSTWVATSLALGSRKMSKHTLVGGDARKLLDLLGRLKSRAEQRMAAPVKVVAIQEVGLDGFWIHRLLEANGVESHVVDPASIAVPRRHRRAKTDAIDGETLLRTLMAWQRGEPRVCAMTVPPSPSEEDCRRVSRERATLLRERIRHTNRIRGLLFGQGITNYNPLHKNRRTGLEELRTGDGRALPAHLKAEILREIDRLELVLRQISEVEAERDEMLRPAQASSPATLLMRLKGIGAEFAGVLYLEGLFRHFENRRQLAAYAGLAPSPWKSGSVDHEQGISKAGNPRLRTTMIELAWMWVRYQPASALSCWFRQRVGSERGRIRRITIVALARKLLVALSRYINHGEIPAGALMKAG

SEQ ID NO: 335548 - protein, 424 aa, unidentified
MKPQPDVEFAAFVGIDWADTKHDICLQVASSEEREFAVLPHRADAIEAWVAALRQRFAGRPVAVSLELAKGPLVYALQKYDFLVLFPINPSTLAKYREAFTPSHAKADPTDAELALELLVRYRAKLKALQPQSAAMRMLLRLVEQRRRLVGDKNRISNRLTDALKQYFPDVLEWFQDKDTLLFCDFLTRWPTLKHVKHARKATLQSFFHEHHGRSQPRIDERLRAIKSATALTDDVAVILPNQLLVLALVEQLRVTLQAIDRFDAEIATVSQTLPDYSLFRALPGAGPAFAPRLLAAFGEQRERYQSAAEIQQYAGIAPVTESSGKKHWVHWRLQCSTFIRQTFVEWAGATIPRSFWAAAYYRQQRDKGCTHQAAVRALAFKWIRILYRCWQTRTPYDESTYLNALKRRGSPLLNSMVETAKNI

SEQ ID NO: 335549 - protein, 340 aa, unidentified
MDITTLGIDVSKNIFHVVGTSRAGKPLIKNRFTRQKLAEFIAQHPPCLIGMEACPGAQHLARKFEEYGHQVKLMPAQFVKPYVKSNKNDYNDAAAIAEAVRRPTMRFVTTKTTEQHDLQALHRVRERLVRTRTSVICQLRSFLLENGVAVRTGRVALAKALPDILEDADQPLSDRMRALIQGLREHWLFLDEQIKSVSNDLERIAKSRDDCRRLLTVPGVGPLVATALIASVGSGKQFKRGRELSAWLGLVPREHSTGGKQRLLGISKRGSSYLRKLVIHGARSCYLNMNRSQHKMGPWIDEMANRGTHRNVIVVAIANKLARICWAVMRDGDVYHCARA

SEQ ID NO: 335550 - protein, 405 aa, unidentified
MDGATPARVAGLDWASRLHVVCVLDPDGHVRARFQVPHTGKDLRGLSRRLAKLAVGRVAIERPDGPVVQALLDAGFQVVVIPSRQVKHLRTRYGSAGNKDDRFDAYVLADALRTDGHRLVPLRPDSPETAGLRAVSRARKQLVQARVALANELRANLEVAFPGAVSLFAEVDSPIALRFLGRFPAAERAAWLTQARLGGFLCRVGYCGRTTTTELYRRLVDAPDGLGGAEGEARAAVTASLVATLRAVRAQIQELDGEIVERLAAHADGHIFTGLPRSGRVRAAALLAEIGDCRQRFPDPTSLECLSGAAPSTRQSGKHTTVTFRYACDKKLRQAVMDFAGDSRHANPWAAHVYNQARARGHRHPHAVRILARAWLRVIWRCWQDGTAYDPARHGAYQRLIAQAG

SEQ ID NO: 335551 - protein, 312 aa, unidentified
MDAIVVGIDVSKDRLDVAVRPSGEMFVVRRDAEGLDALIARLTPLAPAAVAVEATGGYETVVAASLAAAGLAVVVVNPAQVRSFAQALGKRAKTDPLDAGVIAHFVAATKPQIRPLPDQETRFLADLVARRRQIVAMIVAERQRQKRLTNKRLQKSIARLIAALQKELSSLETEIDESVRGSPAWRDKENLLASVPGIGKVIARTLIAELPELGSLDRRKVAALVGLAPWTRQSGKWKGKSCIGGGRASVRANLFLGAMAAARHNPDLKAFRDRLLQAGKPKLVALVATARKLLTILNAIIREQQPWRSQTA

SEQ ID NO: 335552 - protein, 412 aa, unidentified
MTADMEVVYERACGIDVHKRGIVVCLITGQRKAETRKYGTLTKELREMVAWLKEERCQIVAMESTGSYWKPLYNIFELEGMEAMIVNAQHMKAIPGRKTDVNDAQWIAKLLRHGLLRASFIPDKEQREYRELTRYRNSRIEERAREINRLQKMLEGANIKLSSMVSDITGQSANNLIKLVVRQEELTLDKVAAVRNRRCKSSAQELLDALTGVISPLQRELFREVLQIIEEQTLQIERIEAMIEKYTTQEYDIAAQAIDEIPGIGRVSAEQIIAEIGVDMSRFPTANHLCSWAGLCPGNNESAGKRKSGKTRKGNKTLRKTLIQCAVSAINNKASFFSAQHQRLVVRMGGKKANVAVAHSMLIAIYHVLSGKAYCDLGAEYYTQFNREKKIRSHLKQLKKLGWELPCPAVAS

SEQ ID NO: 335553 - protein, 355 aa, unidentified
MIVIGVDAHKRTHTAAAVEEVSARSLGDVAAEADERGFRRLLSFAVDHGAERVWAIEDCRHVSGGLERFLLAAGETVLRVPPSLMANARKGARTRGKSDPIDALAVARAAIREPDLPRAFLAGPEREIALLVNYRSRLVSERTRHSKRLRWLLHDLDPDLEPASRTLSNLGTVRSLERRLARRERTAAVRIARDLLAQIRGLTTRIDDLRAELALLVRRHAPTLLELTGCGTLVAARIVAEVANVHRFRTEAQLALYAGVAPLDASSGRQQRHRLNRTGNRQLNHALHIIAVTQARIYAPAREYLARRRSQGKTIKEALRAFKRLLIRRVYQLLRVDTDRPDINIKATINAPCLT

SEQ ID NO: 335554 - protein, 348 aa, unidentified
MVHFAGLDVSVKTTSVCVIDDVGKVVLEQRSPTEPADIIAVLTSLGVSFGRIGVEAGPLSQWLVNGLMAVDLPVICVETRHMKALLTAQQISKTDRKDARGIAQMMRVGLFKPVHVKTLVAQEQRMLLTSRKLLQRKLLDVESDLRGTLRNFGLKVGIVGGSRYEARVRELVEGFPRLVAIVEPLLSVRRVMRQQLAVLHKMLLDMVRGDPVCRRLMTAPGVGAVVALTYRATVDQPQRFLHSRAVGAHVGLTPKRYQSGETDYEGGISKCGDALLRTMLYEAAHALLTRGAKWSWLKAWGVRVAQRRGMRRAIVAVARRLAVVLHRMWVDGREFRWSKDDTTVPAVA

SEQ ID NO: 335555 - protein, 438 aa, unidentified
MLKVIHPNAGGLDVGAEEVYACVPEDRDAQPIRRFGTTTPDLHELAKWLVGCKVDTVALESTGVYWIPIYLILSDYAIEVQVVNAQHVKAVPGRKSDVKDSQWLQELHSVGLLRGSFRPPDDIVILRSYLRHRDSLIEHRAVHIQHMQKALVQMNVQLTQVLTDVTGVTGMAIMRAIARGEQDVDTLLGFRNARCGHSPDDFVKALTANYRVEHVFALKQSLVLYDAYTDQIGLCDAEIARHFAVIKPSHDQDDLPPLDDSRKRNTHSKNAPHYDARGQMYRITGVDLTEIDGLHDSTAQTILSEIGTDMSKWKSAKQFAAWLGLAPRNDITGGKVKRSRTLHGNRRANQAFRMAAQAVGKTRTALGAFYRRRRAIAGPQQAVVATAHKIARIVYHLLKHRQPFHPVSAADYDLLQLDRERKSIQRRASKLGLKLVPA

SEQ ID NO: 335556 - protein, 403 aa, unidentified
MSPEHSIDIFLGLDVGKSEHHACALDRDGNKVFDKPLPQLESELAGVFHQLQKLGTVLVIVDQPNTIGALPIAVARDCGCEVGYLPGLAMRKAADLYPGRAKTDKRDAFIIADTARTMPHTLRAVDRNDEVLSALKMLSGFDDDIARDCTRTVNRLRSVLTQIYPSLERVFAGSTLTRTPILELLIHYKGSQGLKRAGYQRVLNWMIKRTRKDPTPLVDDIFTALKAQTVTVPGSDAAELVIPQLAANIQALKEQRNTIAEQVEEMLADFPLCEVLMSMPGVGIKTAAQILLAIGDGSDFASAGHLAAYAGIAPVTRRSGSSIRGEFPARSGNKRLKNALFYSAFAVIRSHEPSRRYYERKRAEGKRHNAAVICLARRRCNVIYAMLKNKEFFREIPPRPVAA

SEQ ID NO: 335557 - protein, 338 aa, unidentified
MTIETLGIDIAKNVFQLHGVNRNGRVALKRRVMRDRLLAVLAQIGPCTVVIEACTGAFYWARKFEAVGHQVKIISPQYVKPFVRRQKNDGNDAEAICIAARQPHIPFVPKKTVAQQDIQALHRARQRMVNHRTAVVSQIRGLLLDRGFAIAKSITRARRAIPEILADLKNELTAMAREALSELYDLFRDLDRRIASFDRKIERIFRASEPCQRIAKIKGVGPKTATAVVAAIGDGSEFKNGRHFAAWVGLVPRQHSSGDRNLLMGISKRGNQHLRSLLVHGARAVVRTAPNKNDLNNLWVNQLRERRGFNRATVAIANKNARIIWAVLRTGEPYRAAS

SEQ ID NO: 335558 - protein, 325 aa, unidentified
MPEDLSKSSFNWVGIDVSKDRLDVYVQATQARISVNNDVEGIEQLKHHLEQVENVAVICEASGGYESLMALSLDEQGIRVSVVNPRQARDFAKSTGKLAKTDALDAQMLARFGNATYPEATVFASEADRQLTAWVRRRQQLVEMLSAEKNRRGQLKGPVRDDVDSHLEWLTERIKQLDQDIANLSQAKAEWRERKAILQSPKGIGPVIAIGLLTCLPELGRLNRKQIAALAGLAPFNHDSGRQRGRRRIAGGRPLVRSWLYMATLVAMRHNPPIQAYYQHLVARGKLTKVAMVACMRKLLTCLNAMLRDNTPWQNEKVTAFFKTA

SEQ ID NO: 335559 - protein, 415 aa, unidentified
MQEEAYAIYVGVDWASEAHQVAIVDAACDLRIQERVPHTGADLTQLAEELGHRAGGEPGRVAVAIEVPRGPVVETLLERGLHVYALNPKPLDRFRDRYSMAGAKDDRRDARVLAEALRTDRPAFRRLQIDEPAVIRLRELARLDAELQQERTRLANRLREQLQRFYPQLLAFCPAADEPWLWTLLDLAPTPAAGRRVSPAQLGRVLRTHRIRRLTADALHAQLQTPALRVAPGTAEAASEYLALLLPRLRLVHAQHRACEQRLDRVLAELAEPAPGQPTEHRDVTILRSLPGVGRGVAATMLAEATPLLATRDSHGLRTQMGLAPVTRQSGKHVEVSMRYACNQRLRYAAYHWGRTSVQCDPHSRAHYAQLRQRGHAHARALRGVVDRLLRVLVVMLDTRTPYDPARRRPLEQTA

SEQ ID NO: 335560 - protein, 322 aa, unidentified
MTETGERLETVRISNDPEYLRQVMARAGESPEVVLEATYGWYWAADCLAELGASVHLAHPLGVKMFSLRRVKNDERDAGDLADLLRMGRLPEAWIAPPATRELRGWVRHRAKLVGLRSNLKCQVHAILAAAGVQVPMSDLFGAAGQQLLATVGLAAESRARIDSLLRLITALDFEVELFAKLVAGRLRTHPGYLAIQAIPGVGPVLAAVFVAEIGDITRFHRPAQLASWAGLTPKHHESDTTVHRGRITKQGSRLVRWAAVEAVQRVGAHTGLGQVREQVGARRGRNIGVVAAARELTELVFYGLRDGHIRRLPAPPHTPAA

SEQ ID NO: 335561 - protein, 347 aa, unidentified
MIIIGCDFHSRFQQIALLDTETGKVEERRLAHENGEARDFYAGLREPALVGIESMGYTQWFEELLAELGHELVVGDAAKIRKMEVRKQKHDRRDAEHLLNLLVKGDFPRLWLPSAAERDARVWLEHRHQLVQMRTRTLNGLQAVALNHGLCLRQKLWTKHGQAELKKLPLREGRARRRADLLALRAQLDRWIAELDERLAQEVAQRPDAQRLLTHPGVGPLTALGTVLILGPVERFPDAKHVTSYVGLIPQEESSGGRQRFGRLTKQGNGLLRFLLVEAAQTASRFDPGLRRAYRRLTFRKGRASAKVAVARKLAIRLYIMLRDKIDYEEFCRRGSHAGMLGEVALA

SEQ ID NO: 335562 - protein, 369 aa, unidentified
MGEYSEAFVAFDVAKIKHAVAVAEGGRTGEVRFLGEIDNREGPIERTVKKLAGRYGRLHFCFEAGPTGYGLYRQLQALGHDCMVVAPALIPKRRGERVKTNRRDAVTLARLHRAGELTGVWVPDAVHEAVRDLVRAREAAADELRRKRQQFLSFLLRHSRIYSGSGHWTLAHRRWLANQAFEHAAQQIVFQDGIDAIEDAIARLRRLEEQLVAIVPSWSMAPVVEAYQAMRGASFLVAVTFAAEIGDVRRFDNPRQLMSFLGLVPAESSTGDTVRRKGLTLAGNRRARRALVEAAWTYRYPARVSETLRARLEGLPKAVRDIAWKAQIRLCARYRRLRATGKKLPVVVAAIAREMAAFLWAIGREVAPG

SEQ ID NO: 335563 - protein, 363 aa, unidentified
MAKARADVMQPAMRYVGIDWAYRRAAWCALSAGGEVLDEGLVGADEEGLARLVLALGTEVRACVEMMSGAIWVRDQLAAAGWRVQIAHARKVRDIAPLACKTDRVDARVLAELCRRDLVPELWIASLDDRALRERLKRRMHLVRLRTSAMNRIFGLLTQWGLRLSLKRLREPDAIGLLEARGVPAAWRDSIVEALTVIDLLDQRIAPIDRELRPFAAADARVLLLITIPGIGPLLALTIASEIGDVARFGSPPKLIGYAGLAPRIKQSGDRSRTGALSKAGSRTLRWAAIEAAQQAWRPTNPWHGLYVDVAKRHGRNPAKSAVARKVLIAAWHVLARNEPFKPSRPRGGDTPVSASSSMFLAA

SEQ ID NO: 335564 - protein, 355 aa, unidentified
MEDTKYIGMDVHKDSISIAVLNSSGKLVMECIVETKAITILEFVHGLRGSLHLTFEEGTWAAWLYDLLKPHVAKLVVCDPRRNGYLKQGSKSDRNDARKLAELLHSNMLRPVYHGEHGVRSLKELARSYLTITKDQARVMTRVKAVYRSWAIPCVGKQVYGQRHRLEWLGKIEEPGVRRRAEFYYAELDALRSLRLVVLRELLLESKKHSVSTLLSQIPSIGPIRAALLIALLQTPDRFRTKRQLWAYSGLAIETHDSAENQYVNGQLQRSKKKQSIRGLNSNHNHDLKNIFKGASAVAAVKSGPFQRFYAAQISKGIRPEIARLSLARKIAAIILTVWKKGASFDASYLNPQTA

SEQ ID NO: 335565 - protein, 412 aa, unidentified
MLFVGDDWAEEHHDIEVQDETGRVLAKKRLPEGLVGMVAFHELVGRHVPASWADLDPLEAAGQVIVGIETDRGPWVAAMVAAGYRVFAINPTSAARYRQRHSMSGAKSDSTDAHLLAEIVRVDRAHHRPVAGDSADVQAVKVVARTHQSLIWDRTRHVLRLRSALREYFPAAIRAFDELAAPDTLELLAAAPDPDAAATLTKARIVAALKRAHRRNVEERATTMLQVLRAPELRLPAPVQQAYAAGIASQVAVIGVLNRQIDQLSVVVGDHFGRHRDADIYTSLPGLGVILAARVLGEFGDDPTRYVDGKARKAYAGTAPITKASGKRKVVLARYARNDRLADALQQWAFGSMNGSPGAKAYYQTLRARKIGHQAALRQLGNRWVGILHGCLKTSQLYDENIAWNHLFAAAS

SEQ ID NO: 335566 - protein, 311 aa, unidentified
MYYIGIDVSKKDLSVFDGKDLNFINKEGLKSFKKYLKKKYRLSEIAIIFEPTGIYSQYLKEFCAENSIKAYIINPKQSHNFARALGIRPKNDKIDARTLYKFHKLIDLKDIKVPKIDQQAKTLSGYLVSYEFALKQRVALSNHLESLRDQELIALMKKDLKRAKKLEDKLFHDILEYVRQNQNLKEDYQRLLTISGVGDKTAIALLTLFKTYQGTNRAQITALAGLDPVKRVSGTSVKYKVKISKNGKGIYRKIFYLPTVCATVHNQKIRVFYQRLLANHKIKKLAIIASMRKMLLIAHAMYRDKTEYVSA

SEQ ID NO: 335567 - protein, 349 aa, unidentified
MLSSNVKYIGLDVHKEAVAVAVLNGAGKLVMESIVETKASTLLDFLKGLRGDLHVTLEEGTWAAWLYDVLKPHVAELVVCNPRRNALLKEGSKSDKVDARKLAELLRSGMLRAVYHGEHGLGTLRELARSYLTIGKDQRRVMSRLKALYRSWGIPCSGKQVYTPRHGEQWLNKITQPGVRRRAELMYQQMDGLSVVRRTVRGELLAESRKHQAVKILRQVPLIGPLRATLLLALMQTPHRFRSKRQLWTYSGLAVETHDSAQHRYVVGQLQRSKKPQQVRGLNQNHNHEMKEIFESTAMSASRCAGPLQDFYEGLLAKGMKPDMARLTLARKIAATTLTLWKKGERFRR

SEQ ID NO: 335568 - protein, 322 aa, unidentified
MSYVMKPTAIFGADIAKDEVMVQRHGESAKQRLPNTPKPLSAWLAQLAPGALLVMEATNTYHEMLATLAHAAGVQVVVLNPRCTWHYARSLGVRGKTDRVDTDTLTDFGATQWQRLHRWEPPSAGNARVARLLRRRGKLVHAKVALGQSLSAVKELSSVRRQIERALARMIDRVDLLIVKAVSQDEQLAPLHRLLQTIVGVGPIVAAQLAQALTRMRWRNEDAFVAYTGLDPRPKDSGTHRGRRKLTKYGPPMLRHLLFMGAMSAIKTALYKPMYRALRDRGLETTQALVVVARRIARIAFAMFKTGQPFDPSRLSPAPQNA

SEQ ID NO: 335569 - protein, 460 aa, unidentified
MGAKARLSRKSGRAVREAAKLDTLEQINLNAAGLDIGAEEIYVCVPEGRDAETSVRVFGTYTAHLCALADWLERCEVDTVAMESTGVYWIPAFEILEARGFEVYLVNARQIKNVSGRKSDVLDCQWIQQLHTYGLLRGSFRPEAEMCALRAYLRHRDNLIRYRSAHIQHMQKALQQMNVQLTQAVSDITGVTGMHIIRAIVAGERDPQVLAQHRNPRCVKSKQDIAQALTGNYRTEHVFALKQALELYDFYTQQIVACDAEIERQYSAIKPQVDVEATPLPPVTKSRSKSAPTFDARTQLYRVSGVDLTQVDGIDEALAQEIISEIGVEMDPWPTVKHFASWLRLAPRNDVSGGKVLRSTTGKTGSRASQAFRLAAQAVHHSDSALGAFYRRMKSKYGAAQATAATAHKIARIVYHMLKYKEEYVDSGAAYYEERCRERAIKNLERKATRLGMKVVPIIA

SEQ ID NO: 335570 - protein, 360 aa, unidentified
MSFNGTSVGLDVHALSVVAHAVDEETGRVERARLCPDHGEILGWLHRLRAPVRVAYEAGPTGFGLARALAAAQIDCVVAAPSKLIRPGGDRVKTDARDAAHLTRLLRLGEITAVTVPEADVEAVRDLVRAREDARADLMRVRHRLSKLLLRHSRVYSGGQAWNGVHETWLRRQRFDDPHTVAAFDHHFEAVLSATAARDRLDEQIVTVAASPRWADPVNRLGCLRGISALTGLALSVEIGDWTRFTGSSIGAYVGLVPTEYSSGTSRVQGSITKAGNAHVRRLLIEAAWHHRAAYRSPGPTMRARWAKVDPALKARGHAGNRRLHQQWCRFNERKKHHVVANVAVARELAGWCWSLATLN

SEQ ID NO: 335571 - protein, 421 aa, unidentified
MRAFGLDVHRDFCEVAIAEGGAIRSAGRVATRVGSLELFAQSLVAGDVVALEATSGADRIVSLLQANGIRVIVANTRKLRSITEAKAKTDRLDARTLARLLVSGLLDEVWTPDERTRSLRRLTNRRERLVRARTRAKNEAHGVLARNLCERPPVTDAFGKAGRRWLARLDLPVDERLTLDGCLRQVDFLDAEIAALDSEIARAALAWPEVLRLMTVPGVNVQTAATFMAAIGDIRRFPSPRKLVSYLGLDPRVRQSGSTPARHGRISKAGAPEPRHMLGEVAWKVMLTPGPLRAFFERVRARRGPQVAATATARKLTVLLWHLLTREEDYAFARPAMTRNKVRRLELLAGAPAQKGRKGIAGGKSKAVFEAERELSRQAEAAYRRLVSDWRSSGPPKAGAGATPGRASSKPSKGKATRQTP

SEQ ID NO: 335572 - protein, 449 aa, unidentified
MSRPEVIDDTEHERVHDRVAAIDVAKDSGVVCTRTPHPSRPGARQSRIWTVKARMNTIRQLGRQLNKDGIEKVTLESTSDYWRIWFFVLEAAGLAVQLVNASQAKSLPGRPKTDKADAMWLARLTEMGLLRASFVPPKAIRDLRDYTRARTRLVHERTRCWQRLEKLLEGALVKLSSVASKLTTVSAQDMIKAMIAGQRDPKVLAALARTGMKAKHDDLVQALDGMFDDHHGELAALLLDQIAVLDGKITQLTTRISESVAAIPAAWGINADGTTGPGAGTGPDALVLPAVARLAEIPGVSENLARAIIAETGLDMARFPTAAHLVSWAGLCPSARQSGPRTRAGKKGQGNTWLRGHLGQAALGAARTATFPGERYHRIARRRGKTKAQVAVARSILVIIWHLLADPAARFTDLGYGYYQDRTDKDRKLRNHIRQIEALGFTVTLIKDT

SEQ ID NO: 335573 - protein, 340 aa, unidentified
MTSVTVGLDTAKSIFHVVEKNGSGRILKKAKLSRNKLVNYFTNKEACTIAIEACGACHYWYRVFNQLGHTVMIIAPQYVAKHRIGNKNDFNDADALADVAQREDVRTVPPKSIEQQDIQLLHRVRERYVKQRTALGNQIRGLLAEYGVVIPRGLSSLRKALPFVLENPENELSPLVREILSELNNELSHLDGNVKEIDKQFIQQGQVNEQCQKLQTMTGVGPLISSILWVVLGDGKSFKNGRHFAAWCGLVPKQHSTGDRARLLGISKRGNGYLRTQLINGARSALKHAKSKDDRLSVWAVNLEMRAGFNKACVALANKMARIAWAMISKQETYKTQAAK

SEQ ID NO: 335574 - protein, 379 aa, unidentified
MEAKKEDPRSLRHRCARVEMLRNHSQNRGSDMQVTTYGVDLAKQVFQVHWVEPDSGEVKRKVLTRGQFREFFARRSVGLVAMEACGSAHHWGRALSGMGHRVRLISAQFVRPFVKSNKTDAADAQAIWEAAQRPDMRFVALKSEAQQAVLGLHRVRAQLVRMRTMQANQVRGLLYEFGIVVPKSWRALLKQAGPILAESSCHDVPELIRGELQQQLQGLRELTQRIEQLERSIGSYRAQDEQCRRIEAIPGVGPLSSTAVLASVGDVRTFRSGREFAAFLGLVPRQSGTGGRIKLLGISKRGDPYLRTLLIHGARTVLNHASRPGRTLPLWLQGLLSRRPKNVAIVALANKIARTIWALLAHDRIFDPRWGQTMSVPVV

SEQ ID NO: 335575 - protein, 410 aa, unidentified
MEVFLEHCAGLDVHEASVVCCVLIGTPERKPQKLLRTFGTTTRELEALRAWLAEYGVTHVGMESTGVYWKPVYAVLEGHFDLIVGNTHHIKNVPGRETDVKDAEWIAQLVRHGLVAKSFVPPPAIRDLRELVRHRRTLIETRTAVRNRVLKLLEEANIKLSGVASDVFGVSGMAMLEALAAGTNNASEMAGLARGRMRRKHAALEAALDGRMREHQCFLLAMQLRSLEAIDQDLEALDARIETQLEPYQAQHRLLMQIPGVDWVTAAAIIAEIGTDMDVFATAQRLAAWAGVAPGNYESAGKQKGAGTRRGNVFLKSALFAAASAAVRTKGSYYRDKYNRLRARRGPVRAIMAIAHKLLIAAFHMLSTGEDFRDLGEGYLDQVARKRSTTKLVQRLSNLGYDVMLVPKAA

SEQ ID NO: 335576 - protein, 355 aa, unidentified
MNSEKYIGLDVHQATISVAVLDSTGKLVMESILETKAATILEFFAGLRGTLSVTFEEGTWAAWLYDLLNPHVAKLVVCNPRKNALLKDGNKSDRIDAHKLAELLYLNKLSSVYHGETGVRMLRELARSYLTIVKDLTRVMSRLKAVYRSWAIPCAGRDVYYTRHRAEWLGKIKEAGVRRRAERLYQQLDMLQFLRQQARRELLAESRKHAITVKLRQIPSLGPIRSALAVALIQTPHRFRTKRQLWAYSGLALETRTSAEYCYVKGGLRRSKKQISIRGLNKDHNHDLKGLFKGAATRASVLPGPFQDFYQRSLAKGIKPTMARLTLARKIAAITLTLWKKGENFDADKLKSQAA

SEQ ID NO: 335577 - protein, 339 aa, unidentified
MKVTTFGLDLAKHVFQLHWVEPETGEVRRKALKRDQMMKFFVQRAPSVVAMEACGSAHYWARKLIGLGHEVRLIAAQFVRPYVKRNKTDAADAQAIWEAVQRPEMRFVAVKDEHQQAVLTLHRMREQLVKMRTMQINQLRGLLYEFGANLPKGRQQGMAQVGAQLAQLEDTLPAMVIDALRGQLQRVQALSDDIEDIERKLALWKKEDAAAKRLMAIPGVGLLTATAAVATIGDAKVFKNGRQFAAFLGLVPRQAGTGGKVRLFGISKRGDTYLRKLLIHGARSVITHQKARAPWLEQLLARRPFNAAVVALANKMARTIWALLAHDRTYQNGVTAQAA

SEQ ID NO: 335578 - protein, 393 aa, unidentified
MNKHSMIFIGLDTHKEFHEVAYCEEQRGAVPVHYGRISSSKVSVKKLLRQFESKYPGATLHVVYEAGPCGYWIYRLITSLGHCCYVVAPSLIPKKPGERIKTDRRDALKLVRSLKSEDLTPIYVPEPEDEAVRDLSRAREAAMKDLKEAKYQLKALLLRNNIRYEGTANWSKKHLRWLTELILPHPAQQIVLQEQLQTIEERIRRLERLDNELTHHVHQWRYYPVVKAVQAMRGVRLLVAVGVVAELGDLNRFDHPRKLMAYLGLVPSEQSSGGKRHLGAITKAGNGRARRLLIEGAHSYRYPANVSTELQLRQEGLPKDIVDIAWKAQLRLCKRYQRMSKKGKHYNLIITAIAREMAAYIWAIAKEVVLTPVNSKLRLSRVGVLGIFPSKKT

SEQ ID NO: 335579 - protein, 317 aa, unidentified
MESKTPPDRYVGIDVAKHQVAVHLRPDGVSFTCGTDPAGLKALVTRLQPLQPKLIVLEATGGYETIVAAALADAGLPVAVVNPRQTRQFAAALGRLAKTDKIDAAAIAHFAEAIHPEPRALPDAQTVELRALLARRHQLVVMAAAEQQRQDHAENVLTRRSCRTMLRSLRAELARIEKAIDKLIAASPVFRAKQDLLKSIPGIGDVVARTFLAELPELGSVDRHKIAALVGLAPVNRDSGRQRGQRHIKGGRSQVRAPLFVACLAVIRHNKPLSAFYQRLVRAGKPKRVALIAVMRKLVCIANAMLRSQLPWQTGQA

SEQ ID NO: 335580 - protein, 375 aa, unidentified
MSTNLRNVGLDVHAETIAVAVAEPGGEVRPLGIIPNRPEAVAKLLRNLGPREHLRVCYEAGPCGYVLYWQLTRLGVHCDVVAPTLVPTKPGDRVNTDRRDAAKLARCYRAGDLTPVWVPDAAHEALRDLVRAREVAKHDQLRARHRLTKLLLRQGIRPPEGVKPWTQRYCRWLDAVPFDQPARRATFGDYLHEVDHAAARLERLEQALDEAVQAAPASLRAVIAALQTLRGIRQVTAATIVSEVGPLSRFTHPRQLMGYSGTVPSEHSSGAAIHRGGITKTGNAHLRRVLLEAAWAYRFPPKCAKGLRQRQRGQPEAITDLAWKAQHRLCGRYRRLLARGKPTPQVITAVARELLGFIWAIGVAAERAGTAAAAA

SEQ ID NO: 335581 - protein, 427 aa, unidentified
MKISSTKSEIKPVAQLISAYDVSKFKNNYYSNFESAGHNHTLESIVDNEPVSLREHFSSLKQVANEHGMTEVLVVCEPTGGYEKLLLKVARSFGFKTEYVSGEASSKYKVIETNDSGKNDIKDARVIFALAKARKTLTCRDLPKEYQVLRRLSKAYERISLDIAHLKNTISTVIEEFFPGVKISASQIYSKTVTTVINLYGLNPYKISALSFNRFVKEVEKVLGKTCTKPQKSLLERIFKSSVNFDYKDTYEEVIEADTLFLQSLFKRYDLLLEQKKRSKDKVLIAFEKTKEFKKFESIGTGLFSIARIISETGPLDSFSCIEQVIRYAGLNLIERQSGTYRGHVRVSKKGNSLLRKILGQLVFSSFIKKGSVYSDYYFKKKEQKGGFYALTCTMRKALKMLFGIHKSNQSFCLERVLDQEYFSKVA

SEQ ID NO: 335582 - protein, 499 aa, unidentified
MQRDIFPDRSQVAAELLRSQPSSAILIVPVDFAKREHVAQICSGTGEFLFQRPIIARNDAPGAAYLIERIEACCRRLGVPRSHVLVGGEDAPSYARNFLTALAAAGLHLLRVQPADAKRYRTNTRATTDKLALNGIAQAILCRRSYDLERLGGLYSTMKGAERTRRRLVWQETAAKNRIHRQVEWLFPGFLSQAQSGLLPFGSASLELMGEDFSVVHIRRLRTETLVRRLKQASVQHPAEAAEKLKALAGKTLAPPAEAIAYGSRSLALQVGLLRGLQGAMKAEENEMARCLAQTPGFLLTSIPGIGVVLAGGLVAEYGDPDHWPDPDRMASYGGIVPRHYQTGGPDAQGITGSLPLDCNHHLKDWLLQAAFHAGTTPHEAWDRMALPGDQHRLYEHYQRVELQEGHSRLSTAKLLLRIGRAMVRDRRAYLPANALDPQAQDALSPEALVQYLGLTAAAVARRWRGYDLSGLPEELNLLQQWHKEIEALTQFHARGTTL

SEQ ID NO: 335583 - protein, 369 aa, unidentified
MIPTDAETVIGGVDTHKHTHYAAVIDQRGRLLGHQQFPATDTGYQALLTWMRTHGPLEAIGVESTGSFGATLTRALTAAGEHVIEVNRPNRIARRMDGKSDRLDAEQIARAVLGQTSTATPKSKSGMVEVIRTLRVTRSSAVKARTQTFNTLFGIMIGAPSPLRDELVALTKRTLINRCLGLRPETTDFAQLRAHPERLLMASIKTSLRDLARRWKALDSEIKTLNQQISVVVHATAPDLVKLFGVGVELAGQFLVTAGDNPERIRNEKAFAKLCGVAPQPASSGRTTGRHRLCRSGDRQANSALYIVTIVRLRHHEPTRAYVERRTNEGLSKREIIRCLKRYIAREIYANLPRAQDNSLTPNSQPAAA

SEQ ID NO: 335584 - protein, 338 aa, unidentified
MKLYGAIDLHSNNNVTVLIDEKDKVVYQKRLANDLPLVIEQLSPYASSMEGIVVESTYNWYWLVDGLMEKGHRVHLANTAAIQQYEGLKYTDDDSDARWLAHLFRLGVLPEGYIYPKEERAVRDLLRKRSQLVHHKTAHLLSIQNLYSRNTGASLSANRIKQLTSETVDARFSASDLALAIKANLSVMRSLETEITVLERVVKERIKLKPAYRYLLTVSGIGQILAFTIMLETGEIRRFPKVGNFVSYCRCVKSEKLSNGKRKGSGNTKNGNKYLSWAFVEAANFAIRYEPLVARFYQRKKAKTHRVVALKAVANKLARACYYVMRDEVPFDVGRAFA

SEQ ID NO: 335585 - protein, 359 aa, unidentified
MFYGIDLHTDSFKIAILGENTEKITVKTVNLKTDAFTQFLNTLTEEDYMVVEASTNTFWFVEQVEKRVKEVYVVDPFKFSIIANSRKKTDKIDATKLAKKLKYYVCYDQSADEFPTIYIPCKDVNELRSMFTTYEMLKKQACMTKNRIRSLFSQNGIFNFTGENLSYNHVQEKIKELQLSASLSAQLRILLSLLNTQEDEKENIKAEILIKGKIFYREIKILTSIRGVSPFLAIAIMSDIADINRFPNAKKLCSYLRTAPRIDASGNKEYVGKVNKQSRTLTASLMTESIKHFIDSSDRLHKFYFDKRKGKSAGKVRIAVMRKIIVIMYNMLKEEKLYYYKDEKNYAAKLKQYESILAA

SEQ ID NO: 335586 - protein, 341 aa, unidentified
MNQDLSVVGIDIAKRVFHIIGRDKRGTIILRKRLYRGEGVSFMAQLPQATVGMEACGGAHYWARQLRQQGHQVKLMAPQYVKPYVKTNKNDIRDAEALAEAVTRPSMRFVPVKEVAPQDIQALHRVRERLVTARTALVNEMRGLLAEYGIVLPQGVAKFRKTLVSTLEAEQTKLTPLGQELFHQLFDELGTLEAELTYYQEKLEALAPPHPVCQRWLTVPGIGPLTATALIAAVGDAQVFKNGRQFAAWLGLVPKQYSTGGQSRLLGISKRGDSYLRKLLIHGARATLRWARTKADRRSQWIRGLLARRGWNRTAVAVANKNARIVWALLSRGGVYRESTS

SEQ ID NO: 335587 - protein, 356 aa, unidentified
MNVVAIAVIIEGEKDFYDTIRLKNTDTVIAKYMQKLSHQFTIKACYEASSSGYCFQRKMRAWGYHCDVIAPSLVPKKPGSRRKNDFRDARELAQHYANGLLTVVHPPSEQDEALRGLIRCRQSLKEAEKRVKNQINSLLLSQGLHWQKSKWTLRHRQWLATLHLPHTYLQQVLDEHLALLHYLEARVLHFDRQIEALAQSDIYADSVKKLCTLKGIRTLAAMILIAEITDFRRFASPRALMAFLGLIPAEHSSGDKQTGCSITKTGNKRCRTQLIEAVLHYVKKPIIRGRIKTALADVDAATSSIALTCMQRLHKRYWALVMKGKEPKVARTAIARELAGFIWALMNQQPAPATTV

SEQ ID NO: 335588 - protein, 345 aa, unidentified
MSKVTYVGMDVHLNSIAAVWGRPKEKPRCIVVENSPDGWAKLMRAVEPGEVWGVYEASSCGFEVYDELSKMGWKMTVVAPTHIHKSVLSRKRKTDLRDAKRLWEVLVSHAELGTELPAVWIPEERIREEREIVRRRLALAERQTRVKNGIGSLLRIHKLKRPEEFKTPWTQKHMAWLKGLESSSSVGVHVRSVLGSYLREFEFLETERTILDAEVKKLSREDRYARAAQRMTELDGVGLLTAMTFLVELGDVRRFHNRRQLSSYLGLVPSSYETGEDDDHKGHITHMGPARIRKVLNQAAWTLVRMDPDWKARYGPLAERRGKMKAIVAIMRKLGIELWHRAMAA

SEQ ID NO: 335589 - protein, 356 aa, unidentified
MERYLGLDVHAASSTLVVLSEAGRRLKRCVLETNGQALVEAIRTIPGRKHLCFEEGTQSAWLYEILSPQVQETVVAMLRYRRGQKNDALDAYMLAEKLRTGQIERQVFKAPSQFALLRELARTHGMISRDLVRVQGRLKSLYRSRGVRTPGSSVYGSGQREAWLAKLPKTSCPGAARLYEQIDFLAELKQRSEKDLIRESRRQRITRILETIPGLGPIRVARLVPIVVTPYRFRTRQQFWSYCGLGIVTRTSSDWVRTPDRRWIRAEVQHTRGLTRQHNHVLKDIFKGAAMSVLIHYPHDPLRQHYDRLLEGGTAPNLARVTLARKIASISLALWKKKEPYQPEHEQRAEEIPREA

SEQ ID NO: 335590 - protein, 374 aa, unidentified
MKKNTTRKKIAQQVKQSPKRAATRQKRPITIGMDLGDKRSSYSVLDEGGQVVVEGSVATSKSAMTEAFVGMKGCRIAIEVGTHSPWLSRLLKKLGMEVIVANARQVQLISASTRKSDRMDARMLARLARVDPELLRPIRHRGEQAQVDLLQIRMREALVEARTKLINSARGMVKAQGERLPKCDADNMDVDQLKELPAELREALPALVEPIAELTRQIQALDSKLEKLAQSQYEETGLLRQVWGVGTLIALTFVLTIEDKDRFQKSRDVGCYLGLRPKQSDSGESEPQLRISKEGDPLLRKLLVQGAHCILSKRAPDTDLKRWGLKLMERGGKNGKKRAVVAVARKLGVLLHHLWVSGEVYEPLYNSESRQQAA

SEQ ID NO: 335591 - protein, 331 aa, unidentified
MQCVVGIDVAARSFDLTVRKDGKNQKRETFAQTPQGHRRAVKRLRSLQPTRVVMEATGVYYLDLAMALHEAALPVCVINPRSFRHFADIKLSGSKTDAIDSALLAEYAERMEPTRWSPPPRLHLELRDLGRQINRLIHARTQAKNRLHALGAKKDTPRVVIEDEQEGVAHLDRRIERLRQAAREVISQSDTLAEPFDCLMAANGVGESSAVAILAELSVLPGTLKASQVVRHAGLDVRLTQSGSSVNRPGRLSKAGNTYLRAALFMPAMAAIRHEPRARAFFEALVARGKKKIQAVCAVMRKYLTGIWACVKSRTRFDASLLFSEKHAPTG

SEQ ID NO: 335592 - protein, 354 aa, unidentified
MCAVFGINVSKTSSEVAILVNGEKVHGYTMPNDIVGFSRLLEGLKTVSNPEIIFESTGVYSRRLQAFLEENSYDYTRLNPLEAKKQLDGLRVRKTDKIDAEKLASSQFVLNLKPIYVQEKVYQNLHDLSRFYQNLTEDIVRTKNRLHKVLQVAFPEIENLLSTPTGEQYWNLVSIFPTKHWVLDLSEVELKEAIRNSTSKRISENRVGNLAEKLVGLAKQSYSAISKTSPMIEEVKYNAQELIRLTNRREQVLEQLIELAKPLPEYEILLSIPGIAETTATSVIGELGDIRRFKSANQINAFIGIDLKHYESGDFLGQEHITKRGNPYARKILYKCIHNIAAASHTNPCHIADF

SEQ ID NO: 335593 - protein, 397 aa, unidentified
MDAAGRRLAAARLPEGVAGITRLHEMIGAQLGEDAGAGADAGAGEVAIGIETDRGPWVSALVAAGYTVYAVNPLQAARYRERHGVSGAKSDKADAHTLADMVRTDAHQLRPVAADSPHSEAIKVVARAHKTLIWERTRHTLRLRYVLREYFPAALEAFDDLAAPDTLELLAKAPDPASAAKLNRSQIRAALKHARRRDIDMKTTRIQAALRSQQLGRAPVITAAYAATTRSIAAVLATLTEQISTLRGQVETHFGRHPDAEIILSQPGTGVLLGARVLAEFGDAPGRYADAKARKNYAGTSPITRQSGKRKITHARFVHNDRLVDALMSQAQSALLASPGARAYYDKQRARGLDHHAALRQLANRLVGILHGCLKTRTLYDEATAWSHHNQDQRTAA

SEQ ID NO: 335594 - protein, 340 aa, unidentified
MVHVGVDLHKRMSQIAVLTEEGEIAQRRLANDPERLEAFFAQLPPQTPVAIEASGTWWWLVDLLERGGHRPVLSNPKQTKAIAAARLKNDRVDAERLALLLRGDLLPTVGIPPAELREARELIRHRVQLVWLRGEVRNRLLAMLARRNLQPTSGKSWLTVRGQRELQALPLTPIATTIRADCRALLPLLDEQIRRLDDDLRTRWGADPRVRRLQTIPGIGAFIAIVLVMELGDIQRFPTAKHVASYIGLTPRVRASADRIRSGHISKEGNRLLRWVLVLAATQAARQPGPLRAWFRTMKQRRGTKIARVALARRLGEIVYHVWKHDCDYFTMLRRGAVRG

SEQ ID NO: 335595 - protein, 400 aa, unidentified
MLSIGIDVSKGKSTVCGMKPGGEIVYTPFEVQHTREGMSELVSLLHNSGEEVRAVLESTGSYHCPVVAALLENGIFVSVINSLRMKRFCSQSIRKVKTDRIDAMQIALYGLAYWQELQPTKLPEDTYRELQLLARQYYQMTSILIKAKVDFNAICDQVLPGMQELMNDHAGRHKLSDFVLRYRHTTHILEMGETRFRKDYCKWAEKKGYRNCERMAAHIFATAQNGIPVLPNAPSTQIVITEAIRVLHTVEASRDAILTQMQALAKTLPEYSLVREMPCIGDTLAPRLIAEIGDVRRFHSKRALIAYAGIDAPPYQSGKFCANNRHISKRGNRYLRKTGYEVMQSYVMHKPANDPIFTFIEKKRGEGKSGKLAMVAGLNKFLRVYYGKVTELYRSLPAIE

SEQ ID NO: 335596 - protein, 309 aa, unidentified
MPLLHYVGVDVSKDTLVAACGRYRWEFRNTAEGHRKFMAQLRKLPGTAQVVCESTGPYHLRMCLAFQEGGIAFSIINPKKIYHFAKSEGLEAKSDPSDAVLVEKFAIAKQPQPGEPLNPEQIALCELLGHRAHLVEAAKVLRINRAQVLSSMARKEIDRSLAQLEKQIAALENKLQAMALADPKMQKTLEVLLQVRGIGLITAMTLIARMPELGTLNRGRCAALAGVAPFDDDSGTYHGQRRIRGGRSDVRRVLYMAAVTASRFNPALKPVYERLIGAKKPFKVAIVAVMRKLLIHLNTLLKPAETAAA

SEQ ID NO: 335597 - protein, 345 aa, unidentified
MNKGKIIGIDLAKTHFYLFTLDKEGNPAGKKRLSRGELLRWLAQQTVVIVALEACGSAHHWAREIQALGHQVLILPAQHVKAYRRKQKNDYNDAQAIAEACQHGTIRPVRVKSLEQQDEQTFLKMRRLVVEEKTQLINHIRGLLAEYGIILKQGASALHHLLPSLLEDGNPAMTPKLKILMQRQYARLVTLEQELIWYDSELRIQVKKNAVCQRLQTIPGFGPLVSQLFKVWMGDGQQFRRGRDASAALGLVPRQFSTGGRQILLSITKCGDGYIRAMLIQGARSVVSRAANKTDTLSLWINRLREKRGFNRTVVALANKLTRIVWAIISRQEIYIPKGVSLENG

SEQ ID NO: 335598 - protein, 393 aa, unidentified
MVCVGIDVAKDKHDCFIISSEGEILADVFTIPNNAEGFDTLLQAIRRSTRPEDKIKVGLEATGHYSYNILGFLLDKGLSTYVINPLHTNLYRKSLSLRKTKTDRVDARTIAAMLMSDVDLKSYTDTVYHNEELKSLTRYRFDKVRERAKLKQSVSRLVTILFPELEKLVSSLHSASVYALLSEFPGAKQISSTHMTHLKAVLKNASQGRYGQEMAETIRNAARSSVGSVMPAKSLELQHTIRLIRELDAEIEDIETAIQAIVDEMQSPITTIPGMGVRMGAVILAEIGDFSRFDSPDKILAYAGMSPSTYQSGQLSLSGAYSHMEKRGSRYLRYALYNATKHVCHWDPTFAAYLAKKRAEGKHYNVALSHAAKKLVRLIFAMEKSQRPYCAAA

SEQ ID NO: 335599 - protein, 336 aa, unidentified
MRGQNSHFVAVPADRDPQPVREFHSFTAELERLADWLAHCRIKTVAMESTGVFWIPLYEVLEQRGFEVMLVNARDVHNVRRRKSDVMDCEWLRELHSVGLLRPSFRPAAAIVPRRSFMRQRETLVEEVAARILRRQKALTQMNVMLHVVVTDITGETGLKIVRHILAGERDPERLAAHRNYRCHASTAEIIAALTGNYRAEHLLALKQKFAAYEFLLQQIAECADQIERLLTCLAAQQPPPATPLPATRRTRAAKHQPQFDIRGPLHRLTGGVDLSQIDNIGPQAALQLIGEIGTDMARWPSAKHFTSWLALAPNNKISGGRLRPIALRPFCAAVR

SEQ ID NO: 335600 - protein, 315 aa, unidentified
MTNLKKSKSNVNVGVDVGKWTLDVCLYEKDLYWQVENTPQGVRKLLGRLGHYQVDRLVMEATGRYQHLLTEKAFERDLPVCVVKPLSVRRYAQAIGKTAKTDRIDAQVIAEFAAIIQPPVTLKKSKNLLLIRDLLARRRQLVGMRTRELNRIKVMGKALETSCRRIIRVLDQEIARMEKRLDALIDKEAAWSEKKSLLKTAPGIGDTMVYTLLADLPELGSMTNKQAAALVGVAPMNRDSGKMRGKRRIKGGRYMVRTTLYMATLSATLCNPVIKEFYQRLVAQGKHKKVALTACMRKFIVILNAMVRDNCEWQH

SEQ ID NO: 335601 - protein, 338 aa, unidentified
MTYYAGIDVSLESASVCVIDAAGKIIREGKVASEPQALTDWLRATGLSLERVGLEAGPLSQWLYAGLRQAGIAAELLETRHVRRAFEIMPVKTDRKDAHGIADLMRLGWFRPVHCKSINAQETRAMLTARKLVQKQVLEVESSLRGILRGFGLKVGKTTPVKFEGRVKELVVGNPNLERITDALLTTRAVLRREFNGFERQVRAMARNDTRARLLMSTPGVGTIVALTYASAIDDPSRFKSSKTVGAHFGMTPKRYQSGETDYTGRISKLGDASVRAALYEAAHVILTKPLKGCTALKSWAMRIARRAGMSKAKVALARKLAVIMHRMLANGSTFHAA

SEQ ID NO: 335602 - protein, 341 aa, unidentified
MNGVTTIGLDIAKQVFHVHGADASGAMLFSRRISRAKLIGFFASQPHCVVAMEACGGSHHWARELLRLGHQVRLIPPAYVKPFVKRQKNDAADAEAICEAAQRPGMRFVPVKDEEQQASAAVFRARDLMVRQRTQLINALRGLLAEYGWVAPKGLFHMAGMMQRIEDPGCGLPESARSIFVMMIDSVKALDERIMVLDRVIAKRAREDAVARRLMTIPGIGPITATALTALAPPPESFRKGRDFAAWLGLTPLQRSTGGKQKLGAISKMGERTLRRLLIIGSSAVVLQASKRGAPAGSWLAQMMARKPRMLVTVALANKTARIAWAVMARNEVYRAPAAAA

SEQ ID NO: 335603 - protein, 403 aa, unidentified
MRSVLSIDVANGKSEVLLITEIGEVLIEPYEIKHCLNEFIKLKEKINSFNLDDLTIFMESTSTYHLPVQRFFTNNHFKVQVINPILGKNNTRNLRKTKTDIEDCYNLAALFFKNTVKIHTKDMNTIYSNMIELSRQEKHLTESIVRSKNRFKQIIANTFPEYIKCFTSSDIYGNTSLNFIKEFPHADIIKAKRIDALANNIYKSTKGHLPYSRCLAKAKKIKILANNSYPGIDINSCEIKNLINIIDIIFYNSTKLNEVKQDIINLAKQTPYFEIIFSIYGVGETSTAQIIAELGDINRFENIKQLNAFCGLDPTIVQSGKSINYNGPISKRGNRNARKILFITCCSIIRTSVLHNVDTDILIYYRKKQAENKHFKECITACSTKLLRIIFAMCKNNSLYVQK

SEQ ID NO: 335604 - protein, 456 aa, unidentified
MPRRRRPSTRPVTMPILHPHAGGIDVGATEIYVCVPLDRDPQPIRRFGTFTEDLHALADWLTQCGVTSAAMESTGVYWIPLYQILETRGVEVCLVNARHVKNVPGRKTDVQDCQWLQYLHSVGLLRASFRPPETVCAVRSLLRHRDTLIQLAATHTQHMQKALNQMNLQLHHVLSDVTGVTGLAILDAILAGERDPQVLARHRDGRVKASRETIAKALVGDYRPEHLFTLRQSLASYRHYQGLIAECDGEVETLLGTFASQVDPAAHPLPPAPAARRKPHRKTPSFDLRAELYRVLGTDLTQVAGLQTPTVHTLFAELGADLSAFPSGHHFASWLGLCPDNRISGGKVLSVSTRHVKHRVAQALRLAAQSLSRSQSVLGSFFRRMRAKLGAPKAITATAHKLARIVYHLITTRQPYQESRLAAAEAAHRRHSESRLRAQARALGFQLVPAPEQSVS

SEQ ID NO: 335605 - protein, 355 aa, unidentified
MSQEKYIGMDVHQATISVAVMDAQGKLIMECLLETKAATIVEFIRGLHGTLSLTFEEGTCAAWLHDLLKPHVSRLVVCDPRKNALLKDGNKSDRIDARKLAELLRGNQLHAVYHGEHGVRTLKELGRSYLTITQDVTRVMNRIKALYRSWAIPCAGATVYAPSHRAEWLAKIAEPGVRVRAERLYQQLDLLQAVRLQARRELLAESHQHSGVKLLRQIPAIGPIRSALLVALLQTPHRFRTKRQLWAYSGFAVETHDSGEYRWVRGKLQRNRERMTVRGLNDNHNRDLKNLFKSAAISASTHPGPLRDFYVARVEKGMRPTMARLTLARKIAAISLTIWKKGVEFDAQQLQRPTA

SEQ ID NO: 335606 - protein, 336 aa, unidentified
MKYVGIDLHKRDLVVAVEDEQRPVGKPQRLLCENESAIIELFDKLRPFKAVIEASASYRWLYDLLEPMGTVVLAHPLRLRAIVTSRAKTDKLDAATLARLLRIDEIPAAYVPPRRFQDLRDLTRARARLTQQGTVAKCQMHGVLRRVNAHSPYRNVFCQKGRRWLGTLDLGVAGNLVRDELLLRLGHYDRAAAKLDVHLAKVAEEFPEVESLTALYGIGLYSALLLVAELGEVERFGNDRQVGAYAGLTARVHQSGGHDYHGNITHQGSSWLRWILVQAGMKLIRRDAPLRNFYTRIRKRAGKKIARVAVARKLAGICWIRLRRWHREHSVVAAGN

SEQ ID NO: 335607 - protein, 304 aa, unidentified
MFGIGIDVSKATLDVAVHEEQFRQFSNDKRGFLRLIRWLKKWAIKQVVLEASGGYERAALDALYAAGLPVVRINPARARRFAQGTGRAAKTDRLDATVLAQMAHLLPLTRYVPPAPWQQRLAEFGQCRRHLVQMRVSEMQRLRRLADPDLIAIKQRHIAQLSDDLKQLDKAIAEQLEGQPGWKDIGSLKGVGPILISTLACELPELGRLGSKAIASLVGLAPMNRESGTWQGQRRISGGRAVVREALYMAALTAIRYEPRLRAFYAGLKAKGKASKVALVAVMRKMLVILNARKRDAEVALGSP

SEQ ID NO: 335608 - protein, 413 aa, unidentified
MGGFPVFSLIPFQGGVVLSALFIGIDVSKDFSTAQAINGKGNKCFYLELAMTADGFEQLLKAITSYCKDLGEVTVAMESTGCYHVNLFSFLTYKGIRCIIINPLLTANFAKLSLRKTKTDKKDALTIAQFLLVQKDSLLKTDLSPDRQDLKDLAREHESLTNLIAGMKNDIRRMLQITFPELESICNIFSETILEFLRQFPSARSIKIARPNTIAGALLHEDKRKKTSVSAEDIIRAAKTSVASHAAAKEIILPEKISTLQHLIEKKVRMKKALVEACEAMMVEDIEIITSIGGISNITASRLLAEIGDYRDFSTYKHIIAFAGLDPSVHQSGKFEGISRISKRGNRHLRYIIYLMTTCVVRGDNIFSSYYQKRRAEGQPFKMAIIATAHKLIRVLFTMLSKRTTYKPKEVNA

SEQ ID NO: 335609 - protein, 347 aa, unidentified
MKIIGCDFHPSYQQIAMLDTETGELLEFRLEHEKGEARRFYERLQGPVRVGMEAVGNSQWFEQMLAALGHELWIGDAGEIRRLEVRRQKTDRRDARHILDLLLDGRFPRLWVPSAEIRDVRQLLRHRQKLVEWRTQVKNQLQHLALNQGVQRKRKLWSKEGRAVLEQLPLQGWTARRRAELLGMLDRLEEQIKELDTAVRAEAERRPEVRLLMTHPGVGPVVGLAYALTIGPPGRFSRGKKVASYLGLIPRENSSGGRQRLGAISKQGNTMMRTLLVEAAQNAARFDEQLRRDYRRLAARKHKALAKVMVARKLAVRLYWMLREQRPYVPPSVARRQGGSSHSVVEG

SEQ ID NO: 335610 - protein, 352 aa, unidentified
MIIIGVDFHPEFQQIASVDSETGEFQEKRLAHPEEAEKFYRGLVGQKVRVGMEASGHARWFERLVAELQFELWIGDAAEIRTKRVRKQKTDRQDAQLILRLLLEDRFPKIWVPSLENRDLRQLLWHRHRMVQARTRIMNQLQAVALNEGLRCKKRLWRERGREQLESFLLAPWASRRRRDLLELMDRLSPTIAELTLAIEREVEKCPEAKRLMTHPGVGALTALAYVLIIGKAERFGSGKQVASYLGLVPSEESSGNRRRLGHITKQGSSILRFLLVEAAQVTVRSVPEWRSKYFHLAMRRGRKIAKVAMARKLAVRLYWMMRQGWDYEQVKKFGSHAGQPGNRHGVQSNTE

SEQ ID NO: 335611 - protein, 343 aa, unidentified
MEYYAGIDVSLKESSVCIVDAKGKVVREVKVASEPEALSRYFDELELSVCRIGLDAGPLSQWLRAGLIAAGRDVALLETRHVKAALSAMTVKTDRKDARGIAQLLRMGWYRPVHAKSVASQDTRAVLVGRKLLQGKLLDVELSIRGILRGYGLKVGEVSRGRFAARIQELIAGHATLETVIGAMLAARATLWQEFTRLHREMLKIARADKICHRLMSTPGVGALVALTYRSAVDDPTRFGKSSTVGAYFGLTPKKYQSGETDRDGGVSKVGDAMVRTALFEAAHIMLTRATRFSSLKRWALEVAKRRGMKRAKVALARKLGVVLHRMWMDATDFRWGATAMAA

SEQ ID NO: 335612 - protein, 391 aa, unidentified
MIYVGIDVAKDKHDCFIVSSDGEVLFDVFTIQNNMDGFEDLLFKIKSAEKDSGNVKVGLEATGHYSCNILGFLKNKGLPTIVINPLYTSLSRKSISLRKTKTDKVDARTIASMIMSDVSLKPYSDKLYHNEDLKSLTRYRFDKVMQRAKLKQSVSRLVNILFPELETLVSTLHGKAVYELLLEFPSAQHIASANLKHLTHLLNTSSKGRFKRVTADEIREAARKSISSYLPAKSLELKHTIKLIRELTSEIAEIEAEIKKIMDAIDSPILSIPGIGQNLGAMIIAEIGDFSRFDNPDKILAFAGCSPTTYQSGQLYSSHAKMEKRGSRYLRWALLNAAAYVCNWEPTFAAYLQKKRAEGKHYYVALSHAAKKLVRLLYHLEITGEVYQATA

SEQ ID NO: 335613 - protein, 342 aa, unidentified
MQSYYVGLDVHSRESVFVVENDAGVIVARGSVPTTVNGLKHLHDSCGLPAATGVALETGNSAFFVARELARLELKPVVIDAHEVRRKAQRPEQKSDTRDALELCEGLRRGFYRSLVHVPTPAIRDLRTTLSRRRHFIRIQTAEVNAVKRLLRGVGRNSGRRGSLRTDAHWQSLLAGDLVPEQLQEHVRHHHAVWHQAAERVRALDLSLGDSARERRDAVKRLETVPGVGPIVALTAIAVCAEVSRFENAKHAASYAGLVPSTFQSGERDAHGHITKRGSAELRAMLCEAAHHARRSAHPLHPHFARVCARRGYKTAVIAVAHRLCRILFAMLRTAPTSASAA

SEQ ID NO: 335614 - protein, 341 aa, unidentified
MAESVGLDVSMKETAVSIRRDGKRIWRGKCGSDPKLVAEVIRRRAPDAARVVFETGPLSVWFFHALTAEGLPAICIDARHAKAALDMAPNKTDANDADGLAQLAEVGFFREVRVKGFDSLLGRTLVAARNRLVQITTELSNQIRGLMKTVGLLVPAGKGSKFEEHVRALLEDQAELARIILPVLEAWRGLRRQAAELSRQLIVSARQSQACQILMSIPGVGAITATSFATAIEDPGNFRKSRSVGAWLGLTTRRYQSGEIDYDGHISRRGDTHLRGLLYEAATVLLTRTSAESSLRTWGLKLKERIGFKRAAVAVARKLAVVMHAMLRSGQLFERTAGGAA

SEQ ID NO: 335615 - protein, 387 aa, unidentified
MNKNRGRVVGLDVHPDSFAGAVVEGSDPASARVLSTSTRVELEQLERWALRHTRREDTLVLEASGNAFAVAARLRALPRAVEILDSHRAGKVGKVYCANDRVDAVKIARIYLSALSPIVWQPDEKTLERREVFSAYQAVVKESTRAKQQLRAMLNEHCVRLEKGFRLCHPRAITRLLQLRSWTPARKMLLQQLHGSLLSARARRTLLRRHMAQEIVADDALMRLSRLCGINLVTLYGVVSAVGDVHRFTHSKKLAAYFGLNPSVSQSGNFEGSGALKRHGRGALRALLIQSGKKLLEVNNPLQKWGLAVAARRGRNKAAVAVARKLCVAVWHVLMGHVIGALERLDTLETKLNKFATEIGPAALAAFGYTNKADFVQKKLYVLRSYP

SEQ ID NO: 335616 - protein, 316 aa, unidentified
MNTNTEIIVGIDISKKNLDIQIQEDGPYFTCGNDLMGIDNLVEKLRSVQPALIVLEATGGYEKAVVSALVEAELPVTIVTPLWVRYFAKSSGTLAKTDKIDAKMLVRYGRANLPPVVIKRSEEQERLSELMTRRSQVSLALITEKNHLENVTSEVVKKSIQKTILFLKQEIKELEAEIDEIVKSYPTLKNNEQIISSIPGAGKITAAILLADLPELGTLDHKKIAALVGVAPFNRDSGNNRGKRRIKGGRRSVRKVLFMAALAAIKWNPVIKEFYERLLAGGKVKKVAIVACMHKLLTIMNAMIRSQTSWKPIATP

SEQ ID NO: 335617 - protein, 318 aa, unidentified
MVEDITRTAGIDTGKDRLEVAVHGGGGPFTVENTPAGWQSLADRLSHDGVQRVGIEASGSYERGVARHLQAAGFTLVVLQPLQVRAFAKLHLRRAKSDRIDAVLIAACTDVLDPKETKAADPRLDGLCDQLTFVEQVEADVARLKARLEHIRDPRLRTMVTIDIKNLQARRADELRRLITALQSHADLARRFALVLSVPGIGERTAIALVLRMPELGEVSREQAAALAGLAPFVQQSGRWKGETHIAGGRSRLRRSLYAAALPAAFRWNTALKALYRRLVKRGKAHTVALVACARKLLVFANTVVTRGTPWTERPITP

SEQ ID NO: 335618 - protein, 330 aa, unidentified
MPHYVGLDVSQKTTAICVVDEQGRWLWRGVCATDPEAISARVLRHAGVDAKVGVETGSMTPWLVHGLRSAGLDVACLDARRVKAALQMRLNKTDENDAEGLAQIMRTGWYRPVHVKSLDAHRARALLGARAQLVGMTTRLSNMIRGVLKTFGVLPGAGRRLRFDHRVEALLDDASDIALIVRPLLVSWRQLREQIAVFDKAVRRQVGIDPICRLLMTVPGIGALSSLMYVSTIEDPGRFSRSRAVGAHLGLTPRRYQSGETDRSGHISKCGDGLARTLMYEAAKDWAEAIERRSSPGKARVALARKLSVILHSVWRSGEPFRWAPTAPAA

SEQ ID NO: 335619 - protein, 316 aa, unidentified
MMSEEISRVLGVDVSKDWLDVAAEPDGSLQRLSNDTEGFKSVIALARESESERITLEASGGYQTRLVAALLEAGLPVVVVNPRQVREYARATGRLAKTDRIDARILCAFTLAVQPPLRELKDEQAELLSSLIARRRQLIEMRTAEKNRLTLGARGKVRKNLKAHIEWLDRHLRDTDRELRQLIERSPAWQEKEDLLTSVPGVGKTTAQMLIAQLPELGRLTHKQIAALVGVAPFNRDSGTLRGQRTTWGGRDSVRAGLYMATMSAIRANPPIKAFYERLRGRGKPGKVAMTACMRKLLTMLNAMLRDHKPWEHQMA

SEQ ID NO: 335620 - protein, 370 aa, unidentified
MLDTTTFVGLDVHARSIKAVSLDVMTGEVRAATFGYDAGAVAEWVRSVDPKARCVYESGVTGFDLQKRLSGLGVDCVVGAVSKMIKPSADRRRKNDRNDAEFLARMLSVGNVVEVWVPDDECEAARDLTRALEDARDDLSRSKQRLSKFLLRHGLAFDERTPTGRRKGNWTRAHWSWIESIRFAERADEEVLAYYVDAVRRAAEEKARLEGLVEAEARKPRWRKRVDSLRCLKGVDTATAADLVFEAGEFSRFRNARSFAAWVGLTPSEHSSGESDRRGAITKAGNKHLRKTLVEAAWHYLTCSGRPKDLARGQAPDRGARRHAAKGVRRLVERREALLARGVHNNKANVATARELACWVWAVGLMAEEA

SEQ ID NO: 335621 - protein, 344 aa, unidentified
MKITTIGIDLAKNVFQVHGVNEHGKAEKKRQLKRGQVAEFFANLPPCLIGMEACGSAHYWARKLEGFGHTVKLMAPQFVKPYVKTNKNDAADAEAICEAVARPNMRFVPIKNVEQQSVLSLHRVRQGFVKARTAQANQIRGLLGEFGIIIPQGIANIAKRVPELIEDASNDLTGSFRLLAKRLMDHLKELDKQVGELEVQIKTWHRESDASCKLEKIPGIGPITASALVASIGNAKNFDDGRQLAAWLGLVPKQHSTGGKAKLLGISKRGDSYLRTLLIHGARSVILSASKKVDKSSWVHKLLERRNPNVAAVALANKNARIVWALLANEREFRSDYTPARAIA

SEQ ID NO: 335622 - protein, 420 aa, unidentified
MKVTYQTCCGVDVHKSFLVATIVKTTGGIEPSYQKKRFSTFNNSILEFKQWLLDNHCHDVCMESTGKYWVPVFNLLEDKINVVIANPKWVKAVKGNKDDTKDSKWIGDLFRLGLVKGSYIPCKIVRILREYTRYRYKLVSCRSSEKNRYQNALTVCNVALDSVVSDIFGKSSMSIIDYLLEQSGTSINHEEIASKLLRSLKSKEDAVIESVEGYQMTDAQKYRMRLVRAHLDYITSTINDIDTMLDSLVAPYENAVQLLCTIPGVDRNSAVTVISEIGTDMTPFSNSKRLCCWAGLTPGNNESAGKKKSVRITRAGVYLKPALVQVAHAAVKSDKSPYYKQKYERIMKRRGKKRAIIAIARMILTAIYQMLSTGEAWNPTDLFKIDMPEPMKEKQKEKAIKQAMKLLIREGKISESQLAS

SEQ ID NO: 335623 - protein, 335 aa, unidentified
MTCQNIQPQKTNVTPQSEHISPAAYIGIDVAKTQLVIAHNGQVTNVANSKRDLQSWLGTLPPNCALALEATSSYHQLLADMAYAAGHTVYVLNPKQIKHYRTATRGRAKTDLCDALLLARYLEREYMQHHPYQPLSPDSMRLCSLLRRRAAVVKSKILLRLSLEGEAKALGLGTKLTSLLDSYKRLLKAIDLKIDQLLKKPQFEEAAGRLLSIVGIGPLSGAALLVALERGEFKTPEAFVAFFGLDPVSRDSGQSNGRRRLSKQGDSETRRLLYNAAMSASLTELWRPLYLRYLNRGFTRIQTLCIMARKLDRIAWALYKKKQTFCAQKFAKSLT

SEQ ID NO: 335624 - protein, 347 aa, unidentified
MMIIGCDLHSRMQVIAMLDTETGEVVERQLEHESGEARGFYEGLKEPALVGIEATGYTRWFAELLSELGHELVVGEAGKIRALKTRKQHYDRGDAEHILNLLVRGDFPQVWLPPAEERDVRVFLEHRHQLVEMRTRAQNGLQAIALSYGLRRRRGLWSEAGQKELQKLPLREGMKRRRADLLRLVRQLDIWIQELDRRIQLEVAQREEARRLMTHPGVGPQTALATVLVLGPVERFPDDRHLTSYLGLIPREDSSAGRQHFGHLTKQGNRLLRWLLVEAAQTASRYDPQLRRAYRRLAFRKGRPVAKVAIARKLAIRLYIMLRDKIDYREFCRRGSHAGMPEEVALA

SEQ ID NO: 335625 - protein, 321 aa, unidentified
MSHTTSTPSFVGIDVSSGTLDVCSIPEKQLWTVGNDPAGHAALVDELRTLKVVLIVLEATGGYEIAVTAELAAAGLPVAVVNPRQVRDFAKALGITAKTDRLDAGVLARFAQNIRPEIRPLPTEEERFLRELLTRRRQLVQLQTQESNRFQQAASAKVRHSISNVLQFLEKQRRQIDADIDRLIRQSSVWREKEEILRSVPGVGPTTARTLLAELPELGRYGNRQISSLAGLAPRNRDSGKFCGRRSIGGGRGNVRKALYMAALTAVKYNPSLHEFYQRLRNEGKKFKVAITACMHKLLIILNTMMRKNTPWNSKFNPQIT

SEQ ID NO: 335626 - protein, 371 aa, unidentified
MSHVTSIGLDVHARSVSAAAFNLYTGEVVERRFGPEAGPIAEWVLSFESPRAVYESGPTGFALCRELRALGVDCVVGAVSKMQRPAADRRVKNDRRDAAFLARLLATNNVVVVPVPDAGVEAARDLPRALDDARENVQRARQRLSKFLLRRGYVFDERDSLGRRRCAWTAAWWSWVAKIKMPEPAAKAALDHYIEDVRHEESSKLKLEKLVAAEAARPRWAAVVAALRRIRGVDTVTAFCLAAEAGSFSRFRSAPAYAAWVGLVPSEHSSGEKVARGGITKTGNSATRRALVEAAWHFASCSPSPKPPKSGSEAVPADIERRCAKCTARLAARHRALREAGKRPCVANVAVARELACWVWEVGCRAEGTLR

SEQ ID NO: 335627 - protein, 425 aa, unidentified
MKNNILSTLFVGIDVSSKTNVLCALDFQGNKLLNLKALNNQPGAESISESIIDCLDSNSLKYVVIALESTSFYSTHIANFLASNEYLLAYKPLVYCLNPKTIANYRKTFVDMDKTDPLDAYIIADFARCGRIKSKPWRGAQFLALQRLTRHRLHLVEGITREKSYMVSNIYLKFSELAVLDKEDRPFSNTYGATSSAILTEYLSLDDITYSSVEDLVEFIKEKGKNHFSDPKKTVQILQKAARDSYRLDKVLYEPLNVAIASSFNVVKALENEVKAIDKAIEKNIKGVNPTEYQSLISIPGIGPILASGILAEIGTITSFDSHNALAKYAGLTWRVNQSGNYSSDDTRMTKTGNKYLRYYLIEAANSVKNHAPEYKEYYYKKYGEVTTHQHKRALALTSRKLVRLVFGLLTKNQIYSSDKVGEIN

SEQ ID NO: 335628 - protein, 350 aa, unidentified
MNITTVGVDLAKEVITVCTMDAHGHVLKTRDLRATEFSAWLVQLPVGTILGMEACSSAHHWARKMQAMGLVPKLMAAEFVQPFRKSRSSKNDHNDAEAIAIAVKQPQMRFVAIKTEAQQARLAWHRCREGWKEERTALINRTRGLLLEFGHPLARSSKAFTVGLQAALHHDALPPQFRTLLTHVQQQLQQLDQQLAQCDRSIALSAKQDESSQRLQAQPGIGPISADALTASVGNARDFKNGRQFAAWLGLTPRQYSSGGKTKLGRISRRGDAYLRTLLVQGAKSTLQSTLKKAPNLLSHMQQWILKLYGRVGYHKTLVAIANKHARQVWAILSKGEAYDQDAWKRIVST

SEQ ID NO: 335629 - protein, 426 aa, unidentified
MSVRDYSKQVARRQRIGDTTLVVGVDIGCASNAVGFMSKEGKVLGSYPNMPNSREGFEQFVKVTEGLRAKHGLTEVLIGLEPTGHYWRKFAYFAKAKGCEVRFVRTTALRHHRELDESSSAKSDKQDALTITNITREGKYIDTVIEDGRMRHLRTLVKVREKIRKRNVSAKNSLHAALDDYFPELKEIFWSMHSRGLWALLQRCPFPVDVVTLKVSALKEIIARASRRRAEASQKAVALSQAAKESIGLKQIGSADRYRLRMCLDEVKRTELMIKDIEREIKRMLKEIPQAEYLLSIPGIGPISAAVFLGELGDPSYFQSARQIVKYAGYDPQESDSGYRVSRKFISKKGRWLLRKHLFLMSMRVVVLSRYFQEYYQRKLQTKNRFSQLPRKKEVLCAVAIKLIKVIFALLRDKRNFEDTVACSVE

SEQ ID NO: 335630 - protein, 345 aa, unidentified
MNITAVGIDLAKNVFQVHGVDARGKTVLRKQLRRVQVAEFFVNLPPCLVGMEACGGAHHWGRTLQRFGHTVRLMPSQYVKPYVKTNKNDAADAEAICEAVGRPNMRFVPIKSVEQQAILSLHRVRQGFVRARTAQANQIRGLLSEFGLVIPQGIRHVTQRVPALLEDASNELPLPFRQLIERLTEHLKVLDQQVRDFEAQIVAWHRSSELSRKLEKIPGIGPLAASALVASIADARSFDNGRQVSAWLGLVPRQVSSGGKSVLLGMSKRGDAYLRTLLVHGARSAILAARRKPDSANVWLANLLNRRHANIAAVALANKNARTVWALLAHDREFQADYVPLVAAA

SEQ ID NO: 335631 - protein, 402 aa, unidentified
MKEDIAKAISQQTAAALNDAKGWSRYGGFIGLDVHKDTIAVAIAMPGRDEPVYRGEIAHEPKALKKWLDRLNDEFGGAVLLFCYEAGPCGYGLYRQLLAAGHDCQVVAPSLIPKKPGERIKTDRRDALKLARLLRAGDLTAVWVPDAEQEAMRDLTRARDDMKSQERKARQQLNAFLLRQGHHWPSGKKRWTKIHFNWLESISFEQPWLQIVLQEYVDAVKAATQRVDDLTDQLMRALPSWSLAPVVDALVALRGIDKLAATVLLAELGDISRFDSPKQLMAYLGLVPSEHSSGGRRRQGAITLTGNRHARRMLVECAWSYRFPARQTMHLKRKAQHASEQAKAIAWRAQKRLCGRYRQLSQAGKNIKLVCVAIARELVGFIWDIVRHEMPRLEVQVAPAGR

SEQ ID NO: 335632 - protein, 406 aa, unidentified
MYYVGIDVAKEKHYVCVLNENKGLACKPFWIYSDITGLNELVKRLTELSTNFSQFLLAIESTGAYSENIYEYLTDMELKTILLNSYQTAKYRDFSTMKRVKNDSIDAYVIAELISNGKYKESHISSETYHTLKVLNRLKKSLDEKIKTIQREISTVMAIVNPEITLVFKNIFTKTALAIIKEYPTAKDLQTTTPKKLCKLFRNIKGNNFNEDKAKILIENAINSIYSGKSKYARSLMITTNITILELLIQEKSFLENEIQTLIDNNSDSNFTNGVENLKTIPGVANKTISAILGECGDLTRFKTAKSFIGYLGLYPTQYQSGNSHTIGRLAQRGIPIAKHALYMSAVSSVLHNEQLHKIFRDKVSSGKSKKEALIIIAKKIATMIYSMFKYNTQYNPNRVLVSYRK

SEQ ID NO: 335633 - protein, 388 aa, unidentified
MQVAADRTDASTAIQTDLPAIFVSLELSRSTWLITSLSPGAGEKMSKHSIRAGDVAGLLVRLAQLKEKARGRTGRDFPIIAIQEAGLDGFWIHRVLQSEGIESHVVDAASILTSRRRRRAKTDGIDGETLVRTLLAYKRGEPRVCAMVKAPTPEEEDRRRICRERKALVGERVEHVNRIKGLLFAQGVSDYEPLKRNRRARLGELKTGDGRPLPAHLKAQISRELDRLELVLPQLKAVEAERDALLKPVSEGCPTPAAMLAQLKGMGPEFTAILWSEGLFRSFSNRRQLAAYAGLAPTPWQSGSVAHEQGVSKAGNPRLRTTMIQLAWLWLRHQPTSALSVWFQERVQSNGGKMRKTMIVALARKLLVALWKYSTRGVVIEGAAMKTI

SEQ ID NO: 335634 - protein, 366 aa, unidentified
MEKSSTAFVGMDVHKESIDVGIADATEACHYGRVGGDAASLDRVVRRLRSAHRQLVFVYEAGPCGFWLYRRLKARGLQCMVVSPSKTPRNAADRVKTDRRDSLKLARLARAGELEPIYVPDAKDEAVRDLVRAREDAVCMQRQARQRLAALLLRNEIRYSGKTAWTQAHRRWIAKLKLPNPAQQIAFEEYVQAVHEAGERLERLAKAIGAELKHWRWRPVVEALQALRGVSAIHAVRIVAELGDLSRFESPRGLMGYLGLIPSEDSSGPRRRQGSITKAGNSSARRALVEAAHAYAHPARVSWVIARRHTGLPKSVCDIAWKAQLRLCTRFRRLRARGVLKNKVVVAVARELSGFVWAIAREVKPD

SEQ ID NO: 335635 - protein, 361 aa, unidentified
MKCVQRNKLDFSGQNIYVGIDVHLKSWSVAILSEHSVLKRFSQSPEPELLHKYLVSNYPGANYFSVYEAGFCGFWIHESLTDLGITNIVVNPADVPTMSKEKLRKTDAVDCNKLARELRSGSLEGIYVPGTATLELRSLIRMRTLIVKDSTRAKNRIKSLLHFHGVKIPEEFIRCSSHCWSKRFLRWLHNLELSTEYGKKTLELHLEQFIRLRKMLLQETRAIREISRKAPFAKPIRLLSSVPGIGITTAATLMVEIDDIVRFNSAEHLASFIGLVPMCHSSGDNDAVSNMTIRRHFMLRWLLVESAWTAIRIDPAMTMAYTEYRKRMNPQKAIVKIARRLVNRVYFVLKYEKEYVSCIVK

SEQ ID NO: 335636 - protein, 332 aa, unidentified
MAILDSATGEIREQKLENGNGEAERFYRSLPSPARVGFEACGNTQWFEDLLDGLGHDVWIGDAAEIRASYVRKQKTDRRDAAHILKLLIEDRFPRLWRPSPAERDLRQLLIHRHRLVGIRTRVKNGLQHLMLNRGVQLKQKLWSEAGQKLLRELPLEGWAAQRRQDLLNLLSGLNPQITQLDQAVERAAQEHPRACLLMTQPGVGPITALAYVITMGDVTRFQRGKQVASYLGLIPSEHSSSKRRRLGSISKQGNPFLRMLLVESVQTVCRLDEGFRKQYKHRCHRMKKGVAKVAAARKLAVRLFWMLRTGTAYPEIARIESSPRDGVVGRS

SEQ ID NO: 335637 - protein, 345 aa, unidentified
MYATQPREPSYDDYQNWSGYRLFQVHGVDENEQTVVRRQLRRSEIAKFFNRLPPTRIGLEACGASHYWARLLRGLGHEVVLLPPQYIKPYLKRGKNDANDAEAICEAMSRPGMRFVPIKSAERQAELMPLGVRDLLIKQRTAVINAIRGYAAEFGVIAAKGPVKVAELLQQAHAEEASVPAVALDMLRLLAAQLDALDVKLKQIETRLVAVHRENPLSQCLASQPGIGPIGAVSFALKVTDPKSFRSGRHFAAWLGLTPKDNSSGGRRRQGRISRQGNETLRKPLVLGATAVIRFARPGHASPWLLNLLARKPRKLAAIALANKMARTLWAMMVSGEVYRRPLPA

SEQ ID NO: 335638 - protein, 366 aa, unidentified
MQNTIVQNEGAASLEAARTKVKLSRSIIKIGLDMHARLYVAVAQYDQLLPKPARRLAPLEFVPWVRQLLRAGHTVHVVYEACGFGFNLHRELKALGAQCYVIAPRKLDEQCTRVKTDPRDGLTLCQRLSRYVEGNTRELAVIRVPSEEEEQARHVSRQREQLVHHRQKLEAQGRSLLINHSLPAPAHWWKQQTWSRLGKLLPAWITLHLEVARPALLCLQKQINALTSELEAAAPSDIPAGLGKLTTVVMTREICSWERFSNRRAISSYTGLCPGEHTSGTKRIPGSVTKRGNPRLRAALVECAWRMVRFQPNYPPVKKRLGILAKGARATGAQRKKAIVAVARRLAVDLWRVHTGRCIAAQLFNH

SEQ ID NO: 335639 - protein, 462 aa, unidentified
MRRRDERETWENRREQLEGLPIIRRNVAGIDLGSERHWVCAPTPNAQGREITSFGATTPELIRMAGWLKERHVESVAMESTGIYWIAPHEVLEAQGLQVLLVDTRQLARVPGRDKKTDPSDCEWIQRLHSCGLLRGSFRPEEAVCMLRTLVRDKANLVAESGDWVRRMQKNLDQMNVRVHRAVSDIDGVTGMAILRAIVGGERDAQKLAKLRDRRCSKTEEEIAEQLSGHWREDHLFSLQQALKMYDAVQERIAAYEKEILGKLGDMERDEHHEQTAPPLPNPNKAKTIKHRGQEAKRQALYRMSGVDATHIDAIGVETVEVVLSEYGPDLSRFPTEQQFVSHVTLAPRVPKSGGKPVKKKKRNSASTRVAAALRMAALSLRHSQTALGAYYRKMAQRRSGDIAVFATARKLAILIYRLLRWGQTYVDEGAEAYEDRYRQRRIGHLTATAKQLGYQLIPVNA

SEQ ID NO: 335640 - protein, 345 aa, unidentified
MMKTIAGVDLAKKVVQVCVYANKKVHSNTEMTPNEFTCWLANSESATVIFEACGTSNYWKQLAVSLGHDARLISPKLVASVRQNQKTDKNDALAIIQASLLPDVAFISGKTMDQQQLQSVMRLRELSVRQKTAAKNQLTALLTEFNIKVSHKHGGLRGSIESTLEDAENGLSSEFLMALSVAWEQYLSLVNAVDTYDTCLEKSLQSQSDCKKLLKIEGVGMLNAVSLYIALGCTDIGTFTKGKDAAACIGLTPIQHSTGGKVKLGSIGRRVKNNILRSQLITGAMAVVSHLANRPARTKKELWLKALIERRGKKCAAVALANKNVRTAFAILTQGTEYKAEPIVA

SEQ ID NO: 335641 - protein, 379 aa, unidentified
MIYYIGIDISKYKHDFCIISNAGEAIVENNSFDNTKNGFQYFVNLLKSYDKSKVRIAFEATGHYSKNLELFLIDQDYSFMKINPLVIHQFLKARSLRRTKTDKADSIAIANYLMSVPYKPNSNLLYNIYTLKTLCRSREQLIKERSKFFILLTNELDLTFPELKPFFSNDFSATLLYILDKYVNTEHISLMRDFETISKKSRWRFSYAKFVNLKELAKNSVGHHDKNTDLLISTYVSIIQNFNDKIDPIDKQISTIIKELNPRMLSIPGLGEISAATIISEYGDIKNFSSSNKMLAFAGLEPSIIQSGTIENNGKMVKHGSGHLRYSIMNTAMIILRYSPTFYDYYHKKCSEGKCHRVALSHVCKKLLRVIYTLEQHGF

SEQ ID NO: 335642 - protein, 339 aa, unidentified
MESYVGIDLHRRRSVVVVLNKDGDRVSWSRIDNTPVNLAREIVAAGGPEAEVAMEATWGWYWAGDVIGECGATLHLAHPLGIAGYANRRVKNDLRDATLLADLLRLGRLPEAWAAPPEVRELREVVRYRAKLGRLRSGLKQQVHQTLGKEGVIPELDSIWRGGGRQWLDDQALGDVYVGRIESLRDLIELYDREIGQCDARIHRRLKGHRGYEAIQALRGVGPVLAAVFVAEIGDITRFGRPEQLTSWAGLTPKHHESDTTVHRGRITKQGSRLVRWAAVEAVQRVGGHTRLGQVRDRVAARRGRNIGVVAAARRQLEYVFYALRDHHVRALSGTRAVA

SEQ ID NO: 335643 - protein, 408 aa, unidentified
MNPLFVGIDVSSKNNVAYLMKPDGSKHSSFSVQNNLGGAKLLSERIVSALSSMRLSDVVIGLEATSIYGDNLVYALREDGGLGRFRRKIHVLNPKQVKKFKEAYPDLPKNDWVDAFVIADHLRFGRIAKEVYMDDYRYQALRTLTRARFDVIQNLTREKQRFANYLFLKCSGMAQDKGIQNTSATTIALMERFETVDNLANADLDDLTAFVAETGRGRFADPESTAKAVQAAARGSYRLPKTVNDTVNQAMAVSIASMRALKEQVKVLDKAIEQQFEIIPNTLTSIPGVGKVYSAGIIAEIGDNHRLSSQASVAKFAGLVWTQHQSGEFEAEHSRMIKSGNRYLRYYLLEAANSVRRCDSEFRRYYDLKFKEVNKYQHKRALALTARKLVRLVFRLLKDNRLYIPPEG

SEQ ID NO: 335644 - protein, 340 aa, unidentified
MSEITIIGLDIAKHVFQAHGIDAEGTTVLRKRLRRGQVLAFFSRIPRCVVGLEACATAHYWARELGALGHEVRLMPAQYVKAYIKRNKHDAADAEAICEAVQRPTMRFVPVKTTEQQATALLHRGREQLVRQRTMLVNALRAHLAEFGMVAAQGLRNVGELIAIVRDDGDTRLPDVARQVLQVLAAQLEQIEAAIAALEKQLMAWHKANAVSQRLASIPGIGPIIATAIATTVADPGVFRSGREFAAWLGLVPRQNSTGGKTRLGGITKRGNRYLRRLLINGASANLLRSKATKADPWVIGIRRRRPPLVVAVALANKTARIAWAVMLRQKEYQPRALAA

SEQ ID NO: 335645 - protein, 409 aa, unidentified
MANETTKVIAGIDTHADTHHVAVINEYGKPLADKEFLAVGSGYRKIVEFITSYGPVAAVGVEGTGSYGAEIARTLRGEGLCVLEVNRPNRAARRLKGKSDPLDAYQAAQSVLDGRTTAIPKAKDGPVECLRILRAGRTSAVKARTAAINQIKGLLVSASDNLRAKYRGLGTAAMITALQRSRPSGHIADPEYVCLLALKALATRCQSLAAEIAAADAALREILDTYAPMLCDLPGVGTEVASQLLVTVGDNPDRLGNEAQFAALVGVAPIPASSGKTTRHRLSRGGDRNANRALHQVVLVRMGSCQRTKDYVAKRTAEGKSKRETMRCLKRYAARELYRQITNPQPAPSNADLRQMRTKLGFTITTAARELGHWPSKISSLERSLIRNDALAKSYRQWLTQQAAATRTT

SEQ ID NO: 335646 - protein, 341 aa, unidentified
MGQASTIGLDIAKWVFQAHGADATGRVVFRKRLVRAKVLEFFAGQPPCLVALEACGGAHYWARELGKLGHTVRLIPPAYVKPFVKRQKNDVADAEAICEAAQRPGMRFVPVKDEAQQANAVVFRARDLLVRQRTQCINALRGHLAEYGHVVPQGPAHVDSLVALVEDPKSSVPESARGILQVLIRTLNALEEQLKELDGEIARRAKTDPVARRLMTIPGIGPIAATAITALVPAPEGFRAGRDFAAWLGLTPLQKSTGGKHKLGAISKRGERTIRRLLILGASAVVRWASRRGAAAGSWLARMLARKPRMLVTTALANKMARIVWALLVKGGTYRAPAVAA

SEQ ID NO: 335647 - protein, 368 aa, unidentified
MNAVGIDVSKGKSMVAIMRPFGEIVSTPFEIKHTSSDINSLVKLIKSIEGESRIVMEHTGRYYEVLAHQLSEANLFVSAINPKLIKDFDNDSLRKVKTDKADSVKIARYALDKWQNLKQYSVMDELRNQLKTMNRQFGFYMKHKTAMKNNLIGILDQTYPGVNTYFDSPARSDGSQKWVDFASTYWHVDCVRKMSINAFIDHYENWCKRKKYNFSKSKSEEIYGKAKELVPVLPKDDITKLIIKQAVDQLNSASITVESLRTLMNETASKLPEYPVVMAMKGVGTSLGPQLMAEIGDVSRFTHKGAITAFAGVDPGVNESGSYEQKSVPTSKRGSSDLRKTLFQVMDVLIKTHPQDDPVYQFLDKKRG

SEQ ID NO: 335648 - protein, 340 aa, unidentified
MKVITIGIDLAKSVFQVHGVDTAGEVTVRKKLRRAEVLKFFEGLPPCLVGMEARATAHYWAREIGALGHDVRLMPPSYVKAYVRRQKNDAADAEAICEAVTRPTMRFVPVKSAERQGVLVLHRTRDLLVRQRTMLINAIRGHCAEFGMIAPQGAYRASELIEQVRKAEGSVLPELARSALLMLAAQLDALAVQIHALERQLLVWHRQDEASQRLATIPGVGIITATALAASVTDPGLFRSGREFAAFLGLVPRQNSSGGKDRLGRISKMGDGYLRKLLVIGATSVIRRAINNTSATGAWVRSLMERKPARVVTVAMANKTARIAWAVLARGDIYRAPAMT

SEQ ID NO: 335649 - protein, 335 aa, unidentified
MDFKVFIGIDVSKETLDFIPTSEGKRLFHEHVSNDNKGIVRLYKRLAKTVDSSPEQWLFCMEHTGVYCNPMLEFSAEKDLAIWLESAAKIKAHHALERGKNDALDALRIAEYAFAKKDKIKLWEAPREVIIRLKSLIKLRERLITSKKRLLDPLREEKQFCNKEWVREHEKLLKPVIAKIEKQTKEVEQEIQQLINEDDDLKRLYGLITSVRGVGQIVAINTLVVTNEFKQITNPKEMACNCGVVPFKYDSGKTIRSRAKVSHRANKTMKVLFHLAAMSAISTKGELRDYYLRKVEEGKNKMAVINAVRNKIIHRIFACVRDQRKYEENYIHSLA

SEQ ID NO: 335650 - protein, 370 aa, unidentified
MSQSSTLFIGMDVHKDTIAVAYVAQEHGAEVTSLGTIGTRQCDIDQLSRKMQSKAKHLIFVYEAGPCGYWLYRYLSKKGYDCWVVAPSLIPKKAGDRVKTDRRDAMQLARLARSGDLTAVYVPKVQDEAIRDLTRAREDAISDLKDAKFRLKAFLLRHASRYTGRAHGGPAHLRWLSEVVCPTPTQQIVVQEYVRAVHEHTERLQRLEQELHEHVKAWRLYPVVEALQALRGVQFTVAVTLVAEMGDLTRFDTPRELMKFLGLIPSEYSSGEQRRQGSITKAGNTHARRVLVEGAWAYRYSAKVSRHLQLRLETQPKIIQDISWKAQVRLCKRYRRLVSRGKHANVVTVAIARELAGFMWAIAREVPITP

SEQ ID NO: 335651 - protein, 317 aa, unidentified
MDVLGIDVSKAQLTMVLLQGESLTRKTVNNSSSGFRQLAAWLKNRKVRELHACLEATGVYGEAVAECLHDAGYIVSVVNPIQIKAFGRSTMVRTKTDAVDALVIAQFCRAQHPMPWTPAPENVREFRALIRRREALVDMITAEGNRLEAASAKEVRRSIRSVLKALKAELALLEREITDHVDSDPQLRQTIDRLDEIPGVGSLTAMKLVAETNGFTVCTTSRELVAYAGLNPRHYQSGTIVLRQRISRVGNPALRKALFYAAMSAKNRSQYFRPFVDRLKAAGKRPLVIVTAIMRKLLVLAHTLTAKGTRFDPAMAA

SEQ ID NO: 335652 - protein, 319 aa, unidentified
MPLAALIPAPVDYERTLVLAIEVSDKSWVLAAQVPGLPHTKAKRTISPQAVALSAAIAGYRTRATATGRKIERVIAVYEAGWSGFWLARWLMRHGVEVHVIQPSSVPVDRRMRRAKSDGIDAELLLRTLLAWLRGEPRVCSMVPVPEEADEDARRLVRERSDLISERVGLTNRIGAILATLGVSEYNPLLRNRNRRLAELRTGLGEPLPRNAHAKIERLLARLELVLAQIAELERQRDAVVETEASDKASEMIQQLTSLRGIGVQSATVLVREAFVRRFANGKALGSYAGLASSPFSSGGIDREQGIGKAGNRWVIPAP

SEQ ID NO: 335653 - protein, 329 aa, unidentified
MSAFVCGLDVHRDSTYATILDCNGKIVSQGRMGNDKVLPYLSNYKIDKIGVEASNQITPLYRLLSKKGYTVSVSHPKKTRYIAEAKIKSDRIDSKAIAELARLDALPLAYMPDQETAMLREKIRRRVFLVRERVRLRAKIRSILTYEGIKPPSEHGLFTEKGVEWLHRLNLEPVESYLQIIKPLDDEIKQLSKHLKELAKDDGDVKLLMTVPGVGYYTALLVKSETGHINRFSDGEKLCSYSGLVPSTYASGGVVTHGNITKEGSRWLRWVMVEAAMIHVHKYDTSITRAYHRIAQRRGRQVATVAAARRLLMCCYSVLKNKRPYYDQA

SEQ ID NO: 335654 - protein, 354 aa, unidentified
MIIIGVDYHPSFQQIAFCNQDTGECGERRLNHSDGEAKRFYRDLQQPGIRVRVGMETTGYSRWFEQLLAELGFEVWIGNAAEIKTQRVRKQKTDRNDARLLPKLMREDRFPRIWVPSPENRDLRQLLWHRHRLVQMRTRILNQLQALAMNEGRHWKMKLWSEQGRAELEKLALAPWASRRRRELLELLDRLHPTIEDLTAAVEQEARKRPEVLRLMTHPGVGALTALAYVLIVGTPERFRRGKQVGSYVGMIPKEDSSGGKQRLGHISKQGNSLLRFLLVEAAQAAARINSEWRRRYVHLAMRRHRSIAKVALGRRLGIRLYWMWRNGCEYSASLEFGSYAGQLGTGHGVTTAP

SEQ ID NO: 335655 - protein, 338 aa, unidentified
MEWTVAIGVDTHKEVHVAVALDALGAELDSREIATTPAGYRCLLTWAQELGVPAFAVEGTGSYGAGLVRFLERAGVAVYECERPRRQERRRGKSDLIDAALAARRLLSGERLSIPRGGGRREDLRLLLLERRSAMQARTAALNQLSALLVTAPEHVRERLGALSGERLAQAAARLRPGPDVLNGVLRRLGKRVERLSKELAEAERALAALLAEVAPDLLEECGVGPVCGAQLLVSSGDPNRMTSEASFAALAGTSPVDASSGKQRRHRLNRGGDRQLNWALHVIALQRIRHHPETSAYYERLLAAGKSTREARRCVKRALARHFYLRLREIPRLPLTT

SEQ ID NO: 335656 - protein, 335 aa, unidentified
MKKIYVGIDISKEKCNLCYRDGLEIVLEEESVNDVKALKKSLTAALKTFSVTIDEVLVCAEYTGRYIYPLTVACQELDIFLWMDDPTRIKNSMGLTRGKNDAIDAARIAEYAYRYSDKASRYCIPDAELVSMKSLLVDREFLLVDKKRYQSQINDQKRYMAPGDFKHKYARWKKVIKAIDEQIKAIDAEIESIIAANPVLTRQRELLTSIDGVGDRIAINMIAITGGFTRFQNARQFCSFAGLTPYKYDSGTSVRSKAKISKRANQTMKALLHLAAVGAATHMKESEYRDYFERKTKEGKHVMCILNVVRAKIVHRMFSVIRRDTEYTKAYKPAV

SEQ ID NO: 335657 - protein, 402 aa, unidentified
MNAVGIDVSKSKSVVAIMRPFGEIVSTPFEIKHTASDIHSLIELINSVEGESRIVMEHTGRYYEVLAHQLLEANLFVSAINPKLIKDFDNDSLRKVKSDKADAVKIARYALDKWQNLKQYNVMNELRNQLKTMNRQFGFYMKHKTAMKNNLIGILDQTYPGVNTYFDSPARSDGSQKWVDFASTYWHVDCVRKMSLNAFIDHYQNWCKRKKYNFSQSKAEEIYGKAKELVPVLPKDAITKLIIKQSVDQLNSASTTVESLRTLMNETASKLPEYPVVMAMKGVGTSLGPQLMAEIGNVSRFTHKSAITAFAGVDPGVNESGTYEQKSVPTSKRGSADLRKTLFQVMDVLIKTHPQDDPVYQFLDKKRAQGKPYYVYMTAGANKFLRIYYGRVKEYLASLPES

SEQ ID NO: 335658 - protein, 304 aa, unidentified
MDKSNTLHVGLDVHKDSIDIATAELGRDGEVRHVGSIGGELVALDKTLRKLISKGHRLHVVYEAGPCGFVIWRHLNTLGTACDVVAPSSIPKRSGERIKTDRRDAMNLARLDRSGDLTVVRVPGAADEAVRDLVRAREDSVRECRSARHRLKALLLRSGIAYAGKSSWTQAHLRWLATLKLEHAAQQIAFQEYLHSITETTTRIQRLEQSMRDTLPEWTLKPLVQALQALRGVQLIAAMTLVAELQDFLRFESPRKLMAYVGLVPGEHSSGPKRRQGSIYPRPATAPHGACWSRWPGTTSTAHA

SEQ ID NO: 335659 - protein, 347 aa, unidentified
MVIVDSGRHVVGGVDTHRDVNVAAVVDMNGGLLGVESFRTTGDGHRLLWVWMDGFGTIERVGVEGTGAYGAGIARFLSRSAVTVIEVDRPNRQQRRRHGKSDQLDAIEAARAALSGRCQGRAKSGDSFAEAMRALLIAKRSARSTRIRSIVQLRHLVITAPDELRAKLAGLTAIQLVNGAARLRPRADGDVVVQGIKTAAVILARRVQALDAELDAIDIQLAPLVKAAAPGMLQIFGVGVDTAAMLIVAAGDNPERIVSESAWAMICGVAPIPVMSGKSSNRYRFNPGGNRQANNALWRIVMTRLSQHEPRTVAYMQRRLEEGKSKPEIIRCLKRYVARETFQALLR

SEQ ID NO: 335660 - protein, 434 aa, unidentified
MNCNTQNAKIKSITEKTLIVGIDVGSETHYARAFDWRNIEFSKKPFAFSNDEAGFASFKAWLEDIKEKFGKTIVLPGMEPTGHYWFNLGAFLQDNGMKPVHVNPHHVHKSKELDDNNPSKNDCKDPKTIAALVNEGRFNYPYIPTGVYAEIRSLYGLQVMTQEALIRVKNRIARWLSIYFPEYKDVYRSCDAISGVMVLKVCPLPADIVMLGADGVNKIWRDAKLRAAGMKRARPLVEAAKHSVGSTESPEAAKYEMELLLGDYDVYTKRLEELTEKIEVKLEEIPYVDKLLEIKGVGKKTVSGLIAEIGDISRFDNPKQIQKLAGYAIVACSAGKHKGESNISYRGRKRIRYVLYEAAISLIGQNAEFKEIHRYYLTRQNNPLKKMESVIAVACKALRVFYAILTKGVSYDGKFMLESIRYPENQVLGNRIAA

SEQ ID NO: 335661 - protein, 433 aa, unidentified
MDNEFVAYVAIDWADRKHAWALQVTDGSPRESGSLDHSPEAVDIWAAELRLRFSGRLVAVALEQSRGALVFMLSKYQHLVVFPVHPTALANYRKSFRPSGAKDDPHDAGLLLDILLRHRDKLRRLNPDTVETRTLQFLVEERRKLVHEKTRYSNRLTAHLKLYFPQVLEWFDDIGSRIAADFLLRWPDLETLQRARSATIERFFLEHNSRSMERIRERLEQIRKAMAATNDQAVVSCSSAAVVAWAGLLRQLLEAIQEYDERIDRLAHQHPDYAVMNSFPGAGPVLTPRLIAALGSQRERYQTAHEVQCYSGIAPVVATSGKQRWVHWRWACPTFLRQTFHEWALHSIAHSPWAQEYYQEQRAKGKSRHTAIRALAFKWIRILFRCWKDGKPYDELAYQRVLAARRPKPRAAEAVELQWKGVAGFNKITNARA

SEQ ID NO: 335662 - protein, 312 aa, unidentified
MAPLYLGLDVAKTTVQLASEPAGLGGQFATDPSGLAVLVAQCQAQPVALVVLEATGGYEAPLAAALATAGLPVAVVNPRQVRDFARALGRLAKTDRIDAQVLALFGARVQPAPRPLPDEATQELEAVLLRRRQLLEMLHAERQRLPRARGREVRRNLQAHIRWLEHSLIDTDATLEALIQASPLWRVQDHLLQSVPGVGPTLARTLLAQLPELGHLDRRQIAALVGVAPLARDSGTHRGRRQCWGGRPALRSVLYMAALVAARWNPVLRAFYARLRAAGKPGKVALVAVARKLLTILNAMLRDQRRWQCTHA

SEQ ID NO: 335663 - protein, 366 aa, unidentified
MSKIAYVGIDYHLNSLSIAVMVDGQKTPYETIRLKNDDKVIRKYMSKLAVQFQIKACYEASANGYCFQRKMAAWGYPCDLIAPALVPRKAGNHRKNDFRDALDLAQNYAHGSLSIVHPPSEEEEAVRSLIRCRMAFKEAGKRVKQQINFLLLSQDQRWELSKWTDQHRKWLGQLRMSHSHLQQVLDEHLAHLDYLETRIRHLDEQIEQIAASPIYAPAVKKLRAFKGIKTLTAMLLIAEITDFRRFPNARALMAFLGLIPSEDSSGDSRKGGPITKAGNQRCRTALIEAVQHYGKSPHISAQMKSNLSQVDASSGQIAIKCLKRLHKRFWALTLKGKLRSVAITAIARELAGFVWAMMQAQPAVAS

SEQ ID NO: 335664 - protein, 355 aa, unidentified
MSQKLESTIAVIGIDIGKHSFHVVGHDERGAIVLRQKWSRGQVDARFANMPPCLVGMEACVGAHHLSRKLNSFGHHARLMPAKYVRPYSKGQKNDFRDAEAIAEAVQRPTMKFVATKTAEQLDLQALHRVRERLVSQRTGIINQIRAFLLERGIAVRQGQRFLRAELPCILATPPDVLSPRIVRIIEDLAGDWRRLDERVEGLSNEIETIARQDAGCERLMSVPGIGPIISSAMVAAIGAGDVFTKGRDFAAWLGLVPKQISTGDRTILGKISRRGNRYLRVLFVQAAWVVLVKVKPTRWGYGLKRWIEAAKKRLHHNVLAIALANKLARIAWAVLAKGRAFELTRTDDAGVRPA

SEQ ID NO: 335665 - protein, 348 aa, unidentified
MSITMIGIDTAKSLFHLHGVDAQGKVLLKRKLGRDQLIGFFEQQPRCTVVMEACGAAHHWARVMSGLGHEVKLMASEAVKPFVKRGKKNDPADAAAICAAASRPEAKFVMAKSLEQQGVLALHSVRSLLVKQETMLANAMRGLATEFGLVVPKGMDKLEALVTLVEEDPTVPEQAHQAFAELREHRRATTERVAGLERQIVAHARQDATARRLATIPGIGPITASLLAATVGDTIGSFKSARHFAAWLGLVPRQHSTGGKTRLGKITKAGNKQIRTMLVLGATSMVNRAEHWDSALGAWLRGLLERRPARLAAVALANKMARIAWAVMTRKEVYRAKGDVAPAAAATA

SEQ ID NO: 335666 - protein, 360 aa, unidentified
MAHFAGLDVSIEETAVCVVDDQGMVLLQCSVATEPEAIAEALAPFAATLRRAGHEAGSLSPWLHPQLKALGVPVVCLETRQVRAAMSAQRNKTDATDALGLAHLMRTGWFRQAYVKTDGAYRLKLLLTHRRNLKRKFLDLENAIRHSLKSFGVRLNKVGRGGFEQAVREACAGDAFTAELMECMLTARAALWRQYLKLHKLAVGLVARDELCRRFMAIPGVGPVTALTFSAAIDDPSRFRRSRDVAAYFGLTSKRWQSGASIDVQGRISKAGDPDVRRALYEAASAMLTRYKGKTALKSWGQKIAKRCHKKAVVAVARKLAVIMHAMWRDGTAYADRPHAAGRPDDAPTAKERKLLGVLA

SEQ ID NO: 335667 - protein, 431 aa, unidentified
MLKINPLSTLYVGIDVSSKSNYVCALDFYKNKYINSSFANNQPGAEELALKILECLKEHPDITTIVAALESTSVYSIHIANYLSSCEELMRFNPYVFVLNPKCTANYKKSYIGLGKSDPIDAFVIADYARAGNIESEPWRGSQFLALKRLTRHRLHLVECMTREKTYLVSNLYLKFSELQMLEGDDQPFCDIYGATSSSVLMEYFSPEEILDSSEEDLIAFLAKKSRNRIKDISKTADLLKKAARDSYRLDKALYEPLNVSIASSFNCIETFKREIKVIDNAIEKEIKGLNPNAFIILQSIDGIGPVFAGGIIAEIGDITAFHSSDALAKYAGLTWKSNQSGDFDGEDIPMIKAGNRYLRYYLGEAANSMRKHNVEYGTYYRKKYNEVPKHQHKRALALTSRKFVRLVYGLLARNQLYSGVSLDTSIKDSN

SEQ ID NO: 335668 - protein, 300 aa, unidentified
MQQDVVTVGVDLAKNVFQVHSIGADGKVLVRRQLRRAEVLNFFSALPPCLVGMEACASAHHWGRELIALGHDVRLMPPAYVKPYVKRGKTDAADAEATCEAVTRPTMRFVTVKTPEQQAVLMLHKTRDLLVRQRTGLINALRAHLAEYGIISGKGPGGVTVLMKVLHEAQERLPEHARSALHTIGSQLRALASEVQRLEAQILAWHRSDAASTRLATIPGIGPITASAIAAAVPDATMFRSGRQFAAWLGLTPRPHGSGGKEKLGGISKQGDGYLRRLLVVGATAVMRMARNEVYAAAAA

SEQ ID NO: 335669 - protein, 342 aa, unidentified
MKVAVLGIDLGKNSCSVVGLDDTGKVIMRRRMHRDSVIKIASGLAPCVVAMEACCGAHHLGRILRERGHQVRLMSPEYVRPYVKAQKNDDRDAEAIAEAATRPTMRFIELKSAEQLDMQSLHRVRDRLVSERTALLNQLRAILLERGIVIPQGRRKLEDHLRTLLEGQEAILSPRVWSLLNDMQAEWRALDSRIEALTDEFAAQAKTDEAARRLATIPGIGVLNATALVAAVGNAATFARGRDLAAWLGLVPRQMTTGRQAAADGHNKARQQISAQTAGTRGSGSLAFAVGKCDSPWEVADEPAGAGAQKYRCRGAGQQACSDCLGGAAPRRNICVAAVTVA

SEQ ID NO: 335670 - protein, 354 aa, unidentified
MIIIGVDFHPEFQQIASVDSETGEFQEKRVAHREEAETFYRGLAASGQKVRVGMEASGHARWFERLLAELQIELWIGDAAEIRTRRVRKQKTDRQDAQLILKLMLKDDFPQIWVPSWENRDVRQLLWHRHRMVQARTRIMNQLQAVALNEGLRCKKRLWRDRGRQQLEAFRLAPWASRRRRDLLDLIDRLNPTIAELSQAIEQEAEKCPEARRLRTHPGVGALTALAFVLIIGKAERFGSGKQVASYLGLVPLEDSSGNRRRLGHITKQGSSMMRFLLVEAAQVTVRSVPEWRSKYLHLMMRRGRKTAKVAMARKLAVRLYWMMRKGWDYQQWVKFGSHAGQPGNRDGVQSITE

SEQ ID NO: 335671 - protein, 418 aa, unidentified
MSLLLEQPFTAFVGIDWADTKHDICVQAAGDPRRESSCIAHRVAAIDEWANALHRRFGGPIAVALELAKGPIVAALQKYDFLVLFPINPATLAKYREAFQPSGAKSDPKDAELALDLLLHHPERFGPLRPQSAAMRTLVSLVERRRQLVGDQTRLTNRLCDTLKQYYPQALEWFDDRGTVLFCDFLDRWPTLRSVKQARTATLEAFFRAHHCRSARRISVRIGSIREAAPLTEDLAIIGPCRLHVLALAAQLRAVLAAIMQFEHEIAAVAPTLPDYTLFKNLPGAGAQLAPRLLAAFGEQRARFRSADELQKYVGIAPVTERSGKQSWVHWRLQCPKFLRQTFVEWAAQTIPRSSWAGAYYRQQRAKGSSHHVAVRALAFKWIRVLYRCWQNRTPYNETVYLNVLRKRGSLLAGKLST

SEQ ID NO: 335672 - protein, 347 aa, unidentified
MLADELDYVIGVDPHRDTHALAVVDVRSGAVVFEATAVADGEGYASVLRLADQHAPGRRAFAVEGTGSFGAGLARFLASQEQRVLEVGRLRRERRSGKSDALDAIRAARSVLGQTRPARPRAGGEREALRALSAAREGAVTARRAGLCQLRGLLVSAPEPLRAELRSLTRAQLLRRLAAVRPGRCQDPELRGTLLALRALARRVIALTVEERELAREIETLTRQLAPQLLAQPGVGPLAAAQVLISWSHRGRITSEAAFARLAGCAPIPASSGQTVRYRLDRGGDRRLNRALHMILVTRRRAHAPTIAYINRRIQEGKSRREATRCLKRYLARNLYRLLEHGTPLAT

SEQ ID NO: 335673 - protein, 331 aa, unidentified
MKFEEVIGIDVSKFTLDACIHSSQILNQVPNTKQGYRKLLSWVTKSTNCLIEQVLFCFEHTGMYSFMLANFMSEKQLNYILVPGLEIKRSLGIQRGKNDQIDAKKIAQYAYRRRDEVKLYHFPEKSITQLRQLLSLRERLVKQRAGFEATLKDQGDFMDRAENKLLFSIPEKLIKELNKQIESLEKEIDLVLEGSPDIMNNYRLITSISGVGRQTALHLIVITNNFLLFADHRKLASYAGVAPFPYTSGISIKGKTKVSSLANKKLKSLLSACAVAAIKSDPEMRLYYNRRAEDGINRMNTINAVRNKLLARVFAVVKRGTPYVKIFKYAA

SEQ ID NO: 335674 - protein, 338 aa, unidentified
MIHVGVDLHQRFCYMTALEARGKIVQAGPVANEKRALRKYFRQFGQEAVQVAVEACGFWPAFREVVEPEVKRLVLVHPQRVKAIASAKLKNDRVDSETLAHLLRCDLLPESWKADRETQARRQQVRLRTTLVRQRTRLKNQVHAALHQQGLHSPVTDLFGRKGRWWLSQVKLPEVARGSVEACLRMIDHYGEEIQKQNLQLREKASGDERVEWLQTIPGVGEVSAMMLLAEIGDLGRFGTKEALCSYAGLVPRVRESAGKAARGGITRQGSSALRWIMVEAAQAATRSSPAAKRYYERLLRKKHKHVARVALARKLLIAVYALLHYGVAFDEQKFAAR

SEQ ID NO: 335675 - protein, 319 aa, unidentified
MAQNGLVVAGIDIAKDKADVCIRALSQRQTFPSTAEGRRQLISWLRKHKVTKAVMEASGGYEREWAKALRERDIEVRIVDPKRVRHFAQSAGRLAKNDDIDSDTIAWFAETFGEAPSQAHDAAREKLLQLVNARQGLLDIKTMLSNKGEQDVPEPVQKSHARLLKAIAVELANLEAAITAMIKATPHFAERAEIIESVPGLAGTTSAGLIAAMPELGQVSNEAISALLGVAPYDDDSGKRRGERQIKGGRRKVRNLFYMACLGAATQHNPALKAFYRRLIAKGKKAKVALVACMRKLIVTLNIMIARGEKWDARRYAVG

SEQ ID NO: 335676 - protein, 357 aa, unidentified
MPSSTVKYVGLDVHKEAIAVAVRDATGKLVMESIIETKASALLGLLHGLRGELYVTLEEGTWAAWLYDMLKPHVREIVVCNPRRNALLKEGSKSDKVDARKLSELLRAGLLRAVYHGDGELRTLRELARSYEVISNDLRRVMNRLKALYRSWGIPCTGTQVYGRRDREQWLMKILETGVRRRAELFYQHLDELQVLRHTARGELLTESRKHKAVRILRQIPFIGPLRAAQLLALMQTPHRFRSKRQLWAYSGLAVETHDSAQYCYVDGQLQRSKKPQQIRGLNQNHNHAMKEIFKSAALSATRRAGPFQDFYEGQLAKGMKPELARITLARKIAAITLTLWKKGECFEARYVKTQTA

SEQ ID NO: 335677 - protein, 360 aa, unidentified
MVESTPIVAFDQHAASVVAAVLLPGQRTPALHALGADLGTISRFVERLQLADVRCCYEAGPCGFELQRHLHGRGIACDVIAPALIPRRAGNRVKTDRRDAAQLAVLFRAGALTAIHVPTEAEEAVRDLLRCREDINADLLRAKHRLSKFLLRHGRRCPDARPWSKRLFAWLAIQRWPLPALAPTFVSYRRAIDDVIARRRGVDEDLRAALTIEPLASRVARLRCFRGIDDLSALTIAAELGDPARFAAARQVMAFTGLVPSEYSSGASRRRGGITKTGNAHLRRILVEAAWHYRHRPAVGSHLRIRQRRASPAAIRCAWMAQHRLHARYRRLVARGKSPQLAATAIARELSAFVWSALTQ

SEQ ID NO: 335678 - protein, 412 aa, unidentified
MSKIEITAVGIDVSKGKSTVAVRRPGGEIVMMPFTVLHTAEGLAELTNTLRSIGGEIRVVMEHTGMYWRPIALALKEGGFFVSVVNAMLIHDFSDNSIRKVKTDRADSLKIANYALTFWQDLRDYSVEDETRQMLKIQSRLYERTLNSSIALRNGLISLLDQTFPGANKLFDEQRTKAGHIKWVDFVRRFWHKDCMAASSLSTFADTFQKWCKRTGYHYSLSDAERIHGIARNSVATLTKNDSTKLIITQAVDSLNAVYDTLQILRSEMQHLASMLPEYEVVMAMQGAGPITGPQLMAEIGDVRRFTSKGALVAFAGVDAPPFQSGTFDSKSRHVSKRGSPHLRRVLFTICSVILQHSDPENAVFQFMDRRRAEGKHFYVYTVAGGAKFLRIYYAKVKEYLNTIDSQTGCVA

SEQ ID NO: 335679 - protein, 366 aa, unidentified
MTSVSSVAELIHLGMDTSVKEIVVAVLRPGEEVPVVDRIPGDEESVRRLIGRFPDRRLLSACYEAGPGGYELHRLLTSMGVACDVVAPSLIPKGSSDRVKTDKRDSVRLALTHRAGLLTPVRVPSPAEEAVRDLVRARGDLLDDRKRMQQRLNAMLLRHGRVWRGGKKWSYAHRAWVDRQVFDEPALAEAFSLYRGGLEAREAELTAAGARLAAWAAREPLAGPVARLGCYRGIAQLTGLTLAAEVVDWRRFASARAFMGFAGLIPTEYSSGSRSRRGHITKAGPEGVRTALIEAAWAYRYRPAIGATLHRRQAGQPPETLARSWKAQQRLHAKYQKMTARGKPPGVAVVAVARELAGFVRAEMIT

SEQ ID NO: 335680 - protein, 310 aa, unidentified
MDATVVGIDISKDRLDVHLHPAGESFTVARDEEGLDVLTARLAQLDVRAVAMEATGGFEAVVAARRSGAGLPVIVVNPAQVRAYAQALGKRAKTDPIDAAVIARFVEATKPEIRPLPDADTRLLAGLVARRRQIVQMIVAERQREPQLPTRHLRRSAARLIKALQKELGVLDRGIDDAVRGSPVWREKEELLKSVPGVGNIIARSLLAEMPELGKLDRREIASLAGLAPWTRQSGRWRGKSFIGGGRASVRAVLFIAAMVAARRNPVLQAFHQRLIAAGKPKMVALIAVARKLLTILNAILRDKQPWQSA

SEQ ID NO: 335681 - protein, 325 aa, unidentified
MEDKKLCCGIDVSHGKLDVCYQNNLGELFHLQVGNNNKGFEKIFEHTGPDYHFVMEATGVYYIRLAFFLHQQGCKLSVVNALSIKRYIQMHLERNKSDRKDAGWICRYAIEQCPPYWEMPDSAYFECKQLYNTIREYTEQAKRFNNQLHSLRLLPVPSKDTIKSLEKVKRQLVKEIDSLEQKLEALLQQWQPAQLKSVGSIKGIGKRATAMLIVFTQGFKNTHSHRQLISFAGLSPTEYSSGSSIHGKPRIYKRGGKNLRDILYMCAMNAIKTNTACKILFDRLKANGKTGKQALIAVCNKLLKQVFAVVKNNTMYQPNYCTAKP

SEQ ID NO: 335682 - protein, 372 aa, unidentified
MLQKSKVFVGLDTSKLKISVALAEEGRQGEVRFLGEIDNTPEAVRRLVSKLASRHSELVFCYEAGPTGYGLQRQIAALGHECDVIAPSLIPKRPGERVKTNRRDALTLARLHRAGELSAIWVPDPGHEAVRELVRARDAAMADLRAKRQHLQSFLLRHGRLVPGRKPWTRAHARWLSELAFEHPAQYLVLREYRQGIEDAEARLERLTQQLADVLTTWSMAPVVEAYQALRGVALVTAVPFVAEIGDVRRFESPRQLMAYPGLVPCERSTGERVRRGSITKAGNTRVRRVLIEGAWTYRFPARMSRLLQERQANLPQIVRTIAWKAQVRLCARYRRLMAAGKRQTVVTTAIAREMAAFLWAIGREVNPSAAA

SEQ ID NO: 335683 - protein, 406 aa, unidentified
MRLFVGDDWAEDHHDVEVMDAAGRVLASGRLPEGVAGMARLHELIGQQLGEAGEDAEVVIGIETDRGPWVAALVAAGYTVYAVNPLQASRFRERLGVSGAKSDPGDSHMLAGMVRTDSHQLRVVAADSAEAGGIKVVARTHKTLIWERTRQVQRLRHQLREYFPAALEAFEDLAAPDALELLGKAPDPARAARLTRAQVSAALKRARRRAIADKTTQIIAALRSEQLAQPAALTAAYAVTVRALAAVITTLNEQAKALESQVGAHFGQHPDAEIYLSQPGMGRILGARVPGELGDDPHRYADARARKNYAATSPLTRASGKKKIVTARYIRNDRLIDALMAQAFSALNVSPGARALYDDLRARGIEHNDALRRVANRLAGILHGCLKTRTLYDEATAWSHRKNLAA

SEQ ID NO: 335684 - protein, 466 aa, unidentified
MTPRRTKTFRMPPQPAEPLPVQHPRAAGIDGHAAQHWVAVPPEAAPPPPADHPPNLPSHVRRFGACTADLEALADWLTACGVTTVAMESTGVSWIPLFELLERRGFQVFLVDPRQTRQVSGRPKTDVLDCQWIQRLHSYGLLAASFRPEDQVVVLRGYLRQRHRLLRYAGQHVQHLQKALEQMNVKLAEVVSDVTGVTGLAIIRAILRGGRDPLELAELRHDKCHHTESEIARALYGNWRDEHLFALRQALELYEAYQAKLRDCDDCIERHLRTFADRSGGRKLDQKARRRRRPRHEPAFDVRAALFRFRGVDLTVIEGVDRTTALTILGDIGCDMSQRPTVKHFVSWLGLCPQHQGSAGQIKSRHTRRGANPAARALRLAAQGCHHAKNALGAFYRRIQARCGGPKAVVATARKIAERVYRLLKYGEAYVRQEMAAAEEAYRARVLKGLARKATGLGYPLVPATP

SEQ ID NO: 335685 - protein, 344 aa, unidentified
MLHAGLDLSRARLDVCLVGESGEFVAHTAAPPDADGLRHLADRLRGHRVRAVIESMTGARFVHDALEEFGWEVLVADAQKVKGLAPLACKTDKIDARVLAELSWRDLVPVIWLPDPSIRRERELARYRLHLVRHRTTLKNRIHATLMTFGHPCPVSDLFGLAGRELLDRLALPDPWRRNVDASLELIDDLELQIAQLTVEMRRQGADHRYIPLLVTAPGFGWINAFTVASEIGDIERFASPAKLCGYTGLCPRVYQSGNSDRRGPITKNGSRYLRWALFEAAMHACTHPVYKERYQRTKRRLGRQRGPKVAQIDLSRKLTEAIWHMLTRNQPFAPAGAAFRLAA

SEQ ID NO: 335686 - protein, 316 aa, unidentified
MNVIGFDISKDTIDVTLLRNSGQVDYIKIANACEGFETLNDWIRSKRIRKISISMEATGIYYEEAADYFSAIYQVFVINPLKIKEYSKSQFSHTKTDKADSRLIAEYTKRHLDKLTPFKPSENPTLYKLINLLQQLKQQQNESQNRLHAAKDTFIRATHEEIILLLAKQIDQTAKRIDLMIQQQDSLNTHYKNLQTIPGIGKDTAAILLHHLTDKQFKTANQFVSFAGLSPRIEQSGTSVNKKGRLSLYGHRRLKRALFMPALVAYRIKAFPKLVQNLSQKPKMVVIVALMRKLAKIAYYIHKTQKPFEKMRYQTA

SEQ ID NO: 335687 - protein, 412 aa, unidentified
MDVVYQRCAGIDIGKRTAKVCVRVQGRGSQPTVSTVTSWSSMMPQILKLRAKLVNEGVQRVVMESTSDYWRPFFYVLAEELDVILVRASDVKAIPGRKSDVSDAEWLADLAAHGLVRASFVPPQQQRQLRDLTRARSRLLADRAREVQRLEKELEDACIKLAAVVTDLQGVSARLMLQALIEARDDPAAMADLAIGRMRTKIDQLTEALTGRFNDHHRFMVTFRLKRIDAATADLAELDARIDALIVDAGFDPARDLLLSIPGLGPHSADELLAEIGPDMSVFDAPEQLAAWAGVAPGSHESAGKRKNAPARRGNRYVKRALGIAAKSAARKKTGFLAARFRRLAARRGYQKALVATEHSMIIAIWHMLSTGEYYHDLGGDHYHRLIPARIIRRKIAELEAAGYTVTHEVAA

SEQ ID NO: 335688 - protein, 392 aa, unidentified
MVVSVGIDVSKDKHDCFIVNSEGEVLADVFTISNTMDGFNSLLEKIQNCTTPQDNIKVGLEATGHYSYNILGFLLDNGLATYVLNPLRTNLYRKSLSLRKTKTDRVDARTIAAMLLSDMSLKPYTDTAYHNEELKSLTRYRFDKVKERAKLKSSVSRLVCILFPELEKLVPTLHMASVYALLEEFPGAKQIAGAHLTRLKSLLSDASRGRYGRDMAVEIRDAARNSIGSVMPAKSLELKHTIHLIRELDAEIDEIEAAIQSIMDEINSPITTIPGIGYRMGAMILAEVGDFSRFESSDKLLAYAGLSPSTYQSGQLKNCYPHMEKRGSRYLRYAIYNATKYVCLWDPAFASYLAKKRAEGKHYNVAISHAAKKLVRLIFALEKSGQPYRLAA

SEQ ID NO: 335689 - protein, 366 aa, unidentified
MATYCGVDFHARQQLVKWCNTDDGEIHERQLWHQSIVEVREFYAQFKGAVIVGLETSGYSSWFEAMLEELGHQVWVGHATEIRRRARSRQKTDRRDAELILDLLLKNEFPRIHRVSAESREVLRQLRYRHRLVQQRTRSYNSLQAIALSAGVSLKAKLRTRKGQERLLGLVVSAAHGQQRQEWLDLIAQLDGYIERVEKELELIAEADARVQLVRTHPGVGLLTGLGLVHTLSPVSRFANSRKVAAYVGLEPREYSSGERQQFGGISKAGSRLLRLLLVEAGHKAINKDAQLKQLYYRVMHRREKAKAKVAVARHLLVRTYIMLRDGIDYAEFVRRGVAVPSARVGYRLKVPDDLIERRASEQQSS

SEQ ID NO: 335690 - protein, 407 aa, unidentified
MRTKNPRCAGVDVHKDSLKVAARVDGVETVETFGTSSSEIFAMADWLAGLGVKIVAMESTGVYWKPVWNLLEDHFELILSNAQHVKHIPGCKTDVKDCRWLAELLEYGLAPRSLVPPAPQRDLRDLTRQRTQLNGDRGRVVNRIQKVLEGANIKLASVATDIMGKSGRAILDALVEGKLTAEQMAELVHPLMNAKKPQLRLALQGRVTAHHRFMLKQLLEQVDHLDQQIAGFDRRIEEVMSPLEREVVARLDAVPGLNRKVAQVVIAEIGTKMSCYPSSDALAAWAGLCPNTNESAGKRRSGRIRHGNGWLKAALVQAAWAAGRTRRSYFSQRHRRISVRRGAKRANIAVAHSLLVVSYHLIKNGQEYTDLGADYSKKFLDPERQAQSLVKRLEKLGYAVTVTRPAA

SEQ ID NO: 335691 - protein, 319 aa, unidentified
MLVGIDVAKAELVVGTRPTAERWTVANDERGVRTLVERLTRDAPALIVLEATGGYEWLVVGALAAAGLPVVVVNPRQVRDFARATGQLAKTDRIDADVLALFAERVRPDVRPLKGEAAQELDALLARRRQLLDMLQAEKNRLGQVFGKGHARVRKSLKAHVAYLERELRIADSDLGTMVRQSPAWRERDDLLQSVPGVGPVLSRTLLADLPELGRLSRREIAKLVGIAPLSRDSGTLRGRRFIQGGRASVRAVLYMAALVATKRNAVIRAFYQRLLAAGKPKKLALVACMRKLLTILNVMVRTHERWRATLAQPALVGA

SEQ ID NO: 335692 - protein, 429 aa, unidentified
MEYALVQVLPDIPAGQVCAGIDWATADHVACVVDMSGRVKDRFAAAHDKAGIEALIARLRRAGVSEVAIERGDGVLVGALLDAGLTVVVITSRQIKHLRARYGAAGAKDDRFDAFVLADTLRTDRARLRPLIPDTPATITLRAAVRARRDLLAHRVAVCNQLRAHLAAAFPAAIGLFFELDSPISLAFLARFGCQDAAAPLDEQAVGAWLKTIAVRGRPAPASVLCARLRAAAPGVTGEDGTAQAGITAALTATLAVLAAQIKILQTQIAAQLAAHPDAHIFTSLPRAGTLRAARLLAEIGDCRSRFPDPGSLASLAGTAPVTRQSGTHISRGFRWAVSRQLRDAICNFADDSRRASPWAASIYDAARARGKDHPHAVRILARAWIFIIWRCWQDGTAYDPAKHNALQRILDQHYQDSQPEAPGPGQTR

SEQ ID NO: 335693 - protein, 388 aa, unidentified
MFFLGIDIGKNTHVASLLDEKAKIIFKAYSFANTLDAAEALLVKLEPYKDSLEIGMEATGHYWLSLYSFLAEHKFIVHVLNPIQTDGWRKGIEIRKRKTDVIDSVLIADLIRYGNFLETSLADEDILSLRNLSRFRVYLVNSVSDLKRKAIAVLDQIFPEYASVFSNVFGQTSKELLKSLSLPSDYENLSATKIEEVLSNITQKKKASKTISTLSDKASRSFGISFCKDSFAFQLKLIIEQICFIEEQIASVELEIDQLMSKLGTNIKTIPGVGSVIGAVILGEIGDIERFDNPSKLVAYAGLDASVSQSGEYEASSGKLSKRGSPYLRKALYMAAQRAEFCDPVFHAYYEKKRNEGKHHLVATNAVVRKLCHTIYAILKKDVPYEVQ

SEQ ID NO: 335694 - protein, 340 aa, unidentified
MKNMHFVGLDVHKKIIAFCVKQMDGKIISQGTIKANRNALRLWVHSLPKPWVVALEATLFTGWVYDLLQNYALEVKVAHPQMLEAITVAKKKNDLCDAEKIADLLRCNLLPECYMQPKEIRELRRVLRYRSLIVREIVRMKNKISGLLMEAGIEYDSRKLHGQKYFHQLLDQIEISDELSQILKMSRECLEFLKSIEKRIVDGLKIHPEIKQRMERLTTIPGVGQITALTWILEIGDPHRFSSIKKAVSYCGLCSDQKESGGKQYRGPISKKRNKRLQTILIEAAKLAPLWNPQLREVYEREKQKGNKNRATLAVARKLVAYLLAVDKNKRPFKMKEFCK

SEQ ID NO: 335695 - protein, 364 aa, unidentified
MQKISTMRRSGKNIFRGQLTIGLDLGDRFSAYCILSEAGEIVLEHKLATTPEAMKQVFGSMPRCRMAMETGAHSPWVSRLLAELGHEVIVGHAQKVRLITKSRRKDDRLDARTLARPARIDPELLSPVKHRSAQAQLHLAEIRARAGLVSARTALVNTARGLVKSYGERVHKCDTRQFRRETSGLSTGLREALEPLLSQIESLNESIQKYDRRIEKMAKETYPETSLLKQVKGVGDLIATTYVLTLEDTHRFRKSRDVGCFVGLQPGRRNSGESEPQMRISKEGDEYLRTLLVQGAHYILGPFGEDSDLRLRGQKLSARGGKNAKKRAVVAVARKLAVLLHRLWVSGEVYEPLRNSRKAMSTAA

SEQ ID NO: 335696 - protein, 386 aa, unidentified
MQASTVGTPTASHYGTIFITIELSQKSWLVTLHSPDQDKLSRHQLAGGDHAGLLALIGRIRDRAARALGGVPAVASCYEAGYDGFWLHRLLLAAGITNYVLDPASIAVDQRARRVKTDRIDGETMLRTLMAFLRGEPRVVRIVRVPSAEQEDARRASRERDRLVREQTAHTNRIKALLRLLGMAIGNPRRRDWLSWLATQRDWQGQAVPPQMLGEIRHEHARLMLVRERLDALAKTPAQADPTPAAAQMIERSELLLRLKCLGPAFATTLTNEVFYKDFRNRREVASYFGLTPSPWRSGGIDRDQGISKAGNPRARCAAIELAWLWLRHQPNSKLTLEYRKRTLDAGKRIKRVAIVALARKLVVALWRYLTTGLVPEGAVLKTVKV

SEQ ID NO: 335697 - protein, 400 aa, unidentified
MLSIGIDVSKGKSTVCGMKPGGEIVYTPFEIQHTREGMSELVSLLRGSGEEVRAVLESTGSYHCPVVTALLENGIFVSVVNSLRMKRFCSQSIRKVKTDRIDAMQIALYGLAYWQELQPTKLPEDTYRELQLLARQYYQMTSMLIKAKVDFNAICDQVLPGMQELMNDHAGRHKLSDFVLRYRHTTHILEMGETRFRKDYCKWAEKKGYRNCERMAVLIFATAQNGIPVLPNAPSTQIVITEAIRVLHTVEASRDAILTQMQALAKTLPEYSLVREMPCIGDTLAPRLIAEIGDVRRFHSKRALIAYAGIDAPPYQSGKFCANNRHISKRGNRYLRKTGYEVMQSYVMHKPANDPIFTFIEKKRGEGKSGKLAMVAGLNKFLRVYYGKVTELYRSLPAIE

SEQ ID NO: 335698 - protein, 404 aa, unidentified
MEVLYKRCCGIDIHKNMMVACIFTSVRKKEIRQFSTITEDILQLVSWLKETDCEMAAMESTGSYWKPVYNIFEEEQIPIMVVNAQHIKGVPGRKTDVKDAEWIADLVRHGLVKASYIPNRDQRELREITRYRQEVIEERARELNRIQAVLEGCNVKLSSVITDISGKSGMTILKAIVSGETDPVVLSELAEGRARDKIPEMQKSLQGRISEHQQKMLKHQLGHIESLTALIMDLDADIKKTESINWAIEALDDMPGIGRKSAERILAETGVEMEHFQNESRFSSWAGLVPECKESAGKKMSTRIRKGNKYLKATLVECARAGIRNKQSYLYSRYQRIAARRGGKRALIAVAHTMLIAIYHILKEKVPYHDLGADYYSVINQEKIINRNIRTLEKLGVNVMIQPK

SEQ ID NO: 335699 - protein, 385 aa, unidentified
MQPTQMERRSSHGSAREQTLNRAESHCWCLVEDKPRSPMQPYTHYVGIDVSKQTLNVALYPRGTSPPEKAALETSNDAKGHRQIIQWLGRQDAVREATILCMEHTGRYDDALLEHLTLDGWICAVEKTTVLEKVKPEHHRKDDDFDADLLSEYAYRYSDKLHLYQAPNPIIEQIRLLYQERRRLVTHRGAVQQLQREQGYNRAGSPNQAERFAQKLWQQQRTFYDRQIKALEEKMTALVDSDEALRHRYEQIKGIDGFGPQTTLMWLCLFYGEQHLDARQIASRFGFAPHAAVSGTSRRRQGRSSGHGNAEVRKLLTMCARSAGAHHEKYRQYKARLLSKGKASQLVTNNMINKLIRVACAIWNQDGEYEQNHQSRFMQNVVATP

SEQ ID NO: 335700 - protein, 311 aa, unidentified
MKSYVGIDVSKRFLDFAVLGQNGCPRMGNNETGVGEIIDRLAELEQPLVVVEATGKYEELVVNRMTKAGISVARINPRQGRDFAKALGILAKTDRIDAHVLARFGEAAKPRLVMVVDEERKELDELVRRRRDLVNTRSTEMTRKKMVSAGTAESIQRHIDFLNDEVKALDEKIKQVSAKPSLAKASRLMRSLKGIGQTVAATLIALLPELGRLNRQCIASLVGIAPYDNQSGGGDRKRHIRGGRREVRDMLYMSTLTAVQFNPRLKAFYERLLAAGKPPKVAQTAASRKLLTWVNAMVRDNKEWDDAIIST

SEQ ID NO: 335701 - protein, 432 aa, unidentified
MNPFSVSPEPSPVAAWVGLDWADQQHVICLYEVATGQSTVSRLEQKPEVLQDWLSQLRQRFGGAPVAIVLEQARGAVIYALLSADFVRLYPVNPQSLASYRKAYAPSGAKSDPADAVLLMEMVRNSPERFRPWKPDDADTRSLQLLTENRRQLVNQKTALTNQLTSLLKTYYPQALELAGVLDSLQACDFLTQWPTLEALQQARAGQIRQLYREHGHPRLEQLDRRLEQICQARPLTTDPAALLSGSMMVQALVQQLRPLLGAIERFDRQIAVLFRKHPDRPLFDSLPGAGAVLAPRLVAAFGTDRDRFQSAQQAQQLFGIAPVTEQSGKQRWVHWRWACPKFLRQTFHEFAGHSRHWCGWAKALYQRLRRTGKGHHAALRVLAFKWIRILFHCWQTRTGYDEQIYLKSLQKRNPTLWAEIQLLPPRNKKVA

SEQ ID NO: 335702 - protein, 408 aa, unidentified
MDLFVGIDVSSEKLDVCFLDSKKHILNESSLGNSIVGASLIKDSILLYQQQYNYDQVTVGLESTSVYSFHPSMFLHEDEELKALDIIVSVINPKKVHRFKQMFDEDKTDRIDAFRIADFLRIDVHQTSLIKQEKYVALQRLTRSRYQVTKQLVECKQHFLENLYYKCNTLTKEVSTSVFGSTMLELFTNDITLDELSKIPLEDFVSHLQKAGKGRFTNTEKLVKSIQKAIRESYRLTPMVSESVDQILSMYAQLIRTLTKQIKTLDKGIEQVVKTMPEAQLLLSIPGIGPVYTAGILAEVGQIHRFTNEAKLAKYAGLYWNKNQSGNFTASNTSLAKTGNHILRYYLIEATNSVRRYVPTFSNYYSKKTKEVPKHKHKRALVLTARKFIRLVDTLLRNHQIYTPERSV

SEQ ID NO: 335703 - protein, 344 aa, unidentified
MGEVITIGLDIAKSVFQVHGVDDAGTVLIRKRISRAKMLEFFADLPPCLVGIEACPSAHHWGRELQGLGHIVKLMPPNYVKAYLKRSKNDANDAAAICEAVTRPSMRFVPTKTKEQQTALMLHRTRQLLVRQRTMLSNALRGHLAELGVVSAKGRNGTGELLRIIADGADSRLPQAVRGILDVLARQYGATGTEIGSIDKSILALHRSCEASRRLAEIPGIGPIVATALVAEIGDWKTFSSGRSLAAWIGLVPKQHTTGGKDRLGSITKQGNRYLRWLLVVGAMAVIRSAKMHGTKNRPWLARLMERRPTKVAAVALANKIARMAWAIMVHGDRYKEPKLLLAA

SEQ ID NO: 335704 - protein, 354 aa, unidentified
MFFAGIDAHTRYVIVVIINRMGERVLGPTRVKVGQPELLLELLAPYRPVDAIMETSSSWPWLHEVLSGVGVHFVLAHARRLRAIAEANYKRDDIDAELLARMRLAGLIPEVYPTPFAQREWATLLRHRTTLVTQRTALLNRIHAQLHMRGLHLERGRLLTREGRQWVRTVAWPHFGGEQRALVRSHFRVIAGLRPLIRAVDRHIAQVAATIPEAQLLTTIPGIGPQRALVLCAEAMPISRFRTPGHLASYAGLVPRSKQSGLAPVRHGTIPAGANRWLRGALVRAVVTHVQHAPDSWLTHYYVAQKARLGWPTARVAAARKLARAIHAMLRTNSCWTNDPARGELDEPHAAQTA

SEQ ID NO: 335705 - protein, 351 aa, unidentified
MNISHYIGLDVHKKHINFCIKTADGTVVEEGRLAAQRVTLRAWAAGQTQAWHGAMEATLFSGWIYDTLKPYAACLEMAHPLMLKAIAASKKKNDTLDARKIADLVRCHLLPACYVATPQIRELRRLLRYRNLVVRESVRMQNKIAGLLMESGAPFHKQKLHGKKYFAQLLDTLEEVPDSVKDLLNLSRSAMEMFQATQKRLLGELLAHPQLRQRVERLASIRGVGPVTALTWALEVGDPFRFSCSAQAMSYCGLTSALQSSADKQQRGPISKQRNPWLQTALIEAAKLAPRWNPQLAALHARELERGHRNRATLAVARKLVAYLLAVDKSGRPFQLRPLAAVIVPAAQQAS

SEQ ID NO: 335706 - protein, 428 aa, unidentified
MKVMHEYVAGIDVHKEMIKVAIRSPGEKPWTRKTEVLEYRTFYGVLQQMARDLRKRGVTHVVMEASGVYTEPVYYALCEQDFTEVAVINPAHARALKGHKTDAKDCARLAELFECGLLRGSYIPPAEQKEVRDLTRYRTKTVQARTSEIQRLSKALESAGIKLGSVASEITGKGATAMIEALIDGERRGGVLADLAIGRMRSAGKLADLSMALAGRFTGHHAMLCRLHLDRIKVFDEAVEGLDRRIAAGTARWQREAGLLKSVPGFGDVVAGAWLGEIGPAPHQWFSRHDKLASWASLCPGNNISARKRKHGRTGDAGTYIKPVLIQAAWSAIRVRGRLQARYNRLVRRFGGPKNPAAKKKAITAIAHTLLKIAYQVLKTGTPYEDLGADFYTRRNSPEERQKYLERQLQKLHPGCTITITISPPEAA

SEQ ID NO: 335707 - protein, 315 aa, unidentified
MYYLGIDVSKKTIDCCLTSDSIFYERRFDNTEDGFRQLDDWIKEYTVEVVYCCCEATGIYHEAIADHLRQNHIVSIVNPSKIKGFREAEQTRTKTDRQDARLIAEYCRRMQPQAWQPPTEEQKYLQAITDYIARLKQQRAAEQTKYQTAPDVIRNHIQTTIDHLNRLIAIVQTELKDFYRQNPKYNEKKNRLKTIDGIGESAASVLLAKLTRYDFANQNQFAAYLGLDPKIKDSGTSVKGKSRISKQGQKNARKALYMPALVAYRMNAFPAFIARLKAKGKPPKLIIVAIMRKLAVIAYQLYKTGKDYDRSRYRK

SEQ ID NO: 335708 - protein, 444 aa, unidentified
MLRRTVGIDLAISAVQVAQIFDDGVAIGKPIRFRLNAEDLHNLVAAVTQGVPAGVPIQAIMEPTGMAWFPVASWLKAAGVQVIRVKGQRVKALRQYLSEHAKTDLADAHVLGAMPSFGARVLDPVHVPSPDHHALQRLTKQRHRYQEQICASRRRVLDLIRWACPALEPILPDTMTRLTLAILAEFFDPNRVIKTRRDSLARFVSQNASGNHPRSGPFVEKLVEALKQSARASVALHGERIDFQSLQFEVRQEVELLRMLERNITELEKKIEVLYQSEHPSDALRSIPGIGPTLAPLLVGVLAQVDRFRNERHVRGFCGLFPTKSSSGGIDRPGQRITKSGNDRIKRALYVAADIARKIDPDLAAVYWRLMVKKGHHHKQALCAVATRLVNRIFLVLKTGKTYVLRDLDGRSITVAEGKRIVAELFSVPADIRRARSRHIETAA

SEQ ID NO: 335709 - protein, 419 aa, unidentified
MSFKIFKFNCCGLDVHKTWIYACIGITDSHSRTEYKQARFSSFSKGLQELCDWLAKYNCTDVCMESTGKYWIPVFNILEKNNVWVTLSHPKYTKPQKGNKTDRKDAKWICDLYMCGMVKPSFIPPADIRELRDLVRYRFKLTCMITGEKNRAQNCLTVSNLKLDDVFSDVFGKSSRSITEQILQHPGEKFDVSPFVDSRCKTPIEEIQAAVDGNISKEQAVKLRQCLDHIDELQKHISEVEQEILRFSDKYEAALNLIRTVPGFDKNPMTAIQVLSEIGGDMPVFPTAKHLVSCAGCCSRNDKSDRKIKSTRISCAGSYFKPVLVQIANALIKSKKHFEFTTRYKRIKTRRGHKKAIIARCRMILTAIWHILTDLKPYTSDGFLESRPVKKEKVLTTSQALNLLRQRGYLIKDEPSPVS

SEQ ID NO: 335710 - protein, 450 aa, unidentified
MGDERFAWFVGIDWGTQHHQVHVADAQGTALADRVVPHTAEALTAFVAWLTALASGQLGRVAIGIEATRGALVETLVARGAAVFAVNPKQLDRFRDRHSVAGAKDDRLDALVLQSAVRTDRHLFRRLALDEAHVIQVRELTRAQEELTDEGVRLTNRLREQVHRIAPAWLTVCEAADEPWFWALLKAAPTPAHGRRLRLNTVQRILRQHRIRRLTAAEVQAVLQAPAMYVAPGTVEATAQHIALLLPRLRLVWEQQRQCEQQLETLLTALANAAEAAEDEGASGPGVDAAGGSPAAPRGEGPPPPSVVAIVRSAPGVGPKITGALVAHAMPMLREPDLLALRATAGTAPVTRRTGKDPKGRVGMRYACNAVLREALFHWAQCSIRVTEGDHAARQYYATLRAKGHSHARALRSVGDRWLRILVAMLKSRTVYDPARFARRTAVAVQPATA

SEQ ID NO: 335711 - protein, 401 aa, unidentified
MEGPIVSIDVSNGNSHYMCFIKNNKRFGKVKKIDHNIEGFKRLLEDIQKLEAETNEKVCAVFEATGVYTKPLERFLSKNSIKTYIINPLESARKRKEEIHNKKTDKLDPISISKVYYDKEEMMELKKKDETYNWLRKKNRLYEDQLNHLRKYKVTFQNQLSICFPGYLDLFKDGYSDIPMTILKKYPHPDLLKNKKAETVARYLEKNTCHTHKVSLEYALKIIEFAKKTYPGCEKDDVEVEIFKILLDKVIETQRECEKTLNEMITVASTLEEYRYILSIDGIGTNLAARIIAEIGDIEEFKSREALVAYAGLDPHIYQSGDQDGKHLKISKKGNKYLRCLLFLAVGCSIRGAKDNPVNRFYQKKKQQSNPLNSKAAKTACTAKLLKIIYGICKNKTTYER

SEQ ID NO: 335712 - protein, 393 aa, unidentified
MRKPRKQKKPLNDLNRSLTPFDPNETLIGVVELSKGSWLVAGIIPGVERQPLKKLTPDEDGLLKLLERWRAEAEKVGYKITRIALAFETGRDGFWLARWLRARGIEAHVIHAASVPVSREHRRAKTDRLDTEQLKRSFLGWLRGERDHCKMAAIPTFAEEDAKRPHRERETLVGEHTTIINRIKSTLARLGIRSFNPTLKEAPERLEHLRTPEGEPIPPNTLAELSRDLERKQLVAEQIHQIEKARMEQLKRAPKAGPNLMVLVLMRVIGIGIETADMLVKEILSRNLRDRRAVARYGGLTGSPDESGSQRREKGLARSGNARVRKGMIQLAWRFLQFQKESTLAKWFEARTKNARTSRKKMIVALARKLLIALWHLVRDGVVPEGVVLRPAH

SEQ ID NO: 335713 - protein, 466 aa, unidentified
MKHNRRRRPGKPRVSPSVLERINPNVAGIDCGSAEHFVAVPPDRDPNPVRSFPTFTSDLQRLADWLSTCRVTSVAMEATGVYWIPIYEILEARGFEVHLVNARHVKNVPGRKSDVSDCEWLRELHSVGLLRGSFRPTDAIVALRAYLRHRQTLIESAGAHIQRMQKALVQMNLQLPLVVSDITGVTGLRILRDIIAGRRDPSQLAEHRDHRCRASKAEMVAALTGNYRPEHVFVLQQNLELFDVCQTQLAACDSAIEAHVQTLTASMSAPATPLPPPRVTKKPRDNEPRFEIRTPLHQLTGGVDLTQIDGITSYTALKLLSEIGTDMGRWPSEKHFTSWLTLAPKNKISGGRLLSSRTQPSANRAAAILRMTVMSLGRTQTALGAFYRRLAAWIGKPQAITATARKLAILIYRTLKGELVYRDPGADAYEAQQRTRVLRRLRQRAATLGFELVSRATGELLDGVVS

SEQ ID NO: 335714 - protein, 365 aa, unidentified
MRLTTTPTQRRDPVLASAPPIVVGVDTHQLTHTAALIDIHYLRLGHREFPATDAGHRELLAWACSHGPIAKIGVESTGSYGAGLTRHLVAAEHDVFEVNRPEKATRVKHGKSDPVDAYSAAEQVLAGRVTARAKLTTGVVEAIRAVKVARDGAVKNRTAAFSQLRDLITAAPAGVHDELIGLTARGRVTRSLAMRPDIARIHEPLHATRYALRALARRIKDLDTEIDAADKILTKLTRQAAPSLIAMRQVGPQIAAQLLISAGQNIERMSSEATYAKLTGVAPLPASSGKKTRHRLNRGGDRQANSALYMIAVGRMKNHSETQAYVERRRAQGKSNAEIIRCLKRAIARSAYNALRTDLTTAGHL

SEQ ID NO: 335715 - protein, 466 aa, unidentified
MENNYILYVGMDSSKGKADAAILKVSDRRSVKPKFLRKKLSFKFVKSEVTSFLETVRSYSDDNCTSICFALEVTGIYSTNVYNFIKDNLNDNESIKFLNTDFVNQWRNAHNIAKSDPLDAQTISTIIGTDSDVQYVNDNVFENKNGYQDLKALVHRHYQIKKIYSQKINRLIAQCDCLFPELQYVFEPKSAAFIAVLSSYPTTHDIINASRLEVFNVVYEATKHRCSIDKIDKLFDLCHDTLVPDNISSYGRSIILDLVENIKNIKGQLKMIERYIRDVASLNPAYKLLLTITGCGPLTAATVIAETGDIKRFKNADCFVSYSGTSPRNKRSGTSVETMGKISKKGSRYLRHAIYMIAEFARRHNPVLKHQFERIKNGNKKRHKLANIATANKIARYIYSIMKNESGFVILHEHIMRLPEETQNTFFNSISLDFPENTRKQIYQYSDIDGEVHKFVYTKLEETMII

SEQ ID NO: 335716 - protein, 360 aa, unidentified
MAKARTLVGLDVHATKVVAAALDAETGELQFFGLGGDVCEAAGLCAGLPRPVRAAYEAGPTGYGLARELARRGVECVVAAPSKIPRAPGDRVKTDRRDAELLVRLLLAGKLHAVRVPGPEEEALRDLVRAREAVRVDLMRCRHRLSKLLLRHGIRFEDGRAWTDRHHAWLAAIELGWPAAQATFVDACGAADALVHRRDALEREIIALLPSSPLQAQAGRLRCLRGIDTLSAVGLCSEIGDFERFERAEQLMSYVGLVPSESTTGQQRRLGAITKTGSAHARRLLVEAAWHYRPRPRIGKTLTERQHDQPAEAVAIAWSAQQRLHRTWNRLETRAKRRTLIAVAAARELAGFCWAITRIP

SEQ ID NO: 335717 - protein, 337 aa, unidentified
MPTLTIGLDIAKNVFQIHGVDRHGKIVVLRKLRRAEVLKFFGKLESSLVGIEACHGSHFWARELTSLGHTVRLLPTQYVKPFLVGGKNDANDAAAICAAVARSGIHFVAIKSAEQQSLQSVHRMRQRLIQERTAKSNQIRSMFAEEGVIFPVGLPQLRKGVVELVNNPDSPITALLRRLGSMYLEQLKALQQWLDELATEIAEIFKSNEACQRLATVPGIGPVIATALVSSVGDPSQFRNGRQFAAWLGLTPMQRSSGGKTRLGGITKRGDTYLRTLLVQGARAVMHFVHRRDDRHSRWIKAVMQRRHVSIAAIALANKTARIAWAILVGNGCFEAA

SEQ ID NO: 335718 - protein, 347 aa, unidentified
MNFYTKQHQYYCGIDLHAKTMYLCIINQEGEIVLQRNIRTSPEVFLKTIERYQEDIAVAVECIFTWYWIADLCAQQNIPFVLGHALYMKAIHGGKAKNDKIDAHKIAVLLRGGMIPMAYVYPQEMRSTRDLLRRRMHLTRKRAELLAHIQNTNYQYNLPDIGKKIAYKANREGVSERFPDESVRKSIELDLKLLDYYDQLLPRLEHEISLIAKAHDADSYFRIRSIPGIGRILGLVLLYEIQDIHRFPRVQDFVSYCRLVKSAKESAGKRLGSSGKKIGNVHLKWAFSEAAVLFLRRNQEARKYRDKLQKKHGKAKSLTILAHKLARATYYILRRKEVFHMETFFQK

SEQ ID NO: 335719 - protein, 355 aa, unidentified
MPSKADTAVARTIGIDTGKNTLHMIGLDERGAIVLREKISRARIAARFMNLPPCLVGIEAGMASHYVARELVALGHEVKQVPPAYSKPFRHGHKNDFRDAHAVAEAVERHSTRCVPIKTDGQLDLQALHRVRSRLIGNRTAVINQIRGFLLEHGIPVRQGHHFLRKQLPLILATRTDVLSPRMIRIIGDLMADWKYLDERIERVTDEIEALAHADEGCQQLITVPGIGPIISSAMVAAIGNGAAFCKGRDFAAWLGLVPKQMSTGDRTVLGRITKLGNRYLRMLFIQGARAVLLRPASWVKHSFGSWLTAATRRLHRNVLAVALANKLARIAWTVLAQGRRYEARVEPRVEPAAA

SEQ ID NO: 335720 - protein, 354 aa, unidentified
MRIIGCDYHPAFQQIAFVDTDTGEFAEGRLAHREEAERFYRDVAARGVSVLVGMEASGHARWFEGLMAELRFELWIGDAAEIRIKRVRKQKTDRQDAQLILRLLMEDRFPRIWVPSGENRDLRQLLWHRHRMVQARTRIMNQLQAVALNEGLRCKKRLWREAGREQLEAFRLAPWASRRRRDLLELLDRLTPTIAELSQAVEQEAEKCPEARRLQTHPGVGALTALAFVLIIGRAERFQCGKQLASYLGLVPLEESSGQRRRLGHITKQGNSLLRFLLVEAAQVTVRSDPEWRSKYFHLAMRRGRKIAKVAMARRLAVRMYWMWRKGWDYGQIKKFSSHAGEPGNRDGVQHNTE

SEQ ID NO: 335721 - protein, 338 aa, unidentified
MDHVAIDLGGRESQVCIRASDGTVIEEKRVATLALKGLFGQMPRSRVIMETCSESLFVADAARELGHDVRVVPATLVRSLGVGSRRTKNDRRDAQILSEVSCRIELPSVHISSAKARHRKTLCNSRDALVSARTQLVNCVRGWMRQTGVRMRTGGVESFTKRFHDKVGDTTPEAIKRLLTAIDELCDQVADADRQLEDEVKSDPVCQRLMSVPGVGPVTAARFTAQIDECERFPDAHRVESYLGLVPGEDSSSDRKERLSITKAGASRVRATLVQAAWSARRWRPNDPMVRWCLEVEKRRGKRIAVVAQARKLAGILFAVWRDGGVYNPMRGAKAPSS

SEQ ID NO: 335722 - protein, 359 aa, unidentified
MPMLADTIDAVIGVDTHRDTHHAEIAYPSGAVIAACSVPSTSAGCTQLLDWARQHAPGPRLAACIEGTRSYGAGLARAAAAAGLVVIECEQPTRQSRRGKGKSDPADAHLAVLTALRLDTARLPTPRADGDREALRILLSARQELTTTATAQINRLRALLRDGDDADRDLARRTKLSGTALAMLAGRAQPPAASRAQAVRHAEIRRLALALRHASQEVKANRAALDEIVSELAPGLTSRPGIGPVTAAQAIVSFSHPGRCRHDAAFAMLAGTSPLEASSGQITRHRLNRGGDRALNMALHVIATSRMRCDPATIAYVTRRRAEGKTSREIRRCLKRYIARQLYRTLTTAMTPPHQEPSD

SEQ ID NO: 335723 - protein, 347 aa, unidentified
MRFYAQQHLYYCGVDLHARSLYVCILDQAGDVQVHQNLRADPQAFLQLVAPYRQNLVVAVECMFAWYWLADLCAREGIPFVLGHALYMKAIHGGKAKNDRIDAHKIAVLLRGGMIPMAYVYPARMRATRDLLRRRMHLMRKRAELLAHIQNTASQYNLPAFEKRIAYESNRAGLSAHFDHPVVRKSIGVDLALIEHYDRLLKELELYILRTARQHDPNALYRLRTVPGIGKILSLVLLYEIHDIRRFPTVQDFASYARLVKCTKESAGKRTGTSGTKIGNAHLKWAFSEAAVLFLRQNPTAQAWLKRTASKHGKPKALSILAHRLGRIVYYLLLRDEAFDMQRFMAA

SEQ ID NO: 335724 - protein, 343 aa, unidentified
MQVVRTVGLDIAKSVFQVHGVDGAGQVVIRRQLKRRYVLAFFQKLPPCLVGIEACASSHHWSRELKALGHTVKLMPPAYVKPYVKRQKNDATDAEAICEAVTRANMRFVATKTPEQQSGLTLHRTRHLFIRQQTAVINVIRAHLAEFGIVAPVGRKGVEALLDVVANPTDKRVPAIARACLAALGAQLCRLKEQILEFDRMIIAWHRSHEASKRLDAIPGVGPILATALVASVADPKAFRSGRSFSAWIGLVPKQHSSGGKDRLGSISKQGDRYLRSLFMAGALAVIRYAKIHGSRHRPWLTALLARRPSKVAAIALANKIARMVWAMMARGERYKEPVALAA

SEQ ID NO: 335725 - protein, 378 aa, unidentified
MRSIGMDVHRSFAQIAVVEDGLCRDEGRIGVRPEDLREWAETLGPDDEIALEATTNSDATATMLRPLVGRVVVSNPRKTRAIAEAKVKTDKVDARILAQLLAVDFLPETWVADDQTRFRRRLVARRTHLVRQRTRLKNQVHGILSRNLVPTCPHADLFSGVGGRWLFNQNLPADEWRSVNALLRQLDFHGDELAEVERDIAVDAIDDPVIARLMTVPGINVTVAMSIVAAVGDFSRFEDPNRLVSYLGLNPRVRQSGNSPAVHGRITKAGRSQARGMLVEAAFSASRAPGPLRAFYRRIKERRGFQIATVATARKMTVLCWHLIAKGEDYAFARPSLVAHKRRSLELAAGAESRRGPVAGPSRDYHIKQLRDQEKAIV

SEQ ID NO: 335726 - protein, 425 aa, unidentified
MNYKQNEKINQVKESTLVVGIDIGSTTQYARAFDWRGIELGKVFPFSNSREGFESFKAWMQHLQDKYKKLDAIVGIEPTGHYWFDLGAYLEDEGILLVMVNPYAVKQTKELDDNSQSKNDRKDPKVIAKLVTEGRYSAPYTPDGVYADLRIMVANRKRLIREMTQIKNRFARWFAIYFPEYTDVFGDYEAQSSMLLLKKVCTPEAIVELGAEKINQIWRDAKLRAVGMKRATTLCETAKRSIGLKKGSSAAQYEMKLLLEDYEYKKAQLDAVMEEIEKLCRKIPESEQMLAIKGIGVITVAGFLAEVGDVRRFESPRQIQKLAGLSLRENSSGKHKGQTTISKRGRSNLRAVLFNAAIPLIATNPEFKSLHEYYTTRANNPLKKKQSVIAISCKLIRVFYAILANGVTYDAQKMLSDIHRQPQAA

SEQ ID NO: 335727 - protein, 402 aa, unidentified
MNAVGIDVSKGKSMVAIMRPFGEIVSAPFEIKHTASDIHSLVELINSVEGESRIVMEHTGRYYEVLAHQLSKANLFVSAINPKLIKDFDNDSLRKVKSDKADSVKIARYALDKWQNLKQYNVMDELRNQLKTMNRQFGFYMKHKTAMKNNLIGILDQTYPGVNTYFDSPARSDGSQKWVDFASTYWHVDCVRKMSLNAFIDHYQNWCKRKKYNFSQSKAEEIYGKAKELVPVLPKDAITKLIIKQAVNQLDNASTTVESLRTLMNETASKLPEYPVVMAMKGVGTSLGPQLMAEIGDVSRFTHKGAITAFAGVDPGVNESGSYEQKSVPTSKRGSSDLRKALFQVMDVLIKTHPQDDPVYQFLDKKRAQGKPYYVYMTAGANKFLRIYYGRVKEYLSSLPES

SEQ ID NO: 335728 - protein, 328 aa, unidentified
MCYFTGIDVSKEKIDIGWLRDSATNKKKTKAFKNTAEGHQLAKDWLLKSIKVDAEEIVVTIEPTNVYHEALLYFLHDCGFKVLLVNPGKAKKYAESINQIHKTDKSDAIVLARYGCAQFNQLELWQPEPTEVRELKVMIRRLSALEKDLQREKNRQEATLVSLSSDRVVQSLNSMIETLEAEIKCLQKDIDDYIDGIPHLKHNRQLLQSIKGIGSVMSRELVYLFSSKKFKNAKQAAAYLGLIPRLKESGKLKGKTTLSKIGDARIRAKLYMAAVSASTYNPDIKAQKARLLKAGKVKMQAIGAAMRKLIQICFGVIKHQIEYRPQLS

SEQ ID NO: 335729 - protein, 358 aa, unidentified
MAGKVTETAVVGGVDTHKDLHVTAVVDQNNKVLGPQFFSTTRQGYRQMLAWMTSFGALKRIGVECTGTYGSGLLRYLQNAGLEVLEVTAPDRMERRKRGKSDTIDAECAAHAAFSGIRTVTPKTRNGMIESLRVLKTCRKTAISARRVALQIIHSNIISAPDELREQLRNMTRMQLIRTLGAWRPDASEYRNVTNVYRISLKSLARRYLELHDEIADLDAMIAAIVDELAPELIKRNAVGYESASQLLITAGDNPQRLRSESGFAALCGVSPVPVSSGKTNRYRLNRGGDRAVNSALHIIAIGRLRTDDKTKEYVARRVAEGHTKMEAIRCLKRYISREVYTLLCNQNRQINSIPITA

SEQ ID NO: 335730 - protein, 416 aa, unidentified
MKLFVGIDVSSEKLDVCFLTDDNQLSILSEISVANDIEGASFIRETILEFNDSYHFDQIVIGMESTSMYSFHPSMFFHEDEKLKKLNTLVTIENPFRVKQFSRMFDENKTDRNDALRIADFLRIQRFTTSPIKEEKYMALQRLTRTRYQLIKQLIRTKQHFLENLTYKCNTLAREMRDESTNLFSATLISLMTEDFTLDELAELPLEAFCDLLQEKGKGRFKQPEKIAKAIQRAITMSYRLGALAQESINVVLSVLVREIRALEKNIKELDKAIEQVIVVIPEYQCLTSIPGVGKVYAAGLIAEIGQIERFEDQTKLAKYAGLSWKVNQSGNYQSQNTPLTKQGNRYFRYYLVEAANSVKNYLPEYKAFYQSKYKEVPKHQHKRALVLTARKFTRLVDTLLRKHQLYTPPRSVIEK

SEQ ID NO: 335731 - protein, 536 aa, unidentified
MIIAKGYVKQRNTSGSKVAASPMIRYTPKDRIMNDFLLGKLKNSSYLQQSQLVHSVRNYDSAGWEPRKWRYLHHALGCVLIRRKWTPIGKDWRTILRGKEQTLMSNEEQQPYLSVGIDVGADISWMSIALTNQLFVGKPYKITHTNVTTLEKCVEIIKEAEEANSLESRIFLESTGVYHYPLFCYLCGKGFKVYIINPIITKNSTNINIRKVHNDRFDSKKVALVGLKPDLKTSIIPSGVVLDLRNLMREYYNLMDSRSAYVNKLQGQLRMVFPQYAKVFSKVTTDTSLTLLDKYGSPQAFLDADMADIMATIRQTARFGIKYAQSKYDAIIGAAKAALSFGYSVPSNFSLIRLYIRFIRKFDDEIDAVLSAMNDLVAANENFLFVQQIRLIQSIKGAGFLTAVTVMCELGDFSAFVKPKQLFAYFGLDPDVKQSGNFVGTKNKMSKRGSALARRAIFTIALINIGHSKKGVPHNQVLSDFYHQKCKSKPKLVALGAVMHKVCNIIFAVLRDHTPFVLIPPDDHIRNYQLKGNALS

SEQ ID NO: 335732 - protein, 388 aa, unidentified
MIYVGIDIAKLNHFASAIDSDGVVLIEPFEFLNDNDGFYILLSKLSSFEKNSIIIGLESTAHYGNNLVSFLVTKGFNVCVINPIQTAALRKNNIRKTKTDKVDALLIAKAVALMDNPRFVTLYDVALMQLKNLGRFRLKLVKQRSRTKIQLTSYLDQVFPELQYFFKSGIHQKAVYAILKEAPSATLIASMHLTHLKNLLVSNSKGHFKKEMALELRVLAQKSVGTADRALSVQITQSIAQIELLDSQIDMIESEIKDIISSLDSVIMTIPGIGPINGGMILGEIGDINRFSKPRKLLAFAGLDPSVHQSGKFSAKRTRMSKRGSSALRYALMNAAHNVVKYNQTFREYYDSKRAEGRGHYNALGHCAGKLVRVIHKMLKDDVEFNLE

SEQ ID NO: 335733 - protein, 377 aa, unidentified
MKNYITKYVGLDVHKNSIAVSVAESGREEPTYYGEISNSVESLRKLVKRLGKSGDPLSFCYEAGPCGYGIYRTLTQWGQACEVVAPSLIPRKAGQRLKTDRRDANLLARMHRAGELTAVWVPNAEQESIRDLTRAREDMKSLERRARQRLNAFLLRHDKIYQSGKSRWTQAHFRWLETVKFDSPVQQIVLQEYIDSVKTSQKRVTDLKNQMREALKTWTFRPVAEGLMALRGVSLITAMTILAELGDITRFESPRNLMPFLGLIPSEHTSGPTRRQGPITKTGNSHVRRVLIEAAWGYRFPARKTATIERRAEKTSIAVQAIAWQAQKRLCSRYRNLLRAGKEKKLVVTAVARELTGFIWAIACEIQGKAHGSKALA

SEQ ID NO: 335734 - protein, 331 aa, unidentified
MKKKDVIGIDVSKLTIDAYVKLAQVHAEFSNDNKGFRQLVKWTKKHTDCQIEELLICFETTGLYSLQLASFLSQINIDFVMENPIQIKRSMGMVRGKDDHVDSQRIAEYAYMRKENLKYTKLPSEELIKLQNLLAMRERMVRQKAGYQASLGEYKRVLVQQQQKDLFLLLNNMISALKKQVLKADKILIEIIQSNKKLKSTYTLLTSIKGIGVILAANIMVTTICFTKFNDSRKYACYCGTAPFKYSSGTSIKGRTKVSQMANKKMKALFNLAALSAIQHDPELKLYFDKRKANGANGMSTINIIRNKIIHRVFAVIKRGTPYVVMAKYAA

SEQ ID NO: 335735 - protein, 341 aa, unidentified
MMVIGIDAHKRTHTAAAVDELGRHKSTRTVGTTSSDHLALLKWAQAQDVPDRLWAIEDCRHMTRRLERDLIAAGERVIRVPPKLMAHARDSARTYGKSDSIDALAIARAALRESDLPVARLDGVEREIRLLVDHREDLVAERTRIIARLRWHLHELDPAWTPPAKLDRTSAFDRVTTYLAQTTGLLARLAATLVEHCRRLTVEIDDLAAEIGTRITKVAPSLLAIVGCAELTAAKIIGETAGVDRFRSKDAYARHNGTAPLPVWSSNHERHRLSRTGNRQLNAAIHRIALTQARCHPGARELLARRKASGDGGMEALRVLKRRISDAIFRAMANDHVASTA

SEQ ID NO: 335736 - protein, 345 aa, unidentified
MRVIGLDVHRNFAQIAILENGLMKNHGRFAMARDAVLTFAATLTKEDDVVLEATGNTAVIVRLLTPFVHRVAIANPMQVCAIAWAKVKTDKIDAATLARLHAAQFLPEVWMPTEEVELQRRCIAERAQLVSQMTRLKNRIQSILHANLIPRETGRIYSKKGRARLQELPPPPDQQRVALRHHDELDRLAVELAIIDKELAQRALDDPNVKRLMTIGGVNSIVATSVLAAIGDIKRFSSPEKLVSYFGLNPSVHQSGDHPAYHGHITHQGRGHARGMLVEAAWALAQAPGPLSAFFQRISLKRGKQVAAVATARKLAVLVWHMLTKNEDSPGRDRRCCSGNCATSN

SEQ ID NO: 335737 - protein, 346 aa, unidentified
MNKITRIGLDIAKNIFVLHAVNEHGKLVKRQTLDRSKLLAFFAQTEPCLVGIESCASSQHWAREIAKLGHTVKLMNPKFVVPYRKNGKNDANDAEAICEAVGRPNMRFVPVKSVEQQAVCALHTSRQFLVVQRTALINHCRGILTEFGMVMPVGADKVRRLLTEKLNNEAEMIPSILHVLMQDHLDDLKRVEERIEAIDKQLAQWAKHNQQAITLQQMRGIGIITATAFASGVCDARLFKNGRQFAAWLGLVPRQYSSGGKNKLGSITKAGDAYLRTMLTQGARSIVFHSKDKNDAFSLWIQRLIARVGMNKAVIAVAAKQARVMWAMMTKNIAYEPDRICSPLST

SEQ ID NO: 335738 - protein, 409 aa, unidentified
MRLFVGLDVSSFDIKACILNGEGKKLDFFSVNNDLPGATALKERVLQCIANQEIETFKIGLESTSVYSFHPSMFLHYDKELQSFGAKVFLMNPKQITNFKKSYSDMDKTDEIDAFVIADYLRFGRNQMSIVKESQYVALQQLTRSRYQLVRMLTKEKQHFLQHLSYKCNTFSQEVDSSIFGNAMMELFLEKFSLEELADMPLEELAEFLQTKGKNRFGDPKCVASTIQRAVRSSYRLDKVVEDSIDVLLGTSIAVIRTYQQQIKEIEKSIKRIMAGLTQTLESIPGIGPVFAAGIIAEIGQIERFDDETKVAKYAGLYWRTHQSGRFTAENTSLSRNGNHYLRYYLVEAANSVRRHVSDYQEYYVKKYNEVPKHQHKRALVLTARKFVRLVDALLRNHQLFTPERCVKV

SEQ ID NO: 335739 - protein, 404 aa, unidentified
MWYVGLDWADTHHDVEVQDEAGKRIGARRFAHSHEGLHELQAFLLGIAASPEELACIVETNHGLLIAFLLEAGIPVYPVNPKTTHRLRKAAGAKTDRIDAHLLAKTGRFDLAELRRMAPDSPSVAELKTLTRDQDALIQTQTRLVNQLTACLKEYYPAALQLFAKLQQRSTLLFLQAYPTPQAALAASVEEITATLRAGKHTNPRRVAPKIVEELHRPQLVASEVIVRAKSRLMLSLVKQLLVVIQEIESYDKAIRPLFLSHPDQELWRSLPRAGKRLAPRLLAEWGDDRSRYVDANSVQQLSGTAPVPYESGNYAKAHKRFACSKPLRNALHQFAWQSTRQEAWARDYYQRKRAQGKTHSMALRALANVWVRIIYAMWVNKTSYQTTTFEAAQRAHAPRQRVA

SEQ ID NO: 335740 - protein, 339 aa, unidentified
MEVKRISIDTSKHTFTIHGVDLQERPILQRDIKRTQLEPFFAKLEPTEVALEACAGSHHWGRLLSRLGHRVKLIPPQYVKPFVKRSKNDRTDAEAIGEAASRPTMRTVPLKTVAEQAATIVVKHREMLVAQRTQAINALRGHAAEFGTIAAKGCTNVTALLAVLAADEVIPHSARAMFEQMSQHVADLDSKIEALDRQLLDQHKINPVSRRLATIPGVGPITAITLALTVDSGNFESGRHLAAWLGLTPREHSTAGKHRLGQISKAGNERLRQLLVVGAMAVIRVAKPGRPSASGWLLQLLERKPRKLAAVALANKMARIVWAIMAHGEAYRRQPATAA

SEQ ID NO: 335741 - protein, 315 aa, unidentified
MDEQPSVFVGIDVSKDRLDVHLRPSDETFHVPRDAKGLETLAHRFGNRPIALVVLEATGGFEASVAAALAAVGLPLCIVNPRQIRDFARAMGRLAKTDTLDAEVIALFAERMRPPARPLPEPERRHFAELVSRRRQIIGMINMETNRRDQAVDKQLIRRLGRHIAFLERDLAELDGEIGHAIEASPVWCETEALLKSVPGIGDVTARTLLAQLPELGTIGRHQLAALVGIAPINRDSGLMRGRRSTAGGRTAVRGVLYMAALTAIRRGSPFRPFYERLTQRGSPRKVALVAVMRKLLVTLNAIIRDRTPWRPLTA

SEQ ID NO: 335742 - protein, 412 aa, unidentified
MKEIADKVGGLDVHRDTVVACTRVREPDGMVTLSKETFNTTRKGLEDLARFLVDAGVSTVVMEATGVYWKPVYYALEGLFPQLWLCNAQHVKNVPGRKTDLSDAEWLADVAAHGMVRPSFVPPPEIRELRELTRYRKTQVDARAREIQRLEKVLQDAGIKLTSVASAVWSASSREIIEALIAGERDPAVLAQMAKSRMRAKIPQLEEALYGHFGAHHAFVAKQTIDHIDYLDSAIGALTQEICERLVPFESAVALVSSIPGISATTAQVIIAETGGDMSRFPTAEHLCAWAGLAPASYESAGKRKPAGTRHGSTSLRRAMIEAARAAARTKGTYASAQYARIARRRGPNKAAVAVANSMLNVVWHLLTNGELYQDLGADYFESHNDPTVQVKRLTKRIEALGFDVTVTERVA

SEQ ID NO: 335743 - protein, 342 aa, unidentified
MKVRAVGIDVAKNVFQIHCVDEQGKVLLRKQLKRSQVASFFANLSPCLIGMEACSGAHHWARKLQSFGHSVRLIAPQFVKPYVKSNKNDVADAEAICEALLRPNMRFVAVKTIDQQALLALHRARQGFVKARTAQANQIRGLLSEYGLVIPQGIGQIAKRVPELIEEASNELPGMLRMLVSRLMEHMKALDGQVAQLEAHIKGWHREHEASRKLERVPGIGPLTASALVASMGEAKSFDNGRQLAAWLGLVPRQRSSGGKPTLLGISKRGDSYLRSLLIHGARAVIRAAQRKPVRGGWLHELLKRRNPNVAAVALASKNARIAWALLVHERQFEANYAAVAA

SEQ ID NO: 335744 - protein, 403 aa, unidentified
MNNVAGIDVSKGKSMVSVLRPFGEVVAKPFSIGHTGSELKELADYLKSLDGETRVVMEHTGRYYEPVARFLHEEGVFVSAVNPKLIKDYGNNTLRKVKTDKADARKIARYGLDNWAELRQHTPMDTIRMQLKTLNRQQSLYTKTKTMMKNNLIALLDQTYPGVNALFDSPVREDGSQKWVDFATAFWHVDCVRNMSLTAFAERYRKWCKRHGYNFSQSKAVEVHTGAQDLIAMLPKDALTKTMVRQAIDALNAVSASLERLKAEMQALAAQLPEYPVVMAMHGVGDSLGPQLMAELGDVTRFTHRNAITAFAGVDPGADQSGTHEAKSTRVSKSGPPELRRALFLVMDCLLKTQPQDDPVYRFMDKKRAEGKPYLVYMTAGANKFLRIYYGRVKEYLASLEEN

SEQ ID NO: 335745 - protein, 394 aa, unidentified
MNSISNKKINQVTDQTLVVGMDIAKKKHYACFVDERGRVLKKPFPVLQSREGLEWLYQCIVEAMKEFEKTEVIVGIEPTGHYWLNLAYFLDEKGIPLVMTNPMHVKRSKELDDNLPTKHDAKDALVIARLVKDGRFSYPRILKGVEAELRTGATFRSKLVEEQGAVRNQMIRWLDRYFPEFTQVFPSFGKMALAVLEQTPFPSDLAGKEIEEVLTLYRQSEGLQSPQKPKAKKLMELVQHSIGVTEGQQMARIEIATLVRRYRQLEEEIEALTQQLTELVQTSVEYEWLKTVPGLGDATIVELLSEIGSFSHYQDPRQLLKLAGLTLREHSSGQHKGQKRISKRGRRRLRALLFRVMMPMIRHNEAFRQLHEYYTTRPDNPLRKKQSIVVLCGK

SEQ ID NO: 335746 - protein, 352 aa, unidentified
MQSTTTIGLDLAKDVFQVHGVDGAQKVTIKRQLRRKDVLEFFTKLPPCLVGMEACAGAHYWARELRKLGHTVKVMAPRYVKGYAKRAKTDAADAAAICEAVTRTHVEQVAVKSEAQQCLLMLHKARELLIATRLSLANALRAHLAELGLVAATGHPGFALLRAKLLDEADGDIPPAARVALLPLEAAIGAAERGIAALEGKIRIAHKVDETSRRLEAVPTVGMFGATAFAAVAADIKAYRSGRCYAASLGLTPKIFGTGGEVTLGSITKQGNGYLRRLLYLGALSQLRVARAAPHKADPKLLRLLAEKPFRVAAIALANRTARTIWALIVRGGEYVANHVPAVPVAAKMGLQ

SEQ ID NO: 335747 - protein, 402 aa, unidentified
MNSVGIDISKGRSTIAVMRPFGEVVISPFEVRHTDSELSELARQLKSLNGETRVVMEATGNYHASVAKLLHNAGLYVSVINAKLVHGYGNNELRRVKTDRKDAVKLANYGLDRWLTLPRYIPEEDTRLLLKNCYRQYRQYSKVQTVLKNNLISLLDMVFPNVNRLFSSPIRRDGSEKWVDFVAEFWHCRCVSEKSQKAFTNKYQRWCRKHGYNFSEAKAHTIHAEACGHIDVIPKSETTKLLVEQAVAQLRATSAALAALKHEMQALASILPEYPVVMDMFGVGPTLGPQLMAEIGDVRRFYSKKALVAYAGLDAPPNDSGDVTGRHKSMSKVGASSLRRTLFLVMSVYLQNAPLNEPVYQFMNKKRSEGKPYRVYMMASANKFLRIYYASVKAYLDSLEHD

SEQ ID NO: 335748 - protein, 344 aa, unidentified
MQYIAFDVHKKYTWARVEDKSARVLRQERIDHGRGAVSAFLAECEANSPVAVETVGNWYWVVDEIEEGGFEPKLVNARLAKLMMGQVNKTDKLDARGLNLLQRNGTLPTVWIPPAEVRDARELPRTRMMLVGQRTQLKNRVHATLAKYGLSLPEVSDLFGKAGRKALARLMEQLPPNTTEATRAVLQQLDGLEQAITAVERRIAEVFDDTAENKLLRSLPGVGPTLSVIIATEMGDIERFGGAERFASYAGTVPRVHASGGKSYGGRVRMDTNPYLKWALVEAANAALLQGDRYGHVRRLYDRIRARRGHGKAIVAVARHLAEAAYWVLRKQQPYQEPRRSTRG

SEQ ID NO: 335749 - protein, 411 aa, unidentified
MDVYCGIDWSEDHHDIALVDRDGKLLARRRISDDLAGAAALLALLAEHGDSAGELIPVAIETPRGLLVACLRATGRPVCPVNPMSVARYRDRHSVAGKKSDHGDSVVLAHVLRTDMDMHRPLPADSELAQAIAVLARAQQDAVWDRTCAHSKLRSHLREYFPGFLAAFAAARGGITRPEARAVLAAAPTPAAAAALTLTQPRAMLKKAGRTRGIDTEATRLRDAFRIPQMRQLPLIEHAMGRRTRALPGQLDAACTAADDLEQAAAESFNQHPDAEIITSFPGLGSLTGARVLAEIGDDRSRFQDAKGLKAYAGAAPITRASGKTKSVTRRHIKNNRLNAAGYTWAFSALTASPGARAHYDRRKDTGDRHAGALRNLFGRLLGGLHHCLITGQHYDEATAFPAHTNQPAAA

SEQ ID NO: 335750 - protein, 300 aa, unidentified
MTSPTTTAGIDTGKDSLDVALDTSDLALKVENAPTGWKQIVRFLKQNRVKRIGIEASGGYEQGVVAHLREQGFTVLLLQPLQVKAFARFKLRRAKNDRCDARLIAQCAASLEAREAPDKRLANLASKLTYVEQIEEDIVRFQGRLEHTREPRIKTQIREDIVAMRLRLKAEKKRLVAELEVHPDLAKRFALVIRMPELGQITREEAAALAGLAPFDDDSGKHNGHRHIAGGRARLRRSLYAAAFPAAFQWNKALIDLYARLTKRGRTHKSALVACARKLLIYANTVVQRGTPWQTNQAAA

SEQ ID NO: 335751 - protein, 395 aa, unidentified
MRKNITKKSDTVEKKDAVEKNAAGKKDAAADAANTAADTASAGAEVAGVTIGMDMGDKTHKAVVLGADGREVERREVANTEAGVRAFLSRHPGATLAIETGTHCRWTGALAAALGLRVLVANARKVEAIWKSSNKNDWRDAEMLAKIARTDRTLLHPVRLRGAGDQRLMRLAKSRDLLVRFRAATVNQVRGFCKSEGVRLKKCSAESFVKLKGDLPAEVADVAHHLFEVLGKLSETIRAYDGIMREAVLRLRKEDAEAVMQIPGVGPVTTAVFLAAIGDAKDFRKPRDAGPFLGLTPRQAQSGAGDPQLRITKEGNAMARRVLVTAANYIMGPFGKDCDLRRHGERIAARGGKNARKRAKVAVARRLAVTMLALVKSRAEYRPLMGGPAEAKPTS

SEQ ID NO: 335752 - protein, 387 aa, unidentified
MPQPNDLSRSLVALDQNSTIIAVVELSQSSWLVGGVVPGIERQPHKKLEPSPERLLAVLHRWRDEAVRAGGTITRIALAFEAGRDGFWLARWLAARGVEAHVIHPSSVAVSREHRRAKTDRLDTELLKRGFLGWLRGERGHCSMARVPTIVEEDAKRPNRERDCLVGERTRIVNRIKSTLARLGIRNFKPTLRKAAERLATVHTPEGMPLPPNTLAELQRDMARLGFVGSQIRDIEDARQRQLEQQHETGPHAMVRRLARIVGVGVETADMLVHELLSRPMRDRRAVARYAGLTGSPDESGARRREQGLARAGNARVRRAMIQLAWRFLMFQKESALALWYRARTADSRSGTRKTMIVALARKLIIALWRFVTTGEPLEGVVLRPAS

SEQ ID NO: 335753 - protein, 336 aa, unidentified
MVYVGVDLHRKRSHVAALDQDGIQVLSRRISSTPEEFLRVFGELGPAELEVAFEATYGWGWFADLLTDVGIPAHMAHPLGTKAISSARVKNDSVDARTLAHLLRTNLLPEAWIAPPEVREARRAARARTALVRMRSRLKCQTVAIVADHGFIPEVSDLFGKRGRALLARFDLPSVSRSRVDANLRVIDQITQEIEIADRELRQLFRGDDRIRRLTAIPGIGFTTAAVVTAEVWDVSRFPSPDKLCSWAGLTPLERSSSETLRRGHISKQGSRWLRWVLVEAAASGPHDPTLRSFFGRIARRRGVKIARVAVARRLLTLCFYALRDETGCRAFPVTG

SEQ ID NO: 335754 - protein, 408 aa, unidentified
MQIIYERCAGLDVHKRSVVACLLFPENGQPRKERQTFSTMTPDLLRLRDWLKDHDCTCVAMESTGVFWKPIYNLLEEHFQVFVVNAQHIKAVPGRKTDIKDAEWIAELLQHGLLRPSFIPPAWQRSLRDLTRTRSTLTEERSRVIARLQKGLEDANIKLASVVSDVMGTSAQHMLHALVQGELSPAAMAELALGNMRPKRAQLAQALTGHLQPHHRLLIVEHLAHIANLEQAMAQLSAEIAERLAPYEEILLRLETIPGIKRRIAEILLAEIGPDMSRFPSAAHLASWAGMCPGNHESAGKRLSGKTRKGSQWLRTALVEAAHAASHCKECYLSAQYHHIAFRRGKKRAAVALGHTLLIIIYHMLAEKKEYEELGGDYLDQLDRQGKEKRLVRQLEKLGFEVSLTPTE

SEQ ID NO: 335755 - protein, 482 aa, unidentified
MKPRQKDKDKRAAGRPTRPSWQEMNRKQRRETMRKIQSEELSLEVIHPDAAGIDIGNESHYVAVPPSRDIQSVRRFGCTTAELKAMAQWLKQCGIQTIAMQSTGVYWIAVFDILEEAGFEVYLVNARETKNLPGRKTDVQESQWLMKLHRYGLLRNSFRPSQEIRTMRTYWRQRNDLVQAGARHIQRIQKALTQMNIQLANVLSDVSGMTGQAIIKAILAGERDPHKLAAFRDPRVKASEEQIERSLEGHWQKDLLFVLKQEQDGYEFCQQQMAECDRQLDQYLQQQEDRSKGASLPEEKRKERLKKKKGNKPRFDLRTGLFRMAGVDLTQIDCIDVMTATTILSEAGSDMSKWETEHHFVSWLRLCPDNRISGNKIIGKGRLPTSNRITNALKMAASTLRTSNTYLGAQFRRLRTKLGAPIAIKAMAAKLARLIYRMLRYGMKYLDQGAAFYELQHRKLQIKHLKSKAAKLGFQIVQAPAA

SEQ ID NO: 335756 - protein, 341 aa, unidentified
MEHIAIDLGRRESQICIRDPSGQILEEARHRTSELRSYLSRRPRGSRVLVESSAEAFTVADWAAELGHEPRVVPSILVPALGVGERGLKNDVRDARKLSEMDCRMAVPSVHIPSAARRAHQARLTAREALVRMRTKLINTVRSFVRMRAIEPIRATPPTLPRAVRAKLLNTPEGVPEYLEALLGSLEHLNAQIQQADLALREVAHGEPVCRLLMTMPGVGPVTALSFVSAIDDITRFEDASRVTSYLGLVPGERTTGFKTRRTAMTKAGPSRVRWTLTQAAWTLVRVQPDSPLGQWYEEVSKRRGKKIAISGLSRRMAAILYAMWRDGRPYDATGAASRHG

SEQ ID NO: 335757 - protein, 316 aa, unidentified
MAMQTQPLWVACDVAKDTLVIVTSASDSAITLSNQATAIRAWLKKQAGPVVLAVEATSTYHLELIEQAHARGHVVYVVDGFQLSKYRECVGGRAKTDRTDAQLLLRYLRHEHRALRRWQPPPKGYAQLHTLLKRRAKLAQSKESLKQSMQGMAELKPSVAALLRHFGRLDRLMLKRMRQLLSKLGWAADARRCQGIEGVGPVVSALLVQSFHRAHFRSADAYIAFLGLDVRARDSGQLRGKRKLTKRGDPEARRLLYMAAMTARRATTWAPYYQRMLERGMAPIQALVALGRKIARIAFSLMKNQSDYVPRQPKFA

SEQ ID NO: 335758 - protein, 385 aa, unidentified
MPEYPQLRRLFVGMDVHKDNHAAVAVNCFGTTLLEQEIGNEVKDFEILLTRVQTLAREKQLVPLFGLENTAGSGDFLARFLFARGYEVKTINPVLVKREGEYETHPEKSDLADALGVAKVLIQRIDSVPEYRITETTEMARDIHALVKDRETIVLEKTRLKNQLHELLHHAYGSQYKTVFRDIFSKKALSFWQKFPSAQSVKRTKRNIIKPDWIVNADTAALPIVSVTGTNQIKRKATRLLAMRDELSEIEKELIDLVAQTGQHLDTLPGCGPILSAAVLSEVKDIERFKTPAALAKYAGLAPRKLESGKQKRHVKSRSGNRRLNRAIYQIALTQISNQGIPKAKAYFQKKVSEGKSKKHALTCLKRQIIDIIWSMLKEKRAYYP

SEQ ID NO: 335759 - protein, 405 aa, unidentified
MEVIIERGCGPDVHKGTVVACIMGTGIEKEIRTYGTVTNDLLRLKEWIQEAGITHVAMESTGVYWKPVFNILEDHFEVILVNARHVKNVPGRKTDVQDSEWLCRLLRSGLVSGSFIPPRDIRELRDLTRHKRKLIQAITAEKQRVEKVLEDANIKLSSIASDTFGASGKRIIEELIKGKLRAEEMAELSKGRLRQKRGDLKEALVGQVREHHKFMIKVSLKHIRAMEKILSDIERKVQEKIDRQYQEEYALFQTIPGVKREASTLIAEMGVDMERFPSEEHLSSWAGMSPDNNESGGKKKPGSTTYGNKCLKTMLTEFAWVASKTKGTYLRSKYHSLVGRRGKKKALVALGHKILIMCYHILKHRCAYKELGVDYLDHRRKDKIARSYIKRLHHLGYEVILQEAA

SEQ ID NO: 335760 - protein, 370 aa, unidentified
MGKSSTIYVGLDVHKDSIAVAYAPEDRDAEVSYLGPIGTRQCDIDQLVRKLQSKGGELVFAYEAGPCGYGLFRYLRKKGLRCLVVAPSLIPRKSGDRVKTDRRDAVQLARLLRSGDLTSVYVPEPGDEAIRDLCRAREDSMADLKAAKFRLKSFLLRHDIRYTRKADWRPAHLRWLAEVVCPIPAQQIVFQEAVRALAQAFERVERLELLLRDPASSWRLAPVVEALQALRGVQFTVAVTTVAELGDITRFSRPAQLMSYLGLHPREHTSGVNRRQGGIAKTGNGHARRVLVEGAWAYRYPAKVSRQIQERQESLPDPIRDIAWRAQVRLCQRFRTLIARGKHPNVAVAAVARELSAFMWSIAKQVPIAK

SEQ ID NO: 335761 - protein, 346 aa, unidentified
MTIVEADRAVTGGVDTHLELNVAAALDRIGGLLGVAEFPTTRSGHRELLGWLAGFGTVTRVGIEGTGSYGAGLARFMRTAGVEVVEVDRPNRQVRRRRGKSDPVDAVEAARAAQAGRGFGAAKTRDGNVEAIRALMVAKRSGRDTKIKTLNQIRHLGFTAPDELRERLKGVSRDLLGAEAASLRPHAGADPVVLATKTAIRTLGRRVLALDDERTRLDKLLAELVRATAPALLAVHGVGTDTAAALLVSAGDNPDRLRSEAAWAHLCGVAPIEASSGKVTRWRLNRGGDRQANAALWRIVITRMSSDPRTRAYVARRTTEGRSKGEIIRVLKRYVAREVYRHLPRG

SEQ ID NO: 335762 - protein, 417 aa, unidentified
MFKIFRKNCCGLDVHKTWIYACIGITDANNRTEYKQARFSSFSKGLRELAEWLAKYECTDVCMESSGKYWIPVFNILEKNCFVTLVHPKYTKPQKGNKTDRKDAKWICDLFMCDMVKPSFIPGLEIRQLRDLMRYRQKLTDMKTSEKNRALNCLTVSNLKLDDVFSDVFGKSSTSIIYYLLEHPGEPFDVRPFVHGRCKTPIEEIQAAVDGAISNAQAIKLRQCLTHIDEIESHRKKIDQEIQALAEPFSPVLELLHTIPGLNANPMTAIGILSEIGPDMSVFPTAKHFVSWAGCCPRNDRSARRTKATRISRAGHCLKPLLVQIANALIKSNKHPEFKKRYRRIKTNRGHKKAIIALCKMLLTAIWNVLSKVEPYNPAGYLDAKPVNESKILTQAQAFDLLRRRGYTITDSVSPPG

SEQ ID NO: 335763 - protein, 347 aa, unidentified
MYKENIETNDRKINNDKYDYYIAIDWSQRNMAIATLRNEGNKPKVTDLESNIDNLKAYFKSLRGSKIVTIEETTSTHWLYVELFEYADKILVCDPYRNKLLSDGPKTDKLDAENLCKLLRSGLLKEVYHSLDKKYQLRQLVSEYEQLVKFGIRVKNEKSAIYRSIGKSYQKKEEIGEDTLVWIISQKDKRIELYETQKAEYEKMFAEKIKQDKDLKHLKGVNGIGVIGAVKILSTVIDAKRFKNGGKYLSYCGLVKHQKMSGGRNYGQKKSRYSRRLKSVYRIAANAVINGNSPVREYYDSLLQRGISEENARNQLSRRIAIITYGILKTGTQYKPYKWRESKQVRN

SEQ ID NO: 335764 - protein, 334 aa, unidentified
MKYQFVIGMDISKHSFDMAILLADSPENIFHNAFSNDENGFKDLMFFVNETMPDFDITKALFCMEATGLYCNALLQFFQTQQANVWVENAVQIKRSLGVKRSKTDKVDSIEIAKYAFKNTELVRLWKPSGVVLEKIKQFATLRERMVVTQKRLITPINELRDAGQKQMADLLFKSIKKSITAIDADLKKIEAKIMECLKEDASLHHVFSLITSVVGIGFVTAVNLIIHTQGFNIMCDSRKLACYCGVAPFPYQSGISIKGKTKISHMANKKLKTNLHLAALSAIKCDPEIKTYYEKKVLEGKPKMSVINAVRFKLLARVVAVVNNDKEYVKKTA

SEQ ID NO: 335765 - protein, 343 aa, unidentified
MAQQTIIGIDLAKHVFQVCMVTPQGTIKTNTTVARGKLLTLMARQPPALIFMEACGGAHDWARRFRAMGHEVRLLAPQYVTPFRRGQKNDPNDALALTEAGQRPNIPTVPIKTIEQQDLQALHRVRERLVKHRTAVVNQVRGLLLEYGIVIPQGMARLRKRLPRVLEEADNGLSFLMRDLLQSLQSELSALDTRITEVTSQLTRLSHELEACQRLQAMEGIGPLSATALVAALGNGHDFQTGRQVAAWLGLVLRQHSSGGTTRLGSITKGGNSYVRRLLIHGARSVISHVRDKPDAKSAWIRQLVTRLGVNKACVAVAHKMARVAWALLHTGEQYRKPAVLSI

SEQ ID NO: 335766 - protein, 365 aa, unidentified
MFAGIDTHKDTLAVAVIDPTGRQRAGREVPNTEAGFAQLVDLLNSYQVSRVGIEGSGGYGRSVAVHLSICWATERDVTVVEVPTLMTSRERRAQLGRGKTDPVDALAIARVTAREPHLPPVRLVVGPAADLRALLDYRDDLIVERTALVNRAHAELVGLRAGYQHQIPHLTNRSHVRAALTLIAADDSVRGQLCRRRLERVLAIDAETTQLKATIAILVADTGTTLTALHGVGPLVAARLIAEIVDIRRYRDRNAFASANGTAPLPASSGRTIRHRYNPGGNRQLNRALYTFALTQIRSATEGRAYYDRKRAAGKTKREALRCLKRRLSDIVFTTMRHDAAAWQSVDPALPTVGAADANEARLTA

SEQ ID NO: 335767 - protein, 348 aa, unidentified
MTLVGCDLHSRKQQVAALDTATGEVLEQELVHEGDAVERFYRALRPPVTIGIEATGYTQWFHALMHRLGHTVLVGEAAKIRAMVVRKTKTDRRDARHLLDLLRHDRFPTVWIPDPATRDLRALIAHRVRLVRMRTMVKNGLQAIALNQRLTLRSGLWTQRGLAQLQALSLPTYATRRRDDSLELLAWLTTRIDDLDDRIAASADADPRARLLLTHPGVGPLTALTTVLVLGPIARFPDSKHVVSYIGLAPAINASADKHHLGKITKQGSALLRWVLSQAAPLAARADDDLRRRYFAILHRRGRPKAKVALARKLLVRLYVMLRDRVDYDEFCRRGRARHQSRRATTVM

SEQ ID NO: 335768 - protein, 404 aa, unidentified
MVFLGVDWAEEHHDVCMLDEQGKVLARAQVANSVHGVARIHALVAEHSEESGEVVVGIETDRGLLVQALLAAGYQIYAINPLAVDRYRDRHSVSGAKSDAADAKVLADLVRTDRNNHRPVAGDSAQVEAVKLLARAHQSLVHSRQRQVNQLRSALHEFYPAAIEAFKDDLGGRDAVAVLEYAPTPSRGRSVSQAKLISALRRAGRERNLKARAAELQRILQQPHLEQPATLVAAYGVIVKSCVRLIRELNAQTTELEQELTKSFELHPDAELYLSLPGLGFVLGARVIGEFGDDPNRYSDAKGRRAYSGMAPITRASGTRHVVLARYARNRQLADACYLWAFSSLKRSAGAHQYYRALRARGKSHAQAIRALGNRWVSILHGCLRHRQLYSETVAWRAPVAVAA

SEQ ID NO: 335769 - protein, 325 aa, unidentified
MSNQKLCCGIDVSQNSLDVAYQNNLGDIFHIKVGNNNKGFETIVEHTGLSHHFVMEATGVYYVRLAFFLHAKGCALSVVNALSIKRYIQMQLERSKSDKKDALWICRFAIDQTPDLWEMPESAYFESKQLYNTIRQYSEEIKRFNNQLHSLSILPVQNKATIKSLQKMKACFEKEIKVLEEKLEALLLTWKPEQVKSVSSIKAIGKRATAMLIIYTQGFRYTQNHRQLISFAGLSPREYSSGTSINGRPKICKKGGKPIRDVLYMCAMNAIKTNKACKTLYERLRSNGKPGKLALIAVCNKLLKQVFAVVKNNTLYQPNYCSAQP

SEQ ID NO: 335770 - protein, 364 aa, unidentified
MIIIGVDFHPEFQQIASVDTETGEFQEKRIGHREEAEKFYRALAASGMKVCVGMEASGHARWFERLLAELDVELWIGNAAEIHAKRVRKQKTDRQDAQLILRLLLEDRFPRIWVPSWENRDLRQLLWHRHRMVQARTRIMNQLQAVALNEGLRSKKRLWGKQGRPQLESFRLMPWASRRRRDLLELLDRLNPTIAELSQAIEHEVEKYPAAQRLMTHPGVGALTALAFVLIIGEAERFQCGKQIASYLGMVPLEKSSGNRRRLRHITKQGSSMLRFLLVEAAQATVRSVPEWRRKYLHLMMQRGRKTAKVAMARRLAVRLYWMMRNEWDYQQVTKFGSHAGQPGNRHGVQQEHRVIDWAPRSSS

SEQ ID NO: 335771 - protein, 320 aa, unidentified
MYMVGIDVAKNSFVYAVLDDSRRLVRAPQQITNAQPEIDAWLIELRRCYGERLELCLESTGSYHRLLIVTALHQRVPCRLLNPLMTKQFTRATVRGTKTDRKDALVIARLGLQQAGHLVSSDHLHPAKQLLRLSRKLCQVKTAIGRLQIVAGMLIEELPPDCAESFTDITQSLQIARMNFQRAGLAHINHDTQELLMSIPGIGPVVAAVTIAEMGSVKRFKNADALVAFCGLDPRVRQSGTSLHRNTKLTKRGSPYLRHMLYIAAHMARQKDPALAAYFQKKRDQGRPYTEALMPVARRIVHRIYAVWKRGTPYEPRQTT

SEQ ID NO: 335772 - protein, 413 aa, unidentified
MDKIYDICCGIDVHKKLIVACLNHKRKKELREFGATTRELMELAEWLQKNECEIVAMESTGSYWKPLYNIMESYGLHAIVVNPAHMKAVPGRKTDVKDAEWIAELLQHGLLQPSYIPSKDQRELRELVQYRKSLVGERTRELNRLQKMLEGANIKLSGTVTNINGKSARKILEYILSGNEIDEKKYDEMYEEKLIAHNLKASKEQILDDLKGFMSPLQRRMLKELLQHLDELNVHIENLNDEIDNFMKPEEKQASQVIQDVTGIGNTSAQTIIAVIGTDMERFPSDRHISSWAGLCPGDNVSAKKRKSGKIRKGNALLKSTLVLCAHAAVRHKSSYFHAQFKRISTHRGKKRAYVAVAHSILIAIYHILKDGVKYQDLGAEYYNQFNAERKIHAYLKKLKALGWEPPKEAVPS

SEQ ID NO: 335773 - protein, 328 aa, unidentified
METKEVYVGLDLHRETVHGTAMDKDGNVICSHRFPNTKEALKEFYKTFEVWNTQTAIEACGMWRGCYNILHELGFNAKLANPYKCQKINPEKKTDKTDSKLLADLLRTKYLPEVFIPSREILELRDLSRHRSDIVDERVRIQNKIKHYLIREGIAYKSIWNKGGIAWLKSLDKNQLNDLIEIYEKLCEKEKSVRNEIAKKAINKKETSLLMTIPGIGIVGAMMIYSEIGDINRFPTDKHLHAYAGVAPGIYQSGDTSIDIPRKSVNRWLKWIVTECAGISIRKPNQFQRCYFAIEKKKGWKIARKVVARRLLTVVWHMLKENVPYKES

SEQ ID NO: 335774 - protein, 350 aa, unidentified
MRKPQFYVGIDIASASFFAAAGRDNKGIWHLSVKPKRFENEYDSLPKFLSWLQENKIMPNNSIVCMEATGVYNEILAHFLFANQYRLSIQSPLDVKRAFKPIGHKTDPVDSCQIAEYAYRFYDELSQWRPREEILEQIKTLLATREQFIKQKTAQKNALHAIKRKVVRTPLAEKLHEDGILRLEENIKAIENEIERLIDQDPTYKQMIGLLMTIPGIGFMLASHLLIVFESSPEPFNARKMAAFIGICPYQHRSGSSVNSPASSRHYGPPGLRRLLYLAAMSVRMHNPYFRQYFARKVLDGKPKKLVINNISNKLLRIVCAVARTRTPFIPGYRSVHPSLLECKRVLTMS

SEQ ID NO: 335775 - protein, 482 aa, unidentified
MSNDRRLVGIDLGIASAHTVRVLDGAGVTVAKRKAWPTAGSLGEVEAAALAGVVAGTRLEVVIEPTGPAWLPIAVFFSARGHVVHRVSSAKAHDLRRFFSRHTKTNGIDADTLARLPLVDPAGLVPLVLPGVERAALDRRVRATDRLTQTGAEHKRRIKDLVRQLMPMTPLGGDLGVADLVVLERWADPNLLVKAGAKRLTAVIAKASNNHQGAERAAEWVAAAEASIELYAGHPAVAFADLAAEVATEVRLLRAVQAELAAHAAERENAYRWVDPGALARSLPGFAEIGAPALVAAMGDPHRFRRGKQVRAFTGLAPRASETGETDRKGQPMSKAGSALLRTTLVRAADHARKQDPQLARVYYVQMVERGKDHLGALCVVAANLAERAWAVLHRGMPYVVCDTHGHPVDPDQAKAIIAQHWTVPPEVRARRRSTKAGKAPQKVHTGQSKPHAHGASTRGDLPRPASSTGHPPPSTRTPVPI

SEQ ID NO: 335776 - protein, 400 aa, unidentified
MGPHIRVGLDVGSKSYQVGIAGPDGTILEEFTITHSQEGFQKFFSSIERHQKELDLPVEVAMEGYNGCARPLDQLIKKKGYRLYNVNNLKLARFREIFPGPAKTDSLDVRKMLELFHLKDHLPLAKDVLQEVPEIPPANEKLKRLTRRRKELVEEKVKVANRMQADLNSVCPELLLITGSIDNLWFLNFLTSRDDLRKLARMHKESLTSIPAVGKKYAEIIEKWRRKAKFSPEAEYVSPMIISDAKRILELFKEITSLDKAIEELSLNSEIARRLDSIPGFGKVSSAELAGEIGTFDRFPSEASLALYLGMCPLDRQSGGSHGTKRPRQVNRRAKTAMMIAIVRHIGQVPESRLYYQKKRREGKKHNQAVRALGRHLVRVFWSMMKKGRDYKLREGICLT

SEQ ID NO: 335777 - protein, 362 aa, unidentified
MGYYIGLDVSQRQTAICVLDDRGHVVAEGKAATQPCAIHGWLVVKNISLVSVVKVGLEAGAMSFWLSAGLTEMGLPMVCLEAFQAHRFLKTCRNKTDRNDARGLAQLVRMGGAFIRPVAIRTQVSQEARMLLTLRQSLVNQKVSLENNITGSLKPFGLVVPRGSICAARFRERVLAILDKAEALGLKLRESVMPSLDLYESLCQQLSLLNQQVEAVAKNHPICRKLMTAPGVGPIIALSFVTAVDDPRRFSKNGDIGAYFGLTPKQYQSGETDQQQGISRLGNSMTRQHLVQAATVLLVSSKKWSTLKAWGMKIAKKRGFSKARIAVARKLAIILHRMWITNEDFRWATKAAEQGIAGQAAG

SEQ ID NO: 335778 - protein, 343 aa, unidentified
MEAITTIGLDIAKSVFQVHGIDAEGNVILRRQLKRRYVLTFFQKLPPCLVGIEACASSHHWSRELQALGHTVRLMPPAYVKPYVKRQKNDAVDAEAICEAVTRPNMRFVATKTPEQQSCLTLHRTRHLFIRQQTSVINAIRAHLAEFGIVAPVGRQGVEQLLGVAADTNDKRLPEVARACVAALGAQLRMLKAQILQFDRMIRAWHRSNEESRRLDDIPGVGPALATALVASVADPKAFRSGRDFSAWIGLVPKQNSSGGKDKLGNISKRGDRYLRSLFTTGALAVIRYAKIHGTKHRPWLTALLTRRPTKVAAIALANKIARIAWAMMAKSERYKEPAALAA

SEQ ID NO: 335779 - protein, 453 aa, unidentified
MSKSKRGRQSSRFLPTVHAQAAGLDVGSTFHVVAVPPELCDEPVRTFRSFTGDLHRLADWLRAIGVTTIAMESTGVYWIPVFEILETRGFEVLLVNARDTKNVPGRKTDVNDAQWLQQLHQFGLLRGSFRPHERVVRLRALLRHRERLIDSAATHIQLMQKALMQMNVQLHHVVTDITGVTGMKIIRGIVDGEHDPLTLAKHRDVRCKESVETICEALTGNYRSEHVFALRHALELFDFLQTKIVESDAEIETVLHSLNEDRVPPAVPIPHVRHSRGRNEPQFDVRAALYTMLGVDLSQIHGLGPYTVLRLIAECGDDMRKWPTVKHFTSWLTLAPGNKISGGRVLSSRTRRSSNRAAALLRIAAVNIGKTETALGAFYRRLGARIGKAKAVTATARNLAVLFYNALRYGMRYADPGANYYDERYKQRVLSNLHRRARQMGFLLIEAEANPSP

SEQ ID NO: 335780 - protein, 337 aa, unidentified
MKYSGIDLHSNNSVVTVIDETGRVVAERRLVNELGRVLAFLQPWRDELAAVAVESTYNWYWLVDGLQAAGFTVQLANTGAIKQYDGLKHSGDETDARHLAELLRLGILPTGTILPPAQRAIRDLGRKRMQLVHSRTAHILAVENIVARQLGAGISSNQIKRLAEDGVDQRPLPADVALAIKSNVAVITTLNAQIERLERRLREAVGGWPGYALLHSVPGIGDVLATAIVLETGSIDRFPGVGQFASYARCVDSRRVSNGKKKGAGNPRNGNKYLAWAFVEAATFARRYCPEAKRFYERKKARTNAVVAVKALAHKLARACYHVLKERKPFDVHRCFA

SEQ ID NO: 335781 - protein, 408 aa, unidentified
MEKFLKLCVGADVSKDTLDVCLSGLREDLSVHEVERKSFSNNADGIKKLMKWATQKTEGNPYQIVMEATGVYHEKLAFTLSKNGVEAVVVLPKLMSNYFKSHNLRVVTDEICAEHIAMFGLSRKLDVWKEPEPVYMALRALCRHRYQLAKLTTQCTNQIHAQKHSETSLQEMIDMSEDMVKLAEKQIKEIDKKLRAILKENAWLKAKVDKVCTVIGLGWITVVKIIAETSGFNLIRNSRQLVAYAGYDVLSKESGTSVHTKSKMSKKGNKYIRAAMYMPALSAIRSDEQMAAFYSRLFHRHFISKKSNVAVQKKLLVLIYTLWKNDCTYDPDYRHPASQSQNQEKNQGNEPQCDQESDQPSKIVEKTINKNREAIRRSLHRLDQVRLQDFDETKIKKNPQNEHRQRIE

SEQ ID NO: 335782 - protein, 341 aa, unidentified
MNATTYGLDIAKRVCQMYWVDAQTGEIANRRFNREEVCSFLARRAPGRVALEAGGSAHWWARKIKALGHEVVLLHARFIRPFVQTNKTDAADARAIWTAVHQPGMRTVAPKTEDQQAMLSLHRMRSLLVKFRTMQVNQLRSMLYEFGAAFRTGRAAGLAEIRERMAELEATLPGTILLNLQEQLQRIERFERDIDQLEKRIGAWQKRDAACRAIAEVPGIGRLTATALVATMGDAGAFKCGREFASFIGLVPRQTGTGGKVRLGSISKRGDPYLRTLLIHGARSVLFHAKAAPTAWQKGIQERRPGNVATVALANKMARTAWAIMARGESYRRSPAALSCA

SEQ ID NO: 335783 - protein, 343 aa, unidentified
MRTITTIGLDIAKSVFQVHGVDAAGQVVIRRQLKRRHVLAFFQKLSPCLVGIEACASSHHWSRELQALGHTVRLMPPAYVKPYVKRQKNDMADAEAICEAVTRTNMRFVPTKTPEQQSCLMLHRTRHLFIRQQTAVINSIRAQLAEFGIVAPVGRKGVTELLHVVADPRDKRVPEVARACLTALGTQLLRLKEQILEFDRMIMAWHRSSQASKRLHYIPGVGPMLATALVASVADPGTFRSGRNFSAWIGLVPKQHSSGGRDRLGSISKQGDRYLRSLFVAGALAVIRYAKIHGTKHRPWLTALLARRPTKVVAIALANKIARMAWAMMARGERYKEPIALAR

SEQ ID NO: 335784 - protein, 387 aa, unidentified
MPQPNDLSRSLVALDQNSTIIAVIEMSQSSWLVAGMLPGIERQPRKKLDPSPERLLGLLHRWRDEAVRAGRTITRIALAFEAGRDGFWLARWLAAHGVEAHVIHASSVAVSREHRRAKTDRLDTELLKRGFLGWLRGERGHCSMARVPTIAEEDAKRPNRERECLVGERTRIVNRIKSTLARLGIRNFKPTLRKAAERLATVNTPEGMPLPPNTLAELQRDMARLGLVVSQIRQIEDARQKRLEQQPETGPHAMVRRLARIVGVGVETADMLVHEVLSRPMRDRRAVARYAGLTGSPDESGAQRREQGLAKAGNARVRRAMIQLAWRFLMFQKESALAIWYRARTADSRMGTRKTMIVALARKLIIALWRFVTTGEPLEGVVLRPAS

SEQ ID NO: 335785 - protein, 360 aa, unidentified
MTTTTTQTATAADTILALDLGKYKSVACVYRAADDLRFTTVTSGRQELGRLIDTCQPAIVLFEACLLAGWVRDLCADKGVKCLVANTTSEAWKFKHLKRKTDRDDALRLAEVYRLGKFPAVALPEKEVREKRGLIEARQKLVGRRVALQNRVRAILVSQGLPAPRGARAWAAPGLAGIAAYAQPIGGCGPLELWRGRLHLALTELGHVKGLLGQAEKKLDDMGKTDERMKLLDTIPGVGPRTAEAVVAFLPAPERFRTAKQVSAYGGLVPRQYQSADTDHRGRITKRGPRTLRKLLVECAWVMLRYNRWARSVYERLTHGGRSRKKQAIVAVARKLLVRCWAMLRDGTAWRAEPAGAVAR

SEQ ID NO: 335786 - protein, 423 aa, unidentified
MDILYERVAGLDVHKDTVVACVRIVADGKTKRECRTFTTTTEQLAELRAWLEECRCTHVAMEATGVYWMPVFRILGEGQFELTVANAAHIKNVPGRKTDMNDAMWIADLLACGLIKASFVPLEEMQELRALTRTRKQLVREQTRHVQRIEKTLAEANIKLDSVISDIMGASGRRIIEAMIAGVRQPRKLADLASKQIKATPKELYDALHGRLTDHHRFLLELHLRQWDGLDDTIRKIDQEIDRRIGCMDSEAGANQVPFRTLIELVYTVPGVSTVAAPAILSEIGCDMGRFPTAGHLVAWAGLCPGQNESAGKRKSSRLRKGAPWLKTMLVQCAWAAKRKKDSYYRAQFFHLQSRRGPQKAICAVAASILTAIYHILKDGTEHHDLGAGYFDRRPIEVKASRLVTRLKKLGFTVQLQPTVEAA

SEQ ID NO: 335787 - protein, 356 aa, unidentified
MCLTPVSEEKESTMKLMRVGVDLAKNVIQVHGVDRNEEPVWRRRLSRKKWLKVLLETAEPACEIGMEACSGAHHWARQLQAQGFTVKLIAPQFVKPYVKSNKNDANDAEAVCEAMSRPSMRFVAVKTVEQQDIQAVHRIRSELVGQRTAKANQIRGLVGEYGLIAAQELRQLRRAIPDWLEDPDNGLSERFRRLLHGLWDDVKRLDERVAELGQEIATIAEEAPAAQRLQQLRGVGPITATALVAAVGDGAQFANGRQMSAALGLTPRQHSSGGKDRLLGISKRGDSYLRTLLIHGARAVIRTAKHKEDRLSQWAMALAERGHPNVAAAALANKTARIAWAMLRNGTDYQPDRVTC

SEQ ID NO: 335788 - protein, 390 aa, unidentified
MLYFIGIDIAKFKHTACVMDHNGEICVEPFDFPNDSIGYGRLWEAIKPYAGKDHRVGMEDTGHYADNLRMFLLNKGCTVCMINPLTSTHLRKAGGLAKNDRLDSLVIAETLMNPRFFRSVTKDNFDYTALRQYTRIHHKRMEEMAGFKAQLQKDIDHVFPEYNNLFPTPYSRAYVAVLKEFQSADAIAHTDIRRLRSVLNPEGRGKHVSLNAEDLKAAAKKSVGRPDAAIEMEIVHLISVIELIERSLAEVDKKIEEFSRSLNSPILAISGISDFSAMSIISELGDISRFRNEKCVIKFAGVNPAVYESGTYSMTHTRLEKKGSKYLRKTLYQIIDAVIRGNPVFKAYYEKKISQGKSYRCAQGHCVRKLLRVIYKILSANCQFDPALLH

SEQ ID NO: 335789 - protein, 358 aa, unidentified
MQLHDYLAQPKIFIGLDIHKNSWTVSIQTDLFFHKTYSMPSVGEDLYLYVENTFPKYEVHLVYEVGCCGFSAARYFLNLGWNVLVVNPADVKTSDKQRYQKTDALDSKNLSNQLKMGVLKGIYIPTEEHEQFTTLARHRTQVTKKLRQTKSHIKSMLLFHGIKVPNQFDNSNWTHDFVLWLEQQKFSTSCGDFALKGKIRMYKFIKSEYLEIANQMRKYCRKNNTKDYYLLKSIPGIGGYLASVILAECGDLRRFNTESQFSSFVGLVPGIYNSGDSEKCLGITPRSRTQLRSYLIEAAWVAIRKDTEMQQYYRKHQGKNIKSIIVKVAHKMARRILSVIKTETPYQINKNLVLENIT

SEQ ID NO: 335790 - protein, 340 aa, unidentified
MGEITTVGLDLAKNVFQVHGVDSEGMTVLRRQLRRAQVLVFFSRLPRCLVGMEACATSHYWARELRALGHEVRLMPAQYVKAYVKRNKNDAADAEAICEAVVRPSMRFVPVKTAEQQAAVLLHRGRERLVRQRTMLVNALRAHLAEFGVIGAQGLRNVGKLIIVIRDEEDARLPDMARKVLQVLAVQIEQTEAAIAVLEKQLMDWHKSNPLSQRLATIPGIGPIIGTAIAAMVAEPSGFRSGREFAAWLGLVPRQNSTGGKNRLGGISKRGNQYLRRLLINGASANLLRSKATNADPWVIGLRRRRPSMVVAVALANKTARIAWAVMHRKEDYQRMAVAA

SEQ ID NO: 335791 - protein, 338 aa, unidentified
MTPFKYFVGIDIASATFTVCAGTAPWELVVKPVTFDNHEDGFTSFLGWMQEHSLLPNQTVVCMEATGVYGEGLAYFLYASGYTVAVEPPLNIQRKFPVNTSKNDSQDSQNIAEYACRYTDKLSLWKPRDEILEQVKVLLSTRQQLSSQLTAQKNALHAVNHKKVSPELAKKVHADMIQQITKHIKSIDIEIRRLIDSNPTFKNALLLLLSIPGIGLQLAAHLIIIMQYSLDPRVLSAFVGICPYEHESGSSVYRTPTSRHYGPPAIRKLLYLAACSVSTHRKEFKLYFARKKAEGKPGKLVLNNIQNKLLKIACAVIRTQKPFIPNYVSVNPLVLKNA

SEQ ID NO: 335792 - protein, 431 aa, unidentified
MRRIFIKRAPVRSIRRAPMDVMFEKCCGADVHKDSVVACVVKGPKGPGFSREVRTFGTTTRDLLKFRDWLEQEGVTHVAIESTGVYWKPVYNVLEGSAEVWLINAQHVKVLPGRKTDVKDSEWLADLLRHGLVRASFVPEMETRDLRELTRYRAQMVGERASEVNRVQKALESANLKLGSVLSDVVGVSGRAILDAIVSGETDPQKLANLAVKKVVNRKKDDLILALEGRIRPHHRFMLKMILEHIDELDAHIEEATREIEGRLGPFEEPIRRLDEIPGIGQRAAQVILAEIGTDMTRFPSADHLASWAGICPGNKASGGKRLSGKTRKGTPWLRSVLVESAWAAVRVKRSYFNAQYVRLKKRLGAKKAVVAVAHSILVVIYTLLKKGTVYKDLGTQHFEEADRQRLARGLKRRIESLGYQVTLEDKTRVA

SEQ ID NO: 335793 - protein, 346 aa, unidentified
MMHVGLDLSRKRLDVHVMNDEGDTVDTWGVLPDRDGLDALVRRLDKYGEPVHAAIESMTGARFIHDELERAGWNVDVADAVRTKGLAPLACKTDKIDARVLAELCRRDLVPAIWLPTPENRGERERARWRLHLVRHRVALKNRIHATLLTFGHQCPTSDLFGAEGRRRLAVMELPEPWLGTVEASMRLIEQLDAEIDARERELRALGVAHPYIPNLMTIPGVGWVLAYTIASEIGDISRFATPKKLCGYTGLCPRVYQSGGKDRRGSLAKNGPTYLRWALIEAATHAHRHPAFYDHYEATKKRLGKQRGSKVARVEVARRLSDAIWHMLTRDQAFHPAGPQRCLVA

SEQ ID NO: 335794 - protein, 392 aa, unidentified
MVVSVGIDVSKDKHDCFILSSEGEVLVDVFTIPNTMDGFNCLLQRIQDCTTPQGKMKVGLEATGHYSYNLLGFLLDNGLATYVLNPLRTNLYRKSLSLRKTKTDRVDARTIASMLLSDAGLKPYTDTAYHNEELKSLTRYRFDKVKERAKLKSSVSRLVCILFPEMEKLVSTLHTASVYTLLEEFPGAKQVARAHLTRLKSLLETASKGRYKRDMALEIREAARNSIGSRMPAKSLELQHTIRLIRELDTEIVEIEEQIQSLMDELASPITTIPGMGFRMAAMILAEVGDFTRFDSPDKLLAYAGMSPSTYQSGQLKNCYPHMEKRGSRYLSYALYNATKYVCRWDPTFAAYLAKKRAEGKHYNVALSHAAKKLVRLIFAMGKSRQPYCSAA

SEQ ID NO: 335795 - protein, 359 aa, unidentified
MVIKIKRNKINFKGKMVNIGIDMHKKSWRITALVEGDIVMAVTLARPNYDSFKKLLVQFLGNYVRIVYEAGPGGFDLYDRLTDDGVECIVTPPSLIPTASGSKVKTDKKDSYKLARLLESNMLKQVWVLTPEERAHRQLARTRRQIANHRSDVMRQIKSLLLFHSIEIPFSSRQQWTGPFTKWLHGLDLGDEYLNKSLEALIKLFDYLSIEKKSLTHEVIKLAREEKYASRVKLLKSVPGIGALSAMEILVELQDIARFKTADELAAYIGLTPSQHSSGEHTRMGHITHAGNDRVRTTLVESSWILIGKDPEIKKKYDNIKYRSGGKRAIIAVTRTLSARIRRMLLDQIPYKIDLKKAA

SEQ ID NO: 335796 - protein, 378 aa, unidentified
MRKITLDLGSRKTAYCEARDGHVVGRGTVEDVRSLEPMLGPEQPEAVVAIEACREAWYVHDLLTSWGNRVVLVDTTRSRRLGIGQHGRKTDRIDAEVLALALERGGILVAHLLSPHRRELRRRLGVRRALVESRAQMVTTARGLAREQGVRLPSCAVPNFVTNVRKSHLDAELSAVLEPLLKLLETIEGELESVEEALAKLCVTEPIISLLATAPGVGPVVAASFVSVLDEAKRFSSAHHVESYLGLVPSEDSSGGRRRLGAISKKGNKYVRALLIQSAWSILRGKNSQDPLRMWAEAVAARRGKPVAVVALARRLVGVLWAMWRKGTAYEPARLATAASQGLANSAQTLQFRADALKKAGKKESMKRLTANEVTASN

SEQ ID NO: 335797 - protein, 410 aa, unidentified
MEALLERCAGLDVHQASIVCCVLIGAPGRRPQKLLRSFGTTTRELEALRIWLAEHCVTHVGMESTGVYWKPVYAVLEGHVDLTVGNAHHIKNVPGRKTDVRDAEWIAQLLRHGLVAKSFVPPPAIRDLRELVRHRRTLIETRTAGRNRVLKLLEGANVKLSGVASDVFGVSGMAMLEALAAGTASASEMAGLARGRMRRKHAALEAALEGRMREHQRFLLAMQLRHLEAIDRDLDALDARIEAHLEPFQSQHRLLMQIPGVDWVAAAAIIAEIGTDMSVFATAPRLAAWAGVAPGNYESAGKPKGAAARRGNVFLKSALFAAASAAVRTKGSYYRDKYNRLRARRGPVRALIAIAHKLLIAAFHMLATGEGFRDLGESHLDQIARKRSTTKLVQRLRGLGYDVTLVPKAA

SEQ ID NO: 335798 - protein, 438 aa, unidentified
MSNKVFFNLDDLFISVGIDIGADFSWMSIALPNQQFVGKPYKILHNSIDSLTTAVSKIKEAEELYSLESHIFLESTGIYHYPLFCYLRDKGFNCSVINPIITKNSTNINIRKVHNDRFDSKKAALVGLKPDLKVSLMPSDLALNCRNLCREYYDLMDNRSAYVNKLQGELRMVFPQYLDIFSKVTINTSLTLLETYTSPSAFLKADKQEIIDIIKSTARFGLTYAQNKYNAIIQAATDANQFGYIIDSNIKRIRLYISFIRKYDEEINNILESLHELVDANEDADFVKQIHLIETFKGAGFLSAVSIMGEIGDFSAFSKPKQLFAYFGLDPAVKQSGKFEGTKVQMSKRGSAIARRVIHTLTLQSISISRNGEAKNPVLREYYLKKCDSKPRLVAMGAVSHKVCNMIFAILRDNKPFKIIAPQEHIKQYNAAKCDIAA

SEQ ID NO: 335799 - protein, 340 aa, unidentified
MNIKRIGLDLAKNIFQIHAVDHHEHVVLRKTLRRDRMTAFFSQLSPCLIGIEACGAAHYWARELTRMGHTVRIIPPQRVKSYLKGQKNDANDAEAICEAISRPGMRFVAMKTERQQTLQAEHRVRARLVRARTALSNEMRGLLGEFGLVLPVGIRQLRKALPEILSQQELWDDRFIRLLSELAEELQMLDERVARHDRRLEQSVRDDIRIKRLLAIEGMGPVVASALVAAVGDGRQFKSGREMAAYLGLVPRQHSSGGKARLGSVSKRGDSYLRTLIIHGARAVLNACQNKTDRRSQWLKALSERRNRNIATVALANKNARIAWALLSREEDYHGLQAAG

SEQ ID NO: 335800 - protein, 320 aa, unidentified
MMAQTDSVVAGIDVAKDKVDACIRMIAERPIFPSTTKGRRQLVAWVRKHKVTKVVMEASGGYEREWAKALRQAGIEVRIVDPKRVRSFALSAGCLAKNDAIDAEMTAWFGEIFSDGPSQLYDADREELQGLVKSRLALVNLRIRLQCQSEHAAPGPAQKAQARVLERLDTEIAKLEAEISAKVKSTPALAERAEIIASVPGLGEISATNLVAGMPELGQVSNKIAAALVGVAPYDDDSGKRRGERHIKAGRRWLRNAIYMPCLGAATLNNPVLKAYYRRLIERGKEPKLAIIACMRKLIVILNTMLVRRQTWDPTRHALS

SEQ ID NO: 335801 - protein, 409 aa, unidentified
METVYARVAGLDVHKDSVAACVRWLEGGGRVGQETRRFGTTTRQLLKLRDWLARSEVTHVAMESTGVYWKPIYNILEGGFEVLLVNARHVKNVPGRKTDVKDSEWLAHLQQCGLLKASFIPPRPQREWRDLTRTRAQLVRQRAAVSNRIQKVLEDANVKLASVASDILGVSGRAMLEAIVGGQSAQRTLAQMARGRMREKIPQLEEALEGRLSEHHRFLLRSLLDQVAHLEEQIERFEQRIEELNAPFAQVVEAVAEMPGFGTTSAQAVISEIGTDMKAFASAENLSSWCGICPGNHESAGKRQSGRTRKGNVWLRATLIQAAWAATHTKDSYFRAQYRRLVGRRGKKRALVAVAHSQLVVIYHLLTTGRHYQDLGVDYFGQRDIEKIARHHIKRLEALGYTVTKKEAA

SEQ ID NO: 335802 - protein, 443 aa, unidentified
MPQWYVGIDISKKKFDVALVNQAKQCIKHAVFNQDYEGYHGLLQLLRHYCEDPLQVNIGMESSGYYHYLLFAFLKEKYTPNVAVINASLIAKYCKTDLRPCKTDKKDAYQIGCYLVDKEIRFSQIDEILQHLSCLDKQRIELIKERSRTMVAIRGLLAIGFPELERQLSSFSGYLLHFLYRFADAQAVTELSRKKFIEEFTSLLPPRTKNIKFDAHTLYDMASRSIGREVPGHRFAMQIKIDRIIYLDKQIKAIDQQQQQLCIQHREREWKILRSIPGIGRISAASILSHLPVPELFANYRKIIAYTGTDPRPNESGEWKGHRSITKKGNSYLRRILYWAATKVKKQEGVFQALYERLLARGKPKKVALIAVVNKLIKIMYVLFAKNELFDPRHYFKLLEKKENQQSKEVNKRQAERAHQMRTKTNKSSTSSPVSSPSAYKQA

SEQ ID NO: 335803 - protein, 339 aa, unidentified
MLAVIGLDIAKRIFQLHSVDPETGEITRLKLGRSELIPFFANRAASIVAMEACGSSHHWARQLRQLGHEVRLIAAKFVMPFVKGNKSDAADARAIWEAAQRPEMRFVPVKSEGQQAILALHSMRDGLIKARTAQLHQLRAVFYELGIDLPEGRHWCVKHLPIAFERLEGKIPVMVIEALRGQFELIQQLTARADDIERKLDAYGRSDERCDRLLAVPGVGLLTSTAIVAAVGDAREFRSGREFAAWLGVVPRHSGTGGRVRLLNISKRGNSYLRAMLIHCARAVMARQKQHSAWLERLMRERPWNVAVVALANKLARTIWAMLAHGRTYLHDERPVVTA

SEQ ID NO: 335804 - protein, 412 aa, unidentified
MDADMGVVYERCCGLDIHKKIIAACVLISGKKKDIRTFGTMTGDLLELCGWLKENGVQMVAMESTGSYWKPIFNIMEVEEIPAILVNAQHIKAVPGRKTDIKDSEWIAKLLRHGLVKSSFVQSRKDRETKELVRYRGSIIEERAREYNRIDKVLQGANIKLSSVVSKIGTKSGIDMLRSIAEGYIDPKLLAGLATGVMKSKTDELEKALTGLIQPHQQMLIQSMLNHIDFLTVQIDKLDVEIKERLEDKQEIINALDEITGIGEISAQVIVSEIGSDMSQFPKAENLASWAGMSPGQNESAGKRKRSKTRKGNNTLKKTLVQSARSAARSKDTYFNSFYSRLASRRGANRAAVALGRKILEICYTMIRDGTPFRDLGADYFLKQNKSRILKSSIKRIESLGFKVIIEESNAA

SEQ ID NO: 335805 - protein, 322 aa, unidentified
MRRVIGIDIHRTFGEVVIWENGLTRHEGRVEMTRTALEGFGRQLKKTDEVVIEATGNCMAVSRVLSPHVKRVVIANPLQVKAIAHAHVKTDKVDAATLASLHAAGYLPEIWMPDAATERMRRLVARRYQVVRHRTRIKNEVHAILHAHLIPKCPHADLFNKRGRDWLTRQPVPEDERAAIARHVRELDRLGEDLAVLDRDIAQDAIDDEAIQRLLTITGVNLTVAAGLMAAIGSIDRFNSPQKLVSYFGLNPRVRQSGLGPAHHGRISKAGRSHARAMLVEAAWAAAKAPGPLRAFFIRIRARRGHQIAGHCQLIFTRPNEA

SEQ ID NO: 335806 - protein, 335 aa, unidentified
MKSWSVTVLSENSVLKRFVQDPDPGALHKFLTRNYPDAEYHSVYEAGFCGFWIHERLTALGINNIVINPADVPTTAGERIQKTDAVDSAKLARSLRNKELTGIYVPDSTSLEVRSLIRLRSAIAKDMTRQKNRIKAHLRFLGYEIPVEYCNRDWPKRFIVWLRELDMKTQSGRQSLDFMLDLLENLRKEKLDMTRALRELSRTEQYEKPLELVMSVPGIGQQVGMALLAEIVDIRRFKSAESLAKYVGLVPMCHGSGEKDGVGDITIRKHAFLRTLIVESSWVAIRQDPALTLAFETYCTRMKPSEAIIKIARKLVNRIYFVMKWQKPYVTSVVS

SEQ ID NO: 335807 - protein, 391 aa, unidentified
MICVGIDVAKDKHDCFIISSEGVVLADVFTIPNNMEGFTTLLDKLRACSTPQDSIKVGLEATGHYSYNILGFLLDNGLATYVLNPLRTNLYRKSLSLRKTKTDRVDARTIAAMLLSDAGLKPYTDTAYHNEELKSLTRYRFDKVKERAKLKQSVSRLVCILFPELEKLVPTLHMASAYALLAELPGAKQIAAAHLTRLTSLLGDASHGRYGRDMAVEIRDAARGSIGSRMPAKSLELQHTIRLIRELDAEIQEIEAAVQNIMDELHSPITTIPGIGYRMGAMILAETGDFSRFDSPDKLLAYAGMSPSTYQSGQLKNCYPHMEKRGSRYLRYALYNAAKYVCHWDPTFAAYLAKKRAEGKHYNVALSHAAKKLVRLIFALEKSRQPYCPAL

SEQ ID NO: 335808 - protein, 362 aa, unidentified
MGKKDATRYVGIDLGKRTYEMAIVGKKSVTKSNGRTCITGRKNLYSKLRSTDKVALEAGNLAFIIAKDLETLVGCRVYVLNPSQLALIYGSMKKTDKEDSLKLAHIIEDFQEERLPVVPLPSDKEIMMRKLLAGYKRAQQSRSRDINKLHALFLAQGITTVVRKDLATEEQRKETIKMLKGLELEEAEYLVACLDLHEQRIKALKRRMNKESAGDEVVERLQSVPGVGKMVAFAFVAHVDAKRFDNASQVSNYLGLVPRVYISGDTMRYGRITKRGNSYLRALLTQAAWSLIRTKAGGKLKERFEYMTIEKSKSKKKAIVAIARRIAEMLYSMMRDGTYYASRPFTPGKSTAEEMVQILLSA

SEQ ID NO: 335809 - protein, 327 aa, unidentified
MTASPLGLDVSKLKFNACLVRQGGKLRHKVFANNAEGFAQLSDWLKQQAITQVHACLEATGTDGDSLATYLHAQAHLVSIVNPAAIKAYAQSHLSRTKTDRVDAALIAGFCAERKPPAWHPPAPEVQELQALVRRLESLTEMHTAEENRLSSGLSVKSVRESVEVLLAHLSAQIKKTEALIRDHIESHPKLKRQRELLDSIPGIGETTAAVLLAEVADFSQYGSARQVAAFAGLVPRERQSGSSVRGRPRLSKIGNARLRKALYFPAITALRCSAFFQSWAEGLRQRGKCKMSVIGAAMRKLIHLAYGVLKTGQPFDPEWARKAKTA

SEQ ID NO: 335810 - protein, 400 aa, unidentified
MLLFFEVITMIFVGIDVAKDTHYAAVSDDYGAVLVKPFAFQNNAEGFCLLLKKLSEFDRSKLLIGLESTGIYSENLICFLYESGFRLAVINPIQTATLRKTAIRKTKTDKVDTMLIIKSLMVNSYRLYSQRDADSLKLRTLCRFRQNLKKSKARLKIQLAGYVNLVFPEFGKFFKSGIHIAASYALLKKHSSPKEIAALRTSTLCTLLSKASHGRFGKDTAEALKSLALSSVGVKNPYISIQIAQTIAQIELLEQQIKDLNSAIEEAMESINSVLMTVPGIGAVNAACILGEIGDIKRFSKPCKLLAYAGLDPTVRQSGQFTAKSTRMSKRGSALLRYALINSAWQLTLNDTTFKAYYDLKRSQGLNHYGALGHVAHKLTRVIFKLLTSDTPFNPAKLVA

SEQ ID NO: 335811 - protein, 347 aa, unidentified
MRFYTRQRQYYCGIDLHTRWMYVCILSRDGEIVYHKNLPAGPEPLLEAIAPFREDLVIGAECTFTWYWLADLCAREGIEFVLGHALYMRAIHGAKVKNDRIDSRKIAALLRGGTFPLAYVYPREMRATRDLLRRRTRLVRHRAELLAHIQNTAAQYNLPPFGDHEVCPKNGPEIIQYFDDPAVQRSIGTDLELIDYLDGTIAYLESQIERAARGHDPQALMLLRTVKGIGKILGLVILYEMHTIERFETVGQFCSYARLVRSPHESAGKRSGRSRNKIGNQHLKWAFSEAATLFLRGNPEGMAYKKRLEKKYGKPKAMAILSHRLGRAVYFMLKRNRAFDMNTFLAN

SEQ ID NO: 335812 - protein, 350 aa, unidentified
MKITTIGLDLAKSVFQVHGVDGEGRAVLRKQLKRHQMAEFFANTPPCLIGMEACGGAHHWARKLQAQGHDVRLIAPQYVKPYVKSQKNDAADAEAICEAVARPSMRFVAVKTVGQQSLLALHTSRSGFVKARTALSNQIRALLSEFGVVLPKGFSALFTRVPEALEDAANELTSIVRELAQRLLDHIKDLDELIKKLELQIRQWARADVTVRRIEQIPGIGPISATALVASLGDVSHFENGRQVSAWLGLVPRQHSSGGKTVLSGITKRGDSYLRTLLIHGARAAILAAQRRRQGPPDWLAKLLERKHPNVAAVALASRNARIVWALLKHKRDYEPGYGRDKHLSAAIVA

SEQ ID NO: 335813 - protein, 416 aa, unidentified
MRAERAHDQRVRAQEAAAVVGVDAGKFTHALAVRPRGQKDTKPFAFGATRAGFERAGAFIEEATGGADHGHVIVGIEFAGVYGFTLAHFLHQQGFSVVSVLAAHTKKWKEVVHGGPVKSDPKDALNITDLAAQGRFVTFPFLEPVYAELRYLVSARQRLVRMTNGTRNRMKSTLQVIFPEFEEVFSDFTKKTPIAVLEKYPTPHDLLCAPKRSVIKLLREVSRGQCGEGTYEQLMARARATVALTNGQSVLATELRLLIERLHLFQQQEEELLEAMTKTLLHAPAGPHLLTIPKMGPATAAAFLGLIGDPKAYASSRQVLMMAGLNLVPNSSGTRVGTVRLSRRGKPQLRKLVYMFAMRHVRASDGIYRAQFERMVHVQKRPKKQAVVQLMRPALRMMFAVAREERDYAPDVPRER

SEQ ID NO: 335814 - protein, 347 aa, unidentified
MRFYTKQHNFYCGIDLHTTKMYLCILNQEGEVVLHRNIRTKPDFFLAAIKPYRDDIVICAECMFTWYWLADLCTAESIPFILGHALYMRAIHGGKSKNDKIDSRKIAGLLRGGLIPMAYVYPQRMRATRDLLRRRNHFMRKRSELLAHIQNTASQYNLSEPLGKISRPSKRKGICDQFVDHAVQMSINANLEMIESYDRVLAGLEQEIVTSAKEHDPASYALLKTIPGVGKIIGLNMLYEIENINRFPSVQDFASYSRLVKCAKESNGKKYGSSGKKIGNAHLRWAFSEAAQLFLRKNGAGQKYYQKISRKHNNGKALSILAHKLGRAVYFMLKNQQVFNMKKFITT

SEQ ID NO: 335815 - protein, 444 aa, unidentified
MLPVMRCDAAGIDIGATEIFVAVPADRAHENVRSFPTFTQDLYTLADWLKQCGIKTVAMESTGVYWIPLFQILEERGFEVCLVNARHVKNVPGRRTDVSDCQWLQFLHSVGLLRASYRPEQEVCAVRSLLRHRESLVQMAATHINHMQKSLDQMNLQLHHVISDIAGQTGLAIVDAILAGERNPQVLAKLRHQRIQASEEIIAKSLVGDYRPEHLFTLRQSLAAYRSYWKMIADCDGEIRQRLEEFKSPDKPASKENEKPDTQKLDTPSKKTSPDGILRLELKRIFGIDLTQIPGIQTGIAQTLFGEIGPDFTKFTSASAFSSWLGLCPDNDISAGKVLWVGTRKVKTRAATALRMAAQSLHHSKSALGDFFRRMRSKLGAPQAITAAAHKLARIIFHLISSRQEFDDDRFAADQLKHQQRQERKLRAKAKALGFELIPLEQVA

SEQ ID NO: 335816 - protein, 333 aa, unidentified
MNSANTPVVGIDVSKKKLDVALLMDGKLKFKVVENKAEGHKDLVKWLEKQGARVGDIHVCMESTGVYSEPAALALHEVGFKVSIVNPNLVNKFGQSLAVRNKNDKVDAGVIARYCAMNQPPLWEPPAPEVKALRGWDGHMAALQAMRQQELNRIEANDVNGDEDVAERIRKHVDFIDEEIKDLQKKIDDHIDRHPHLKRDADLLTSIPGIAAKTAAKVLARVGDLRRFSSAKKLAAYLGVTPKQRQSGSSVRGRTTMSHMGSREVRTALYFPAVSAMRYNPLIRDFAARLKATGMATMAVIGAVMRKLVHQMYGVVCSGKPFDPNHLGTLNTA

SEQ ID NO: 335817 - protein, 414 aa, unidentified
MEDWPEAIPAFLYYQWEVHVMSFFIGVDVSKEKFDACCISEKEEKVFSLMCTMDRQGFEKLILHLPANKTSLLLGMESTASYHLPLFSYLTAQGYGVVIINPLLINNFAKRSLRKTKTDKKDAFTIAQFLLREKEAFAPQATDHLATELRDLARRREKLTDHVTSLKGDMKRILSVIFPELEHITGAFTKCTLRLLMEYPSAHALRQADHAAVADIFITKSRGTRPRVSIKTLMTAAASSVGVVSPAKELTLKQEASLLIHVQEQMKETTEVIMNLLNQRMKHDMEILCSIKGIGENTALNFLIEMGGEIEMYENDKKLIAASGLDPSTYKSGKYEGKSRISKRGNRHLRRVIWLMATRVIINNTIFRVYFYKRRSEGLPYKMAVLATAHKLIRIMFVMLNRKTYFVEGGIKYS

SEQ ID NO: 335818 - protein, 336 aa, unidentified
MRYIGVDLHTTQITVCYLKSMEEFSFERFELNEMKRFIGTLAGEDEIAVEATGNTRWFVEQVREQVKRVVIVNPREFEVVKRSAKKTDKRDALNLARFLAVDLLPEVRGKAEAAETVLRLNETRSKLVRLKTTLLNKIHALAVSKGRKLKKESLSSKRGLDKVFAQEWTKIERLELEIIREQIESLQKSLKRLDEALAEAGRELKGFENLVSVTGIGERSAGVLLAVIGEVRDFADEKKLASYFGIVPRVRNSNETVKSGKISKRGSKVGRTTLVQCSLVAIKYNEYLRNYYERLKARSGHGKAKIAVARKFLGIIYNTLINNWVFADFNNFELAK

SEQ ID NO: 335819 - protein, 507 aa, unidentified
MRYKVNGSADMTDPALVRAVASPLESMVRESSPTVVSAAMRIPFRRSSRIRRFLWRCRSLTILEQMMAMRKREEVVFPNAAAIDVGGSTHWVAVPRDRADQPVQEYGAMTDDLHAMANWLIACGVDTVALESTGVYWIPVYEVLERRGLKVWLVDARQMKYVPGRKSDVQDCQWLQKLMSLGLLRAAFRPDDEVCVVRAVARQREVLLAEQASWVLRMQKALVQMNIQLSEVLTDVMGMTGQAIIRDIVAGERDPAVLARHRQSRVKASEADIRRALTGNWRDEHVFVLAQSLAMYDSLAQRVTECDAKMQALLTPLGCHEVNLHGPGKRAGKNTPAFDLRMALARWAGVDLTRINGLALTSVLTILSEVGPELSRFTSVKHFCSWLGLCPGTKVSGGKVLSARTRRSTNRVRQALKLAAMSLSRNSSALGAFYRRMCARMDKPRANTAVAHKLARMIYFMLTRGEDYVDQGQQRYEEQQRQRSIAALRRRAADLGFAITPTGAAAT

SEQ ID NO: 335820 - protein, 360 aa, unidentified
MRSKVSENAFAGQTFYVGLDVHKKSWKVTILGQEFEHKTMSQDPDPVILRDYLLRKFPGATYKAVYESGFCGFTICRDLNRLGIQCGVINASDVPSNHKEKMQKTDKADSRKLAKVLRSGDAEMIHVPSVELESDRALVRLRFRLSKDIARTKIRVKSLLMQFGIPIPERFTIGQTRSWSRNYMQWLGETDTPGKSVRRTLDSYLRTGKSQREELLLVNRQIRELCKKPEYRESYALLVSIPGIGFVSAATFLVEFGDITRFSTLDKLCHYVGLVPRMHGSGDRMQVGRLVNRGRKELKVMLIEVAWDAIGQDPALLASFNELTKRMNRNKAIIRIARKILSRIRYVLIHRRPYEMGVIM

SEQ ID NO: 335821 - protein, 349 aa, unidentified
MKIIGCDFHPGYQQIAVLDLATGETEERALSHERKEEVRAFYAGLEGSARVGIEASGQSQWFERMLAELGHEVWIGDAAKIRASCERKQKTDRRDAELLLRLLAENRFPRIWVPTAAERDARQLLLHRHKLVRMRTQVKNQLQALALNQGVQRKWKLWSAAGRKQLESLPLLPWASRRRAELLQLLDQLEVSIGALDRAVAEQAQARPAAQRLMTHPGVGPVTALAFMLTMGPAERFQRGKQIASYLGLIPSEYSSGGRQQRLGHISKQGNPFLRGLLVEAAQSAVRYEPEMRRAYQRLAQRKCRALAKVALARKLAVRLYWMLRLQVNYAQLIQGSHAGQPESFRGRG

SEQ ID NO: 335822 - protein, 438 aa, unidentified
MRRVIGIDVHRTFGEVVFWENGRLRHAGRIDMTRTALEGFGKTLLASDEVVVEATANSMAVSRVLAPFAARVIIANPLQVKAIAQAHVKTDKIDAGTLASLHAAGYLPQIWTPDAETERKRRLVARRYQVVRHRTRLKNEVHSILHTHLIPKCPHADLFNVRGRAWLAAQALLNDERAAIDRHVRELDRLAEDLALLDREIAQDAIDDPAVNRLMTITGVNLAVAAGIVAAIGDISRFNSPQKLVSYFGLNPRVRQSGLGPAHHGRISKIGRSHARAMLVEAAWTAAKTPGPLHAFFVRIRARRGHQIAAVAVARKLTVLCWHLLTKGEDYQWARPALVANKTRAMQLQAGHPQQKGSRRGPAYAYNIKALRDREMLIAAQAERSYERFVSQWKPRRPKNRRAGASAPQDKIGSPETLAADASRFATRSPARDDHNRR

SEQ ID NO: 335823 - protein, 341 aa, unidentified
MNYAGIDLASKSSAVAVVDEQGNVMEQREVATDAGQLAKVLAPFTPVSVVVESSPLAEWACQVLEEAGHQAQIIDARAAKHLMDARKKTDRRDAQTLAQIVRSGWFQPVHRKSDSARLERTQLQGRQGLVRTYCSIDSQVRGLLRAHGICLGRVSKRRFPQWVRERAQQHSEALVAVLEPLLAVYEHSLEQAEAMKKQMQAQQREDELQQQLQSVPGVGPLTAKVFASTVDDPQRFANGEQVADYAGLTPGVTQSGERCVRGSITRQGDHLLRWHLVEAAHAMIRQGGDCRLKRWARQLAETKGAAKARVALARKLAIVLWRLWLKGERFEPEHGTVAAAA

SEQ ID NO: 335824 - protein, 299 aa, unidentified
MEKITTVGLDLAKSVFQVHGIAEEGPVIVRRTLRRSQVLDFFRKLQPCLVGMEACGSAHYWAREIQALGHTVRMMPPAYVKAYLKRNKTDAADAEAICEAVTRPTMRYVPVKTQDEQAAGMVLKARDLLIRQRTQTINALRAHLAELGIVRATGLVGIVSLAAIVRDDSDLRLPGAARMALEELVEQIETVTARIERLDRKILEAIRKDDNARRLTAIPGVGPIFAATVRAVVPDPAGFKTGRDFAAWIGLTPRAHSSGGKERSVRSQSAETSNCARCLSLEQRRSSSSPVVASRHHHG

SEQ ID NO: 335825 - protein, 386 aa, unidentified
MKDETFVPREYDMFAGLDVDKKSIAATFSSPQGFIRSLHMPYSVDYLLNHVRKHFGDQKVAFVYEAGPTGYGLYDGLVAQGYRCLVAAPSMIPRAPGQRVKTNRLDSRGLSESLRGGQLKSIHVPSPIYRELRHLTQLRDTVVREAAAHKQRIKALLLLEGIGFPSATAGRQWTLRVKAQLRKLRCSRTVRFKLDQLLDSLEFCEKQVVSSTKEIRRFCKEDVELFQSIEYLMSIPGIGWIVASQLLARMGDWREIDNVRQLGSFLGLVPTENSTGDSVDRGSITRAGDGRLRSKMIQAAWSAIRQDGELREFYRSVCQRNPRGKGARIAIVAVARKLSTRIYAVLKKQRPYIVRKQVHSAPLTQEETSPQGTTRRCAEPGETDNS

SEQ ID NO: 335826 - protein, 360 aa, unidentified
MTDQHTPVDTSHTDLVTGGVDTHKDTHTAAALNALGQLLGTQTFPATHTGYTALTRWLTGFGTLEAVGVEGTHSYGTGLTSHLTDHGIQVIEVNQPDRHTRRRKGKTDTQDAINAAHAVQSGRATTTPKTSTGPATSTAVLRTVLTSAVKARTAALNQLDSLIVTAPTTLREHLTGLPRRALITTCARLRPTHDLTCPTAATKTALRRLAHRIHRLTTEIDQAKAELTAVLDRVLPRTTALPGVGPDTAAQLLITAGDNPHRITTDAAFAHLCGTAPIPASSGRRDRHRLNRGGDRQANAALYRVVIVRLRHCPRTRAYLARRTAEGLPKRHIIRCLKRYVTREVFHALTTDMTHLATTT

SEQ ID NO: 335827 - protein, 372 aa, unidentified
MASIIYVGMDVHTTNFTFCCYTADSDRGFAVAQTEPDYRQVIKYMERVQKQRGEECKFVCGYEAGCLGYSLYHQLTRCGVDCVILAPSTMHQEKGKRIKTDRRDAENIAKCLAFSLYSPVYVPTTEDDAVKEYIRMRDDIKADLKRVKQQIIAFTTRHGFAFDGKSYWTQKHLKWLETLVFEHPLYKKTLQEYLILYYMLDEKVAVYATRIEEMSHLEHYEENVQKLCCFRGVAAHTALSLLVEVGDFQRFRSAKHFAAYLGLVPGEHSSSDKQIRTSITKAGNTHLRRLLVEAAQSYNRGAIGKKSAALKARQGGNPAEVIASADKANERMQRKYYRIAFKSRHNIAKTAIARELACFVWGMMTGNISNAA

SEQ ID NO: 335828 - protein, 412 aa, unidentified
MQTLVERGCGLDVHQATVVACLLVMQKDGRIQKQTRTFGTTTRELVGLRDWLRAEGCTHLARESTGVYGKPVYAVLEGALEIVVANAQHVKKVPGRKTDVKDAEWLADLLCHGLLRPSFVPPPPIRELRDLTRYRRKLVQSQAAERNRLLKLLESANIKLASVATDGFGVSGRLMLRALIEGQASPKEMAQLAKNKLRNKIPELELALEGRIEEHHRFLLKLQLDRLESVEKPIEVLQQHIQQKLQPYTAKLALLDEIPGVDCILAAVIIAELGVDMSVFESVSQLASWAGVCSGNNESAGKRKSSRIPKGNVYLKTALVEAAHSAAKTKGTYLRDKFYRLKARRGYKRAAVAIAHKILVAIYHMLSQQVSYNDLGDLYLDNLNKHHLTRNLVHRLERLGYAVTLTLQDKAA

SEQ ID NO: 335829 - protein, 410 aa, unidentified
MDTLIERCAGLDVHKDTVVACVRVPARGGGREQSIQTFGTTTAQLLALRDWLVAHGVTRVGMESTGVYWKPVYYVLEDAVECWLLNARHLHNVPGRKTDVADAAWICQLVEHGLVRPSFVPPKPIRELRNLTRYRKAQIEERTREAQRLDKVLQDAGIKLSSVASDVLGVSGRAMLRALIAGTRDPETLAELARGTLRRKIPALRQALHGRFGPHHALLVGTILAKLEFLDEALGHLSAEIEQVIAPFAAEAALLRTIPGVDRRTAEAVVAEIGVDMSRFRAAGRLASWAGWCPGNNESAGRHGSGKTRKGSKWLHTYLTEAAKAAARTKGTYLGAQYARLRGRRGSARATVAVGHSILVAAYHILDRHEPYRELGPDYFRRRHSREHQTRRLVRQIEALGYHIRLEEVA

SEQ ID NO: 335830 - protein, 411 aa, unidentified
MRRVIGIDIHRVFGEVVFWEDGRLRPAGRVDMTRSALENFGRSLTKEDEVVVEATGNAMAVARVLTPYVARVIVANPTQVKAIAYARIKTDKIDAGVLAALRAADFLPEVWLPDANTERVRRLVARRNQVVRHRTRIKNEVHAILHAHLIPPCPHADLFGRLGRAWLGRQIVPADETAAIARHLRELDRLGEDLAVLDREIAQGAVDDPAVKRLLTVSGINLTAAVGLVAAIGDVSRFASPQKLVSYVGLNPRVRQSGLGLAQYGRISKQGRAHARAMLVEAAWTAAKTPGPLRGFFLRIRARRGHQVAAVAVARKLAVVCWHLLSKNADYHWARPALLAHKVRAMELQAGLPEKKGNKRGPAYAYNVKELRDREIEVARHAERAYERFVTGWQPRGTRTRRTGAAIEERR

SEQ ID NO: 335831 - protein, 547 aa, unidentified
MATAVCGSATRATGVPRFREDQACSRTVAADISVAVIRDRARRSCTARRREVVNNCAAGENFAGGRPAPARSQSQSPHPKRVIGRLLAEPEALAPTSHRKRPQEGHYISSMDGRAKRRKSQPQQQKTMNDSKQWQQHRAFGALDWASEKHSVIVVDQTGKVIEDFEIEHSALGWKKFREKLQPYGSIPFAIETSQGVAVEQLLEAGMLVYPLNPKSAQAYRERKAPSGVKDDRLDAWSFADALRVDGQDWKALRPEEPLIKELRLLCRDEVTLIEQRTAFVNQLRHALAEYYPAALEAFEDWTSVSAWMFLQRFPTPESLAQAGKRQWQKFLHSRRLWGSDQGPRRMEIFARATEFAGTAPTVKAKSLLALSLVQMLFAIEKQLALYRQRIEELFARHPDHDLFGSLPGAGPKIAPRLLSEIGDDRQRFGGDPQNLQCLAGSAPVTKRSGKQRKYWHVHQRWACDKHLRHTIHLFAEQSLSRCVWAEIYYQHHRQKNQSHANALRRLAHRWLKIIYKMWIDRTPYNAELHHRNQLQHGSWIFQLQKS

SEQ ID NO: 335832 - protein, 391 aa, unidentified
MVCVGIDVAKDKHDCCILDSDGTIRADCITIPNNMDGFKQLLQTIRDCTKKSDKIKVGLEATGHYSYNILGFLLDNDLAVYVMNPLHTNLYRKSLSLRKTKTDRVDARTIATMLLSDVDLKSYTDTAYHNEELKSLTRYRFDKVRERAKLKQSVSRLVTILFPELEKLVPSLHIASVYALLSEYPGAKQISEIHLTKLTNLLVTASKGRYGKDKAIQIRDAARTSIGSVMPAKSLELKHTIKLIRELTSEIDEIEVSIQKIMDELNPPILSIPGVGIQSAAMILAEIGDFSNFESPDKVLAYAGCSPSTYQSGKLTNCYAHMEKRGSRYLRYALYNATKYVCYWNPVFAEYLAKKRAEGKHYNVALSHATKKLVRLIYALQKSGKAYLTAA

SEQ ID NO: 335833 - protein, 404 aa, unidentified
MSAPPTVPTRFIGLDLHKHYLIAVAVDPAGEPVGGPWRVMLDHLEAWAQQHLSQLDAVAVEITTNTYAVYDALRPLVHSVTVVHPPHLALITRVPVKTDHRAALVLAQFLAKGLLPALWVPPQAVRDQRASVAQRAKFTRLSTQAKNRLHAVLHRHHLPLPESGSPFTPVNRPWWQQLPISASEQARVQADLATLDFAEQQVDRLTNALTREAAHDERLPLLVQLPGFNAVNSLTVLAALGDITRFPDAKHLVGYAGLGASVHASGQLYRTGRITKAGRRDLRMALVAAAQTAANTHPHWQAELARLEPRLGRNKAIVAIARKLLVAVWYVLTYQRADRFAEPDRVARKLLNYTYQAGRVNRQPGQSTAAYVREQLDRLHLGAELEKITHGNRTIPLPPSHLSA

SEQ ID NO: 335834 - protein, 324 aa, unidentified
MSDSSVQTSSRVFVGIDVSKSTWDVHLLPSGKSMSLAADETGLTQLRTELAQWGKCFIVMEATGGYEHELAAHMLEDGHDVAVANPRQVRDFTRGLGKLAKTDRIDARMIAEYARLAQPRLLEKMPEKQAELAGLVARRRQLLQLQTMEKNRRAQTSGKAAKKSIGPVLDVIRKQLTIIDKAIAELIQANDDWRQRTKLVQTTPGVGPVNGATLVAELPELGKLNRQAIGALVGVVPFNHDSGQHKGKRMIHGGRASVRSALYMAAMSARSHNPTIKAFAQRLEKRGKAFKVVITACMHKLLTILNTMVRNNTPWKSDYRAANP

SEQ ID NO: 335835 - protein, 315 aa, unidentified
MSDEPCFVGIDVAKAQLDIAVRPSGERWAVPNDAGGVVTLVERLQALHPTLIVLEATGGLERVATAALATAGLPVVIVNPRQARDFARATGQLAKTDALDARALAHFADVIRPTPRPLPDAQTQALRALLGRRQQLIGMRTAEQNRLAGTSERLTQDIEAHIAWLNARIATLDDDLETMLRASPLWRENDDLLQSAPGIGPVCARTLLLELPELGTLNRQQIAALVGVAPLNCDSGTLRGRRIIWGGRAHVRTVLYMGTLVATRYNPRIKAFYERLLAAGKVKKVALTACMHKFLTILNAMLKHRTPWQSQEVQG

SEQ ID NO: 335836 - protein, 363 aa, unidentified
MMSSPVAGIDPHQDTYTIGIVDPNGVELAHAAFPNSAAGYLDGIELLNAHGVQLVGIEGSAGWGSHVAIALCAAGFDCREVPAQRTAAQRRARRLDKTDHVDAVAAARAVLAEPTLGPVQALEVYDPLVAKIEAVLERRRMLVAVRTLVLHHVQDQISKLPVEIRDQLSATGKIEGRLRRLEQVDTGIVTTLAGEYRLSWLLPLVDQDRIARHQIRELERDIDALLDEHGTTLREEPGIGPIAAATLLAEVGDPFRFARESKFARWCGTGAVALSSGAGDGRPVKHRLDFGGNRRINSTLYIASITQHRDLDEARTYIDRKLAEGKTRREARRAHKRHLANRVIRRMWKDESPRQDHPAQHAA

SEQ ID NO: 335837 - protein, 408 aa, unidentified
MTVVGIDVSKGKSMVAAMKPGGELVAAPYEVRHSDIELSHLALDVLCMEPDTRVVMEATGRYHEPVAALLHSEGIFVSILNPLLIKQSGAGSLRKVKSDPKDALKIAKYGLDNWSTLREYTPMEAIRQQLKLCARQCDLYNKNIVMLTNNLISLSDKTFPRVNELFSSPEKADGHLKWVDFYRSFWHCDCINRMSPDAFGERYKKWCKRKGYHFSTDAADALYAASCGSYTTLPRDNNAKLLVTVAADQLIALRENQSKLEAEMLNLCKQLPEYETVMAMYGVGKSTGPHLMAELGDVRRFPHRSSIVAFAGVDPGVVGSGKMQLSSVATSKRGSPQLRKALFQVVSTYVKRKPENEAVYQFYAKKRNEGKPFFVCTTAAANKFLRIYYARVKECLNAAESAVQTEEG

SEQ ID NO: 335838 - protein, 343 aa, unidentified
MQRVTTIGLDIAKSVFQVHGVDAIGNVVIRRQLKRRYVLAFFQKLAPCVVGIEACATSHHWSRELKACGHTVRLMPPAYVKPYVKRQKNDAADAEAICEAVTRANMRFVATKTPEQQSCLMLHRTRHLLIRQQTAVINAIRAHLAEFGVVAPVGRRGVAELLDVVTASSEERVPEVARGCVAALGVQLRMLKAQILEFDRQIMAWHRSNETSRRLDEIPGVGPALATALVASVADPKAFRSGRNFSAWIGLVPKQHSSGGKDRLGSISKQGDRYLRSLFTAGALAVIRYAKIHGTRHRPWLTALLARRPTKVAAIALANKIARMAWAIMVKGERYKEPAALAA

SEQ ID NO: 335839 - protein, 310 aa, unidentified
MDIITVGIDVSKDRLDVAVRPSGEAFVVERNAAGLERLVVRLREVSASIVALEATGGFETIAAAALAAAGLPVVIVNPAQIRAFAKAVGQRAKTDPIDAAVIAHFAEATRPEVRPLPDEATRLLADLIARRRQIVEMMAAEGQRDRRVTNRRLKKSIARLRKVLEQELAELDGDIDDAVRGSPAWREKEDLLASVPGIGPTIARTLIAELPELGRLGRREIAALAGLAPFTRQSGQWRGRSFIGGGRAVVRTALFMGAMVAKRHNPILKAFFDRLVEAGKPKMVALIAVARKLLTILNAILRDRRQWQNA

SEQ ID NO: 335840 - protein, 394 aa, unidentified
MRYAPFSCAGTIQRERLLFVGMDVHKDTHAAVGTTAYGEKLFAVAIGNNQKDFDSLIRQSRSIADERGLGLIFGLEDSSGYGERLAKHLFLNNILVKTVSPVLVDKECKYETHPEKNDSLDAFAAAKVLIQKIDTLPTYRITKQNEIAKEIKELSLDREFLIKEQTRIKNQLHRLLHKAYNSEYRKRFKDPFGVKGLKYWSNHPLPITKAKEDDIVGTPKILKNQIKRKVKRLIDIRKEVNEIKIEMQSLIEQTGQQITTLNGCGVALGSKVLAEIKDIDRFHSPSALAKYAGLAPREKSSGKTFRHIKTKSGNRQLNTAIHRIALSQISRSGNQFAKEYFQRKISEGKTKAQALCCLKRRLVDIIYMMLKHRQPYKQNLHFISPTADFIHRKI

SEQ ID NO: 335841 - protein, 328 aa, unidentified
MFYLGMDVAKAKLDCCLLLDEASGKRKTKAVSNTKSGIVDLLAWVAKQNVSPGVLHVVMEATGVYHEQAAMALADVGITVSIVNPAQVKDFGRGLAVRTKTDGVDSFVLARYGALLKPAAWTPPAPEARMLQALLSRREAITQDLQRERNRQEKADATDTPDRIRQSLSDSIGFLVKQLAELQRDIDQHIDRHPTLKDDMTLLQSIPAVGPQVGGNLLSVMHSHEFHSAEQLAAYLGLVPVERQSGSSVMGRARLSKAGPARIRAVLYMAAVVATRHNPHVKAVYDRLLARGKSKMSALGAAMRKLVHLCFGVLKTRKPYQHNYAKIA

SEQ ID NO: 335842 - protein, 420 aa, unidentified
MEEIVEEEAELVARVAALDIGKKELVACVRVPHEDKPGRRRQEVRTFATTTRSLLELRDWLTCQGVSLCVMEATSVYWKPPFYLLEDAVECWVVNARDVKNVPGRPKTGKLDAIWLAKLAERGMLRPSFVPPPWQRELRDLCRYRRTLIQERTREKQRAEKLLEDTQIKLSSVISDIFGKSGRDMLEALIAGQRDPYALARMARGSMRGKISVLQEALTGHFRDHHGYLLAMMLDRVDQLTARIDQLTGRIDEAIAPFAAQVAQLDEIPGIGKTGAQELIAEIGTDMGRFPSAGHLVSWAKFAPRARQSAGKNKPGSTGKGSPWIAGTLGEAVIGAARTKTFLGSRYHRLARRRGKQRALVAVGNSILVIAWHLLSDPDARFADLGPGWHDRLAPLRRKRQLIAELERLSGKKVMLQEAA

SEQ ID NO: 335843 - protein, 348 aa, unidentified
MAVYIGVDFHARQQTISYLTTEDGEIKRQQLEHGEPQEVRKFYQQFGGQQVLVGYEASGYAAWFEELLEELGYELWVGHATAIRTFARRRQKNDRRDADLILDLLVRGDFPRIQRHSKVSRAVLQQLRYRQRLVKMRTMVINSLVFMGASRGVSLRTQLKSQRGLARLKQLALPEPLGQQRTELCQLLLEMQVKIKTVEQWLEEQANSDQRVQRLRTQHGIGILTGLGLVHTLAPVERFSNARKVTAYVGFDPVEDSSGERQRIGAISKQGSRLLRGLLVEAGQVAVRRDRDLAVVYKRIWLRRGHAKAKVAVARRLLIRAFIMLRDEIDYAEFQRRGVAARSSRATA

SEQ ID NO: 335844 - protein, 334 aa, unidentified
MENIALIGIDLGKNSFHIHCQDRRGKAVYRKKFTRPKLIEFLATCPATTIAMEACGGSHFMARKLEELGHSPKLISPQFVRPFVKSNKNDFVDAEAICEAASRPSMRFVQPRTESQQAMRALHRVRESLVQDKVKTTNQMHAFLLEFGISVPRGAAVISRLCTILEDNSLPLYLSQLLLKLQQHYHYLVEQIKDLESQLKRKLDEDEVGQRLLSIPCVGTLTASTISTEIGDGKQYASSRDFAAATGLVPRQYSTGGRTTLLGISKRGNKKIRTLLVQCARVFIQKLEHQSGKLADWVRDLLCRKSNFVVTCALANKLARIAWALTARQQTYVA

SEQ ID NO: 335845 - protein, 409 aa, unidentified
METIVSRCAGLDVHKETVAACVRCLEDGDEVRQEVKTFGTMTGDLLALSDWLKERGVTHVAMESTGVFWKPVFNILEGEFEVLLVNARHVKHVPGRKTDVKDCEWLAQLLQCGLLRASFVPERPQRELRDLTRQRRQLVADRSRVANRLHKVLEDANVKLGSVASDILGVSGRAILSALIEGRTAPEELAELARGRLREKRPELRRALEGRLTEHHRFMLRQLLEHWVYLGDQIGQFTQRIEVLTAPFAPVMERLDLIPGVNRATMEGVLAEIGTDMSRFPTAEHLASWAGMCPGNHESGGKRKSGRTPHGNRWLRAALTEAAWAAAHCKKSYLAAQYHRLAPRRGKKRALLAVAHSILIIIYHMLKDGTPYTDLGPEHFDRLENHRRTNYYIKRLQAMGHKVILDPAA

SEQ ID NO: 335846 - protein, 341 aa, unidentified
MKLRTISVDLAKNVFQACGVNEHIKAQFNKKLKRSELLDFMGQQEPTMVVMEACYSSHYWGREMAKLGHDVKLIPAQHVTPFVRGNKNDHNDAFAIAEASQRPYIRFVPVKTEFQQEILCLHRIRERLIKNKTALSNQSRGLLSEFGVVFPCGQKALLGGLNSVINNAEYSHRLQNMVIDMLIEYETTLKRLKGIEQQLGIFVEGSESGKILLSIPGIGLINASALLASIDKGQAFNNPKEFAVWLGLTPKQHASGNISKMGGITKRGDRYLRKQLVHGARSVVSRAAKNTDALSLWATKLRVTKPFNKVAVAMAHRLARLIWILLTRQERYSATPTGVST

SEQ ID NO: 335847 - protein, 342 aa, unidentified
MEKVSIIGLDLAKSIIQVHAASVDGSVLSRRKISSKKLLAFLSGFDPCIVAMEACAGSHHWGREIAKLGHQVKLIAPIYVKPFVKRQKNDAADAEAICEAAMRPTMRFVAVKSEEKQAAATVFKVRDLLVRQKTQIINALRGLMAEFGITVPQGPSHVGILISHVEDDSSNLTEAARAPCLALVLALRALIDKVQELDLEIGRRARHDDVARRLMSIPGIGPVIATALEALAPPAETFTRGRDFSAWMGLTPRQHSSGGKPRLGKTSKMGQRDLRRLLIIGASAVVRWASRRGAVEGSWLSRMIGKKPPMLITVALANRMGRIAWALMTNGGRYEEKRLASA

SEQ ID NO: 335848 - protein, 523 aa, unidentified
MPVFKNSKQQSFNVEGTFPDGTTIVKMTDGTRVVTSASNNIKRPLCGGIDVHKNILMAAACVTDKDSLSATFYVKEFSSTNDDIRKMADWFAGYGIVDVCMESTGKYWIPVFNILEQKGLKPVLTQPKYVKQVKGNKTDFRDAMNIANLFRMDVVVASFIPPSDIRDLRELCRYRLKLTYMRTAEKNRYQNSMTVSRLRIDSVFKDPFGKSASSIMSYLLLTPGDEVDDSKILSFVDARTKASPQEILDSIHGYEFLGVQRDKLEIISGHLDEINEHIAAIDEKLGYYRQKYAGIIQRLVAIPGISMESALYILGEIGADMSVWRDDKALASWAGLSPACNESARKKKSTKIGNGGHYLKPLLVQCALAAIKSTKKQPYFYSKYNSIQKRRGHKKAIIAIARKMLVAIYHMIKDGKEFQPIDYEQVVTPKPFNELNPQKVIEFLREQGVDADTIRLVEKQCSHDTTNQKGASSAAANKEQKKKQPKANTEGTATEQKPAKRRGRPPKSPQTTRPLDQSADATA

SEQ ID NO: 335849 - protein, 347 aa, unidentified
MEHYAGIDVSLEYSSVCVVDTSGKIVREAKVASEPEALITWFGAQGLAVARIGLEAGPLSQWLYATMREAGLAVELLETRHVRKAFEAMPVKSDRNDARGIAQLMRLGWFRPVHCKSMGAQETRTLLTARKLVQSKLRDVENSLRGILRGFGLKVGKTTDRSFAGRIHELAAGHPSLEAVAEALLAVRAVLLREFNGFEKQVRRMARSDAKAKLLMSTPCVGPIVALTYASAIDDPTRFKSSKQVGAHFGMTPKKYQSGETDYTGRISKIGDASVRTALYEAAHIMLTKAVKGCSELKSWAMRIARRAGMSKAKVALARRLAVIMHRMLVDGTPFNPAAKQTAAAAA

SEQ ID NO: 335850 - protein, 401 aa, unidentified
MPMTVGLDWGASGHAVCALDEHGTILVRFECPHSAAGLAELLRRLKRIAAPEALPVAIERPSGLVVETLAAAGHPIVPIHPNVVKACRPRYRAAGGKSDPGDAYMLADILRTDGHRFQPLTAVSGEIKALRALVRGRDDLVAQRVALTNQLRAVLDSFWPGVATIFAALDSPIALAFITRYPTPESAHRLGEKRMASFLRQQSYPGRRTPGALLERLRAAPVGRAPATETEAKGRLVRALVRVLETLAVEIGSLSSRIEQAVAELPDGRIIMSFPRAGRINAAQMLAEIGDERRRFQTFDQLAAEAGVSPVTHASGKRLGVVFRFACNHRLRAAITCFADNSRHASTWAAQHYARARSRGCTHSHAVRVLARAWLRVLWRAWLDGKPYDPQRHSSAVRLTP

SEQ ID NO: 335851 - protein, 475 aa, unidentified
MKIPTDIMAVGIDPAKGVHQGVALAYPEVELLNSQFENSYEAISSFDAKIMKLAEKKGLKVIYGLEDSGAYGKTIKDVLTSRSREIREVNPLKTNRQKDFYGGDKSDEIDARCIAQILLRSYENLPKIEEDNQVYASIREGERFREILVKTKTQNVNRLHFYLTKTWGGAYKKFFSSLQNKVALEFFSTYSIPQALKKTKIKELCLFLYEASSHHLGRGKPRKVAMEKAKLILSSIKGIKDLPLTLEREMKKEIIKELVANISQVKASIRAIGRKLEKDLLPETHQNLTSLKSIDTVIASVLLGETLNPDRFSTRDKFARYNGSAPQERSSGGKAKHRARKGCNRRLKRTLRQISVTAIVREPLTKAYYQRCLSRGLSKSQALKRVDRKISDIVWKMMKTKEPYDRKLAVRNIIKRNREANNLGRARWQSRTLGIKQSPGEIKSLVLPPLDILAELEEIEKKDQSIMSVSERVLT

SEQ ID NO: 335852 - protein, 322 aa, unidentified
MKTQELFIGVDVCKDRLDIANDSNSEVWSEANDDSGVSLLAEKFTTLKPTLIVMEATGGLETLLYSALVTAGLPAVVVNPRQVRDFAKALGKLAKTDAIDAWVLARFGALMRPEVRPIKDEQTRELAALVTRRRQLLSIRTAEKTRLRQAAKWTRKDIKSLIKVLDARLAKLEKEIGNNVKNTPGWKEKDEIITSVPGAGPNLSSYLLANLPELGKLNRKEIAMLVGVAPLNRDSGKFRGGRIIWGGRSQVRSALYMSTLSASIHNPHIKGFYQRLIEKGKKPKVALTACMRKMLTILNTMVKNNTTWDINYSLTLESNHGC

SEQ ID NO: 335853 - protein, 344 aa, unidentified
MDHFAGLDVSVKETSICIVDDAGKIVREVKVASEPEALLAVLKNPAYHFKRIGLEAGPLSQWLFSALADAGLPVICVETRHMQAVLKAQINKTDRNDARGIAQMMRAGLYRPVHVKTIRSQKLRMLLTHRKLLQSKAIAIENDLRGTLRNFGLKVGMVGKVKFEARISELVENLPDLAALVEPMLIVRRTLREQIVILHRRLLAIVRDDEVCRRLMTTPGVGPVVALTYRATVDVPARFRKSKAVGAVFGLTCAKYQSGEVDRNGRISRCGDEMMRVMLYEAAQSMLHSKKWSWLKAWAMQIARRRGMKKAIVALARRLAVIMHRIWVDGTEFRWTRGLAAAAV

SEQ ID NO: 335854 - protein, 401 aa, unidentified
MNAVGIDVSKGKSMVCVMRPFGEVVLEPFEVLHTAQNLHDLAEKLKALDGETRVVLEATGNYHKPVAFVLHDAGLFVSVVNPVLIHDYDNNSLRRVKTDKKDAVKIANYTLDKWTRLRQYLPEDDTRLALKNCYRLYQQAVAIRTMLKNNLISSLDLTFPDANKLFSSPVKNNGCEKWVDFIGDFWHSECVSSLSANAFAKKYLKWCQKHGYVFTRSKSDEIYACAVNSASLPKSPTSKLLIQQQVAQLKAVSQSVAAFRQEMLRLSQQLPEFDTVMEMYGVGPSLGPQLMAEIGDVRRFSSKKSLIAFAGIEPQPNDSGKVVGNDKGISKVGSAVLRRTLFLIMTVILQTQPQDEPVFQFMNKKRSEGKPYKVYMMASANKFLRIYYAKVKAVMDSERSQ

SEQ ID NO: 335855 - protein, 316 aa, unidentified
MNTQEVFVGIDVSQRRLDICLWPGGETWSVEYEEGGLKALIARLSALSVARVVLEATGKVEALAVATLAAAGLPVAVVNPRQVRDFARATGRLAKTDRLDAEVIARFAEAVRPKVGEVKDAERERLSELLARRRQLLGMLTAEQNRLRTTQDPALRKGLLAHIRWLERALGEVDEELSGRLRQSPLWRAKEELLRSVPGVGPVTTLTLIAELPELGQLTRREVAALVGVAPLNRDSGGRRGQRTTWGGRAPVRSALYMAALVGSRRNVVLSAHYRRLRLAGKPPKVALVACMRKLLLILNAMARTGQPWQPRLAHP

SEQ ID NO: 335856 - protein, 415 aa, unidentified
MALKIVYKICCGIDVHKTFVVACVASTSDKGITSYESHRFSTYTSGLKTLLQWLIDRNCKDVCMESTSKYWIPVYNILEKGCSIVLTHPKYVKAIRGKKTDKKDAKWIADLFKHDLVAGSFMPPSDIRQLRDLMRYRFKLTCFKSSEKNRLQNCLTVSNIQLGNVVSDTFGKSAQAILDKLLENPADTSFDLEPLVYKSLKKKLPELRDAIDGFITPEQAGKLKIIKDHYDNLESRKAELEELILALAAPYQQELTILQTAPGISSNFTAIGIISEIGTNMEAFPSAKHLCSWAGLTPTNNESAGKKKSVRVSKAGCYIKPLLVQCANAVVKSTKHPEMRNRYLRLKKRRGHKKAIITIARMLLTALYHMLKNGENYNPELYQKTDLPPVDREITIEQALMLIRNQGYKIKSATT

SEQ ID NO: 335857 - protein, 342 aa, unidentified
MQITTIGLDIAKNVFQVHGIDSTEKVVVRKQLRRGQVLAFFKALAPCLIGMEACATAHYWARELTKLGHQVRLMPAKDVKAYVKRNKNDAADAEAICEAVRRPTMRFVPVKSAEQQARLMQHRARDLLMRQRTQLINALRAHLAELGIAAAQGREGIKELLAIVAQDGDTRLPVDAHASLIVLAAQLQAVQTMIGSIEKRIVAQHRSSEENKRLQTIPGIGVLGASTIAAVVPDPKVFRSGRDFAAWIGIVPREDSTGGKQKLGPISKQGDRYLRRILVVGACAVLRRARQQPEKYPWLTQLLARRPFKVVAVALANKMARIAWALLAKGGTYRAPALAAAA

SEQ ID NO: 335858 - protein, 346 aa, unidentified
MTNNIQFSSVCGIDIAKSVMQVYKVTSDGVVSNKAVKRADFLNEFRNTPPALIGMEACGGSQHWARELQSLGHTVHLMPPKLVKPYVTGLKNDKNDARGIYKALEMSVREVPVKSAAIRDLALLQTMRTKRQREKVAKINHIRGILTEYGLVMGKSINAFLAKAGSLIVQLKERADVSPYIVSELTALFREVKEAMEKIKELETNIESIAKTLKQYDLFRSAPGVGPITAATMLVLLCNPAVFKNGREFAAYIGLAPKSSGSGGKNFVTHIPKKYECNNEVRTLLVQCAHAICRSKHKSDWVSSILARKPKKVVIIAVANKLARQLWIMAKKGEKFERRFILAAAQ

SEQ ID NO: 335859 - protein, 334 aa, unidentified
MQNITLIGIDLGKHSFHIHCQDKSGKALLRKKFTRTKLMQFLATCPPSVVVMEACAGAHFMARCISDFGHETKLISPQFVRPFVKSNKNDFVDAEAICEAASRPSMRFVQPRTETQQAMRALHRVRESLIRDKVKTTNQIHGFLLEFGISLPTGDAVIKRLSLVLAEHEIPEYLSRLLVRLHTHYLYLVEQIAELESELSQSINADDTAQRIMTIPGVGPITASLLSSQLGDGKQFSCSRDFAASTGLVPRQYSTGGKSTLLGISKRGDKNLRRLLVQCARSFIMRLERKHGKLAEWVREQLNKKHSNVVTCALANKLARIAWAITTQKKEYQA

SEQ ID NO: 335860 - protein, 376 aa, unidentified
MAAQTSEHGRVIYLAIELSSSIWLVAAHLPGAEKPKLHRIEAGATAALLALVASLRARVQAGLGPIEVASCFEAGRDGFWLHRLLLANGIASHVLEPTSILVNRRARRAKTDRLDAQGLLRVLMAYLAGDRQACSMVRVPTPEEEDAKRLHREREHLVQERVRLENRIEALLATQGIRQRPSLRSWERDLAALRTGDGRPLPAHLRAELGRLRRRLMLAIEMIREIEAERAAALAADPHDDTGRKIEALCRIRGIGETSATVLAREVLYRSFANRRQLASYVGLAPMPYQSGRMDRDRRISRAGNPRARTAIIQLAWLWLRYQPGSALAEWFRARVGALAGRTRRIAIVAMARKLLIALWRYAQTGLLPESVELRA

SEQ ID NO: 335861 - protein, 332 aa, unidentified
MERIERIRMRVARELNRPVEVISCYEAGYDGFWLHRLLEAHGVRNYVIDAASLHVDRRARRTKTDHIDAVQLLRSLLAYLRGEPKVWSVVRVPSVAEEDERRLHRERHRLIAERVQHVNRIKGLCAVHGIYDYEPLRSNRMLRLERLRTGDGRELPRRLRTEIVRELQRLELVLQMIKAIEKERDAMASATQTSPDSNATKIQQLVKIKGIGAETATVLVGEVFYRHFDNRRQLASYVGLTPSHFRSGLMSRDQGISKAGNPKARTTMIELAWFWLRHQHDSSLSVWFRERVGAAKGRMRRITVVAVARKLLIALWRYLTTGLIPTGAAVKG

SEQ ID NO: 335862 - protein, 353 aa, unidentified
MNSLTDLREVVDVVIGVDTHVHTHSAAVVDAATGGVLGEVTVDATAQGYAELVEFANNHAVLRAWAIEGTGGHGAGLSRHLLELSEIVIELDRPKRAARRNGAKSDPLDAIRAAREAMARPRLGTPRTGGERQALSVLLAARRSAVNASTEAQQQVFSLVIAAPEPIRVRFRGQKVAAMLNTAAKLRVQSAWDVETTSTVVALRTLARRAHAMLKEARELQKAIVAIIRSWRPDLLEEFGVGPIVAATLLCAWSHPGRVHSEAAFAMLAGVAPIPANSGQITTRYRLNRYGDRHLNTALHTVVQIRIQYQTATRDYVARRTAEGKTSREIKRCLARYVARDLYRLLESRSPAA

SEQ ID NO: 335863 - protein, 326 aa, unidentified
MQGKEASEQETKVKSSVGIDVSKDWLDVHVLPSGEVLRLPNTSEGIRRLKRWLARFDLALVVVEATGKWHRPLRRSLDASAIPVAVVDPFRVRMFAKAQGILAKTDRLDARVLAQFAAVMAPPVRAAEPQMLEELRELVVARASAVAQQTALKNQRSVATVKFLQRQLDRRIERGDQDIAALDTAILERINGDDGLARRYAILTSIAGIGFVVAATLLASLPELGSSTVKQIAMLAGLAPIADQSGKRDGVRVVWGGRANVRRILYLAALTATRFNVDMKAFYQRMIAAGKPPKLAIIAIARKLAVLANTLISQNRMWLPVAPKRA

SEQ ID NO: 335864 - protein, 353 aa, unidentified
MDRYIGLDAHASSCTVAVIGPSGKRLHSQVLETNARVLVSFLRTIPTPRHLCLEEGTHAAWLYEVLAPHVQEVVVAGVGGQRSRGAKDDQRDAFSLAESLRIGAIETRVYKGLGEFGRLRELSRAYGMVVSDGVRVQNRIKSLYRSRGIPTGRKEVYAPAARATWLQKLPANVQALAAILYAELDAVRALQKRAAKELLTEARQHRIFHVLRTCPGLGTIRTSQLLPIVVTPYRFSSKRGFWAYAGMAIVMRSSADWARATDGSWVRVPVQQTRGLNRNYNHTLKQIFKGAATTVIQRAREEEPLYRHYQQLLDGGTKPNLARLTIARQIASIILSMWRSEEVYDPAKLKQMA

SEQ ID NO: 335865 - protein, 431 aa, unidentified
MSGRDYNKQVAKRQRIRSTTLVVGVDVGKAYNAVGFMNKEGKVLGSCAKVYNSREGFEQFMKMIEDLKVRHGLKDVLIGMEPTGHYWRKLAYFAKEQGYEVRFVRTTALKHHRELDESASAKSDQRDALTITNITREGKDIDTVIEDGVLRQLRTLAKARERLLRYSVSAKNSLHAALDDYFPELHELFWSMGSRSLWAILDRCPFPEDVLLIKVPTLKGLIVQSSRKKAGAVQKAEALYQAATKSIGLRQIGSADRYRVQMCLEEVKRTVLTLKGMDQQMKNMLKEIPAAPYLLSIPGIGALSAAVFLGELGDPAHFHHARQIVKYAGYDPQESDSGSWVSRKFISKKGRWLMRKCLFFMSMRVVVLTNYFKTYYERKLETKNRVGQLPRRKEVLCAVAIKLIKVIFALLRDKRLFGDTRSTVTALSQVA

SEQ ID NO: 335866 - protein, 372 aa, unidentified
MTSIIYVGMDVHTTNYTLCCYSMEDDRFFAEVQVEPEAKNILKYLARIEKQQSRDCRIVCGYEAGCLGYSLYHQLHAHGIDCVILAPTTMMTKPGKRIKTERRDARLISKCLAFHTYSPVYIPTEVDDAVKEYIRMRDDANSALTRVKQQIIAFCIRHGKIHDGKSYWTNKHLEWISSLDLGNKILSEVLQEYLIRYYQLREQVDMYDMRINELAQAEPYRQKVEKLGCFRGIAAHTALSFCVEVGDFRRFATAQQFASYLGLVPGECSSGDKQQYTGITKAGNSHLRKLLVETAQVFGRSATKSGKSAALKERQAKCDSLTVAYADKANARLKKKYFKIAMRSKVNIAKTAVAREMACFIWGMMTDNISCA

SEQ ID NO: 335867 - protein, 385 aa, unidentified
MIKLDRTDAPTTDEYATVYLAFELSKAKWKLGVIVPGSQKMSRYTIDGGDLTALTARLAAARAKAERCGKLVRMLSCYEAGYDGHWLHRWLIEQGVINYEIDPSSIEVNRRARRAKTDRIDLETLMRAFLAYLRGEPRACSVLRVPGVEDEDRRRLTRERERLVKERTAHTNRIKGLLHAQGVRDAMPKQRGFIASLEHLRTGDGRPLPPRLKQEIVREHERLCLVHKQIGELEAKSKAELRAAAPGSVEAKIMQLIDLKSIGRASGQALGNEVFYRSFDNRRQVGSYFGLTGTPYDSGASRREQGISKAGNRRGRTMAVELAWLWVAHQPDSELTLQFLERVGNLKGRVRRIAIVALARKLMVALWRYLQTGLVPKGAVLHPSF

SEQ ID NO: 335868 - protein, 423 aa, unidentified
MMKLKYSICCGLDVHKNVIVATIVTTNKDGISEYLQKSFSTINSDIQRFHNWLIENNCYHVCMESTGKYWIPIFNYLENDIDVCLTHPKYVKAIKGKKTDKKDSKWIADLYKFDLVRCSFIPPKDFRQLRELSRYRFKLVCMKSSEKNRIQNCMTVSNVGIASVLSDPFGKTATEIISYLLEHTADSMDEKAVRKLIKKGAKSKSDEIIEAIKGYTIETDQAKKLELARGHLEYLDDMITQTEVELYVRIKPYYEFVEFVSTMPGMTELSSTIVLAETGVDMDIFDDAKHLCSWCGLSPANNESAGKKKSVRIAKAGDYLKPMMVQCALAAIKSKKQPYFAIKYGRIKKRRGHKKAIIAIARMMMACIYHMVSEKKPFTPTDYEELITPPNHVERVVLNENNVFAYLESLGYDSSKLVKRNDN

SEQ ID NO: 335869 - protein, 356 aa, unidentified
MTQDDVLRVTVGVDTHKDTHVARAKDHLGRRLGDAKIIPTTPAGHRELLAWARSLGQVEAFGVEGTGSWGAGLARYLAAQDVMVFEVSRPNRQTRRRNGKSDPADADAAASAVLSGDAVGLPKSGDDTVEMVRVLRVARKTAVQARTQAMNALQAVVVTAPAELRELLRTLSGSTLVQKCARLRPGPLTTPTAATKAALRSLAIRYQCLSKEMAGLAASLDQLVLKAAPGLVALFGVGTDSAGALLVAAGDNPERMHSEAGFSMLCGASPIEASSGKVARHRLNRGGDRQANAALHRVVLVRLCWDQATKDYVDRRTAQGKSKREVIRCLKRYVAREVYRVLMSASHTTEVDHAVA

SEQ ID NO: 335870 - protein, 334 aa, unidentified
MAQITTAGIDLAKKVFALHGIEGSGNVVLRRTVRRDQLLGVVASLPPCLIGMEACSGAHEWARQFQKFGHMVKLMAPKFVAPYRKSGKNDGNDAEAICEAVTRPSMRFVPVKSAEQQALLALHRVRKGFIVERTSTINRLRGLMTEFGVVLPLRSVTVRRQAAQAAEALPEIARRSVHDLLEHLRRLDERVDAYDRELEVQARLSEAAQRLMQIRGVGPTTALAIVATIGDAREFKNGRQFAAWIGLVPNQHSTGGKSRLGHISKKGDAYLRALLVQGARSVLHSAKGRADGISRWALLLQERRGYYRTLVAIANKNARIAWALLAKNEELRTA

SEQ ID NO: 335871 - protein, 371 aa, unidentified
MKSILYVGIDVHKESFTLCCYDVSDDKLQYQQLVAPNYKMVLKYLEWVRARYEGEVEFVCGYEAGPLGYVLYHQLNDYGVKCIILAPTTMAITTKNRVKTDKRDAANIAKCLAFRTYSEVYVPTDEDNSVKEYIRMRDDQKKALKIIKQQILALALRHGQRFEDGKSYWTIKHVSWLKSLNLGGVLQEALSEYLITYEYLMNKITRMDKRIGELADGERYQEKVKKLSCLIGVKTHTALSVIVEIGDFKRFAKAENLAAYLGLVPSEDSSGERRRRGGITKAGNSHVRRLLVESAQSYTRGRIGHKSKNLKSRQNGNTPQVIAYADKANERLRRKFYKMTLKNNINRNVAATAVARELSCFMWGLMTDNVA

SEQ ID NO: 335872 - protein, 320 aa, unidentified
MRNAVGLDISKLTFDASAMVGKTEHSAKFDNDSKGLDQFSDRLKSLGCQNLHICMEATGNYYEEVADYFAQYYSVYVVNPLKISKYAESRFKRTKTDKQDAKLIAQYCRSAQESELVKRQKPTDEQYRLLRMTAAYAQIKSECAAMKNRHHAAKDEEAAKAYAEIIKAMNEQLEVLKEKIKEQTEKPNCKEGVKRLETIPAIGRMTAAVLFHHLTSSKFETSNKFAAFAGLSPQQKESGTSVRGKGKLTKFGNRKLRAVLFMPAMVAYRIRAFPDFIKRLEEKKKPKKVIIAALMRKLAVIAYHVHKKGGDYDPSRYKSA

SEQ ID NO: 335873 - protein, 427 aa, unidentified
MSEGEFVRQEPQFAAFMSIDWADKKHVWCLQVAGSQQRESGELEHTPEAVEAWVGQLCQRFAQGLIAVGLEQSRGALVFMLTKYEFLHLFPVPSTMSASMRKALYPSGSKDDPRDADLLLDLLLQHRDKLHRLSPDTEATRRLQNLVEERRKLVDEKTEQTNRLTSHLKIYFPQMLDWFERLDTELVCALLERWPTLEELQKVPPAKLRSFFRKHHCRDQELVEQRIIAIRQAIPAIRDRAVVEAKSMVVKVIVQLVRSLIEGIAGLDEKIGEAAAAHPDFFIFESLPGAGAVMAPRLLAAFGSQRERYGSAQEVQSYTGIAPVTEKSGKKQWVHFRFAAPKFLRQSFHEWAGHSVAQSGWARSYYQQLRSQGKGHHAAVRALAFKWIRVVFRCWKDRVTYDESKYLATLARRGSPLAAVVAAGKTL

SEQ ID NO: 335874 - protein, 430 aa, unidentified
MDYNTQNKKIEAITEKTLVIGIDVGSETHYARAFDHRGIEYSKKAFKFSNDEAGFAIFKEWIQEHQKAHDKDKVIPGMEPTGHYWFNLGKFLQDNEMKPVLVNPHHVKKSKELDDNIQTKNDRKDPKVIAGLVREGRYMIPYLPDGVYADLRTASNMRFQIQSELTRILNRINRWFSIYFPEYKTVYGKPDAVSGVMILKKAPLPKDILALGVEGINKIWRDAKMRAAGKKRAQTLADAAEHSIGSKEGAVSARMEIRMLLEDYESRNARLQEVMELIEELVKKIPMAEKLMAIKGVGIKTVSGFLAEVGDISRFNNPKELQKLAGLAIIENSSGKHKGETTISRRGRKRLRYLLFEVAMSLVAKNPEFAEMHCYYTTRKVNPLKKMQSLMAIAAKLIRVFYTILTKGVDYDPKKMVGDIKRPETYQQAA

SEQ ID NO: 335875 - protein, 412 aa, unidentified
MKDLLEISCGLDVHKEKIVACILTGPLGKPTRSEIREFTTLIPDMIELRDWIVSQNCHHVAMESTGIYWMPIYEILEDAFSGDITLLVVNARHMKNVPGKKTDMRDSEWISTLLRAGLLNGSFIPEKRIREFRDLNRYRKSVIRDITSQKNRIEKFLQSSGFRLSSFISDIFGASGRNIILHLIEYGQIDKTALDSCLKTKTRNRIDEILMSVNGTLSEHQKAFLRILMTHYDSLKKHLTEIETSLEEDMAPFTLQVEQLNSIYGISTTASCAIIAEIGIDMKPFKTAEHICSWAGLCPGNNESAGKRKNTSVTKGNPYIKSMLCEIAWVIAGKRNTYLSAWYWRIKQKKGAKKAIVALARKLLVIIYTMLKQGTLFDESYFETRRKNCEQKQLSRYIRELEKHGYHVEAQS

SEQ ID NO: 335876 - protein, 456 aa, unidentified
MKIPQSTIRLLTGRLVKILLNREVSTMKSNTQNAKIEAITEKTLVLGIDVGSETHYARAFDYRGIEYSKKPFKFSNTEAGFVTFKEWILDIKERHEKDKVVLGMEPTGHYWFNLGKFLQDNEMKPVLVNPHHVKKSKELDDNNPTKNDRKDPKVIAGLVREGRYMIPYLPDGVYADLRTASNIRFQLQAELTRIQNRISRWFNIYFPEYKTVYGKPDAKSGILILKAAPLPEDILTLGIDGVNQIWRDAKLRAVGKARAKTLIEAAEHSVGSKEGAVAARMEIRMLLEDYESRSIRLQEVMTLIEGLVKQIPMAEKLLEIKGVGIRTVSGFLAEVGDISRFNNPKELQKLAGLALVENSSGKHKGETTISRRGRKRLRYLLFEVAMSLVAKNPEFRELHNYYTTRRLNPLKKMQSLMAIAAKLIRVFYAMLTKGVDYDPKKMVSDIKRPAVYLQAA

SEQ ID NO: 335877 - protein, 347 aa, unidentified
MRFYNNAHPYYCGIDLHARLLYVCIIDDKGEVIVHKKIKDDKEALMQILEPYIGNVIVGVECMHCWYWVADWCDDNNIDFVLGHALYMKAIHGGKTKNDKVDSLKIAKLLRGGNFPIAFHYKKEMRATRDLLRRRTKIVRHGAMLKGHVVNTNSQYNLPPTQVNLKNVSAREALKHSYDDPVVQRNIDLDMNILDFYARQISKVEHFILAQARQHNPAFLNLLKTIPGVGRILSLTILYEIGDINRFDSVQRFASYSRLVKCKAESAGKTYGTQGNKIGNAHLKWAFSEAAVLYLRGNDKARNYLNKLQKRMSKAKAISVLAHKLGRCVYFMLKNKTVFDESRFLNG

SEQ ID NO: 335878 - protein, 354 aa, unidentified
MNTIKYIGIDVHQATSVFAIRDSRGNILGESILKTEPTTIVDFLKGQRGTVRVTFEEGTYASWLYDVIKPYVSKVIVCDPRKNKLDENKTDRIDARKLAELLRLNALSAVYHGEQSSQTLKEYARSYLSLQQDSTRIMNRLKAIYRGRGIGCRGTAIYRPKNRKEWLDKLKDTGAQCRAERLMKQLEFFGKLRLEAQKDLVRESRKQKDYKILKGIPGLGLIRIALIMAFVITPHRFRNKRQFWTYIGFSVVRRGSSEYEIIEGELKRKKRKPLPRGLNNNYNHVLKGVFKGAALTAAYRGQFKKLFDQRVADGATPNLALLTMARKIASITLAIWKKGERFDIKRHQLSEQKT

SEQ ID NO: 335879 - protein, 339 aa, unidentified
MNRIVVGVDIAKRVFQLHWVEPQTGEIVALQLKREKFLEHFANRANCLIGMEACGGSQHWARSLQKLGHEVKLMSARMVKPFVGGNKNDVADARGIWTAVQQPGIKAVAVKSEAQQAVLALHRMREQLVKFRTAQINGLRGLLTEYGEVMPQGLAGIHRDIPGALGRLADRLPAIVIETLREQHARLGELDEQISQIERRLRQWQRQDPMSQRIAAIPGVGLLSATAAVATMGDARAFKSGREFAAWLGLVPRQSGTGGRVRLLGISKRGDKYLRTLLIHGARSVLTHSKSPPEWLSELVKRRPKNVAVVAMANKMARTIWALTAHERAYHSGYVSRPA

SEQ ID NO: 335880 - protein, 520 aa, unidentified
MNRTIARDVTAKVVYVSPPVNHRRRTEVGPGAGELNKSGPANRRLRLRKEAGAGSTILLPVCLLEGRERPRTSAESLRAKADDREQLLWSAPALIAGEIVTDLNFAINPGGAGRSDKPEPPAPMPTAIVGLDVASTSARACVTDLAGAVLLEKDFPATLAGEALLLAALPADSVIIIESTGPYHLTWARRLQAAGHRVLLLNALLAKRLATSANALRQRKTDTIDARHLAEVGRLHLAALLRFEFVEDAPRAQLRALCRVRRGVRHALTNAVRLAQHLLMTMLPGADAAGLNFASNASLPELFLRIHSLAQLQRLRRATLARHACSKSDALLTLLAEPRQTAAMFDALLPALQVQLRVVQSLREHFAALGPQLRAALKHGEHTRTAELVRSIPGYGEKTTPIIIASLPPQWRTWGNKRQIASRIQAHWGCDPRPRESGKWKGQVRMTKRGDEMARTALFQVAVCALLHDPMLKAFYDKKRAVGQHHLIAVTHVMRRQLRRLVAVLYDQKPFVPHAEPAAA

SEQ ID NO: 335881 - protein, 307 aa, unidentified
MNKAVVYVGVDVSKAYLDVAWAERSRRFANNKSGLSALMKWIQQSPVHLICEASGGYERGLLEAAEQNAIKLSLVQANRVRQYARAAGILAKTDEVDARVLCAFGSALQPKPLAPLSAQQKQLRELETQRRHYSRMLTAEQNRLAQLNDKELQRLTRRLLAALKKQMAAIDARIATLIAQDQALDEKAQKLTSIVGVGTRTAVLLLAQMPELGTLNRAQVAALAGLAPFNRDSGTLRGKRTIFGGRRAVRSGLYMAALVAARRNRILRDFYQRLRTKGKPHKVALTAVMRKLLLALNHTLKPTACFA

SEQ ID NO: 335882 - protein, 390 aa, unidentified
MNAVGIDVSKGKSMVAIMRPFGEIVSTPFEIKHTTSDIHSLVELINSVEGESRIVMEHTGRYYEVLAHQLSEANLFVSTINPKLIKDFDNDSLRKVKSDKADAVKIARYALDKWQNLKQYSVMDELRNQLKTMNRQFGFYMKHKTAMKNNLISILDQTYPGVNTYFDSPARSDGSQKWVDFASTYWHVDCVRKISLNAFIDHYQNWCKRKKYNFSQSKAEEIYGKAKELVPVLPKDAITKLIIKQAIDQLISVSTTVESLRTLMNETASKLPEYPVVMAMKGVGTSLGPQLMAEIGDVSRFTHKGAITAFAGVDPGVNESGTYEQKSVPTSKRGSADLRKTLFQVMDVLIKMMPQDDPVYQFLDKKRSQGKPYYVYMTAGANKFIRIYYG

SEQ ID NO: 335883 - protein, 310 aa, unidentified
MFSYPAGIDVSKDSLEVRVNQLEHGVSCRNAESDFPGLIGWLKLHQVGSVLLEATGGYERNVMKALQAADFEVIRINPCRAKAFAKAMGQQAKTDPIDAQRLAQFAAVIDSPGSRVTSPEHDELRALVQQRENFIHQRDDDRRRLKTASSEVVKPALQSHIDYLNQAVKLIEQLIRQSAEKLDSEKAARLCSVKGIGIVTAASLMAYLPELGEVAKRPIAALAGLAPYNNDSGKHKGARHISGGRFAARRSLYMACWVVIRDQPEFQARYKALRDKGKCAKVALIACMRVLLIRLNAMLRDRTEWKVHAA

SEQ ID NO: 335884 - protein, 338 aa, unidentified
MKITTIGLDIAKSVFHAVGVDKAGKLIKKKMLRRKDLLPFIAQIEPCLIVMEACSGANYWAREFELLGHSVKLIAPQFVVPFRQGNKNDYNDALAIAEAAQRPNMRFVKPKSVEQQDVQLLHRMRERLTKQSTALINQVRGMLAEYGIVITKSKSAFKVQFPDILADETNALTTKGRTIFYQLYEEFSDIEKRLKGCDVQVLTETKNNVICQRLETIPGIGPVTATAFYAAAGDGKDFTNGRHFSAWCGLVPKQHSSGGKDNLLGISKRGNAYLRTLFIHGARAVLQHSCHKQDKFSCWAIQLAERRGFNRACVAVANKLARMAWVIAAHDEEYRLPV

SEQ ID NO: 335885 - protein, 389 aa, unidentified
MQTIHRSRPPARCARAGTLFVGIDVHKDTHTAVGITPFGEKVFEMTIGNEAEDFILLVEKVKVEAHKVGLTPSFGLEDVHSWGERLSSFLVEEGLPVRAVAPILVDHRRSQTTHPEKNDSLDAQGVAEVMIQRIDSLPLYKLTEEAQKAKQIRELSLEREWLVKERARLKNQLHILLHRIHNTGYRLKFKDPFSKKALQYWMRSISKETDAILEQRMKRAVRRLLDLREEIQEIEEELTAMMKENQQTLSTASGCGVVIAAEIIGEIGDIARFHSPGALAKYAGCSPREHSSGKTIRWRKTRSGNRRLNRAFHRMALSQISRSGNEAARVYFKRKISEGKTKAQALVCLRRQLVNVVWMMMKHKTEYRLPASKPRQAGYPQEKVVDFFS

SEQ ID NO: 335886 - protein, 318 aa, unidentified
MAEVVAFEQIVQRGCGLDVHKQTVVATIDGAGLTRETREFRTTTSSLKELREWLERSEVTHAVMESTGVYWKPVYHVLEPSGMTVWIVNARHVKYVPGHKTDKRDSKWLCKLLLAGLLKPSFIPPREQRELRDLTRYRRKMIEQIASEKNRVIRILEDCNIKLSSVLSDTHGVVGTKLIDKLCASGKISMEDIEEVYHGKLQASREEIYEACEGFVTGHHVFMLQAIRKDISSCEAIISELNARIKKMLAPYGNVLELLKEVPGLSDKSIQDLIAEIGLDMSVFPTEKHLASWSGVAPGNNESAGKKKVDALRMATNR

SEQ ID NO: 335887 - protein, 428 aa, unidentified
MNDNDINRIERFRQFKNEIRGSGRFLIVGLDIGKSMHHGFLGTAMGKTVKRGLRVENSASGFEHLLTMVQFYMDRDGFKDVVFGLEPTSVYHKPLAEFLITYEHLVVYVTNEAIKKNRALLDGRWDKNDTKDAANAADLVAQSKCQFYDLPDIRLRDLRALLALRQRLKKQLHSGRVRIRNNLVAQYFPELDKCWNQAEQENLAIVRWCLSPHKINQLSFEDFFQMVTTRNKGLKQYNRLSKIWQIAAYSIGCQPGMAMQLEAQILVENIKTIQTHIDNVDETIEDICASFQEYEYLRSIPGFGPYVSAVVLAAIGTAQRFKNTHQLIKFAGLDLNANRSGKKSASAVPVISKKGKADLRYALYQAALIASSFNARFRGYYHHLLEGRQREKGIRTKMRVKLAAKLLVIAWTLMKKKQAYDPSYLKVQ

SEQ ID NO: 335888 - protein, 317 aa, unidentified
MQTFLNVGVDVAKDAIVVSCATQSFPVHSVTNQRAPLLAWLKSLPAGTRIGLESTGGYHELLADMAHAQGHVVFLLNPLDTKHYARAMGNRAKTDRVDSELIARLIAQEHTHLRPYTPPTANQRKLDRLIRRRAKIVRIKSSLKLTMSNLSGFTTELKAVLLKLDTLIAKIDTAMSAIAARSPQHEKAQQRLQTIVGVGPVVGMALANTLERVPFHNADAFVAFTGFDPRANDSGHKTGRRRLSKRGPGELRRLLFNAAMSGAKTKVWKPIYEHYRSQGWSTTAALVIIARKIARAAWSIHHYNSIFNPERITKCLT

SEQ ID NO: 335889 - protein, 349 aa, unidentified
MLADELDYVVGVDTHLDEHVLAVVSAATGAVVARQAVRTNPRGYSTALRFAQEAGEGARVWAIEGTGSYGAGLARYLAGGGETVLEISRTPRPERRLQGKDDSLDAARIARAALASETLALPRNGERREALRLLLVARRSAVDVRREALGQLRGVIVTAPNQLREELRRLPVGRLLVRCSRLRRSSSASADELATRLVLRSLARRIEAATLEAAELERELLGHVRALAPQLLDEPGVGPIVAAQLIVAWSHPGRLRSEAAFARLAGVAPVPASSGQTVRHRLSRGGDRQLNRALHTIVLHRRQHDTATQDYIERRIAEGKSRRDATRLLKRYLARHLYRVLQQQRPLTT

SEQ ID NO: 335890 - protein, 390 aa, unidentified
METEASSASIQYVGLDVHKDSIDIATADEGRNGELRHVGQIGGDLAALDKALRRLLSRGHRLHVVYEAGPCGFVIARHLASQGIDCVVVAPSSIPKRAGDRVKTDRRDALMLARLARAGELAPVRVPDPADEAVRDLVRAREDAVREQRNARHRLKALLLRNGIAYAGKAAWTPAHLRWLAALKMPEPAQQIGFQEYLHSITESGARIARLEQALRDQLPGWQLRAHVQALMALRGVQLIAAMTLVAELQDFLRFEHPRQLMAYVGLVPSEHSSANKRRQGAITKAGNSEARRILVEIAWHYRFGPRVSPLIAKRHDGLPKPITDMAWAAQLRLSGKFKRLTARRVMKTKAVVAVARELAGFVWAIGQQVQTSGWQGVAEDAAGRPHAAG

SEQ ID NO: 335891 - protein, 427 aa, unidentified
MDYTQNCKIEQVKESTLVIGIDVGSETHYARAFDWRGRELTKKVFCFSSDIEGFSAFYEWAGQISNRTAKTDIMIGCEPTGHYWYTLEAFLKKNGLRLVFVNPASVKRVKELDDNSPKKTDRKDPKVIAKLVIDGRFIEPYVPEGIYADLREVVSSRDRILKELNCCSNRIQRWLSIYFPEYKKVYKKFDSESGMRVLEEAPLPCDIIALGCDKIVQIWRRYKLRAVGMKRAKTLVEAAHNSVGKHGGNGARVELKMLLEDYRVKSLQLEKVTQSMQSLLMQVPHIEKLLAVKGVGVVTVAGFVSEVGDIGRFDSPKQIQKLAGFEIVENSSGKHNGKKTISKRGRRKLRKILFQVVLPLIRSNMEFRNVYDYYTTRVKNPLKGRQAIIAVACKLIRIFYAILSKGVDYDPSKLLSDIRRPQDYIAA

SEQ ID NO: 335892 - protein, 461 aa, unidentified
MSRNKPTGKQKGSVQKKVDWKALEIVHPDAAGIDVGGSEHWVAVSPDRDPEPVRRFGCFTADLREMGQWLVQKGVRSVAMQSTGVYWMPVFEVLEQHGLAVYLVNARHTKNVPGRKSDVQECQWLLKLHAFGLLNNSFQPTDEIRIARTLWRQRSNLVAEAGSTIQRMQKVLTEMNVQLSNVLSDLSGVSGMKIIGAILEGERDPWKLASLVQSGVKATLEDIAKSLEGNWREELLFVLRQQVELYRIYQEKINDCDLPLRKHLESFGSKRDLKAQPIGPKPKGKKGSRNAPQFDLRTELYRITGIDWAQINGVDVLTAQTVIAEAGADLSAFRSEKQFASWLGLCPTNEQSGGKILNRRTRKVVNRATVAFRNAASTLIRSQSYLGAQYRRLRTRLGAPKAITAMARKLACLFYRLIKHGHPYVDKGTEYYEARYREQQIRSLSKRAQKLGLQLVIPTTA

SEQ ID NO: 335893 - protein, 348 aa, unidentified
MTVYCGVDFHARKQTISYLTTEDGEVQQVELAHEQDNIRGFYAKLRSQGPVIVGFETSGYAAWFEEMLEELGCEIWIGMPAAIRRQARRRQKNDRRDADLILELMLRGDFPRLHRYTPESREVLQQLRYRHRLVKLRTIVVNSLQYLALSRGVSLRTKLLTGRGQKRMKELKLPSHLAKQRDEMCELLKELTEKIETAESWLNLRAEQDTRVGRLRTHPGIGPLTGLCLVYTLEQVQRFANPRKVTAYVGFDPVEDSSGERQRIGAISKQGSRLLRFLLVEAGQVAVRSDEDLKAAYWRVQLRRNHQKAKVAVARRLLVRAFIMLRDEIDYAEFQRRGVAARSTRRTA

SEQ ID NO: 335894 - protein, 398 aa, unidentified
MNPVVGVDVAKGESQIQPFMDKGEPFGRSEKVSHSLKGLDRLGQILIRLKEETGETPAIILEATGHYHRVLVLYLEREGYPVIVVNPLQAQKFRNTQLRKVKTDARDAWYLAEMYYREEWSPSRSQETNLADLQHLTRQHEFITGMYVQAKLNMRSLLDQVFPNYTSVFYHLYCKASLRVLSSCLSENWSSERNMGEIEERIGEGVCNSKSASWIRDKAERLALELDRNPIKETSIGQLVALQSIISLVLHFQEQLELLEERIKDIAESIPAVDLVKSMPGIGDKLAASIIAEIGDAKQFSNAKQLVAFAGLDPSVYSSGKFVATSSRITKRGSKRLRRALYLAVQCGIRGSRNPRIREYFDKKRGEGKPYKVVVIACANKLLHHIYAMLTRGQPYNG

SEQ ID NO: 335895 - protein, 359 aa, unidentified
MTMLAEPNEKVEDPTVLDAVVGGDTHRDTHQLEMLTGAGVMISTISIDNDADGYAAAIAWIAQHAPGPRVLVGLEGTRSYGVGLCRAVQAAGLQVVEVEQPKKGQRRGRGKSDPIDAHLAALTVLRMPADRKALPRSDGDREAMRILLVARNEISTTRTAQINRLRALLLLGDDEDRALSRGAMSKAHLDRIGRRRGRRDETREQAVRRGEARRLAIAIRAADLELTANHKQLKTLVQAFAPGLLDRKGVGPFSGAQAIVSFSHVGRCRDDAAFAALAGASPLPASSGRTDRHRLNRGGDRQLNRALHTIMLTRWRDCTRTHAYIQKRRNEGLSDRDIRRCLKRYIARELFRALNAVGG

SEQ ID NO: 335896 - protein, 358 aa, unidentified
MKYSTKHVGLDVHQATIVTSVRDDSGRVIAGTVLPTEAGPIVDYFRGMRGTIHVTFEEGTQAQWLHDLLVPIVDRVLVCNRRGQSPDGNKADQLDADELSDLLRCGRLRAVYHGGTDRMALRELARTYQNVVEDSTRVMLRLKALFRARGIKTPGTAVYHAEHRRDWLGQLAETGVRFRAKTLYAELEVLQELRPKVKSAMLGEARKDRAWAVLRAIPYLGPVRVALILATMQTPWRFRTKRQLWAYVGLAVVTRTSAEYEMDGPRAVRRRRRLVTTRGLNRNHNRVLKDVFKGAATTASARPGALQDWYQGLLARGMREELARVTLARKLAAITLRLWKRGDRYDPAKLTVQAQAAR

SEQ ID NO: 335897 - protein, 316 aa, unidentified
MPAQIVAADQRLNNRTVEDRFELPERPSCVGLEAGPLSEWLARGLAQAGLDAVLMETRHVRAALSAMVAKTDRNDARGMAQLLRMGWFRPVHRKTMNAREQRALLAARSTLGRRLRDVENSVRGILRGFGIRVPRLLRGRWSNGVRGALQGNTVLLGVVEPLLAATQALRDQLAVVDKRARDAARQDAVCRRLMTMPGVEAIVALTYRAGVDQAERFKSSRQLGPCFGLTPRRYQSGETDRSGAISRAGDASVRVALFEAAHVMLTRSTHWSKLKAWAVAVAKRRGAKRAKVALARKIAVILHRMWIDGTEFRFVA

SEQ ID NO: 335898 - protein, 433 aa, unidentified
MSKFFNSPTVGIDVSADFSFVAILAPNGDVFKKPFRIKHDVSGFNHLLKEIKKVEEEFNMKTAIFMESTGVYHLSLFHFLNKNFDNTFVINPLVTKCNKNVDIRKVKNDKKDALSIAQIGKFQNIKLSQSVSMDIFQLKSLVREYYKLTDNCSTYKKKLSTDLRVIFPGYKNVFSNVTSNSSIAILNEFPTPQAILSAPKDLIINILMEKSKKGLIWSEKVYSNLINYANEANIIGLPLHGFSIKITSTINIIKALESEVKNLLEQIESLINSPNFSEQIRNNIEFIDSIPGIGRLTAITLIAEIGDINGFLKTKHLVAFFGIDSSVNESGKFKGNQNKISKRGTRIGRRALYAAALACIRTNRNGVPINKVLLDYYQINLNGKKPKVALVAIMHKIINYIFAVLRNQTPFEVRDPRIHKQMYLENKNKNTAA

SEQ ID NO: 335899 - protein, 308 aa, unidentified
MIAQNYVGCDISKQWLDFFDETSGRLRRIDNQADAIAAYVAGLDPSRDFVVMEATGVHDRLLRHALAKAGVPFSRHNPAHTHHYSKSTRRRAKTDPLDARMLSDYGRRYHPEAEPAPSEEVERLQSLAGHRDHLVEMRAALKKHLAEAFEEVVIADLEETIAYFDTRIKALENLIAEVIRQNQDTARDHALMVSVPGVSKVGALSLLALLPELGQRSPKAIAALAGLAPFDNKSGKLNRRSQIQGGRSRVRRALYMAALTAIRTCERFKTFYTALAARSGSKKLAIIAVARKLLVVLNAIMRDKTAFA

SEQ ID NO: 335900 - protein, 360 aa, unidentified
MSGTMSWAAMDVHARSTCATSMDVLSGELSRQRFDTGAVEPVVGWLVSLPAPVRCCYEAGPTGYGLYRAAVAAGIDCQVIAPSKTPRASGDRHKSDRRDADLLLRQLMAGALTAVAVPSATFEAARDLARAREQVRADLMRCRHRLSKLLLRHGRVWDRSTWTKVHREWLGSQTFQHQNTELAFIDNLAACDGLTARRQVLDERLSHVATDPEFWPLVRRLRAFRGIDTLSALILVLEVANFDRFPRAVQLGSWLGLVPSREQSGESDRNGSITKTGSKYARRILVEAAWHYARPPRIGKTLYERQEGLPDHVLQIARRAQTRLYRVHRRMRERKKPGNVITVACARELACFLWAAATAP

SEQ ID NO: 335901 - protein, 314 aa, unidentified
MHAPLFVGIDVSQARLDVALRPGTAQTLSHDDAAIATLVDQLRVRHPTLIVLEATGGLEIPLTSALATAGLPVVVVNPRQVRDFAKASGQLAKTDTLDAQVLAQFAEVMRPQPRPLPDADTRALAALLARRRQLVEMLGAEKSRLLSAPTSIRKSLRAHIAWLERELEHTDRGLADAIRQSPVWREKEELLRSVPGVGPVLTSTLLANLPELGTLTHKQIAALVGVAPLSRDSGRLRGRRTVWGGRAQVRAVLYMSAVVAARFNPVIRTFYQRLHQAGKATKVALTACMRKLLTILNAMLKHRAPWRQMEVPHA

SEQ ID NO: 335902 - protein, 318 aa, unidentified
MRVIGFDIHRVFAEAAVLEDARLTRLGRVEMRRDRLEASARTLRRDDHVVVEATGNAAAVAEVLGPHVGRVVIANPQQVRLIAHAKIKTDSIDASVLARLYASGFLPEVWVPDQRTQALRRQITRRNQLVRQRTRLKNMVQSILHSHLIPPCPTADLFGPKGRVWLSDQVLPADERVAVERHVREFDRLGEDLRAVERHLAQTALADQVANLLITIPGIDMVVALGMIAAIGNVDRFARPQQLVSYLGLNPSVHQSGNGPVHRGRITKQGRGHARGMLVEAAWVAARVAGPLRAFFLRISARRGQHVAAVATARKRLS

SEQ ID NO: 335903 - protein, 389 aa, unidentified
MFFLGIDIAKLNHVASLVSDNGNIVFSNFMFKNSLEGFLSLINKVKSIPKDDIVIALEFTGHYSDKFVNFFFNRKFNVTLVNPSNVANFRKSYGRDSKNDRIDSINIAKMLLSREYSLVTQSDIEYLSLKKLNRIRDSLVKQKSKCKILLTRNLDSIFPELHLLPSDIHSKAVYALLKKYPSSEEIAALGIDVLTNILKTNSRGHFCEKTAYIIKSQARSSVGFEDISLSFHISQLISSIELLKEQIRNTEKQINAIIEKLKPVILSIPGISNVACACILGEIGNISRFRSPSKLLAFAGLDPKIRQSGQFRALSCRMSKRGSKYLRYSLIYTAWNAVRNNEVFSNYYALKRSQGKNHYKALGHVAHKLVRVIYKLMKDNIPFNAEQLI

SEQ ID NO: 335904 - protein, 387 aa, unidentified
MTKNKGRVVGLDVHPDSFAGAVVEGSDPAQARVLSTSTRVQLEQLERWALRHTSTEDRLVLEASGNAFAVAERLRMIGRKVEILDSHCAGKVGKVYCANDRVDAVKIARIYLSALSPIVWQPDAKTLERREVFSAYQAVVKESTRAKQQLRSMLNEHCVRLEKGFRLCHPKAITRLLALREWTPARTMLLQQSHGSLVAARARRTLLRRHMAQEIVADDALMRLSRLCGINLVTLYGVVSAVGDVHRFTHSKKLVAYFGLNPSVSQSGNFEGSGALRRHGRGALRALLIQSGKKLLEVANPLQKWGLAVAARRGRNKAAVAVARKLCVAVWHVLMGHVIGALERLDTLETKLSKFATEIGPAALAALGYNNKADFVQKKLYVLRSYP

SEQ ID NO: 335905 - protein, 354 aa, unidentified
MTSTKYIGMDVHTESISIAVRNSVGKVVMECVIETKASTILQFIAGLSGDLRVTFEEGTWATWLYDLLKPHVTEVLVCNTRKNTSRNGSKSDRIDARKLSEQLYMNNIKSVHHGEHGLRTLKELARSYLTISKDLTRVMNRLKALYRSWGIPCAGKEVYAPRHRAEWLAKISEAGVRRRAEHYYQQLDVLRPLHQEARRDLLLEAKKHKPWKLLRLIPGIGPIRAALLMAVMQTPHRFRTKRHLWTYSGLALETHDSAQYRVAEGQLERSRKPATVRGLNKDYNHDLKDIFKGAAMRASTAAGPMHDFYEALLAKGRKPTMARLTLARKIAAITLIVWKKEVRFDANYLKPQAA

SEQ ID NO: 335906 - protein, 321 aa, unidentified
MTYVGIDVSKVTFVVAYSSVKTNKTRTFKNTVNGVHEFVQTISASEHNCVLEATGNYSALLVYLLSEAGITISLENPLKIKNFARVMLTVTKTDEIDARLIALYGEKMQPAPYKLRSDAILVLKQKRTVLRQLKKQLVATRNLKGSMEVLPFFDPKCKKTIEKTITFLEKQIKEMEEELASLAQGEYKKQMDLLTSIKGIGVTLAAALIVATGRFSYFDNAKQLTRYLGLSPIYQQFGTSVNVKGHINQNGDSNLRSQLYVAAFSSLRCNAECKACFDRLRSNGKPGKVAVVAVANKLIRQAFAVVTQGKPYVDGFKSEKP

SEQ ID NO: 335907 - protein, 392 aa, unidentified
MIFIGIDIASKKHDCCIIGANREVLAPIFTFENNAGGYDILLDTVRSFVRDFGQARVAVESTGHYGSNLISFLTSKGFDLVVFNPLQVDMHRRAGSLRKTKTDKADARFIAQMLLSSNAENSSFIQKQPDIADLKALNRHRSRLKGMRARLRMSVSRLVTVLFPELCGVVWSIHSTSSYALLSEFPTVTAIADCHLTRLANLLGASSRGKYGKEKALEIKSLAVRSVGTNSRVIGFELQQTIRLINNVSSELDILDSEIKALMLKINSPITTIPGISYNLGSIILSEIGGIENFANPSKLLAYAGLEPSTYQSGNYNATKTSMVKRGSPYLRWAILQAAKHVSRFDPTFGAYAEKKRQEGKHYFVVLNHVGRKLIRVIFHMLKNNQEFVPVA

SEQ ID NO: 335908 - protein, 361 aa, unidentified
MTGTVTWVGMDVHARSTHAAAMNLLSGEIERRRFGPGVEAPVAWLSELAGPVHACYEAGPTGFGLYRAAIAAGVRMDVVAPGKTPRAASDRVKTDRKDAELLARLLVAGQLAPIKVPPAGVEAARELTRLHDQCRRDLMTARHRISKMLLRHGRVYPKPTTWKQDHRRWLTSQHFDEPTSELVYLNLLAQVDALTSRKLELAGQIAQLATDERWWPTVARLRCFRALDTLTALSIHLELGADWDRFEKAPRVGAWLGLTPSLNQSGESKAQGSITKTGSTLARRLLVEAAWHYGPPPRVGPTLQTRQHGQPEHVLQIANKAQHRLHHVYRQMKARGKPHGVVTVAVARELACFLWAAATAD

SEQ ID NO: 335909 - protein, 370 aa, unidentified
MDTITYVGLDVHKATVAVAVAQGGRGGEVRQLGVFENRSEILTKLAARLSKPGRRLSFCYEAGPCGYGLHRLLTGGGHDCVVVAPSLIPVKAGDRVKTDRRDALMLAKLHRAGELTPIWIPDAAHEAMRDLVRARATAGRVLSKTRQHLQSFLLRHDQIYRGARAWTLAYRRWLTTVRFAHPAQQIVLQDYIHAVQDAEARLDRLTRQIEELLPSWAMAPVVAALQAMRGVALVVAVTVVAEVGDFRRFANARQLMAYLGLVPSEHSSGASVRRGGITKAGNVLARRVLSEGAWTYRMPARVSRKLHDRNEKLSPAIRDIAWKGQIRLCSRYRRLAAAGKPKVVVTTAIAREMVGFIWAIARIAQPALEG

SEQ ID NO: 335910 - protein, 347 aa, unidentified
MRFYNRQHQYYCGIDLHVKTMYVCMLDATGQVLVHRNMPSTPEALLEVLTPYREGLVVAAECMFTWDWLADVCAAEGIAFVLGHALARKAIHGGKAKNDKIDSFKIASLLRGGLLPHAYVYPAAMRSTRDLLRRRLHLVRKRGQLLAHIQNTRAQYNLPAFEKRLAYPGNRDGVVERFSDPSVRKSIEVDVVLIDQYDGLVNDLERTIVREAKRHDADAFHRLRSVPGIGKVLALTILYEIHDIHRFDRVQAFASYARLVTCQKQSGGKTLGTRGAKRGNVQLKWAFSEAAVLFLRHTKDGKKLLTGMAKKHGKGKALSILAHKIGRAVYYMLSRGTVFSMEKFLAA

SEQ ID NO: 335911 - protein, 324 aa, unidentified
MKMSKPDTVGIDVSMLWLEVVVLPRGVRFSVTNDAAGWAELVQKLRPWSVAAVGLEPSGGYERGVIRALLAAGLSVRRINPNQLRQFARARGVLAKNDRLDARLIAEYVAIMPTRSVQSDPAAERLAELVTVRRQLCDEHVSVANQASHLEDAILRRLSKRRLARLEADIALLDNRLAEMVGSDAELARRYRRLVTMPGVGPTLAYTLLALLPELGQMSRKQLAALVGLAPYDFDSGKLKGLRRIYGGRTPVRTLPYMPALSASRLNPPLKRFHQRLVAAGKKPKVVIVAVMRKMITTLNAMLRDRADWTARCDTGRHTVPATT

SEQ ID NO: 335912 - protein, 337 aa, unidentified
MDYFAGLDISMDETHVCVLDREGVVVRESKAESTAQAVANELAKAPSCRRIVFETGRMAPILFHGLSQLGLPVVCVESRQAYQALKSLATHKTDRNDARGLAHLARTGFFKPVHVKSLPAHAVRSLISARKKLVGQRVTLENQIRGLAVVFGVRLPRALTTAFIDRALKASEGVAGLSAAMRGLSAARTAVMIAVAAIDADIRRMTRASAACRRLMTIPGVGQLTALAFVAAIDDPSRIRRSRDIGAYLGLVPRRYQSGEVDYTGGISKCGDGRMRTLLYEAANVMLTRYKGQLKLKDWAFAIAKRSTMRKARVALARRLAIIMHAMLRDGTEFASA

SEQ ID NO: 335913 - protein, 344 aa, unidentified
MEYGAIDLHKRRSQIRIVREEGSVVLDRKIETTRPDFAQVFGGRARMRILIESSTESEWVAQCLGELGHEVIVADPNYLPMYGSRSRKVKTDRRDVAALAEACRTGIYRRAHRASAPARELRRTLRVRSHLVRVRSGAISLLRSLLRQEGVRLASGSADRVLDRLERVSLPAALTEAVQPLRALITQLNTTLWAADEVVETRASVDPIAQHLMTTPGVGPVVALTYQAVMDTPARFGGNAGRASAFLGLVPSEDSSAERQHKGHITKTGPSDLRALLVQASWVIWRGRSAAGLPLRTWAQALAARRGRRIAIVALARRLSRILYALWRDQTDFGRSPRPSRARV

SEQ ID NO: 335914 - protein, 407 aa, unidentified
MDAIVVGIDVSKDRLDVCVTPSGEAMAEANDAAGVEKLALRLAGLTPALVALEATGGYETLAAAALSAAGLAVVVVNPAQVRSFADALGKRAKTDPIDAEVIARFAAASGVRPKPLPDEQSRLLADLVTRRRQIMAMIVAEEARLKRAANRQLKKSIGRLLAALRRELETLDADLDKQIRSSPAWRIKEQLLSSVPGVGKGISRTLIAELPEIGSLDRRQIASLAGLAPFTRQSGKWRGKSFISGGRASARAALFMGALSLRDTIRSSRPSATNSSRRKAQDRRHRRDSPQTAHHPQRHHSGKPTMAPTKRLTAKTVALPLWEESRAAERLGGRGRACRSRGRMRVILPGGTEMATTRPAGPPSPTSVGGKSGAALASPVRKSEGRARQVPRPRRDEAASGRRSGWG

SEQ ID NO: 335915 - protein, 377 aa, unidentified
MGNDSTVYVGLDVHKESITIAYAIDAGDVESMGKTGTTPTEIDRMCNRLQSKASQVRVVYEAGPCGYGLYRRLVKQGFDCMVCAPSLIPKKPGERVKTDRRDAIKLARSLRAGDLSAVHVPSIEDEAFRDLARTWASARDDLRHARQRLKSFLLSHGVHYIGRADWGAAHRRWLSKYSFESAWRQLAFDEHRRTIEDRLAQCDRLETALREAVVEWSFYPAVLALQAMRGIQFITAVGMMSELGDLSRFEHPRQLMAWLGITPSEHSSGGTRRQGAITKTGNSYARKLLVEAAWSYRHPARVGKTLQPRHEGIPKPIIDRAWDAQLRLCKKYRKLAARGKNVNVAVVAVARELAGFIWDISRLAMSLALPRHAVQPV

SEQ ID NO: 335916 - protein, 345 aa, unidentified
MIPQDVYAGLDVSLETTSICVVDSTGATVWRGSCPTDPAAIAGVLRRHAPKARLIGLETGQLSNWLTRTLCELGLPVVCVDARHAKAALKLQVNKTDANDAWGLAQIVRTGWFREVAVKSMDAQALRMLLVARTHLISQRQATANVIRGLMKTFGLVIARGASGLFAPRVREAAAGNGTLLAIVEPLLAAWQALREQIAAFDRQILSRAKTDAVIRRLMTIPGVGAIVALSYTAVIDDPARFRRSSSVGVYAGLTPRRYQSGEIDVSGHISRCGDSLLRSHLFEAANVILARYSKASALKSWGLALAKHIGKRRAKVAVARKLAVIMHRIWVDGTSFIAEGKAVS

SEQ ID NO: 335917 - protein, 344 aa, unidentified
MDHFAGLDVSVKETSICIVDDAGKIVREVKVASEPEALLAVLKNLAYHFKRIGLEAGPLSQWLFSVLAEAGLPVICVETRHMRAMLKAQINKTDRNDARGIAQMMRAGLYRPVHVKTLRSQKLRMLLTHRKLLQSKAIAIENDLRATLRNFGLKVGMIGTVKFETRIRELVENLPDLAVLVEPLLIVRRVVREQLGILHRRLLAIVRDDEVCRRLMTTPGVGPVVALTYRATVDVPARFRKSKAVGAVFGLTCAKYQSGEVDRNGRISRCGDEMMRVMLYEAAQSMLRSKKWSWLKAWAMQIARRRGMKKAIVALARRLAVIMHRIWVDGTEFRWTREQAAAAA

SEQ ID NO: 335918 - protein, 313 aa, unidentified
MAQIVSRAGIDVSKRSLDVALWPAGKTLHLERSDPVWSDSLAAWLKAHDVGRIGLEASGGYEAEVVEVLQSHGFEVVVFNPQRIRLFARANGRLAKNDRVDAAVIAQASAVLSARLAPKRPAALTALIELLTYRRRLQEWITDCTNQLEHLKDAALRRRTQQRKAALQRERLAIDARIAGLLAGCANWQALSVRLQTVPGVGPVLAQMLLALLPELGRLSRRQIASLVGVAPFDRDSARRRAWRHIEAGRAALRHVLYMAALSAKRYNPVLAAFAKRLAGKPPKVVTVACMRKLLVILNAMVRDGTDWTAAAV

SEQ ID NO: 335919 - protein, 399 aa, unidentified
MLFTGWDWASASHAVTILDSAGEVVDRWVFAHTEQDLDTMLARLASHDSPGELPVAIERADGLVVDRLLAAGHPVVAIDPGAFHAARPRWGAAGAKTDPGDSYKLADYLRTDGHRLRRLEPPDAVTRELQALVRLRDDHVAAKTAASNQLGALLDAHWPGAKQLFFRLASKITLAFLAEFPTPQAAAQLDQAELAAFCRRHAYRGGRHPAELLQRLRSAPRPPVGLAPTVLAQVVGAQTQLLATLLATIAELDQAIGNRLGNHPKVGLLARLPRVGQLSHAQLLAELGPILDRASSAEHAAAQAGAAPVTRTSGKTSSVHFRLAANHRARQALHIFADNARHSSPWAAKLYADARTRGKRHPQAVRVLGRAWLRVIWACWHTNTAYDPAKHRAEQRLAA

SEQ ID NO: 335920 - protein, 335 aa, unidentified
MKKYELFVGIDVSKSKLDVSFVNATDSNQWTHFVVTNTAKGLQGILTRLNKRKMDLNQVLICFEDTGVYSMPLCYFMSEKAVDYWMIPAIEIKRSKGISRGKTDKSDSKDIAFYAISHQYKLKLGSLPDEALQKIKLLYSEREKLVKAIQMFGRTTENIGFLPKKLLSDLLKSNASTIKKLKTSLKKIDQRIQELISENESLKEKDRLIQSIPGVGPQTSIYLLIVTRGFTCFENSRQLACYGGVAPFEYSSGSSIRGRTKVSHLADKKLKSLLNMCALNAKAYDHEMKLYYERKVAEGKSKMLVLNNIRNKILGRVFAVVNRGTPYVNTQKFAT

SEQ ID NO: 335921 - protein, 413 aa, unidentified
MAVFCGIDWAEDHHDIALVDQDGTLLATRRIGDDAAGFAALLQLLVEAGDDPDAPIPVAIETSHGLLVACLRATGRPVFPINPLSVSRYRDRHSVARRKSDAGDALVLANILRTDLAAHRPLPADSELAQAIAVLARAQQDAVWARTDAHNKLRSLLREYYPAILLAFATKRGGLLRPEARALLRAAPTPRAAARLTLSQLRALLHRAGLQRGIDTEALRLQQLLRADYLHHPTLVEEAFGRQALALLRQLDTACGNAEDLADAATEHFAQHPDAAIITSMPGLAALTGARILAEIGDDRARFADARGLKAYAGSAPVTRASGKTTAVMHRRVKNQRLASVGYVWAFAALTASPGARAHYDRRKAAGDRHVAAQRNLFNRLLGCLHHCLHTRQTYDEATAFPTTSSTPAERAA

SEQ ID NO: 335922 - protein, 372 aa, unidentified
MQQNLRVFVGLDTSKNKISVALAEDGRRGEVRFFGDIDNSPDVVRRLVSKLSGKYQQLLFCYEAGPTGYSLHRQITALGHDCSVIAPSLIPKRPGEHVKTNHRDAVTLARLHRAGELTTIWVPDLGHEAIRDLVRAREAAMEDLREKRQHLQSFLLRHGQRYPGLRPWTLVHARWLSNLTFEHPAQYLVLREYRQAIEDAEARLERLTQQVTEVVSTWSMASVVEAYQAMRGVAFLTAVTFVAEIGDVRRFETPRQLMAYLGLVPSERSTGEQVRRGSITKAGNPRARRVLIEGAWTYRYPARLSRPLQLRQESLPKVVRAIAWKAQVRLCARYRRLMAAGKRQTLITTAIAREMAAFLWAIGHEVQPRSAA

SEQ ID NO: 335923 - protein, 408 aa, unidentified
MEPHQLHLPIRAGGRAIVGIDIGKRHHAAVAVNHRGEKLASLASFQNTREGVDILQTRVFNPAGTPSQVLFAMEATGHYWMPLYHELVRRGYQGAVLNPIQTNGEARTRIRKTKTDKRDAEGIARFILTGKAKAARIPDEPTLELRILTRRLLQLTQMKGDVERAAQSLSDRIFPEYNDFMSKPFLHSGRTLIKEIGLIPAHIAAQHDAVKDTLRRASRGKLSAAAIDGLLENAAESIGIGYAETVINEELHSSMELIENIEEQINQLDAIIATLMDYRDSPLPSLGIGISLAAAIHAESDPASDFPSARQYAAYARLEPTTFKSGQMEGTRAHISKRGSPHLRRALYMAAFSCYRRHEYFARTYKRFRKKGYTHNSALIIVTRRLALVVWKMLVENRPFAKRPPKKE

SEQ ID NO: 335924 - protein, 405 aa, unidentified
MKPITLYIGLDVHKDSIVIAIAEPGRNGEIRIFGTITNDLQALEKAINRIRKAHPDAILEIAYEAGPCGFGIARRLKQLKVSCLVAAPSLIPKQPGSPFKTDKRDARGLARLLRAGELTGVYIPEPTDEAIRDLCRARTDAVDDHRRCRHRLKGFLLRHGFRYQGKANWSQPHMGYLRELVLPHPAMKTILEEYLQGIDAAHNRIERIEASMITLLENWRLKPAVQALMAFRGFQLVASMITVSELGDIHRFEHPRQLMSYLGLVPTESSSGPHQRPGQHLPLRQLPSTLASDRMCRALRHPSQNQQGTLPSPGGTVRGYQSLELESSESFAHPLYETPEPTAPTQQSQGRRCPGTLRLCVGPAAFTGLLQTVHRNQHPKLTSETGRKEKTKTAFNKKALRADTW

SEQ ID NO: 335925 - protein, 417 aa, unidentified
MSKAPSAASCEEATRKYVCGIDIGSQSCAGCICRPDKSQVGKAMVFANSKDGWKVLLARLSLLDALPSEILIGMEATARYSENLYHELEQRGYQLCLLHPGQTHQFHQRQGLRAKTDRLDAMTIARVLLSGEARAGYIPNELVATYRELVRLHTQLSEEAARYQNQIHALVVVLFPEFTQVFADPCLPAAMSVLKAYPSAQAMAQAKEEALYALLRAHKHPHYGHPTVKKLLTFASTSGSSGRAEAGRSVSLRMLCEQLEQTQKHLERLQTELEQLIATDPAVKGLQQIPEFGTKTIAVLRAELGEVERFARTDQVIAYAGLDVEIKESGLWKGQAKLSKRGSGLLRQTLYLAALRSIHLQSSAFGAYYRRLVARGLKKGSALMAVMRKMLAVAVHLLKHEQQDYDPSKVGVGSLAG

SEQ ID NO: 335926 - protein, 346 aa, unidentified
MVLIGCDFHPSWQQVSWLNRETGECGDQRLVHEAGGVEKFYRQFPAGARIGMEATGNCQWFVQLLGCLGHELWVGDAAKIRASDDRQQKHDKRDARLLLKLLAEERFPRIWVPSAQEKDLRQLLIHRYKLVCIRARVKNGLQHLALNQGLQRKQRLWSRVGQKALRELPLALWASRRREDLLKMMNELDAKIDLLDQAAVEAAEKNEKAKLLMTQPGVGPLTALAFVLTMGDVSRFPRGKQVASYLGLIPREYSSGGHQRLGSISKQGSSFLRMLLVEAAGIAVRCDAEFRKEYLHRCHSKAKGVARVAAARKLAIRLYWMLRTMTKYPEIVRIESSSRVALAGAS

SEQ ID NO: 335927 - protein, 369 aa, unidentified
MAEDKEAFIGIDVAKLRNAVAIADAGRDGEVRFYGEVDASPDSMRRLAAKLAGKYQRLHFCYEAGPTGYGLHRLLTGLGHSCIVVAPSLIPRKPSDRVKTNRRDAVSLARLMRAGELTAVWVPDTAHEAMRDLVRARAAAARDVGTKKRQVSAFLLRHSRLFPRKKNWGARYRCWLQEQSFEHPADQIVLQELLEDVRLGEERRGRIEQAIEEFLPSWGLAPIVEALQALRGIELVTAVTFVVEVGDIARFESPRRLMAYIGLVPGERSTGETVRRGSITKMGNARLRHLLVESAWTYRHPPRIGKAKLAKLERVSPKVREIAWKAQSRLTARYRALTARGKKTTVACTAIARELAAFMWAVAREARPA

SEQ ID NO: 335928 - protein, 391 aa, unidentified
MIFVGIDVAKDKHDCFILNSEGTVLADVFTIANNRIGFETLLSRIQSCSQGESKIKVGLEATGHYSYNLLGFLLDSGLTTYVINPLHTNLYRKSLSLRRTKTDRIDARTIAMMLMSDVDLKSYSNTAYHNEELKSLTRYRFDKVKERAKLKSSVARLVNILFPELEKLVSSLHIAVVYALLSNYPGASYIANANTEELAETLCTASKGRYTKSKTAEIQVAAGVSIGSKMPAKSMELKHTIALIRELDKEISEVESTIDKITSQMDSPIFTIPGIGRHMGAMILAEVGDFSNFASADKLLAYAGLSPSTYQSGQLQNCYAHMEKRGSRYLRYALFNAAKYVCLWCPTFSAYLEKKRSEGKHYNVAISHAAKKLVRLIFAMQRSGKAFLADY

SEQ ID NO: 335929 - protein, 383 aa, unidentified
MRSVALDLAVRKISYCEIESGQVLVRRTVTALSSLKDLLGPGCSPARVAIEACREAWHVHAELTSWGNDVLLVDTTRVRQLGVGAHGRKTDRIDAEILARAVEKGGLPKAHLLSKPRQQLRLELSVRRTLVETRAQYVTTLRGLARTHGVRLASCKTDNFVARLRKMKLDSALQELMEPMAQVLEKIDVDLARAEVRLQRSVEQDPKIQLLMTVPNVSAVVAAVFVSVIDDAHRFRDAHQVGAYLGLVPSEKSSGERRRIGAITKEGNSYARATLMQASWGLIRMGRSDDPLQQWAQAVARRRGKFIAAVALARRLAGILWAMWRDDTAYDAARVGSRSAAGLEQQAQETQFRATAMRHAAQKARQRVRPHERKLEHLKEMNL

SEQ ID NO: 335930 - protein, 399 aa, unidentified
MFVGWDWASTTHDVTVLDDAGVVVDRWAFRHTEQDLVGALDRLARLAEPAALPVIIERASGLVVERLLAAGHPVVPVHPTAFWAARPRWGASGAKSDPGDSYKLADYLRTDGHRLRRLDPPDTGLQELQALVRLREDHVRARTAASNQLGALLEAHWPGPKAVFYRLASPIALAFLTDYPTPQAAARLGQARMASFCRRHSYRGGKTPAQLLARLHSAPTAPVGIPAATLAILVHAQVQLLRTLLGTIAELDAAIATRVAFHPRAQLLASLPGVGTINLAQLLAEVGPVLDRVANAEQAAAECGAAPVTRASGKTSGVYFRWAANRRARKALTAFAHNARMQSPWAGRLYADARARGKRNPHATRIVARAWLRVIWACWHTGTPYDPHAHLAEQRLAAA

SEQ ID NO: 335931 - protein, 412 aa, unidentified
MQALIERCCGLDVHQETVVACLLIGAAGARARKEVRTFRTVRRELEALRDWLTAAGVTHVGMESTGIYWRPVYAVLEGHVELIVGNARHIRNVPGRKTDVKDAEWIADLVRHGLIAKSFVPPAPLRELRDLLRYRRKLIEAQAAERNRLLRLLETANIKLASVMSDVFGVSGRAMLKALIAGSAVPEEIAALAKGQLRKKRAELIEALTGGIVEHHRFLLAMQLGRIEAIEADTAALDARIGERLLPYGAEMALLMTIPGVDWLVAAVIIAEIGTDMSVFLSVHHLAAWAGVCPGSYESAGKQKSGRARKGNVHLRTILVGAAISAARTKGSYLRDKFHRLKARRGALRAALAIAHKIVVAAYHMLAGGMVYRDLGDAYLDQIGERRTVANLKRRLERLGYHVALEPRAEAA

SEQ ID NO: 335932 - protein, 346 aa, unidentified
MGKLPTDLSCVTTVGLDLAKHIFFVHAVDAAGKVVVARELRRRDVAAFFANLPPCLVGIEACGSAHHWGRTLIAQGHDVRLMPPAYVKPYVKRQKNDAADAAAICEAVTRPSMRFVKVREIDNQAVLMRHKAREMLVGQRTQLLNGLRGHLAEIGVIAAQGAGHGRALAALIRQGHEDVPESVRAALLPLVVQLDHLDAAIDDADAAIGQLAKAEPVVRRLMSIPGIGPLTASALVATVGDPSTFTGPREFAAFLGLVPRQHSSGGKPRLGRISKMGNQYLRRLLVVGAHAVLHHRARHSDPLRCWAEKLIATKPFKLVAVALANKLARMAFAIMTTNQRYRGAPA

SEQ ID NO: 335933 - protein, 321 aa, unidentified
MTYVGIDVSKVTFVVTYSSVKTNKTRTFKNTVNGVHEFVQTISASEHNCVLEATSNYSALLVYLLSEAGITISLENPLKIKNFARVMLTVTKTDEIDARLIALYGEKMQPAPYKLRSDAILVLKQKRTVLRQLKKQLVATRNLKGSMEVLPFFDPKCKKTIEKTITFLEKQIKEMEEELASLAQGEYKKQMDLLTSIKGIGVTLAAALIVATGRFSYFDNAKQLTRYLGLSPTYQQSGTSVNVKGHINRNGDSSLRSQLYVAAFSSLRCNTECKACFDRLRSNGKPGKVVVIAVANKLVRQAFAVVTQGKPYVDGFKSEKP

SEQ ID NO: 335934 - protein, 338 aa, unidentified
MRLYCGIDLHATNCWVVILDASFRLVREIKVPNELAAVLAVLQEHRDALEGIAVESTFNWYWLVDGLQDAGYRVHLTNTWAVKKYDGLKYADDRHDARWLAHLLVLGILPEGFIYPKEERPLRDLLRRRAFLVRKKSSMVLSMHGAFECRTGERVKANDLKRWTVEEIEARLEDPTVSLGITCLLKPMQVLDEQIHTIEKVVVKRARLREEFCLLQTVWGIGKVLALTIMYEVGPIARFATVGDFASYCRCVKTDRLSNGKRKGSGNRRNGNPYLSWAFSEVAHYAARFYPEAQRYFQRKRAATNGIIGNRALAHKLARASFYVMRDQVPFDPHRLFA

SEQ ID NO: 335935 - protein, 400 aa, unidentified
MNAVGIDVSKGKSTVAVIQPFGIVIAEPFDVFHTDNGLKELVNFIKSLSGETKVVMEYTGTYFEPVANALHDAGIFVSVVNPLLIDDYDTNRVRKVKTDKLDALKIASYALDKWIKLREYEPAETVRKTLQMMNRQCIKLNRILVMQKNSLIALLDCCFPNANTLFTSPRRESDGHEKWVDFVVKFSHVDSVAKLSLSAFKTKYQNWCKKGRYKYSESKAEQIHAYARTIVCTLPMTDAARKMVSDAAKHLNSTLEALETLHSEMDTLASQLPEYETVMNLYGVGKVFCSQLIAEIGDVTKLKCNKSLVALAGIDPPPDQSGKDDPKSRRISKRGSPALRKTLFLIMTIYLQRQPADEPVYQFLDKKRTEGKPYKVYMIAAAHKFLRIYYARVKEVMPKE

SEQ ID NO: 335936 - protein, 411 aa, unidentified
MQPILESCCGLDVHKSMVMACIAHGALDKPPKFEIRKFSTMTSDLRDLKKWLEEYNVTAVAMESTGIYWKPIFNILEDGFDVVLANAQHIKNVPGRKTDIKDCQWIAQLFRNGLISGSFIPPRDIRELRDLTRTRRKLVEEMASEKNRVQKVLEDANIKLSSVVSKVFGVSSMSMIVLLLEKDELSAKEISKLAKGKLKKKVNQLVKALEGNVTDHHRFLLKQHLAHIDFLVKQIETFDDAIRKKLSPYETQFNDIQSVTGVKDISAASVIAEIGVNMSKFPDEAHLSSWAAICPGNNESAGKKKSGKTRRGNNYLKATLTESAWAASRTKGAALNAVYHIIARRRGKKRALVAVGHRILIEIYRVLKTGKPYQDVGEDIVNERRSKKREQAMIRDLERRGYAVSKVMTTI

SEQ ID NO: 335937 - protein, 374 aa, unidentified
MIVIGADTHKKTHALAAIDAGTGEVRGEREIAADDAGHRLALRWAHDIDPEVVWALEDCRHVSHHLERSLVTAGERVVRVTPRLMGESRRGERQAGKSDQIDARAVARAVLKEGVEKFPPAHLDEQAMEIRLLCDHREDQVAEINRLTNRLRWNLVILDPALEASIPPRKMDFPGQLDRVARRLRKMEPCARVRIAKEQVKAIREISRHSRLLKRELHALVAAHRPQLLAELGCSTITAAILIGQTAGAERFPTDAHFARMAGVAPIPASSGKTDRHRLHRGGNRRINRALHVIAITRGRWDPATKAYLQRKEAEGKNRMEALRCLKRQLARRFHRLLMQPAARAATRPAIPINAAISAPRLTSEQLLGAVRRP

SEQ ID NO: 335938 - protein, 338 aa, unidentified
MLLIGCDFHTRFQQIAMLDSTTGEMRERRLEHPEEARRFYSALPSPARVGMEATGPALWFERMLQECGHELWIGDAAEIRASVVRQQKTDARDARHILDLLVSERFPRIWIPSPAERDTRQLLRHRVKLVRFRTSVQNQLQALAMGEGVCRRKKLWSKAGRKELEGLSLGPWTSRRREDLLGMLDRLHARIEELDQAVKREAESRPAAVRLMQQPGVGPVTALVPPSGMLTIGPVERFRRSKQVVSYLGLNPRESSSGGQQRLGSISKQGNSMLRWLLTEAAQTASKFDPELRRDYLRLQFRRGRGVAKIAIARKLAVRLYWRLREAAQLGAAGSHAG

SEQ ID NO: 335939 - protein, 405 aa, unidentified
MNLEGFAASFRNEEIGPKIRARRRERFVSDDMDSSRDSRGIEVPESPYAAERSAEKESQMQGTTIAVDLAKSVFEVAVSERAGSVSKRHRLSRTQFSRFLAAQAPATVVMEACGTAHYWAREAYARGHRAVLLPPHSVRPYVLRNKTDGADAKGLLEAVRNEAIRPVPVKSVDQHVLAGLHRMRSAWMATRTARLNALRGLLRELGFAIPVGARQVVPFVWALIGDAESGVPDALRPVLAEAAHEIRELEGRVRAVERSLEGLASASPVVARLRTIPGVGLLTATAFVAFVGDAGRFPSGRHLASYLGLTPRESSSGLRRRLGGISKRGDPYLRMLLIHGARSVLCHAKKTTGEPDRLRIWALDRERLRGHNKATVALANKLARIVWAVWRRERGFGDRNSQGAE

SEQ ID NO: 335940 - protein, 339 aa, unidentified
MNYMGIDHHKQYSYITLMDERGEVLRSGKVSNLVGELEKFLNGIDEAKAVIEAGRSSYAMVDVLDEMGVEVIVAHPKEVKAIAKAKIKTDKRDSYILAHLLRTDLIPEVYKRSRENRGYQRVLRQRAFYVGSLTRVKNRIRALLAQQAEEVREEILRVKNLFGEEGMKVLTELVLPEGDKKLLDSLLKTYRHLDARRRETHGLVEKLYLEMPEARLIQTVPGFGVFLSVLVAVEIADVGRFEEEGKLHCYAGVIPSTHSSGDRTYHGRIIRDGNRWLRWAVVEAVWPAVRADFDIRLHYERRKKRKGANMAKVATARRLLTIIYRMLKENRAYIPYKRQ

SEQ ID NO: 335941 - protein, 342 aa, unidentified
MEGLNPTYYAWLDWASQKHDVCVLDLRGQRRAAFTVDHSAAGLTELTRRLRSIASPDGLPVAIERPSGLLVDTLVEAGFPVVPVHPNQLKASRPRYAAARGKSDPGDAYILADLLRTDGHRFRILSSPSDLTRALRLAVRARDDLVATRVALANQLRNHLDHTWPGAAAIFADVDGPIALDFLDHYPSPEHARRLGPRRLERFLARHHYCGRRSAEQLLQRLRRAPIARTGRVEQETGGLVTTSLVALLHPLVDQIKDLDGSIAALLHQHPDGPLVQSFPRTGTINAAQILVELGDQRARFLSPDQLAAEAGVAPVTYASGKHKAVACRFACNKRLRLALTT

SEQ ID NO: 335942 - protein, 309 aa, unidentified
MKRILKIGMDVHTTNYTLCAMEPIIGEDDRVFATIKVTPDYKNILLFIENLKTKLGLNDEYDIQCGYEAGCLGYSLYNQLTAAGVKCVILAPTTMLTPQGVRIKTDMRDAYMIAQCLSYGGYHAVYIPTEDDDSVKEYLRMRNDHKLALKKIKQQINAFCIRHGFCYDGTKWTLKHLKWLKKLEITHELYRETLDEYMASYEEQEAKIERYDKRIEEIAEQTKYHDKVKKLECFLGIKTHTALSLIVETGDFERFAKGNQYASYLGLAPGENSSSDSIHRLGITKAGNSHLRQLLIEASGGIYERKEMV

SEQ ID NO: 335943 - protein, 424 aa, unidentified
MDSTATNPSHPPDVAGEPFRSLTHFGGFDWAMEEHQFAVVDRSGTMLLNLRFKNDAQGWSELRAKIAAYPHLAVAIETSCGPAVERLLELGIIIYPINPKAAERFRDRKSPGGSKSDPLDAWCFADALRTDGHGWRQLRPLDPLTAELRILCRDEIALIEQRTAMILQLRQALHEYYPTALDAFDDWTHAHTWDFVLAFATPDALVKAGKRKWEKFLHTHKLCRPETYQKRLELFAKANEFVSPSLAVTKAKSLLAITLAKQLRTLQGQLDEYRDRINELFNNHPDRDCFGSLPGAGEKIAPRLLSELGNDRARFGSHEELQMYAGSAPVTRQSGKRSIAKMRHACNKTLRTTLHLWADLSRPRCAWAQAYYQQKRDQGVAHAAALRCLGQRWLKILWKMWQTKTTYDEALHTRNQTKHGSWVL

SEQ ID NO: 335944 - protein, 408 aa, unidentified
MKTTYILGIDTAKHKVRAALSGADERFLFEKDLAASAAGLRELLLSLKQFVAEGPQLLVLIEATGVLHLNWAAALAKAGYAVAVINPLMARRLYTVENSLRDNKTDPIDARGLCAIGALHGEKLLAHYRFGLKPEQFALQRLQTVRKALRNALTNLKKTYQSVLELSFPELGQLLEVDGVGIRALLGQAPTPAAIARVRLSTLEKNWMLRPKAAALKALAADSLADRELSVASAPALQAILQALGAMEARLRSLDQQIETLADRSVDPKTKALVESMPGFGPTTAAKVLAYLPSEVLHSGSNRKVAARLQAFMGNDPRLKESGQWKGQTKMSKRGVETLRTAFFQAAFSAAQHDPELKAFYQRKRAEGKTHHVALSHLMRILTRRLVAVLRSGKPYQSNPNLPLKNAA

SEQ ID NO: 335945 - protein, 405 aa, unidentified
MMYNAVGIDVSKGKSTIAVLQPGGTVVRKPFDVKHSSSDLKSLVDYISSLEGDTKAVLECTGRYHEPVVRLLSAAGIFVSAVNPHLIRNFGNNTIRKVKSDPADSRKIARYTLDNWASLRQYSGMDTTREQLKTLNAQMDFFTKQKISAQTNLISLLDMTYPGVNDLFDCPTRSDGSQKWVDYAASFWHVDCVRKIGLTAFTERYQSFCRRHGYNYQPAKPKELFDAAKELVAVFPKEKEYKNLVLMGIRQLNTTAASVEQIRHEMDRLASTLPEYGTVMSMRGVGSTLGPQLIAEIGDITRFTHREALTAFAGVDPGVNQSGQFNARSNRASKCGPPRLRKALFLVMDCLLKTKPVDDPVYQFLDKKRSEGKPYHVFMTAGANKFLRIYYGKVKAYLASQAKSE

SEQ ID NO: 335946 - protein, 313 aa, unidentified
MTAPRFVGIDVGKDHLDVHIRPDGTAFRAAADPAGVAGIVARVLDARPERVVLEATGGYEAAVVAALAAAGLPVVVVNPRQVRRFAEAAGHLAKTDTLDAAVLAHFAEAIRPEVRPLPDADTRALAALVARRRQLTDMRTAELNRLALAPAAVARGIRDHIAWLDRQLGRLDEELAAAIRASPAWRVKDDLLRGVPGVGPVVSRTLLGELPELGTLSRKRVAALVGVAPVARDSGRRSGERAIAGGRAGVRSGLYMAILSAVRYNPPIRAFYRRLRAAGKAIKVAQVAAMRKLLTILNAMVRDNRGWDPATVA

SEQ ID NO: 335947 - protein, 463 aa, unidentified
MNNFYLGGDVSKGYSDFVLINEDKDIIEPNLQLDDNFTGHKELEKILGDFFSQIPDAVIYAGVESTGGYENNWFNLLKKLSERGMNIFVARVNPKGTNHNSQAELNRITTDKISARNIAEYLINHKKKINYDKTDLFFSVRKQWKFIRMLVKQKTQLYNQLESLLYIANPELLCFCKHGYPQWLLKVLMRYPTAKHLSRAKRAVLESIPYLSSQRAEEMIGNANSSIASSTDNTTAKLIKNIVEQITYMEKTYKLQVDSLSEIFPLADEVQILKSFKGIDDYSAMGLLMNIGSIDNFRSAKKIASQFGLHPVYKKSGDGSWGMHMSKQGSAEVRHILYNSTTCAMVHNPLIKEIYAHYLNRGFNKMSAIGACMHKVLRIVFGMLKNKEKFNPGKDRALREKSSIKKPKSVDSDKSRRYQPLDIKAPISRRQAKKRKEIILATISNPDEIKKEEPEKSHNEFNH

SEQ ID NO: 335948 - protein, 412 aa, unidentified
MEVMYPRCAGLDVHKETVVACVRIVEGGDVSRSVRTFATTTASLIELGEWLEVNGCTHVAMEATGVYWKPVWQVLVDSSLELVLANAAQVKNVPGRKSDVNDATWVSELLAHGLVRASFVPEPAIQQLRGLLRTRKQLVREKASHVQRLQKTLEEANIKIESVLSDVMGCSGRAMIQALIDGESDPAKLAALAHWKVRASAATLRAALHGRIKRHHRFLLRLHLQQVDALDAAIAEIDREADAGLACFRDAVKQLSTIPGVSELSAQVILSEIGTDMGRFATAAHLRSWAGLCPRNDESAGKRRSTRLRRGAPWLRAVLVQCAWAAARTKATYLHAQFVRLRGRRGPKKAICAVAASILTAAYHMLKDGTFYEDLGAVHFDRRRPETQARRLVKRLAELGFSVELKPAAAVS

SEQ ID NO: 335949 - protein, 351 aa, unidentified
MIIIGVDYHPSSQQIAFMDQETGECGERELNHSDGEAERFYRELKERGVGVRVGMEATGHARWFERLLAELGFELWIGDPAEIKTKRVRKQKTDREDARLMLRLLLENRFPRIWVPSPENRDLRQLLWHRHRLVQMRTRIMNQLQAVAMNEGYRWKKKLFGQQGRALLEKLSLAPWASRRRQELLELLDQLNPKIAELTAAVEREANKRPEVVRLMTHPGVGPITGVAYVLVIGTPDRFPCGKKIGSYTGLIPCEDSSAGRQRLGHISKQGNTLLRFLLVEAAQAAARCNPDWRRRYVHLMMRREKRIAKVAMARKLSVRLYWMWRNNWQYSQLVEFGSNAGKLGIGHGVK

SEQ ID NO: 335950 - protein, 584 aa, unidentified
MENMKKKKRNCLVGVGIDTSRYGHVVKFMSSDLSVAAPGLIVTECRDGYDKLEKQLNKLSRSNPGTYFKIRIDAAGQYSANLEDFLRGLPLPIDVSVGEPTRNKNYRQAHYPKTKTDDVEGWAMARFSVIEQPPATPKLPDEFFALCEITSRLQGAVKDSTRAINRLHNLLSRVFPELENIVSNVAAGWVLALLQKYPSSAKIARARLKTLESIPYAKLDKVKAIHEEAKRSVGALHGPLIESMLQELVGQVQSSKKVEKRYENLLIEAYRQLPDSGHKQVETIIGIGEITAAILVSKIISIDRFEMPKNLVGYFGVFPNLKSSGINADGTPKPAPKGHMSCKGNDLVRRYLWTAAFSAIQHNPAIRALFNRLRKRGTRGDVAMGHCMRKLLHLVFAVWKTDKPFDKNHYPWETKSNAVETSIEQSTRKENAVGPKMDTNSKEVASQEVTTATVNLDRQLPSVKQQSAKTQVAKSTNSVDYAYLRSQVTIEQVLKHIDHFENLRGTKIQRRGPCPIHKSTSKTSKSFSVNLTKNVFQCFNQKCGAHGNTLDFWAAIHGQTIHQAAIDIAKTFGLSIAVTEKRNP

SEQ ID NO: 335951 - protein, 454 aa, unidentified
MAQRKKRSKKFQVTDLPPHLQHVNLNAAGIDIGSEQHWVAVPEGRDKVSVREFAAFTTDLLALADWLAQCGITTVAMEATGVYWIPLFELLERRGFEVKLVDARRVKNVPGRKSDVLDCQWLQQLHTYGLLAGAFRPADQLCILRGYMRQREMLVQASSMHIQHMQKALQQMNLLLHNVVSDITGVTGMKILKAIIAGERDPKTLARYRDARCRHSAATIAKSLVGNYREEHLFALTQAVSLYETYQAKIADCEAAVARHLSSQPQRTDDEPPASQKRSQAKDFMRAEVDMRAQLFKLTGVDLFSIAGLGADTLLTLAGEVGFDMTPWKSEKHFTSWLAVCPGTKKSGGKILTSKTRRSSNRAAAAFRIAASTLLRSKTALGAFYRRLRARIGAPAAITATARKIAVLYYSLLKNGTTYVETGQAAYEQKYQQRRLKGMQKQALAMGYQLVPIN

SEQ ID NO: 335952 - protein, 353 aa, unidentified
MGIVVALDVHRKQITYKTLDRETGEVKRGRIAPAARADVREWLARFAGCEAEFALEGTTGWRFVVEEIERAGHRAHLADPAETAAKRGRKRRAKTDNADCDLQLKLLLSGELPESWIPPAHLLELRTRVRVRKTLVDQRTAWQQRLQAQLFHQGVPAGLRPRTRAGREALARVELSPAGRALVLLALRMIETIDRELAPLDRELRAYARRQPGCRALMARLYGVGPVSATAILAELGDARRFARSDDAVRHSGLDVTVYQSDSKRAAGHLSHEGPEVLRWALFEAAQQAARAGSPDHRYYRQVAGRIDHNRACLSVARKLCRRAYHILRELGDEALAAVECDPQAEEAVAAAA

SEQ ID NO: 335953 - protein, 343 aa, unidentified
MQFTSIGIDLGKTTFHLVALDARGKVLIRKKFSRWQLLAYTANLQHSLIGMEACAGAHFIGAALRDQGHDVRLIPAQFVKPFVKTNKNDFIDAEAIAEAVTRENMRFVPIKTDDQLDLQALHRVRDRLVQRRTALINQIRGFMLERGITVAKGRTNLRNHMPAVLEDADQNLTPRLRNLLDHLWQEWKQLQADIEGISEQIEVICVEDAACKRLRQIPGVGPLVATATVAAIGHGAAFRKGREFAAWLGLVPRQHSTGGNARLFGISKRGNSYLRRMFVHGARAVLLRVKYDTGGFGRWVRQLEARTARNKVIVAIANKLARIAWAVLSKDVDYQPPAVCANS

SEQ ID NO: 335954 - protein, 346 aa, unidentified
MNLTMIGLDIAKSVFQVHGTDNAGKAQLKRKLRRSELIPFFEKQAACTVIIEACGAGHHWARLLSELGHEVKLIPPEAARPFVKKGKKNDAADAAALCAAASRPDVKFVPIKSREQQGVLALHAARSLLVKQQTMVANAMRGLATEFGFTVAQGIGKLDELTAAVAADDSLPAEARQAIAELHRHCNALGARIATFEGQIIDHARKDAVARLLATIPGVGPITASLIAATVGDNIGAFKSARHFAAWLGLVPRQHSTGGKTRLGRITKMGNADIRRLLVLGATSMIYRAAQWNSAAGTWIVGVLSRRPARLATVALANKMARIAWAVITRKEVYCPKGRATVKAAA

SEQ ID NO: 335955 - protein, 479 aa, unidentified
MERNRSRIERFRQVRNEIRGSQEYLIVGIDVAKDKHHAFFGTATGKTLLRRLVFENDKVGFEKLLTHVEAIRVQHALSKVVFGFEPTGNYHKPLGMYLVKRGFNVVLVSGVAVKRNRELLDGRWDKHDTKCAANIADLISQGKCLYYESPSATISDLRDLLSLRKRFKKEEHSLKMRIRNGLIAKHFPELDRYYGVCESENLAIVRWCLDPRKIANMEFNRFCQLVTSRERGTAQRRRLSAIWNMACGSIGCLTGEASEFEARALVEKLKQVRQLILETEKLIGAVSRRFREYEYLLTIPGFGPYVSSRVIATISDPYRFENNSQVLKMAGYDLSANRSGKNSDKAIPVISKRGNADLRYALYQAALVASTRDRNFIVYYTNMLRGREREKGIKTKMRVKLAAKLRIIAWTLMKKKESFNPDYLNIKQKSYPFGERARARTLRHMTSGGTILGLSLNLVTWIRDDWWPPQCGMPDKRND

SEQ ID NO: 335956 - protein, 397 aa, unidentified
MDSLCACCPFGVGFLSRCLPVGVLGCGVARKRREHIDPNQACPLRLRFADRKGSVMSVMIGIDPHKGSHTAVVVDRDERVIDEIRVRSSTNQVVDLREWASAYDERCWAVESARGLGYLLSQQLVAAGERVIDVPAMMASRVRLLGSGKSQKTDPNDARSVAIAALRHSGLAMVRTDDHARVLGLLAKRHRDVARLKNMVACRLHALLMELTAGGLGSEMTVSKAISLLEQVDVTDEMTRQRMVIATELIDDIGRLDSQMRASKKRIRVAVAASGTSLCDIRGIGPIGAAIILGSVGDIARFPTAGHFASYNATAPIEASSGDKRRHRLNPRGNRKLNHVLHIAAVSQLRYPSEGRDYYQRKIAEGKTTKEAIRALKRRISDVVYRCLVADAGRIIS

SEQ ID NO: 335957 - protein, 332 aa, unidentified
MTAVSTLGIDLAKNTFSVHGVDAQGVVTVRRTVSRAKLGELVARLPPCLIGMEACSGAHEWARRFSEAGHTAKLMAPKFVTPYRKSGKNDGNDAEAICEAVGRPNMRFVPIKSVQQQCDLSLHRVRLGFVEERTATLNRIRGLIAEFGYVVPLGTERLRREVRDLLEQLPARAASCVRDLLEHAERLRSKALEYEREIRSSLQHNELALRAHTRPGIGPITASALVATVGNGHDFRNGRQFSAWLGLVPRQYSTGGKTRLGHITKRGDPYLRTLLVMGARSVLQRAYRETDPLSRWALALQQRRGYHRACVAIAAKNARVAWALLAKGAAAA

SEQ ID NO: 335958 - protein, 393 aa, unidentified
MICVGIDVAKDKHDCFILSSEGEILADVFTIPNNAEGFNRLLQTIRRCTRPEDKIKVGLEATGHYSYNILGFLLDKGLDTYVINPLHTNLYRKSLSLRKTKTDRVDARTIAAMLMSDVDLKSYTDTAYHNEELKSLTRYRFDKVRERAKLKQSVSRLVTILFPELEKLVSSLHSASVYALLSEFPGAKQISSTHMTHLKAVLKNASQGRYGQEMAETIRNAARSSVGSVMPAKSLELQHTIRLIRELDAEIEDIETAIQIIMDEMQSPITTIPGMGVRMGAVILAEIGDFSRFDSPDKILAYAGMSPSTYQSGQLSLSGAYSHMEKRGSRYLRYALYNATKHVCHWDPTFAAYLAKKRAEGKHYNVALSHAAKKLVRLIFAMEKSQRPYCAAA

SEQ ID NO: 335959 - protein, 416 aa, unidentified
MNEQTLWVGVDVGRYFHAWCAIDSTGEVVWERRRVVNTTAAMRRALEQLRGFARGRALRFGVEEPGGNACALVRVLTQAEETVHLAQPLRVHRFHLALGQPRKSDPYDAQVIAQFLRQNPAHLPLVRTGTVETQALRVLSRRLDALGKDLRRCLSRLRATLAEYAPEWLVCSVFSDWSSEAALSTLERYGRVSKLRRTPLGRLANALARWTHGRFGAEHAQALAQAFVEVSLPADLEEAYAQVLNSLVAQIRALLAEKQRLLALVAAQGQAIPAMTTLQAELGYGVETSAIIVSEVGEAADFRSEPAFATYCGVTPLKRKSGTSQGSSRLSRFTNKRLLRAIYQTTVCVVRCDERSRDYYQRKLAGRSDARSKTTALLALARHRTRRLYKLLRQVGVASSEAACCEVAPQLTKLAA

SEQ ID NO: 335960 - protein, 339 aa, unidentified
MRLYAGFDLHSSNTYLGIVDEDGKRVFKKKLSNDREVILSTLAPYKDNMAGIVVESTYNWYWLVDTLTEEGYKVHLANTTKIQKYSGLKYADDQHDAFWLAEMLRLGILPEGYIYPKEDRPIRDLLRKRSHLVRLRTSLILSLQNILSRNNGIKLKANAVKALTIDHVTPYLAGNEDLALAGKVSKESIDFFTLQIKSLESVVGDRVDLREPYTKLLTEPGIGKILGLTIMLETGPINRFADVGNFVSYCRKVSTAWISNEKQKGKGNRKCGNKYLAWAFSEAAELARRFDKDARAYYNRKAQKTNRMVAHNALAHKLARAAYYIMRDGVSFVPEKCFG

SEQ ID NO: 335961 - protein, 389 aa, unidentified
MYFIGIDISKYKHDCCIISAADQKVVSKVTIKNNKAGFNELLTIIHSLANPADIRIGFESTAHYALNLELFLENSLLTFMEVNPVLISEYKKSKTLRRTKTDSVDCESIARWLMTVEYKPHSKGFYHAYSLKSLTRLRDKLIRQRSFYLVKITNVLDHTFPEFKPFFNERLSKTALYLLENYGSAEKMARMNSASYEKLRSVSRGKFSPQQFLRLKELAVNTVGVNNSIFDVELNSLLSLYKSLVKEIDTIEKEINQLIEEVHPHYMSVPGIGPLSAAVIYSEYGDISNFTNPGQMLAFAGIEPGINESGTESHGGKMVKRGSSQLRYTLINCCLPLIRFDMTFATYYAKKRGEGKPHRVAITHVAKKLIRVIYALESQDIDFNAQELR

SEQ ID NO: 335962 - protein, 418 aa, unidentified
MDVVVERCAGLDVHRDDVVATVRVPGSGRRRWDQQTRTFRATLGGLADLAAWLAEADVTLVGMEATGVYWKTVFQALEDRFECWLLNAHHLRNVPGRKTDVKDSEWICQLVQHGLVRPSFVPPPEIRRLRDLTRLRKAQTNERGRSIQRLEKVLQDAGIKLSSVASTTYSKSARAMLEALLCGVTDPEQLAELSKARMRLKIPQLREALQSRFQIEHHGVMVAQLLAHIDTLDAAIQNLTERIEVALTPHAQIVELLCTIPGVQAHAAQVLIAECGLDMTRFPTVAHFASWAGACPGHHESAGRRRSGRTRPGPRWLTDQLTECARAAVRTKGTYLAAHYAQLRGRRGEPKAIGAIRHDLLVAYYHVVRDRVPFRELGPDWQRKRYSPEHRARRLQRQLEALGYSVTLEQTTPAEQAA

SEQ ID NO: 335963 - protein, 331 aa, unidentified
MQISHFVGIDISKETLDAALYPARDRKTDFLHFANSTKGLGEMMSWLKSRGVKSSELLICAEHTGIYTNTLIAFAHKKGIALSLNSPLDIKRSIGLARGKNDAVDAARIAEFAYTRRDKLRLYEKPSEGIIKLQYLLTERRQYVRQRTAIINLHSAMGQYETSAGRSRNESAINHTEKLIKKVEEQMHTVISEDPAIKRNFDLVHSVKGIGLINAINTIVYTNNFKSFESPRKYACYIGVAPFDYTSGTSIRGKTQVSKICRTQQKAELSMAARSAIVHDPGLRRYYQRKMKEKGGDKSAHGIVINAIKFKLILRMFAVVRAGEPYRVLNY

SEQ ID NO: 335964 - protein, 373 aa, unidentified
MEERTKVHVGLDVHKDSITVATAEAVGREKARLIGKVAHDVPKLLKVLARIGAVEELHIVYEAGPTGYGLQRALAARGYVCEVIAPSKTPRQAGNRVKTDARDGMELAEYSRAGKLAPVWIPDPADEAIRDLARAREDAVNSRRTARQQLKGFLLRHDRRYGGKTSWCGAHDHWLARQSFEARAAQTAFTEYWQAVKSCDERVERLTKALQGSIAGWRFEPVVNALQALRGVAAVTAIGLVAEIGDLSRFEHPRKLMGYLGLVPSEHSSGEHTSRGSITKTGNGHARRLLVEAAWNYRFTARVGKEIHARQEGLSEAVRTLAWKGQLRLTGRFAALQKRGVQANKVCVAVARELAGFVWAIGMQAQRERGTAA

SEQ ID NO: 335965 - protein, 354 aa, unidentified
MKDFSAIGIDTSKAHFAVSGADAGGREVWREGGTPARIMMKLAALPPTLIGIEACQGAHALARELVAMGHDARIVPPQLAKPFVGRNKHDAADARAICRAVREPDTTFVPIKSEAEQADAMLVGHRRALHERRTEIGNRIRGYAGEHGLKAPQGVRHVPALLGRLLAREDLPAHARLVVEDLADEWERLGPRIAAAEAQLVKAARTKPECRRLMEVPSVGPVVAWRTVLAVGDPRRFRTGRAFAAWLGLTPRNHTTANKQRLGAITRAGDMALRADLVCAATSLLQQVKRRGAQACGGGRLVAWAAQILPRKKFKEAAVALANRVARILWKLLASGARYDRDHGPALEPLEAAA

SEQ ID NO: 335966 - protein, 459 aa, unidentified
MPGRQKTRGRTAGRLSTINPEAAGLDVGATFHVVAVPADRDEQPVRTFRTFSGDLHQLADWLTAVGITTVAMESTGVYWIPVFEVLEARGFEVLLVNARDVKHVPGRKTDVNDAQWLQQLHQHGLLRGSFRPRDGVVQLRAYLRHRERLVDYAAAHIQHMQKALMQMNVQLHHVVTDITGVTGMRIIRAIVSGAHAPEALAQLRDARCAASPETIREALTGNYRREHVFALRHALELYDVHQAKIAECDAEVEGVLRTLNDARVTPEAPLPAVRHAKSRNEPHFDARPALYTLLGADLTQIHGFGPYTVLRLIAECGDDMSKWPTAKHFTSWLSLAPGNKISGGRVLSSKTRRSANRAAVLLRIAAVNIGRTQTALGAFYRRLAARTGKAKAVTATARKLAILFYKALRFGMAYVDPGASYYEERYRERVLHNLHRRARHFGFTLVADAAAGAALDGVS

SEQ ID NO: 335967 - protein, 334 aa, unidentified
MQNITLIGIDLGKHSFHIHCQDKSGKALLRKKFTRTKLMQFLATCPPSVVVMEACAGAHFMARCISDFGHETKLISPQFVRPFVKSNKNDFVDAEAICEAASRPSMRFVQPRTETQQAMRALHRVRESLIRDKVKTTNQIHGFLLEFGISLPIGDAVIKRLSLVLAEHEIPEYLSRLLVRLHTHYFYLVEQIAELESELSQSINADDTAQRIMTIPGVGPITASLLSSQLGDGKQFSCSRDFAASTGLVPRQYSTGGKSTLLGISKRGDKNLRRLLVQCARSFMMQLERQHGKLAEWVREQLNKKHSNVVACALANKLARIAWAITTQKKEYQA

SEQ ID NO: 335968 - protein, 518 aa, unidentified
MRLSGLPDLQTSCKPVARARRVKRRPREKSAEWGNLPEAMLRICPGYRPADGGGNPEPGQGALSAAPGKRAQSGIISRRRCCASVRATGPATSWKPVARARRVKRRPREKSAEWDIFPEAMLRTCPGLYDYSVRKNRPVLSDGGPDAVSGLRLSRLFRRSFAPDRRSFSCDKPDSIMDRLSPVTRICKVGFTMENELHFIGIDVAKAKLDVDILRPDGRHRCKKFDNTLSGHEALVRWLRGHDVNRAHVCMESTSTYMEDAAAHLSDAGYTVSIINPALSKAFAQSEGLRSKTDKVDARMLAHFCREKRPSAWEAPHPTERALKALVLRHQALTEMQTQEKNRRETAPEVQLASIDILLGCLSAELARIEKQIKDLTDNDPDMKRRRKLLNSIPGIGEKTAAVLLAYTGLRLKFGTARQFAAYAGLTPVQHESGSSVMRASRMSKAGPVQLRKALYMPALSALYHTAWGKAFRKRLEESGKRAKVIIGAMMRKLAQVAYGVLKSGKAFDASQHELLIA

SEQ ID NO: 335969 - protein, 351 aa, unidentified
MSRQSTTAAIATVGIDIGKNTFHLIGLDQRGAIVLRLKVSRAQLGQRLANIPRCLIGMEVCCGAHHIARQLQALGHDVRLMPAQYVKPFLKGHKNDYRDAEAIAEAVQRPTMNFVAIKTPEQMDLLALHRVRSRLVGQRTAAINQIRAFLIERGITVRQGPVALRGALAEILSSNSEVLSPRIIQVITDLAQDWRRLDERIASVSGEIEALAEQDAACQRLMTVPGIGPTISSAVVAAIGNGGGFKRGRDFGAWLGLVPKQESTGDRTILGKISKRGNKYLRTLFVQAAHVVLVRRPKAAMQGLWRWIEQASKRLHRNMLAIALANKLARIAWAVLAGGRDYRARVIANAA

SEQ ID NO: 335970 - protein, 335 aa, unidentified
MRNESTTNARHKISRSRTGYQRVIGVDVAKNNLDLCDSQGKLTKRIDNDVQSIQAKLLDRIDPDSATLILCESTASYHLLMTDMAHDSSIDVAIVNPRQVRDFAKGHGWLEKTDTIDAAMICRFGQDVPVHLAVRRSEQQKHHTAMVHRRASLLKMQAQERSRLLHTADKETRKLLKQMLRNIENQLNRVDKRLSEILRELAKQEPKVQILKSHPGVGEVTVNVLLTSLPELGQLNRKEIAKLVGVSPMARQSGTKDGKRMVRGGRQSVRCALYMAALSARQYDERLKAFYTRLRKQGKPYKLAMIACVRKLLSTLNQMVRNQETFDASKFASMV

SEQ ID NO: 335971 - protein, 369 aa, unidentified
MKKGITHVAMDDSKRRIVVGILRAGATEPELREIPNEPRLIRRLFERLKREGPVRACYEAGPAGYDLYRQLTALGVPCQVMAPSLTPRKPGERIKTNRRDAAKLVRLFRAGELTPICVPAEDQEAVRDVLRCREDLQEDLLRWRHRLVKFLFRHGRVYREGKHWRRGHWAWLREQRFADPVLARTFHESLLMVEHLLARLADLEREIEVLAAAAPYREPVGWLRCFRGIDTLSAMTLLVEVGDFQRFRHPRELMAFLGLVPSESSTGERERRGSITKAGNIHARRILVEAAWHYRHPPRLRGKLAARSLGQPPEVCAQAWRAQQRLHRRYRHLVGRGKRAPVAVVALARELVGFLWAAMTQAPGLRQAA

SEQ ID NO: 335972 - protein, 399 aa, unidentified
MLAVGIDISKSKSVAAILNQDGSMHTSPFEFHHTQPELDAFIKYILNNNQSATILMENTGHYHYPVLKAFREAGLPVCMVNAYQIKKFGDMDLRKAKTDKKDAVRIARYALEKSYSLVPYTSMEQKYEDLRFLARQYNQRMLTLKTNKVFLLNLLDETMPGITNILPLTTRTPETSLSVLFINRFKSYDRIKKMGKSRFLDAFEKIARKSRNRQTKTYGLAIYEAALRNITTRGENEYTLAAQDQCLELVCESQKAADSIILKMQTLAETLPEYAVLRSMAGVGDRLGPLILAEIGDIRRFHSGKALNAYAGNDAPPYQSGTFESHNRHISKRGNAALRKYCFEVMQALKLTRPQDDPVYLFLLKKEQEGKPYNVAKMAGVNKFLRIYYARAMETLKQQ

SEQ ID NO: 335973 - protein, 420 aa, unidentified
MLAESEDDEQIIARVAALDIGKAELVCCVRVPAPRGKRLQEVSTHSTMTRSLIELANHLVELGIERVVMEATSDYWKPVFYLLEAHGLDPWLVNARDVKHLPGRPKTDVLDAVWLCKLAERQMLRPSFVPPPPIRRLRDLTRYRIDLIGARTAEKNRIEKLLEDACIKLSVVASDIFGVSGRAMMAALIAGERDPKVLAQLARSRMRTKIDRLEEAFNGHFGDHHAFLLARMLGRIDGIDADIIALDEQIEAALAPFAAAAARLDEIPGIGPIAAAIIIAEIGTDMTRFPTAGNLCSWAKFSPGINSSAGKTKGSGSTGHGNRYLARVLGEAAVVAGRTDTFLGERYRRIARRRGKKRAIVAVGRSILVIVWHLLADDDARFTDLGTDHFTRHANPDTKKRNYIRQLQALGYTVTLTPAA

SEQ ID NO: 335974 - protein, 366 aa, unidentified
MTSVPSAAGLIHLGMDTSVNEIVVAVLRPGEEVPVVDRIPGDEESVRRLIGRFPDRRLLSACYEAGPGGYELHRLLTSMGVACDVVAPSLIPKGSPDRVKTDKRDSVRLALTHRAGLLTPVRVPSPAEEAVRDLVRARGDLLDDRKRMQQRLNAMLLRHGRVWRGGKKWSYAHRAWVDRQVFDEPALAEAFALYRGGLEAREAELAAAGARLAAWAGREPLAGPVTRLGGYRGIAQLTGLTLAAEVVDWRRFASARAFMGFAGLIPTGYSSGSRTRRGHITKAGPEGVRTALTEAAWACRYRPAIGATLRRRQAGLQPETLARSWKAQQRLHAKYAKMTARGKPPGVAVVAVARELAGFVWAEMTS

SEQ ID NO: 335975 - protein, 342 aa, unidentified
MKSLSVVGVDLAKLVFQAHGASAQGREIFSRRVRREGLLPLMRDLAPTVVAMEACGGAHYWARRFREMGHEVRLIAPQYVKPFVKTNKNDAADAEAIAEAAVRQNMRFVPVKTVQQQYIQSLHRIRQGLMVSRVALSNETRGLLAEYGVIMAKGHRGFVQGITQLIAGSSTSPDLIEPMREEAQALLSRYLELQRRIEHYDEKLKQLAASQEPCKRLMQIRGVGPLTATAMIAAVGDARMFKNGRQMAAWMGLVPRQSSSGGKQLLLGISKRGDRYLRTLLIHGARASLCRAVRQPTRVSTWATAVADRRGLNKAAVALANKNARMMWAILARNEEYRMPAQ

SEQ ID NO: 335976 - protein, 383 aa, unidentified
MAQTYVESPPLPVSSEWSKTERKEGTAAMKNQAIKYLAMDVHQATVVACVRDEGGAIVMRATVPTEAQAILALVRGAGPRVHVVFEEGTQAQWLHDLLEPHVERVVVCNVRGKSEVTNKNDRIDADQLSERLRLGSLKTVYHGATSMLTLKELVRNYNNLVEDTTRVMLRIKALFRARAIPTPGTSVYRAAQRKAWLDRLTTPGARFRAESLFKQLDLLLELRPKAKAAMIANARKQPGWKPLRSIPFLGDVRVAQLMAIMATPHRFRTKRNLWPYSGLAVVTRSSSDQEFAGGKLRRRTKAPQTRGLNRNHNPMLKSIFKGAATAAAAKAGPFKDIYQACVARGTKPDLAKVTLARKIASIALRLWKKGELWDSKKLTLQTT

SEQ ID NO: 335977 - protein, 347 aa, unidentified
MSNTNIVTIGIDLGKNTFHVVGLDTTGAITLRKKRSRNQLDQSLANVPRCLIGMEACAGAHHLGRKLEKFGHQIRLLPAQYVKPYLKGHKNDFRDAEAIAEAVQRPTMRFVPVKSAEQLDLQALHRVRSRLVTQRTAVINQIRGFLLERGLPVRQGAAALRLALPQILSTSSESLSPRVVRLIQDLAEDWRYLDRRVALVTKEINEIAEQDAHCRRLMSAPGVGPIISSAMIAAIGTGDAFQKGRDFAAWLGLVPKQISTGDRTILGRISRRGNRYLRTLFIQGARAVLLQRQTWARHGFGAWLEAASKRLHSNVLVVALAAKLARMAWSILAKGRDYEASFLGHAA

SEQ ID NO: 335978 - protein, 330 aa, unidentified
MSQNNITNSNLNTIYAGVDVAKATLELHLGGVIYNLANETKDHTRILKLLAGAEKAQPGTKVHVILEATGGYEAALVCALHEAGQPVSVIQPSRVRHFAYAKNQRAKSDPIDARILSQFGEAIRPAPTAAPSTAQIHLGGLVTRRAQLVETRIGELNRAAHYSDKMLCRQSRGLLALLDRQIAACDKAIAAQIAADETMKARAQRVRQVAGVGPVVAAVLQAGIPELGTLTPCEAAALAGLAPYDCDSGPRKGSRRIWGGRAPVRCALYMAAMTAIRHDPILKAFYIKLRTAGKKPMVALTAVMRKLVVLLNHLLKNPEFQLASARAGTN

SEQ ID NO: 335979 - protein, 363 aa, unidentified
MKKRSKALWEKEAGKDKPALTMGLDLGDRHSRYCLLNQEGEVVEEGRMQSTEAAFRRHFEGEPRQRVALECGTHSPWVSRLLQSLGHQVLVANPRKLPAITASQSKNDRNDAEQLARLAASDPKLLSPLRHRSLERQQDLNLIQARATLVRARTMIVNALRGLAKSHGARLPACSTASLPMRVGAAIPAALAEVACPLLEQVALLNQQIGAMDRQIEKLSDKYPEIGVLRTAPGVGPLVAAAYVLTLDRPDAAANRSAGAFLGLRPGQEQSGDSDPQLRISKAGDSYLRALLVQSAHYILGRFGPDSALRRWGLKLAQSGGQRGKKRAIIAVARKLAVLLHSMWRSGQSFQPFPQPATATTAA

SEQ ID NO: 335980 - protein, 408 aa, unidentified
MADKMAGIDVHKKVLMVVVIDARTPESKPERRRFATMPGELRRLSTWLQEQGVEEAVMESTAQYWRSVWLELEPHMCLHLAQAFSNRAPRGRKHDFKDAERLVRRLIGKELILSFVPDGEQRIWRNLTRMKLQLTRDRVRIQSQIECLLEEMRIKLSIVVSDLLGSSGLRILHALANGETDAKSLALLGDDRLKCTEEQLVEALTGRSHPMHGQMLGLQLERLRLLDEQIAKLNSLIAQAMKPHQDAVIRLAEVPGLGIDSAQQVIAEVGVTASTFPSAAEFTSWVGTCPGKEESAEENSSSRSAKGNKYMRRVLNQAAHAAARSKGTHFQAVFRRLLPRLGYQSAVWAIAHRLCRLVWKILHQGIRYIEQGIESEPKLLIYRAKYLAKQLRKFGYNVQITPANGAPA

SEQ ID NO: 335981 - protein, 352 aa, unidentified
MIVLGADTHKSSHTIAAVDAATGQLLGEKTIVVGARGFGSLVVWARGLAGERAWALEDCRHVSGALERFLIGRGERVVRVSTRLMATSRRSGRERGKSDSIDSIAVARAALREGLDELPTAQLDGPELDLRLLVDHRERLVRQRVGLNNTLQWHLHDLWPELVLPGGALFSRKWSSRIGRRLARAEQTMRVRIARDELRRQRELTQAIKVLEVEIAALVAQVAPQLLTEPGFGPLTAAKLVGEIAGADRFASDAKLARAAGLAPIPVSSGRTHRHRLDRGGNRQVNAAIHRVAVTRARCHPETRDYVARKTAEGKTHREAIRCLKRHLARRIWQLLRAPHPGQGTPPSPSTS

SEQ ID NO: 335982 - protein, 457 aa, unidentified
MQSFYMGSDVSKGYADFVILDSRKQQVMKNFQLDDTFEGQSHLYDILSQFLAAHSGANLFAAVESTGGYENNWYNTLVKFQSTLNIQTSRLNPLGVMHNSKADLKRNNTDKISAQSIAEYLITHPEKVTYQQENQMASLRKQWGFIKMLTKQSTQLLNQLESLLYTANTELLAYCKDGTPGWVLKLLLKYPTAARLSKARVPAVSQIPYVTSERAQKLVISAKRSVASASDRITEKLVSATAKQILNLKKTIDEQAELMIKECPIPEVYILKTFTGISDSSAIGLILEIQAIERFETVKKLASFFGIHPIYKTSGDGRGGFRMSKKERKEPRKILFMVALTAIRSNPLIRKIYLERTEKGMEKMAAIGLCMHKILRIIYGMLKHGKPFDPQIDLNNRQRSFKEKPVGKRDKSRRFQDYDSKAPISRRQNKKRLERKPSHSVNDTKFGIDAPVPELVS

SEQ ID NO: 335983 - protein, 355 aa, unidentified
MTITKYIGMDVHKESISIAVMNAAGKLVMECVIETKGSMLLQFIDGLRGDVHVTFEEGTWAAWLYDLLKPHVSEVVVCNPRKNALLKDGSKSDRIDARKLAELLRGNHLKPVYHGEQGLRTLKELARSYLNISKDVTRVMNRLKALYRSWGIACAGTKVYAPRHRSEWLGKISEAGVQRRAEHCYQQLDALRLLHQQVRRDLLLESKKHQAWRLLGLIPGIGPIRAALLIALIQTPHRFRTKRQLWTYSGLGLETHDSAQYRVVEGQLQRSKKPVTLRGLNQDHNHDLKDIFKGAATRVSSSSGPLHDFYEHLLAQGRKPTMAQLTLARKIAAITLIVWKKEVRFDASYLKSQAA

SEQ ID NO: 335984 - protein, 409 aa, unidentified
MEVLRPRCAAIDVGKDIVVAAVRVQEGTAIQRGCRTFGTKRRELLALAEWFSGFGITHVVMEATGSYWQSIWRVLDGALDLTLANPAQIKNLPGRKSDVNDATWMADLHAHGLIRGSFVPPQEITALRELTRTRKQFVREIARHTLRIQKLLDVAGLKITGPISEILGVSGRRIIKALIRGETNAERLADLVDPHIRASRDTLVEALQGELTPQQRRLLKMHLKLVESLESAVAQIDGDIAKAVRPFRPVIEHLIEVPGLSDISAPALVAEIGVDMSRFPTAKHLVSWARLCPRLDESAGKIRSRRTLKSAAWVKTLVVQAAWCAVRKRDSYLRAQFLRLRARMGPKKAIVAVAASMLTAVYHMLRDDAPYRDLGFAYFQQADRARLAKRAVARLQQLGYTVTLTTPAA

SEQ ID NO: 335985 - protein, 416 aa, unidentified
MPSAHGTVAGIDVHKKILVVVILRSTDPDHDLATGRFGTTHCGLEQLAAFLRQHGVTEVAMESTTQYWRGVWMALEGEFQLTLAQARSTRAVHGRKRDLADARRIAKRLLANDLTVSYVPPPEQRDWRLLSRARVAMQESVSRLHSQIEVLLEQAQIKLSSVVSDILGLSGRRILHALVDGIGDPEQLAALAHHRIRASKEELRDALWGRLTASQRLVLKLYLAQIEQIEKDMAALEKRLALEQSAEQDPIVRLCGHPGISALAAQQIIAEVGPRAAAFPSAGDLASWTGGCPGSNESAGVSTSDRSPKGNRMLRRVMSQVAWAAIAAKGSEPQRRYRKWLPRLGPQKAAWAVAHYILRVVWHILHDGVPYRPPDQTSLDRCSVLRKAKRVIAELRKLGYSVTVTAPSAQAEPVTG

SEQ ID NO: 335986 - protein, 339 aa, unidentified
MNFKRISIDTSKSVFTLHGIDEQDRAVLRRDLGRAAMERFLAKLEPTEIALEACGGSHHWGRRLTAMGHRVRLLPPQYVKPFVKRGKNDRNDAAAISEAAGRPGMASVPIRSAENQAAGLVIGTRDLLVRQRTQTINALRGHAAEFGVVAAKGTAQVAGLMARVLSAEAGVPEAAQRMLCVLADQVAHLDEQIAALDAQVREAVKADAAACRLCQVPGIGPLGAMTLSLMVEASQFRSGRHFAAWVGLVPRQRSSGGKTRLGGISRAGNERLRQLLVVGAMAVIRHVKPGSRNASGWLLGLLERRPRKLVAVALANKMARVVWAMLARGEAYRGQPVVG

SEQ ID NO: 335987 - protein, 463 aa, unidentified
MKRKAKSKATPSGMALVHPNAAAIDIGATMHVAAVGPDRASDPVRSFGTFTADLRRLADWFAKCGVTTVVMESTSVYWIPIYELLEERGFEVFLVNARDAKHVPGRKTDVSDAQWLQRLHSYGLLRASFRPKGEIIELRAYLRQRERLLDTAASHIQHMQKAMTEMNLQLHHVVSDITGATGMRIIRAIIAGERDPAVLASMRDTRCHSSAEVIEQALTGHYRAEHLFVLEQALALYDVYQQKVAACDIRIESVLKQLSSVRRGKGDAKAEGSGSPPRRQSRQPNAPAFDVGEALHSLLGKDLTRIHGIGPYLALKLVSECGDDLSAWPSAKHFTSWLCLAPGNKISGGKVLSSRTRRSGSRAASLLRLAAVTIGRTETALGAFYRRLSARVGKAKAVTATARKIAVLFYNALRHGMEYVDPGASYYETRYRERVVKNLHRRAKAFGFVLQAADMSAAEQAVS

SEQ ID NO: 335988 - protein, 402 aa, unidentified
MKKSIPEDVIHHAAAALDVVQTGSHYGAYIGLDVHKETIAVAVALPGRNEPEYRGEIANKPKVLEKWLDRLNEEFGGVLLLFCYEAGPCGYGLYRWLTEAGHDCQVVAPSLISKKAGERIKTDRRDALKLARLLRSGELTAVWVPDTDQEAMRDLTRARDDMKSQERKARQQLNAFVLRHGHHWPRGKTRWTAAHYNWLESIRFEQPWLQIVLQEYIDAVKAATQRVADLTDQLLRALPSWSLAPVVDALVALRGIDKLAATVLLAELGDISRFDSPRQLMAYLGLVPIEHSSGGRRRQGAITLTGNGHARRMLVESAWSYRFPARQTMHLKRKAVNASDEARVIAWRAQKRLCGRYRQLSQAGKNIKLVCVAIARELVGFIWDIVRHEMPRLAQQRTAVAG

SEQ ID NO: 335989 - protein, 415 aa, unidentified
MGWLVEEQDGQPVPRRLAGIDLGIASRHSVRVLEADGRVVGRSSCVPTVESLSAVEQAALAGAPEGTRLAVVFEPTGPAWMPIAVFFARRGHAVFRVSSAKAADLRRFLRRHAKSNGIDAETLARMPLADPRGLQCLELPGPDAAALDRRVRACGRLTEAASKHKVRIKDLVRQLMPMTPLAGDLGKADLAVLERYADPRSLLAAGAAELTRLITTVSGHQQGTGRARQWLTAATAAVELYGDHPAVPYDELAAEVATEIRLLRAIGAELAAHAAARELHYRQVDPGQLARSLPGFAEISAPVLVAAMGRPGRFRDGTRFKSYVGLAPRASETGETDRKGQPMSKAGPSQLRSAFVRAADTARRQDPQLARIYYQQMTERGATHLKACCVCIGGSRTGPCRHARRREGSDEGGPR

SEQ ID NO: 335990 - protein, 416 aa, unidentified
MKKGQDTRGYERYMALDIHREYILVGAWNEEKDWVLTPRRVSIEKFPEWAKKNIRPGDIVVLETTTNVWTIYDIVAPLASRVLVANAAEVGEIANARVKTDKEDINRLLKLVVGGIVPEVWVPPVAVRELRAFVSYRHRLVKTSTMIRNRLQSLLHKHNLMLSEAGLLDQAWWEAQKNISSLEKMQIRQELSLLQEVEKLKDAVDEELQRQSTSTMWGKQAVQIMQLPGVGFVVAMTVLSAIGDISRFENAKQLVGYAGIGAGVHDSGKTHKEKKITKKGRRELRWAMVEAAWRAVRMSPFWKAEYEKHLERMRKPNQAIVVVARKLLVAIWHVLSKEETDIHASEDDLAYKMLLLSWSLNEDVRMGLTYKQFAKYALMKLGVETDVTRFMRKNVPRRLAPRDEVLARMTELGLSA

SEQ ID NO: 335991 - protein, 401 aa, unidentified
MKKFNPGQHRIETASALEVVTDARQQERYAAYVGLDVHKETIAVALAEPGRTEPVYRGEIANQPKSIEKLIAKLSEAFEGGLLQFCYEAGPCGYVLYRQILACGHDCQVVAPSRIPRTPGERIKTDRRDALKLARLLRAGDLTAVWVPDRDQEMMRDLSRARDDMKGQERKARQQLNAFVLRHGHHWPRGKSRWSPTHYNWLESLRFEQPWQQVVLQEYIDATKAASARVAQLSDHLMQALPEWSLAPVVDSLIALRGVDKLAAIVLLAELGDISRFDSPRELMAFLGLVPSEHSSGARRRQGGITLTGNGHARRMLIESAWSYRFAARQTMHLKRKAVNASEPAKAIAWAAQKRLCARYRTLTRAGKNTKVACVAVARELAGFIWDIVRHEMPRLGLQEG

SEQ ID NO: 335992 - protein, 446 aa, unidentified
MKSSTTNREGNALEVVHPHAAGIDIGSREHYVAAGAEVQTFGCATADLFEMGRWLKRCGVTTVAMESTGVYWVPVARILEDDFGIPVVLVDPRYVRSVPGRKTDVKDCQWLQRLHTYGLLTGVFRSPLEIEPLKAYYRHRKSLVEGAAQHVLRMQKALEVMNVQLHKVLSDITGVTGMRIVRAIVEGERDPVALARHRHPLVKSPEDQIAKALEGKFLTEQVFLLAQALEAYDFVHRQIERCDGQIEAYMRTLKARPAQPSPPEAALRRPTRRKNQAHFDLRAELTRITGVDLTRIPGIDALTSQTLIAEVGVDVSAFPTEKHFVSWLALCPNHAITGGRIRRRKSRPSANRVATAFRIAAQTLHKSKTALGAFYRRMRARLGAPKAITAAARKLAATVYRLLKYGEAFVERGQEAYELQYKDRVLANLRRSAKHLGFQLVAEPVS

SEQ ID NO: 335993 - protein, 409 aa, unidentified
MDQMLERVAGLDVHKKTVTVCVRVPGARGARRQEVRTFGTTVPELLALREWLETQGVTHAAMESTGVYWKPVFYILEEAVTCLLANAAHIARVPGRKTDVQDCVWIAQLVEHGLVRGSFVPPAPIRDLRDLTRARKALSHDRTRAANRLHKVLEDAGIKLASVANDVLGVSGRAMLEALVGGTTDPTVLADLARGKLRAKLPALRHALTGRFRSHHAFLVGQLLAQLDFLEEAMAQVSAQIDEVIAPFQAELERLDTIPGVNRRTAEVFVAEVGVDMRQFPTAKHLASWAGLCPGNRESAGKHKSGTTRKGDRWLRTALVEAALSASRATDSALAARYRRVMRHRGHKKAVIAVAHAILTSAYHVLARQIPYHDLGPDYYDHRHAERVRRRAIAALERQGYRVTLQPAA

SEQ ID NO: 335994 - protein, 319 aa, unidentified
MAQNDLVVAGIDVAKDKVDVCIRTLSLRRTFASTAEGRRELASWLRRQKVGKAVMEASGGYERDWAKALRGAKIEVRIVDPKRVRSFAQSAGRLAKNDTIDAEMIAWFAETFDEARSQAYDATREQLHQMVNARQALKGMQAKLESQGEHALPAAVQRMHARILKTITVELVKFEAAIAAMIQATPRFTELAEIIESVPGIGRTTSAALIAAMPELGQANNKIVAALLGVAPYDDDSGRRRGERHIKGGRRRTRNVFYMACLGAATQHNPVLKAFYDRLVAKGKEKKVALIACMRKLISILNIMIERRQKWDASRYALS

SEQ ID NO: 335995 - protein, 400 aa, unidentified
MISVGIDVSKEKSTVCILKPYGEIVASPFEVMHTESELKNLIQMIQRLDGEIRIVMEATGIYHLPMLSALQDQNFFVTVINPFEMKEYASRGLRRVKTDKQDSITIANYGIDNWYRLENHQGSDDVYSELKLLGRQYCHYMELHVKALLELTHMLDYTMPGVKKEFHSWNESSGKDKLSDFVERYWHFDNITAMTKEDFIEDYISWAAEKKYHQNRSKAATLYDLASDGIPTLPANTPSTKMLVLEAVRVLREIDSTLLKIITRMKELAKTLPEYETVRAMGGVGDVLAPKLIAEIGDIRRFHSGKALIAFAGIDAPPYESGQFVGTNRKISKRGSKLLRKIGYETMRVLKTHKAPEDDAVYRFILKKEAEGKSKRQAKIAGLNKFLRIYYARVSEVYKA

SEQ ID NO: 335996 - protein, 370 aa, unidentified
MTSIIYVGMDVHTTNYTLCCYQMENDTIFAATTMEPDYKNIVKYLTRVEQNIGGDCHFLCGYEAGSLGYSLYHQLTGEGVDCTILAPSTMAITKKKRIKTDRRDASNIAKCLAYNTYSSVYVPTAQDDSIKEYIRMRNDAKDTVKKLKQQTLAFCTRHGKRFTESRNYWTHKHLAWLKKLEFDDAILQETFNEYLTLYHQAVDKINTFDKRIDEFAVSENYEEKVKKLKCFIGIKNHTALATIVETGDFTRFPTAQHYASYLGLVPGEDSSGGSIQRTGITKAGNSHVRKLMVEAAQCYSRGKIGVKTKTIRDKQAGNEPKVIAYADRANERLKRKCYRIMFNSKRNIAVTAVARELACFVWGMMTDNTA

SEQ ID NO: 335997 - protein, 415 aa, unidentified
MQSFLFVGVDTHKNSHTAAVFSNYFNSLATITFANSFSGFSDFLTKLEKLSDGKAMIFGLEDSQGLGNFLAEFLIKKGLYVVDIDPVTTDRGRRRTAHKDKSDDRDAILIAKTLISKKDSLHKVIINKTSLALRELVKSRELLIGESTRIKNRLHVAIFNQYMEVSAIFPDLFSKCALAFFARYPDPSKLKGESLDNLTVFLKSNSRGRHGNKKAIDILSLVNTDITPDILTDARSSIIKKHIRRLISIQEELKEISDMLSRLVLKSPYSTLTSVPGIDIVTAAKIISQVIDIGRFSSSSKLAKFIGVAPVEKSSGRKRRYQKSKHGKRYLYSAIFFIALNHISRTRDGRDNNPKSRAYYLKKVSEGKTKKEAITCLARRLCDVIYAIMRDGSIYSPSKVKSSGDIKVLETVASL

SEQ ID NO: 335998 - protein, 428 aa, unidentified
MDERNRIRLEQFRQLRKEVRGSSEYLIVGIDVAKDEHHAFFETATGKMLFRRLIFGNTMAGFEKLLEYAETVKAKHALKKVVFGLEPTANYHKPLAEYLIKCGHNIVLVSGVAARRNRESLDGRWDKHDDKDAANIADLISQGKCLYYDYAPIALRDLRDLLSLKKRLKKQEQGTKTRIRNHLLAQYFPEFDKYFEKGDAVSLAVVKWCLKPSKIWDMEFEEFVRMVAPRVRRANQMKMLRDIWDLAIESIGCEAGEELYFGARFMIEDLEQIRGSIKKVDEHIEEVCVGFPEYNYLRSIPGFGPDVASKVMAAIGDPFRFDNGRQVLKLAGFDLNAARSGKTSDRAVPVISKRGKASLRYALYQAALIASVKNKHFLVYFANKLSGREREKGIKTKTRVKLAAKMLIIAWTLMKKREPFDLDHLNLN

SEQ ID NO: 335999 - protein, 328 aa, unidentified
MAFIGIDVSKEKLDVLWLRQSAPQKVKTRVFRNHRPLLKEVVQWLLKQTGEAPEDTHVVMEATSIYHENLAYALHAAGFRVYVANPARVKEFARSEGVLNKTDKKDSLVLALYAQEKHARLTLWQPEAKEIRQLRSLMARLEALEKDLQREKNRHEKALATDTSERVMASIEDMIAALEAEIRKLKDDIDNHINGHPILKNDRELLKSIPGVAEVCSIQLLALLRSRDFTSARECAAFIGVVPVQVESGSSIRRQARISKAGRSSIRQKLYMAAVTACQYNPDIRALKRRMQAKGKAGMAIVVAAMRKLVHIAFGVLKHQQGYIPQAS

SEQ ID NO: 336000 - protein, 314 aa, unidentified
MEAIRTAVAGVDVHKKVLAITVMVGEANESPKIERFECSTFTDDLTAMGLKFLELGVTDIAMESTGVYWKPLYNVWAPMGLKITLGNASHVKNVPGRKTDMNDSHWLAQLHRFGLIRSSFIPKPEFQKLRLLSRHRTNLVDDLARVKNRVQKVLEDGNVKLGSVVSDVFGVGAIQVLRLIAEGVKDPDRLRDAIKTKIKKKEELRKSLTNCLTGEHCFLIQELMHQFNSINERLQSIENQIIVQMEPYTHLLEELKKIPGISDVLAMGILAEATNDMSNFADERKFAAWAGVASGNNESAGKKKDPKQGGGTLT

SEQ ID NO: 336001 - protein, 352 aa, unidentified
MQQFIGCDAHKKYSVFRAINEEGRLGPAVRISHDREQFRSYLAQLPPAASIAVESSGHWYWLIEEMERAGHQPRLTNASEAKRRMGKTKKTDKLDAGGLAILLRNGTLPEVWIPPADLRDQRELLRLRMFLSALRTQVKNRIHGTLGRYNLQIEVADLFGVEGRLRLGQRLDELPEETRRSVARELATQDFLELQMEEIEKSLHHVMQAIPEANLLRTLPAVGPILSAVIALEIGDVGRFPAAENLASYAGLVPRVHSSGGRTRMGQVGGDVNRTLKWAFVEAANLIVMQQRRLADTHVLRLYRRIRARKNHQKAAVAVARHLAEAAYWVLRKREAYREPPARKPAVASTHG

SEQ ID NO: 336002 - protein, 382 aa, unidentified
MRQTQETLRQENTTSDSILYIAFELSNSTWKLAIGDGTKTRYVTVSARELEQLEDEIDKSKRHFGLKGTVQVKSCYEAGRDGFWIHRYLLSKGINNLIVDSSSIEVNRRKRRAKSDRLDAGNLLRLLMRYHGGERQVWKVVNVPSVEDEDARNLHRELETLVDERRRYRNRMKALFIQHGIEMRNPSRRDFQKVVTSLRTWDGKRLPKDMKARVVREYKRLRMVEGHIKLLKKEREQRIKTEKTSSSRLVAQLRELHGIGASSSWVFVMEFFGWRKFRNRKEVGALAGLAPSPYASGGYQREQGISKAGSVRVRSMAVEISWCWLRFQPQSKLSKWFNERFASGGSRMRRIGIVAMARKLLVDLWLYLEHGVIPEGALLRGK

SEQ ID NO: 336003 - protein, 333 aa, unidentified
MNKITKKQWFIGIDISMDKIDVAFLQQNFPETFKEKQFKNSLQGFDAMMDWMIRRKVNLDESLFCMEHTGTHGLLLFVWLNQKGIDYCVESGLQIKRSLGLVRGKNDQVDARRIASYAFMQKSKIKLYTIPAKNLIQIKQLLAYRDQLVRIQTGLKNSLKSHQQYHQVTGLDFVINDIQQQIKQLTDRTDQLEHQIFQIIQTDPQLKKNFEMATSVVGIGPIIAAFMLVTTNNFSSFEDGRKYACFAGIAPFEESSGKYRGRAHVSHLANKKMKSLFSNGANSARNWDPEMKKYYARKEKEGKAHKAIMTAISCKLVYRVFAVVNRQTPFVKL

SEQ ID NO: 336004 - protein, 408 aa, unidentified
MYYVGIDIAKYRHEASVIDAAGQALANSVSFANTQEGCEKVLALLQRLGIGREDVTVGMEATGHYWLSVYAYLTEREYTVRVINPIQSDAFRKMYIRQTKTDSKDSFLIAQIMRFGQYSATQLSQENIIALRQLSRYRLALVDICGDCKRRVIALLDQVFPEYESLFSDMFGTTSRELLLRCQTPEDMLEIPTGELVALLAKASKGHFSDEKAKQIQRLAEGTFGIAYAKDAFSFQIKQLIEQICFSEKQLEQLEEQIASLLHQTNTVISTIPGVGDTLGAVILSEIGDIHRFDSPAKLVAFAGLDVKVNQSGEFTGTKNTISKRGSPYLRRAIWLAASRAAFCDPILSAYYQSLKARGKHHLTAIGAVSRKLCNILFVILRENRPYEPEHPRRPAIQLSEPELPALR

SEQ ID NO: 336005 - protein, 454 aa, unidentified
MAKKREKRECKAVVLEPDAAGIDIGAEEIYVAVPPDRDEESVRMFSSFTCDLHALADWLQRCGIRTVAMESTGVYWIPLFQILEARGLEVYLVNAHYLKSVPGRKSDVSDCQWIQYLHSVGLLRASFRPTLDICAVRSLWRHRGSLLQMASEHILHMQKSLSQMNLQIHHVLSDITGASGQAILDAILAGERNPVQLAQLCNCRVKSPREKVAKALEGDYRPEHVFTLKQSLDGYRYYQKMIAELDREIQRLMQTLPSAVENGQEIPRRTKHSAFQRQGNDPGFDLRGQLYRIAGVDLTDIPGVSAVTAQVILTEIGPDLRRFRHASAFASWLGLCPENRVSGGKVLSCKTRKVKSRAALALRLGANSLSRAKGYFGEFFRRMRAKLGTAQAITATAHKIARVLYHVLRTKEPYAETVFHKCDEHARRRAEMRLRKQAALLGFQIIPVPADSAT

SEQ ID NO: 336006 - protein, 455 aa, unidentified
MPRTKRSRMEMSPVHANAAAIDIGATLHVAAVGPDRDPEPVRSFGTFTGDLHRLADWFKQCGVSTVAMESTGVYWIPVFEILEQLGFTVVLVNARDAKHVPGRKTDVTDAQWLQRLHEYGLLRASFRPESRIAALRDYLRQRERLLDYAASHIQHMQKALMQMNLQLHHVVSDITGATGMRIIRAVVAGERDPVTLAALRDQRCKESAETIRQALVGNDREEHIFALAQAVELYDTYLAKVDDCDKRIEAVLTELKATCPPPPAPLPAPRYRTQQPNALSFPAREVLHQILGVDLTQIHGLGPYLALKLVGECGTDLSAWPSAKHFTSWLCLAPSNKISGGKVLSSRTRRSSNRASALLRLAAVTVGRTETALGAFYRRLAGRVGKAKAVTATARKIAVLFYNTLRHGMGYADPGASYYEDRYRQRVVANLKRRAKSLGYALQLTELTAAGTEVS

SEQ ID NO: 336007 - protein, 346 aa, unidentified
MEEISRIGMDTSKHVFQVHGVNAAGEVVLRRRFRRGEVARFFAGLHPVVVGMEACGGSHYWARVLGDLGHEVKLLAAQLVKPYVKRNKNDAADAEAICEAMGRASMRFVAVKTAEQQASLMLLGLRNRLVRERTRLGNRIRGYAGEFGYVASLGTSKIDALLARLEADEELPELAREMFAVLGRQYATNEVELGDLERRLKRWQRTNEPARRVAMIPGIGPVTSAHLVIKAPDPGAFASGRDFAAWLGLTPKDHSTAGRRRLGGITRAGDETLRSLLVLGATAVIQQVRRGKGPAWPWLHALVARKQPKLAAIALANKMARIAWKLLVSGQSFAPARLQGAVAKAS

SEQ ID NO: 336008 - protein, 405 aa, unidentified
MNKLKRVCGLDVHKDTIFACVKKGKYQSEVKQFSTTTQGLSDMSHWMQGEQVYKVAIESTGIYWMPIWRALEKDFELLLVNPYFIKQMPGRKSDVQDAQWIATLLEKKLLRGSVVPEKTIRVLRAYLRRYAQLQGQMTRCLQQMEKQLSQCNIKIASLSSTIGSKTVIDIVESISKGNYAPEQLLALVHGRILNKHGAKVKQSLEGIIEEHDVFLLRQIYEDYLHIERQCNELLAQAQKIAEVHYKEQLDLLQTIPGIKQLSAVIILAELGGNIKLFETAQQLTGWCGLRPKNDESAGKIKSRSITKGNKYLRRILVQTAWAASRTKTCYLKTKFEQLAVRKSSKKALIAIARKQLVIIWNVLAKQEEYKEPQIKLSAEQISRKQKYYQEKLSKLQQQQVLEKAG

SEQ ID NO: 336009 - protein, 346 aa, unidentified
MNVKTLGIDLAKETFGLHGVDALGRVAVHRRVTRKQLLVFLVKLEPCLVGMEACGSAHYWAREIEKLGHTVKLMSPQFVIPYRKGNKNDPNDAEAICEAVSRPSMRFVPIKNEEQQDLQALHRVREQLVKNRTALANQIRGLLRERGVVVAQASARLRAALPVILEDQSNRLSGLMRELLGEMAERLRMLDDRLRQYDQRIARICQQDERCRRLVKVEGVGPLVATAVVAAIGNARQFTNGRELSAWLGLVPREHSSGQRTMLLGISKRGNRYLRTLLIHGARAATRVAERKRDARSIWLSRLKLRGGANAAAGALANKNARVMWALLARGDSYRVRPAMDGAAAA

SEQ ID NO: 336010 - protein, 367 aa, unidentified
MKQFNKIFVGMDVHKESIDITLAEQGGELRRFGSVGGDRLSLLKAVRKLTSRGGALVFVYEAGPCGFWIYREITALGHACLVVSPSLIPQRAGDHVKTDRRDSENLARLARAGELTGVHVPDARDEAVRDLVRARDDAVIAQRRARQQLKALLLRNEIRYVGKTSWTAAHCRWLAELKLAQPAQQIAFQEYVDAITVATARIARFEQAMRAEVGIWRFAPAVAALQAMRGIQFVHAMTLVAELGDLTRFASARQLMAYLGLVPSEDSSGQRHRQGSITKAGNAYARRALVEAAWAYRHPARLTRIIALRQGTLPKQACDIAWKAQLRLCAKYRRLRARRVLETKIIVALARELSGFVWAIGQSVKPL

SEQ ID NO: 336011 - protein, 406 aa, unidentified
MNTLRVAVDVGSRFHQVAIGDDSGKLLDEFQIDHGRVGFEQFFARVSHHAATDVRVAMEGYNGWARPLDQQVLARGWRLYDVNNLKLARYKEIFPAPAKSDAIDSRRMLELFGFDEQRPLGRDVLQEVTTSTTTQRELKYLTRRRRQQVADRTTRLIRLQGDLLAVCPDLLALTRSVNNLWFLRLLTCRDRLTALPRLHAKTVTSIRGIGAKTSPRILAWQKTATFSGSIDLVDTDIVADAAAIVALNEQIKAIEMRIEATALECPMASRLRTMPGFGVIGTAELSGEIGSLYRFDTEASLALYLGMAPLDHSSGLRHRGKRPKCVNARCQAALMTSTVRHIACVPESRAYYDRKCAQGKRHNQAVRALGRHLVRVIWRYAYRRPRLSSEGRITLENTRGMFRFHR

SEQ ID NO: 336012 - protein, 368 aa, unidentified
MPFSVTRKSDDRVVIAVDPHKASWTAAAVDGSLQPVATVRVPVSRDGYRALRRFAHSWPHARWAIEGAAGLGAPLTTLLRTDGIEVIDVPAKLAARVRVLSSGHARKNDDADALSVGIAALTSPALRTAEIDAATTALRAVVEHRDDLVKTRTQTVNRLHVVLTRLVPAGARRQLSADHAAALLRGVRPRDAAAKTLRALAMDLISDVRQLDRRIAKAANDIQMAISGSGTTLTQLHGLGVLTAGKILGRVSDVRRFRSAAAFASYTGTAPIEASSGDVVRHRLSRAGDRQLNFCLHVMAITQVRQDTPGRAYYLGKRSEGKSHNEAMRCLKRRLSDLVYRQLIHDADAQKAGPGGHSGAALSSRAAG

SEQ ID NO: 336013 - protein, 409 aa, unidentified
MQECNVAAGEMETASSQVALSAASGQGAAKQYAAYIGLDVHKETIAVAVAEPGRGEPSYRGEIANTPKKVERLIAKLSEAYDGGLLLFCYEAGPCGYGLYRQLIASGHDCQVVAPSRIPKQAGERIKTDRRDALKLARLLRSGDLTAVWVPDREQERMRDLSRARDDLKAQERKARQQLNAFLLRHGQHWPKGKSRWTPAHENWLAALKLDDPWQQVVLQTYIDAERAAGERVAQLNDQLMRALPEWSLAPVVDSLVALRGIDKLAAIVLLAELGDISRFDAPRQLMAFLGLVPSEHSSGGRRRQGAITLTGNSHARRMLIESAWSYRFPARQTKHLKAKAASASPEAKRIAWKAQVRLCGRYRTLTRAGKNTKLVCVAIARELAGFLWDIVRQEMPRLMPAQTPATSA

SEQ ID NO: 336014 - protein, 326 aa, unidentified
MKQIVIVGVDVSKATLDLFIKPLNKAYRVTNNKAGYKQWLEEITLVLADSKVLVVMEHTGLYSNRFEQFLQTMLIDYCKVAALQIKRSLGVTRGKNDKIDAERIADYGWMRRDILSADQPPVLKLTELKQLLSLRAKLVKDRSGYITRLKEMKATGCCDRFQNRIHEKTIKFLSEQIDLIEDQMKMLIQSNAEIKSTCELLRTIKGIGWIIAAYMISCTGNFKRFSNARKFNCYAGLAPFKYESGSSIRGRSRVSHLANKEVKSMLNLAAYCAIRCDQEMKQYYQKRVLEGKRKMSCVNIIRSKLVARMFAVVKRQTPYQERLIAA

SEQ ID NO: 336015 - protein, 354 aa, unidentified
MNTIYIGVDFHARQQTICYLTTEGGEVVFHQLQHHDKTAVRNFYAQFTGRVIVGLEAMGYSPWFEQLLAELGHEVWLGNAKEIRRRARSRHKNDRRDAELILDLMLHDHFPRLYVLALQSREVLRMLRYRQKLIKMRTMVKNSLQALALQSGLANRSHLFSKAGKRELQTAPMSPAMQWQRDEWLQLLEPLNERLLQTMLWLKQSADDDRVSRLRTHPGIGLLTALCLVHALEPVNRFRNSRHVVGYAGMDPLEDSSAERIRFGAISKAGPRVLRYLLVEAAHSSVKSDADLKRFYKRLAERRGRAKAKTAVARKLLVRAYIMLRDEIDYAEFQRRAVAARLARQNGGTPCPSS

SEQ ID NO: 336016 - protein, 373 aa, unidentified
MATIARLGIDTSKSLFQLHGVDEREEAVLRKQVRRGQFLGFVAKLAPTKIGVEACGASHYWARQLQALGHEVVLLPPQHVKPYVGRNKNDKIDAAAICEAMSRPRVRERFVAIKSAEQSAAQMLLGTRDGLLHRRTQLSNTIRGHAAEFGLVTPKGLAHIKPLLERITADQTVPALAKELFATLGEEFTELGPRIARLDKKLKAFQRSDELCRRLVEVPTIGPVIASSMVVKIGNPAAFRSGRRCAAWLGLTPKDHSTAGKMRHGGITRAGDEGLRAALVSGATAYIQQVKRGRTRPSPWLAQLLKRKPEKLAAVALANKTARIAWKLMVSGERYDRARAEAREGLGAAQHGGSAPSPSRNHIAAHGTTAMTA

SEQ ID NO: 336017 - protein, 358 aa, unidentified
MSQPSVTHPTCIGIDLGDSHSHLFVLDLASGEVLEEGRIPCTPAAFRRRFAGQPPARIAIEVGCHSPWVSRLLAEAGHEVVVANTRKLRLIYENDSKSDRVDAQYLARLAAADPQLLHPVRHRGAKAQADRAVLVARDQAVQCRTRLVNCVRGLVKSLGHRLPKCDPEGFHNRVRETIPAELLPAVEPLLDVLAILQQKIRALDKVIERLCQEQYSETARLRQIKGVGPVSALNFVLTLEDPTRFTKSRTVGSYLGLRPGRKSSGRGDPELHITKAGDTMLRRHLVNCAQYILGPFGEDSDLRRWGLKLAGHGAKSAKKRAIIAVARKLAVLLHRLWLSGATYEPLRNSREPAHATAQ

SEQ ID NO: 336018 - protein, 387 aa, unidentified
MKTNQIKPIHDRNTSTPSPGQSNPAVAAAPAPPAPLRHVFMLGLDVDLRNVATAIQCDRGAIALAQKFSRAQLLAWVQKQTAAGHEVHTVYEACGFGYTLHHALVAAGAHSLVTTPMRLSPERRRKNDRLDARALCVRLSRHREGHAHELKPIRIPSAAEQQRRELGRQREFFKRERGRLENHGRALRIEFEHETLPAGWAGPRKWKQIAPQCSEFVRGQLEPVVLQIRACQARMQELTARIQATVAQEKIPTGLGALTVALLEGEVCDWKRFRHRKAIGSYTGCCPSEHSTGGVQRFGHIDRHGNKHVRVLLVEAVWRLLRWQPDWHARVKYLQKLKHGASLKKKIAVALARQLAIDLWRWRTGRCTAAQLGWTVESAKDEAGTAQ

SEQ ID NO: 336019 - protein, 350 aa, unidentified
MVADEVDFVVGVDTHRDQHTLVVVASPSGGELGAAVVEARASGYEAALALAGERAPGRRAWAIEGTGSYGKGLARFLAERGERVLEVERPRRKQPVGRGKSDRLDALRAARALLGEARPAVPRAAGGREAVRMLLATRASAVAARTSALNQLRALLLSCPEPLRAELSGLTRARLIACCRSLDASGVDDLELHGALQALRLVAARVHALTIEARELEHELLRLSRQLIPALLAERGVGPITAAQIFVSWSHHGRFASEAAFAHHAGAAPIPASSGITTRHRLDRGGDRKLNYALHQIVISRRKNDPNTIAYIQRRRAEGKTDRDTIRSLKRYLARHLYRTLEATPRPLDS

SEQ ID NO: 336020 - protein, 386 aa, unidentified
MNIILYIGMDVHSRTYTLCTYRAGEDQARNIQKMEAGVGSIIKYLDGVRNQYFGCEVEFQCGYEAGCLGYELYRQLTAKGIKCTILAPSTIPVTAGKKRIKTDARDAVNIAKCLANGSYSPVAVPTAQDERVKEYLRMREDFVDSQRRVKQRILAFCLRKGKRFTGTRNNWTDAHRKWLRSLVLPGLDQETLNEYLLELEHLEEKISRIDKRIEEIAAAPQYAKSVGKLRCFLGIENYTALSTIVEISDFHRFKTAKSFSAFLGLIPGEHTSDGSGSRLPITKAGNSHLRKLLVEAAQCYSHGKAGYKSKKLLAKQGGNPQDVIAYADRANTRLRNKYYKMVLHREKNANVAKTAIARELACFIWGMMTDHRPLLLEPDDLTFVDT

SEQ ID NO: 336021 - protein, 419 aa, unidentified
MSFKIFKFNCCGLDVHKTWIYACIGITDSNNRTEYKQARFSSFTKGLNELCDWLAKYNCKDVCMESTGKYWIPVFNILEQHSFWVTLSHPKYTKPMKGNKTDRKDAKWICDLYMCGMVKPSFIPPADIRELRDLVRYRFKLTCMITGEKNRAQNCLTVSNLKLDDVFSDVFGKSSRSITEHILQRPGEKFDIAPFVDSRCKTPITEIQAAVDGAISKEQVVKLRQCLDHIDELNKHISEVEQEILRLSDKYEAALNLIRTVPGFNKNPLTAIQVLSEIGGDMSVFPTAKHLVSWAGCCPRNDQSNQKIKSTRISRAGSYFKPVLVQVANALIKSKKHSEFTSRYKRIKARRGHKKAIIAICRMILTAIWHILSDLKPYTPEGFLESRPVKEGKVLSTSQALNLLKQRGYIIKGEPLAVS

SEQ ID NO: 336022 - protein, 313 aa, unidentified
MTEAMWIGIDVSKDKLDCACGSKGELNTCPNEVHAIEGLAKQFLALSPAGVVLEATGGYEKLAVAVLARHKLPVVVINALRIRGFAKAQSQLAKTDAIDARLLALFGEQIKPQIRELPSEALRDLQALFARREQLVDMLSTEKTRLHHAQQVQVKKSIQALIRAIERQIEAANGQLLKAIENNALWSTNAELLRSAPGVGPVNSMAITIKLPELGKLNREQIAAIVGVAPFPHDSGKHRGARHIRGGRAEVRALLYMATVTAVRCNPVIKAFYQRLIQRNKLPKVAIVACMRKLITILNTMIKNQQPWTPNFS

SEQ ID NO: 336023 - protein, 349 aa, unidentified
MLADELDYVIGVDTHRDEHSLAVVAAPTGAVLAQTVVDARARGYADALRFAATHAAGARAWAVEGAGHYGAGLARYLAERGETVLEVSRQPRNERRLRGKDDPLDAIRAARAGLAAEMARLPRSGEGPEALRVLLLARRSAVDVRRIALVQLRSVIVTAPEQLREELRRLPVTALIRRCSRFRRTQSRIPGELAIVLVLRSLARRIEAATAEAEELEREILQHVRALVPDLLDQPGVGPIVAAQLIVTWSYRDRLRSEACFARLAGVAPLPASSGQTIRHRLSRGGDRQLNRALHTVILHRRQHDPATRDYIARRVAEGKSTRDATRILKRYLARHLYRVMQNAAPAMT

SEQ ID NO: 336024 - protein, 317 aa, unidentified
MASIGWFAGIDVAKDSLDVALVRGDEEIVWQVANTPAGWTELVTACKERAVERIVLEATGGYERRVAAELMAAGLPVVVVNPRQARDFARATGRLAKTDRLDARGLARFAEAIRPPVRPLPDEKAAELQEKLARHRQLIQMRTAESNRLEHARSKPVRNGIQSLLKVVNQQLEELDNDIDQRIEESPAWREKDRLLQSVPGVGPQTARTLLSSLPELGKCSRQEIAFLVGVAPLNRDSGKMRGTRSIYGGRAHVRQALYMATLVATRYNPMIRKHYQHLLQVGKKKKVALVACMRKLLCILNAMLRDQETWNFTLST

SEQ ID NO: 336025 - protein, 429 aa, unidentified
MKRNSNSQIKNERILKTAKVQRDTKEVIAELVAKLTEQLEAKPAWESTKDKQDNVLAPNRDRLTVGVDLSDKWSNYCILGLQGETLSEGQLRTTPQDFAEFFQALSATRVVVEVGTHSAWVREVVVGCGHELLVANPRLMDGGKNRKRKNDRIDAQKLARVGRMDPQSLYPIEHRSAEVRQDLVLLRARDALVAVRTQLINTTRGLVKSTGARLPKCSSPSFARKAEEALPAEVREGLLPLVHLTEALSDCIRAYDERIEKLASEKYKHTELLRQVKGVGPLTALAYVLTLENPKRFAKSRDVGPYLGLVPKQEDSGESQPQLGINKAGDMMLRRLLVGSAQYILGPFGPETDLKQYGLRLCERGGKNAKKRAAVAVARKLAVLLHRLWVNGRGVRTVAPDFRGDSRAGRVVGQGGTSRRVVQRDSSWL

SEQ ID NO: 336026 - protein, 354 aa, unidentified
MATHYIGADVDSKMVELAIEKNARIIDRYRVPTAIPAIREVLSSIGGTKFLTFEEGPMAGWLYRNLKNNVDDLVVCDPRRNKLIACDGDKDDSIDAGKLASLLRGGYLRAVHQSEDIGRIVLKQWVSLYHDKVREAVRQINKIRARCRMYGIRIPRRVLRDLVSRHQWITELKEKDLAEQLAVLWIGLDTAVKQVRMAKKQLVRHSKNYEIIKYWSDVPGIALIRATTMLAYLDTPWRFSSEKKLWKYCGVGLQRTASGTDKFGKPNLGKLRLVWAINHRLKEVVTGAAMSAINQKNNIFAHEYGRMLGNGLTASNARHAVARKLLSVMWAMWKTSSRFDESLVCYSPVTVNTN

SEQ ID NO: 336027 - protein, 387 aa, unidentified
MTGQPEVSRFIPSEYDIFAGLDVDKRNIAMTFTDHQTLIKSLRLPYSSTQVVNYVRKHFPGQRVAFVYEAGPTGFGLHDDLVANHFPCLVVAPSMVPRAPGQRVKTNRLDSKKLSLGLRSGELRSIHVPSRSYRELRHLVQLRDTQVQQVTATKLRIKALLLCEGIPFPEAPPSSQWSARVVAELRVLPCTAEVRFKLDHLIGTLYFHFNSAAVVQKRIRHFCQNDPELRQSISLLMSLPGIGWIVAAHLVARLGDWREIKNVRSIASFFGLVSSEHSTGDKVNRGSITRSGDSRLRNKLIQSAWVAIAKDPELRAFYRRIFERHPKKVAARKAIVAVARKLTTRMYAVLKQQRPYVIRPDISTTPLTTEETVGPRERLDAAQSDQP

SEQ ID NO: 336028 - protein, 323 aa, unidentified
MNKDIKYFGIDISHLVFDVTDFDGNYYQFKNNPVGFKKFIKLLDIDSHCVMEATGYYHYQLAYYLLESGIKVSVENPLAVKRFIQMKLSKIKTDKSDSKLICEYAKQVELKLWQGNSKHQTECLQMTRLLSVYTKQSTMLKNKLHGESVLGNPSKAVVSSLKRSLKQVQKEIKTLEEKLMILVKQVHQDVLTRLKSIPGIGNKTALMLVVLTDGFERFTSGSELCSYAGLTPVIRKSGSSVNGRSRISKIGNQKLRNLLFMCSFNACKYNKACRDIYERIVAKGKSKKLALIAVCNKLLKQAFAIAKSGLTYDDSYRSILVKN

SEQ ID NO: 336029 - protein, 356 aa, unidentified
MANSNRLDFAGQPIYIGLDVHKKSWSVSIHSVLNEHKTFTQPPDADILVNYLRRNFPGASYHAVYEAGYSGFWVHDQLTEKGVVCTVANPADVPTKDKERRKKRDQIDCRKLARSLRAGEIEGIYVPCRKKLEDRSLVRTRQSMVRKQTRCKNQIKSILFFYGIGIPEEWAERRWSGPFVRWLESLSMERASGEVALRVHLEELKHLRQILARLDREIRLLAQTGEYGVQVRLLRTIPGISTLTAMILLVELQEISRFRSLDELASYVGLIPDTHSSGETEHTGDITQRRHAQLRASLVEAAWVAVRKDPALLLAFQESCQRMRKTRAIVKIARKLLNRVRFVLKNQTPYRMGVVR

SEQ ID NO: 336030 - protein, 395 aa, unidentified
MPSTTVSERVVIAVDPHKASWTAAAVNSALAPLATLRTPVSRQGYRQLRRFAARWPDAEWAIEGATGLGAPLATWLSGDGIEAVDVPAKLATRVRMLSTGHGRKNDDADAVSVGIAALTAPGLRSAAVEDAIITLRALVEHRDDTVRTRTQTINRLHVLLTGLLPGGAPRQLDADTAARLLRTVRPRATGPATLRRLAAELIGEVRHLDRRIATASTQISDAVTASGTTLTQLRGIGDLTAGKIIGRVGDITRFRSPAAFASYTGTAPIEVSSGDVVRHRLSRAGDRQLNYCLHVAAITQLRHDCPGRDYYLRKRACGKGHKEALRCLKRRLSDVVYRQLLRDAQAAQAASPGGQQAATTNSRAADSTPHTSTSGKSLPGPADTDPTTPDEDRLD

SEQ ID NO: 336031 - protein, 392 aa, unidentified
MYIVGIDIGKNHHEASIVSPEGKQIGRSLRFATTHKGADSLMSFIFKNIGNSPCVFGMEATGHYWYPIYSFLKAKGYTIYVTNPIQSDSLRKMYIRQTKNDSIDSFLIAEVIRFGQFGTTSMADENILAMRQLCRYRDSVISSRTEIKLRIGTIMEQIFPEYEKQFSSLWVSTSMGILEKYLTPENIENAPIDELFEIIKDKSHNRLTKAKAISIKEAAADTFGIKIAQDAFSFQLKQLIDRMNFHDKQIEALDIEIMKYYEQFDCYLHTIPGIGIIGAATILAEIGDISRFKNSSALVAFAGIDPTVRQSGEFNSTHNHMSKRGSPYLRHAIFLAATTCSFHNSPLNAYYKKKRDQGKHHLTATGAVARKLTTVIYAVLRDSKPYEPKKFC

SEQ ID NO: 336032 - protein, 343 aa, unidentified
MDHFAGLDVSVKETSVCIVDDRGRIVREVKVASEPEALLAVLTNPACHFKRIGLEAGPLSQWLFSALAEAGLAVICVETRHMRAVLKAQINKTDRNDARGIAQMMRVGLYRPVHVKTLRSQKQRMLLTHRKLIQSKAIAIENDLRATLRNFGLKVGVVGTVKFEARIKELVENLPDLVVLVEPLLIVRRVLREQIGILHRRLLAIVRDDDVCRRLMTVPGVGPVVALTYRATVDVPSRFRNSKAVGAAFGLTPSKHQSGESNRTGGISRCGDEMMRMMLYEAAHIMLVRSAKWSWLKAWAMKIAKHRGLKKAIVALARRLAVIMHRIWVDGTEFRWTREVAAA

SEQ ID NO: 336033 - protein, 410 aa, unidentified
MEVLHAHCAGLDVHKEMVVACVRHMVGGKITTAVKTFMTTTRELMTLSEWLSAEGATHIAMEATGVYWKPVWHILSDGEFELVLANAAHVKNVPGRKTDVNDATWLSDLMAHGLIRASFVPDEPTQQMRDLLRARKQFARERSSHIQRIQKTLEDGNIKLDSVVTDILGLSGRRILEALIDGQSLPEALAALAHRRIHATSAELEAALRGRITNHHRFLLRLYLDQVDAVDAAIHRIDKEVDSHVEPFRAAIELLSTIPGISTLSAEVIVSEIGIDMSRFPTAGHLISWAGLCPKNDESAGKRRSTRMKKGAPWLKTALIQCAWPATRTKGSYLQAQYLRLRSRRGAKKAIGAVAASILTAAYHMLKNGTFYQELGASYFDERSKGKQALRLVNRLQNLGYDVQINPLAA

SEQ ID NO: 336034 - protein, 431 aa, unidentified
MEQKRHPYLSVGIDIGADFSLMAIALPTQEIIGKPYKILHSSNRSVEGAVERIQSIGQAYELPVRIYMESTGIYHLPLYHRLKNAGLDVYVLNPLVTHANQNINIRNIHNDKLDARRIALLGLRPDLKTSIVPADDVAAVKALLREYHAMKKETSMYICRLKNQLRQIFPQYLPLFSKVNGKASLEVLSHYPSPSAVLSAGADALAKLIQEASGKGRAMAEKKAEAILSAARESLSFGHGNSGITFLIGHYVEMIRILDEKTAAILKQIKCCVQEQPDTLLARQTRLLESIPGAGFLTAVTIVCEIGDFRAFHRPKQLYSYFGLDPVVRQSGNSAGANLRISKRGSPYARRCFYILALQSVSLRKNGEPKNHVLRTYYLEKCKSKAKMTALGAIMHKLCNIVFAVLRDERSFVLISPQEHRQNYLSLPKAA

SEQ ID NO: 336035 - protein, 362 aa, unidentified
MTTNNIPNNTERAPVETGVMIKVGLDVHAEKIAVCVQVDGATPQPAQLVMRAGLLAWLAKLRGKHPGATMVSCYEAGPLGYTLHRELSAMEVTNYVVAPQRLDDRGKRQKTDRLDARALLERLDRYVRGNRHALAIVRVPSPEQEQLRARVRLREQLAKTRRQFEARGRSALLLQGIRVNGPWWRPAQWKAIAAELPAWLKAMVSVWQQLAVTADTQERTVRAELEAAAPAALPRGVGALTWTVLAREILDWSRFKNRRQVASYTGLCPGISQSGGKSRGGSINRCGNRAIRHALLELVWRLVRWQPQYPPVRALVDGALSARQRRKQAVAAARHLAIDLWRLATGQCTPAQLHLDAAFAPI

SEQ ID NO: 336036 - protein, 387 aa, unidentified
MYFVGIDISKFKHDCAIVDELGDVITPSWSFQNDREGFSLLKELLDALDGKKKIGLEATGHYGQNLKLFLENNDFSFIEFNPLLINQFVHSKSLRKTKTDSIDALMIAQYLMTVEYKPYPPSFYTLERLKSLTRFRDNLIRQRSKQLVELTNILDKVFPEFKPFFKGRFSATALYILSHYASPEKISNMNSKSYEPLRHLSRGRFSMVDFVELKTLVRNTVGSTCDYLLQEMEITIDIYNQLQSKAEEIELQIHDCVLDLAPPMLTIPGIGAASAAVILSEFGDLSKFNSPSKLLSFAGMEPGYFQSGTSESTGKMVKHGSSHLRYAMMNCAQTVINNEPTFAAYYAKKRAEGKEHRVALTHVAKKLLRVIYTLQTKELSYNPDLVR

SEQ ID NO: 336037 - protein, 411 aa, unidentified
MVLFVGDDWAEAHHDIEVEDDQGGVLVRRRLPEGLAGMASLHELLAGHADLDAEPSQVIVGIETDKGPWVQALLAAGYRVFPINPIQAARYRERHTSSGAKSDPGDAHVLAEIVRVDRAAHRRLVGDSAVVEQVKITARAHQSMIWTRQRSVNTVRSMLRDYYPGFLATFDELATREALLVLAAAPAPEQGARLTLGQIRTLLRRAGRQRRLDERALAIQTGLRAPQLVARPAVVAASAVAVASLAAVILVMLEQTEVLARQVEQDFGQHPDAEVYLSQPGLGKVLAARVLAEFGDDPDRYTDARARKNYAGTSPITRASGTKRVVLARYARNKRLADALDQQAFCALTQSVGARRTYDAHRARGATHHQALRALGNRLVGILHGCLKTHTPYNENAAWPTATPEQAPAAA

SEQ ID NO: 336038 - protein, 415 aa, unidentified
MALKIVYKICCGIDVHKTFVVACIASTDSNGVTTYECHRFSTYTSGLKNLLQWLLKHNCKDICMESTGKYWIPVYNILENDCTIVLAHPKYVKAIRGKKTDKKDAKWIADLFKHDLVAGSFMPPADIRQLRDLMRYRFKLTCFQSSEKNRLQNCLTVSNIQLGNVVSDTFGKSAQAILDKLLENPADTSFDLEPLIYKSLKKKLPELRDAIDGYITPEQADKLKVIKAHYENLESRKAELEELILALAAPYQQELAILQTAPGIRSDFTAIGIISEIGTNMEAFPSAKHLCSWAGLTPTNNESAGKKKSVRVSKAGCYIKPLLVQCANAVVASKKHPEIRNRYLRIKKRRGHKKAIIAIARMLLTALYHMLKNGENYNAELYRKSDLPHANWEITVEQAIIIARNQGYKIKSATA

SEQ ID NO: 336039 - protein, 328 aa, unidentified
MQNDPTQFVGIDIGSRAHEVCVIDRGKTRKCSITSNPADHARFIKTLDPARCRVVMEATGVYHLNLAIGLVEAGIAVMVLNPRTAHHFMKALGKRSNTDTISAQALSEFAQRMEFKPWTPPPPAWLEFRAIARQINRLKKDETKAKNRIHALEATHNHSSLILRDEKDGLRALSRRIERLLAAAAEAIDQSEELKRLLGHLTVAKGFREASIIPILGELLLLPRTMSGKQCASHAGLDVRLKRSGTSVEGKPRLSKAGNAYLRAPFFMPMLSVIQHEPLAKAHFERLVARGKTRKQAMGALMRKYLTGFWSAIRHDQPFDTGKLFAPE

SEQ ID NO: 336040 - protein, 357 aa, unidentified
MEQFIGCDAHKKFSLFVTMNEKGEYGRAIRVGHDGERFREFLKGLPAGSQIALETSGSYYWLVDEMERAGHRPQLAHALTAKRRMEGRHKTDERDARGLAMLLRNGTLPRVWIPPAELRDQREMLRLRMTLVRMKTQVKNRIHGVLLRYNLAVQATDLYGDRGREELLSRLEELPIHSRHSVVEQLRLVDSLESQIEDCEQQLEQILYPNAERDLLKTLPCVGRILSAVIGLEIGDVGRFGSAAHLVSYAGVVPSARESAERKRQGKCPRDCDVYLKWAFVEAANLIASKQRHWPERHVVQLYQRVKHSTKMHGKATVAVARHLAEAAYWILSKQEIYREPKQNAASSFVDARVSAN

SEQ ID NO: 336041 - protein, 344 aa, unidentified
MEKHTVIAVDLAKVVFDVAVSHEEGRVALTRRLSRGAFLPFFAQTPAATVVMEACGSAHFWARKLQELGHKVVLLPPHQVRPYVTRNKTDRTDAKGILEAFRNADIRPVPVKSVSQQVLVSLHRFRSSWLDARTAHINTLRGLLRELGILIPEGAKKVVPQVRAFVADADSDIPDALRPILFEACAEIEGLTERIKIAERQIEAIAEQTPVVERLRSIPGIGLLTATALVAFLGDIQRFPDGRHLGSYLGLTPREFSSGLKRRLGRISKRGDSYIRMLLIHGARSVLCHAKKAQEHDQLRAWALALEKRVGHNKAAVALANKLARIAWAVWKHDRAFVSTPQVA

SEQ ID NO: 336042 - protein, 394 aa, unidentified
MIAVGIDIAKDKHDCFIMNSDGEILFDVFTIHNNRAGFDELFAKIKSASKDLSKVKVGLEATGHYSCNLLGFLKGKGLTTYVLNPLYTSQCRKSISLRKTKTDKIDARTIAGIVLSDVSLKPYSDTLYHKTELKSLSRYRFDLVNERTKLKQSISRLVTILFPELEELVSSLHGKAVYTLLIECPGASYIAECNLKHLTCLLSKASKGHFKAERASLIREAARDSIGTVSYAKSLELKHTIRRILDINIEIEEVEAQIKSIMLSINSPILGIPGIGIITGAMILSEIGDFSRFDNPDKLLAFAGCSPSTYQSGKIYSTHAKMEKRGSTYLRWALLLAAQRVCRWEPTFAAYLKKKCAEGKHYNTAVSHAAKKLVRLIYHLETTGDTYRPQPVLS

SEQ ID NO: 336043 - protein, 411 aa, unidentified
MDIVVERCCGLDVHKDTVVACVRTPGKGGKRDQQTRTFGTMTVDLLALRDWLVAMGVTLVGMESTGVYWKCVFYMLEDAMECWVLNARHLRNVPGRKTDVADAEWICQLVEHGLVRPSFVPPKEIRELRDLTRYRKAQIDERGREAQRLDKVLQDAGVKLSSVASDILGKSGRDMLEALVSGTSDPEILAELARGVLRKKIPQLRLALEGRFSTHHALIVGQILAKLDFLDEAIGTLSGEIDRVIAPFGAEVELLDTIPGVDRRIAECLIAEIGVDMGRFETSARLASWAGLCPGNHESAGKRKSGKSRNGSKWLAANLAQAAESAGRSKDTYLGAQFTRLRGRIGHAKARKAVEHSILVAAFHILAGGVPYNDLGAGWFQKRRPEAHARRLAHQIEALGYRVTIEAADAA

SEQ ID NO: 336044 - protein, 344 aa, unidentified
MTYYVGLDVALRSVSACVIDDQGEIVKEAKLDSEVEPIVAWLASIRSEIEIVGLEAGTLTQYLTYGFQAAGYPIVCMEARGVHAALQAMRNKTDKNDARGIAQILRTGWYRSVHVKSIESHHIRALLSSRKAVLNKCIDLENEVRGLFKIFGFKLPGKLKHGAFDGAVRGIIEADPALSLALLPLLDARGVLYRTFLVLDLRARKMAQQDEVCRRLMTAPGIGAISSLTFKAAVDDPKRFKRSRTVGAHFGLTPRRFQSGEMDNMGHISKAGDKSVRIVLYAAANALLTRTTGYSSLKAWGMGLMKTKGRKRALVAVSRKLAVILHRMWVDGNDFQWGTEGGQS

SEQ ID NO: 336045 - protein, 371 aa, unidentified
MTRVCDRRTPFIIRTKNIKTMQIIGIDVSKDTLYVALAESKDARNDKVIASHKFANNETGFKLFVDWMKKRKADAGTVCLMEATGVYHEHLADWLHRHGVTVVIELPNKIKHYAKCLNVKTKNDKVDAGVIARYGLHNAWTPWHPMTENLYQMRALLRQVQSMTKERTRCKNQLHALMHSAHAPGTVVGNLMDIIANYDRLIESYHDEVVRLAKEDEAFYARVEMVCTIKGVRAITVLTVLCETDGFQLCQSARQAVSYAGLDVSEYQSGTILKDKRISKKGNARIRHALYLPAMVAGTTGGPVSLMNLYKRVKQKHPTAKKVAIVAVERKLLMLIYTLWKKQEPFDPEKDGKPPIHNAYRSTQAVGSQNQ

SEQ ID NO: 336046 - protein, 452 aa, unidentified
MIKKAKSKGSKHLSIPVVHPNAAGIDIGSRLMSVAVPPGRDQQCVREFGSFTCDLQQIARWLKQCDVDTVAMECTGVYWKNLFLVLTEHGFDVCLANARHTRNVSGKKTDESDAQWIQRLHACGLLSSSFLPDDLTARLRSLVRHRRSLTQDSSRYILRMKKALEMMNIKFHSLIRDLMGKTGTAIVEDIISGQTDPDKLLTHVNYRVKASREDLRKSLQGNWRQEQIFLLAQCYKMHRFVEEQIAVCDSQIEIALQAMEAIKHDGAIEEPKTIEIKPKQKKHPTFNTRSYLQKIHSVDVLAIYGISDIAAIEILSETGTDLSKWPTQQHFVSWLNLCPNNKISGGKLISSTLLKKKPNGATQAFKYAANGLQRSQHWLGDYFRRMKAKGGNKYAIVATARKLAIIYYKMVRYQQNFTPFDSQKYKSKFQRTKIDYLERLLAKLKQSTLTVI

SEQ ID NO: 336047 - protein, 338 aa, unidentified
MKLYGGIDLHSNNSVTALLDEENNVVYRRRLPNDLKLVLAELEPYSDAIEGLVVESTYNWYWLVDGLMEAGYRLHLANTAAIVQYEGLKYGDDDTDACWLAKLLRLGLLPEGYIYPREERPVRDLMRKRSQLVNQRTRNLQSVQNLMARNRGHSLSANQIKRLSNEEVDRLLPDVDLALAVKSTLEVMRTLDEVIVRIEKGVLRKIKLRAEFQPLLSVNGIGNILGLTIMLETGEIRRFAKVGNYASYCRCVGSEYLSNGKRKGRGNTKNGNKYLAWAYIEAANFAVRYNPQIKRYYQRKGARTNNIVAIKTVAHKLARACYYILRDQVSFDVDKAFT

SEQ ID NO: 336048 - protein, 363 aa, unidentified
MVDSRDRPRLDWKPAAASVDRPRMSLALQLFLPFPNSCQGTSPHQQGRGTKMTEHCYCGIDVAKERLDVQVLPHRQRFWVDNNATGWAELVERLHALPIAAVGIEPSGGYERGIIRALLAAGLSVRRINPSKLRQFARARGILAKNDRLDAQLIAEYVSIMPTRVVQRAATAERLAEVVTMRRQLCDEHVTIENQAAHVEDAILRRLNKRRLARLKADIHLLDKRMAEIVAADANLAQRYELLTSMRGVGPTLAFTLIALLPELGQMSRKQIAALVGLAPYDFDSGKLKGHRCIYGGRMPVRNILYMAALSAARYNPALKVFHNRLAAANKKPKVIIVAVMRKMITTLNAMLRDNAAWQPRAA

SEQ ID NO: 336049 - protein, 394 aa, unidentified
MFLVGIDIGKNKHSFCIIEKETGELIVKPKFFDNNNIGFEELISSIQNLSNQDILIGMEDTGHYHFALLKFLLDKKYQVALINPVTTNLTRKLQGGITKTDKLDTLTICDVLSSSQRVKSYRITKVDRFDMYEQKQLTREHHNLKEQLNVLKNRLQKSIDIVFPEFNSLFDSKYGTVYVNILKEFGSADAVARADIRTIRKCFDTKGKGRRIALTAEKLKEAAKNSIGFPSTAEVVQIKHLINQVKLIEEQISEIDKKIEEFSIANNSPILSIPGISHFSGTSILAELGDIHNYSKPSQIIKFAGVAPITYESSQFTAQHTAITKKGSKYLRKTLYQIITPVINNNEVFKTYYQLKLSQGKSHRCAQGHCVRKLMRVIFQLLSTNTQFDPVLLF

SEQ ID NO: 336050 - protein, 336 aa, unidentified
MNGSIERWVGIDVAKSKLDVAMLDEHGKLKSHVFVNDAKGHAALMAWLRQRGSSQQQIRVCMEATGCYGEALAISLVDAGWCVSVVNPARIKGFAQSELVRNKTDRADAALLARFGQALRPAPWVAPSLEVRQLRALVDRLHSLKEMHQQEANRLEAAMNQTGMRESIESHMQWLQASISQLERQIDDHIDGHPQLREDAKLITSIPGVGNTTAAKVMAYLGDVRRFKNAKALAAFIGVTPRLKLSGSSIRGRSMISRSGHAAIRHALYMPALVALKHNPIVKTFGERLKNGGMAPKAVVAACMHKLVHLIYGILKSRTAFNANFVVVQLDSKDGI

SEQ ID NO: 336051 - protein, 339 aa, unidentified
MNRIVVGVDIAKRVFQLHWVEPETGEIVALQLKRERFLEHFATRSHCLIGMEACGGSQHWARSLLKLGHEVKLLSGHMVKPFVGGNKNDAADARGIWTAIQQPEIKAVAVKSEEQQAVLALHRMREQLVKFRTAQINGLRGLLTEYGEVMPQGRAGIKRDVPGALGRLADRLPAIVIETLREQYARLGELDEQIGQIEQRLRRWLREDSAAQRIAAIPGVGLLSATAAMATMGDAKVFKSGREFAAWLGLVPRQTGTGGRVRLLGISKRGDKYLRTLLIHGACAVLTHSKSPPEWLSELMKRRPKNVAVVAMANKMARTIWALTAHERAYQSGYVSRPA

SEQ ID NO: 336052 - protein, 433 aa, unidentified
MKDAQDEPLFVQRVAGLDIAKAGVEVTIRVPSDTTPGRRQQETRTFAATRAGLLSLADWLRCWGVTKLGMEATGDYWKPVFFLLESRGFDCELYNAAQVKALPGRPKTDRADSIWLAKIVERGMIAASFVPPEPIRRLRTHTRYRRHLTQARTAEKQRVEKLLEDGHLKLSSVISNIHGVSGRDMLDAIAAGQRDPKALAQLARGTMRGKIRRLEEALECSFFTGEHAAVLAMMLAVIDHYSAQIEALTATIEALTEPWLHQIAQLDAVDGIGTICAQDIIAEIGTDMSVFPTASHLVSWAQWSPQVRQSAGRRKGSNATGRGNPYLSAALGEAAISAGRTQSFLGARYRRLTRRMPKKKALVATGNSMLVIIHALLSDPADSYHDLGADYYEQRMHARRQARNHIKSLERLGYKVTIQALSPDTGQPPTATS

SEQ ID NO: 336053 - protein, 394 aa, unidentified
MFYIGIDVAKRRHRMAAITERGEKVIENYSFTNTTEGFGQMLHKLFSSGITCDNSRVALEATGHYSRALSTHLVAEGFEVVEGNPLQTHNFAKAQSIRKVKNDAVDALALAQWLLSRNPTCAKLSSSESACLKSIARFRTFQSQIIGDSKRKVIAILDQVFPEYASFFSDVFGTSSLAVLSRYPSAQALSRAHLDSLTSLLERSSRGRLGGELAVALKKAARSSFASNATLESQALEVKQLIAQIEFTKKQLAVIDKKMEELLAQARTPIQTIPGIGTVCAATILGEIGDITRFAKPSSLVAFAGLDPSVYESGEFVGTKNHLSKRGSAYLRWALWMAADRAKTFDPAFGAYYDKKRAEGKCHKVAISAVARKLCNTIFAVLTRNTPYVCSVPG

SEQ ID NO: 336054 - protein, 378 aa, unidentified
MNRIIKIGMDVHTTNYTLCIFEPSFEHDGTVHCITQVKPEVKNIIHVIETFKKKHENEELNIVCGYEAGCLGYSLYHELKEKGIECVILAPTTMKTEKGGRKLKNDYRDAKMIAECLAYGGYSAVHVPTELDNSVKEFIRMRDDIKENLKSIKQQIIAFLTRNGKQFDGKSYWTQKHIDWINTISFSEPLLQDTLKEYMIEYNHLCDRVETLDKQIEEVSLKEEYVEKVQQLQCLIGIKTHTALSLIVETSDFNRFKKGNMYSAYLGLIPGDDSSGGHENKLGITKAGNSHLRKLLVEAAQGYTRGRVGFKSKDLKSRQEKCSSEVVAYADRANERLRRKYYRMTLRGKRYNVAKTDVARELACFVWGIMTDYIDLCS

SEQ ID NO: 336055 - protein, 343 aa, unidentified
MQAITTIGLDIAKSVFQVHGVDAEGNVILRRQLKRRYVLAFFQKLTPCLVGIEACASSHHWSRELQALGHTVRLMPPAYVKPYVKRHKNDATDAEAICEAVTRPNMRFVATKTPQQQSCLTLHRTRHLFIRQQTSVINAIRAHLSEFGIVAPVGRHGVEQLLGVVSDASDKRLPDVARGCVAALGAQLQRLKVQILEFDRMIRAWHRSNEESRRLDDIPGVGPALATALVASVADPKVFRSGRDFSAWIGLVPKQNSSGGKDRLGNISKRGDRYLRSLFTTGALAVIRYAKIHGTGHRPWLTALLMRRPTKVAAIALANKIARMAWAMMAKGERYKEPAVLAA

SEQ ID NO: 336056 - protein, 386 aa, unidentified
MKGETFVPREYDVFAGLDVDKKSIAATFSSQQGFIRSLHMPYRVDYLLNHVRKHFGDQKVAFVYEAGPTGYGLYDGLVAQGFRCLIAAPSMIPRAPGQRVKTNRLDSRGLSESLRGGQLKSIHVPSPIYRELRHLTQLRDTVVREAAAHKQRIKALLLLEGIGFPPATAGRQWTLRVKAQLRKLRCSRTVRFKLDQLLDSLEFCEKQVVSSTKEIRRFCKEDAELFQSIEYLMSIPGIGWIVASQLLARIGDWREIDNVRQLGSFLGLVPTENSTGDSVDRGSITRAGDGRLRSKMIQAAWSAIRQDGELREFYRSVCQRNPRGKGARIAIVAVARKLSTRIYAVLKNQRPYIVREQVHSAPLTQEETSPQGTTRRCAEPGETDNS

SEQ ID NO: 336057 - protein, 410 aa, unidentified
MLNTLFVGIDVSKRNNVVRFTDSYGDTLTVFSVPNNQDGANNLLDKLRNTLITRDFQAVSIGMESTSIYADHLAIFLRNDAFLKKWGVKVFVLNAKQVNAFKEAYPELPKNDNIDTLVIADYLRFGRISKEVNLDEKFIALRNLTRARFQVAQNLSREKSRFLDSLFYKFSSLDSSKVFSDTFGTTSIAVITDFFSTDDINEMPLEVLAEFLIDKEKNKFNDPEGIANDLKAAARSSYRLSKTVNDSVNQLLAVRLIGIRSFQQQLKDLDKAIESYMQLFPAILNSIPGIGPVYSAGLLAEIADIHRFKNHAALAKYAGIAWTKYQSGDYEASNTRLILSGNKYLKYYFLEASNKVRMHDAEFKRYYLSKFKEVPKHQHKRALALTARKLVRLVYSLLSTNQLYIPPTSK

SEQ ID NO: 336058 - protein, 367 aa, unidentified
MKKVSTVAAKPSKKISQQKLTIGLDLGDRNSWYCVVNEVGQIQVEQRVRTNAKALREVFGAMPRSRIALEIGTHSPWISRLLRELGHEVIVANARKVRLIGESRKKDDRLDAQTLARLARIDPELLYPVKHRSAQAQADLMMIRARAGLVRARTGLVNAARGLAKSYGERLRGCNVRNMNPEKAEGLSPELQAALEPLLNAIESLSERITEYNEGIEKLAQQSYPQVALLKQIKGVGTLIALTFLLTLEDPHRFGKSRDVGGYLGLQPGRRNSGQSEPQMHISKEGDPYLRTLLVQGAQHILGPFGPDCDLRRWGLKLAERGGRNGKKRAIVATARKLAVLLHHLWVSGEVYEPLHNSRRVAVTAAA

SEQ ID NO: 336059 - protein, 339 aa, unidentified
MGIDIAKNKHDVTALNVPGKTVLKPLTFSNNKAGFELLDLSIRQLNQDCLIALEDTGHYAFNLLNFLHEQGYKVYTYTPLLIKEFAKSLSLRKTKTDKKDAHGIALKLLSDPNREQFQHDNRQVELKILARHIHRLKKKQSDWKVQYTRCLDIIFPELDKIVGKHSEYTYQLLTCYPNPQKRLEAGFDKLIEIKRLTASKIQDILSVAPRSIGTTSPAREFEIIEIIKHYKRLIDKAETCVNDLMAEFNSVITTVTGIGGRLGAVILAEIRNIHAFNNPAQLQAFAGLDSSIYQSGQIDLAGRMVKRGSPHLQWALIQAAKACARFSPAFKAYLKTTLE

SEQ ID NO: 336060 - protein, 383 aa, unidentified
MNDLIRIGVDTSKSVFQLHGVNAAEQPVLRKKLRRRQVIEFFQKLPATRVGIEACGASHHWGRELSALGHEVVLLPPQRVKPYVERNKNDAADAEAICEAMSRPRMSFVPVKTAEQQAALMLVGVRDQLVGRRTQLSNAIRGYAAEFGLVAAKGTDKIEPLLIRIAGDENFPPLAKDLFATLGNEYVRLKPELRKIEARLMAWHRGNELSRRLAEIPSVGPIGATLSVMKVGNPHAFRSGRDFSAWLGMTPKDHSTAGKVRLGAITKAGDEALRSVLVAGATSVIQQVRKGRGRPSPWLVALVKRKPPKLAAVALANKTARIIWKLMVSGERYNPQRAPQRFVPPTDSLAPGTRRQGQAACGGDLRSALTAPALRAPSAPPSA

SEQ ID NO: 336061 - protein, 330 aa, unidentified
MGTAATTAIGIDVSKATFDACLLAPDGTVREKAFPNTPDGFAALLAWADRHAAGATTHVGMEATGGYEDALASFLHAAGRVVSVVNPTRIKYAGVMRGRRNKTDKADARLIAAYTRDERPPAWTPPTPEVRELQALVRRRDDLRQLAAHEKARLESPLLTPAARRSVARVVKLLGKEADAMQKAADALIAATPALAADAELLASIPGVGTQTASTVLAELPSLDRVPTAQAAAAYAGLSPREFKSGASVRGRTRLSKSGNARLRTALYLPTLTAVRFNPVLQGFFDRLVAAGKPKMQAVGACMRKLVMICYGVLKNRAPFDPNWTSRIAT

SEQ ID NO: 336062 - protein, 463 aa, unidentified
MKRAMKGKRKKKTAHGAQDWTLNLDVVHPNAAGIDIGNESHYVAVPPDREAEPIQQFACFTEDLRRMAGWLKSCGIDTVAMQSTGVYWLPAYEILIEEGLEVFLVNARHTKNLPGRKTDVQECQWLLQLHTFGLLNNSFRPPEEICVLRAYWRQRAEHVASASACIQRMQKVLTEMNVQLANVISDISGWTGLAIIQAILDGERDRYKLADLADTRIQATREQIARSLEGNWRKELLFILQQELNLYQIYQQQIAECDTALVAHLQTLDDKAEPGSKLPAAKAGKKAGSNAPTSFDLRGELYRISGTDLTQIDGINIMNAQTIIAEVGVDMSRFPSEAHFASFLGLCPDNQITGGKVFRRGTRHVENRAATALRMAATSLWRSKSYLGAKFRRLRARLGAPKAITAMAHMLARLVYRMLRYGEQYVDKGIRYYEDKYREHEIRSIQKRAKDLGLVVTLTPTAA

SEQ ID NO: 336063 - protein, 328 aa, unidentified
MEHSIGVDLHQSFFQACAVDALGLRQWEDRFPTTAEGIEQFLARCVDVRTVAVEASGPTWHFVDQVVPCVPAVCIVDPARTRLKAGYVAKTDRLDARRLADALRRDSVVSIYYPPVAVRELRELCRYRGSLVRIRVRLKQRIHALLARQGVEMPAVSDLFGQAGRRWLAAVALSARAAQAMEGLRALLEAVDGQVAVAEREVEAIAGRDPVVQRLLPIPGIGPTLGLTIRAEVGEIARFPTAAHLASYAGVVPRVSQSGGSCRHGRVGKRGAPWLRWALIQAAVHGPGRQDRHGRWARRLALKKGAVKARTAIARALCEEIYTAWRMA

SEQ ID NO: 336064 - protein, 463 aa, unidentified
MLVPPTPVEHQRPDLDAAIDVVKAAFASHNIHDSLVAIERTGRYHQVTQRAFAAANFETRILHPFATKQYRQPSDPGNKTDDTDLVAIFRAAVNGFALREAEWDVSWRNLQLLVRHRRDLVGKCSSLCCQIREHLDAALPGLAECFGKLWDSAVAWHLIRQFPTATAVQQAGLAGLAASLRAAAIRFQTPTLEAVLAWSQRAAQPEPTAPIQYRLGLALNDDRLRKAQEIQALERDIAHALARTPYILLLSHPGVNVISAADFAGEMGPIEHYANARAITGRAGLFPSRYQSDEVDKANGPLVRSCNRRLRAAIMGIADNLIRCNQYFRAMGGRWRLAGKDPRHTHVKIAFRFCRIAYQIVAGRQVFRHPCLQGRGYILDKLSAFHVAHGTPSNEVLEDLQSALQQIPVKEYHAEAQPLAEQLQNAQKGRKGPQLLADILPIVLARLGVGSIQSTESGAADLN

SEQ ID NO: 336065 - protein, 383 aa, unidentified
MKQSFSEPLNRTIFMMGWTPRTASMCQSGVFEQHLREASVSGVITVGLDIAKHVFHAHGVDDQGRALFSKRISRGKLLDFFAAQPSCTVALEACGGAHHWARQLTQLGHEVRLIPPAYVKPFVKRQKNDAIDAEAICEAAQRPNMRFVAMKSEQQQAAGLVFRTRDLLVRQRTQLINAVRGHLTEYGWIAPKGPSHVAELAHLIEEKRMAGSLPEAARAMFRLMLDQLASLNGRIAVLDKEIARRAREDEVSRRLMTIPGIGPISATAIAALAPPVETFAKGRDFAAWLGLTPVQRSTGGKQKLGATSKMGERTLRRLLIIGSSAVVQQASKRGAAKGSWLEQMLARKPRMLVTVALANKMARIVWALLVKREVYRAPVAANA

SEQ ID NO: 336066 - protein, 341 aa, unidentified
MTEVSTIGLDLAKNVFQAHGADAAGAPLFRKKLRRDQVLAFLAAQPPCVVAMEACPGAHHWGREIGRLGHTVKLIAPAYVKPFVKRQKNDAADAEAICEAAQRPTMRFVAVKSEAKQAAAVIFRARDVLVGQRTQLINAIRGHLAEYGLIAPQGPCHVERLIAQIEDPSSDIPQAARACLAVLVGTLRHLQEQTAALDAEIAARAKADDTARRLMSVPGIGPLIATAIEALAPPVETFRSGRDFAAWVGLTPVQRSTGGKERLGRTSRMGERTLRRLLIIAASAVVRWAKRKGVPAGSWLGQMLARKPPMLVIVAVANKNARIAWALLTKGGIYRAPAVTA

SEQ ID NO: 336067 - protein, 345 aa, unidentified
MQIKSIGVDLGKTTFHIVALGSRSQVVIRRKFSRSQLLQYTANLPSSLIGMEAGVGSHFLGRALREQGHEVRLIPAQFVRPFVKSNKNDYCDAEAIAEAVERENMRFVPIKTEDQLDLQALHRVRDRLVARRTSVINQIRAFLLERGISFRKGPASLRRQMPEILENADDKLSTRMRRLLDFLWQEWKGLQSQIESLNVDLDQIASRDAGCLRLQQIPGVGPLISTAVVSAIGNGAAFKKGREFAAWLGLVPRQWSTGGKAKLLGISKRGNPYLRRMFIHGARAAVLRVKRGESTLGKWMTGLETRAARNVVIVATANKLARISWAVLASGENYHPTHSAPAFSN

SEQ ID NO: 336068 - protein, 347 aa, unidentified
MRFYTQQHGYYCGIDLHARTMFVCIISQDGTVLVEKNIRARPGPFLDLIAPYRDDLVVAVECIFTWYWLADLCHEEGISFVLGHALYMKAIHGGKAKNDRIDAGKIAALLRGGMIPQAYVYPSPMRSTRDLLRRRLHLVRHRGRLLAHIQNTNHQCNHDDFRKKLTYKANREGVAEQFDDPSTRKSVEVDLALIAQYDGIIRDLELFIVRMAKQHDTDMFHRLRSITGVGKILALTILYEVHDIARFETVQQFASYSRLVKCSRESAGKRMGTGGAKIGNVHLKWAFSEAAVLYLRKNPAGQKYLARLTRKHGKGKALSILAHKLGRATYFVMTRSRNFDEKKFLAA

SEQ ID NO: 336069 - protein, 313 aa, unidentified
MAMPAKPFIIGVDVAKVELVSYCEQTGQHQSFRNTQPEIRKWLALQPANTAICVEATNIYHLDLVEMAYEKGFAVYVVDGYQLSNYRKGIGGRVKTDASDACLLARFLDREGSALRPWVPPPPVYRKLQSLLRRRAALVSARTSLVQSWSNEVFLKEAFNSFIKHFESLDLLIQKQLKTVVREAGLTEQVVRCQKVEGIGFLTAVALVTAFIRGEFRSSDAYIAFLGMDLKVADSGQKSGRRRLTKRGCSEVRRLLHNAAMAASKSAAWKELYEYYRSKGKATTQVLVILARKLARVAFALMKTQGEYVSRRA

SEQ ID NO: 336070 - protein, 423 aa, unidentified
MKKRRYKATNVKRINWERISAQTQGQRIIFGVDVAKEDFFAVLMNADHSVIETLKWEHPQQSRELVEHLLHDLEGAQLEVVMEPSGTYGDALRGYLSELGVAVYQVSPKRVHDVAEVYDGVPSLHDAKAAYLIGRLHLQGVSKPWQGLCETRRDWQALIAELELFQSQRQRNLNRLEASLSRHWPELGQKMMDLQRVSLLSLIGEYGSAQEVAAHRREAQQLMQRIGGIRLDAEKVQQVLDSSATTLGIPYTEGERHFLQRLGQELVRNHQCIQEIEQRIAQEVAADALLTRIAAIVGKTTSLVLGATVGTPLDYPNAHSYLKALGLNLKERSSGKHKGELKISKRGPGETRKYVYFAALRWLYRDRVIGAWYRNKIKRDGNRKGKAIVAIMRKLVLALWYVAQGEVFDSRKLFNTQTLGLAA

SEQ ID NO: 336071 - protein, 359 aa, unidentified
MASIALTRTDVVVGVDTHKDQHVAYALDGLGGMLGELFVPTTSDGYAALVEWAANLGDVNAFGVEGCGSYGSGLFRFLRRGGHKVIEVNRPARRGERRLSGKSDVIDAEHAAREVLAGRVKTTPKAQNGSIESIRLVRIARGTAIKAQTTAMIALKAVLVTGSDELRSSLEPLTSHRLILACAALGLDGDLADPDTAMRYTLSSLANRWIALHKEVKLHTSHLRQLTEATAPELVAAFGIGPDIAGELLAAAGDNTERIRSEAAFAKLCGVSPIPASSGKSSGRFRLNRGGNRQANAALYRAVIVRMRWHEPTIAYVKKRTADGLSKKDIIRCLKRYVAREVYGLLPAPVIPQVASLAA

SEQ ID NO: 336072 - protein, 414 aa, unidentified
MLKIVYRVCCGMDVHKSFVVACIASANEQGVTTYKSKRFSTFTGDLRRCAAWLSENNCKDVCMESTGKYWIPIYNILERTCNIVLAHPKYVKAIRGKKTDKRDAKWIADIFKHDLVAGSFIPPADIRQLRDLFRYRWKLTNFATGEKNRAQNCLTVSNFKLDDVFSDVFGKAASAITARILENPSEKITDVSSFCTKRLKATDEEILAAVDGEMCEEQAEKLRIIRSHMDNLELCKLNLDSLILSTVEKYLPQLELVMTAPGIQSFAAIGIISEIGVDMSVFPTSKHLCSWAGLTPQNNESAGKKKTTRISRAGAYIKPLLVQCALCAVRAKQFPEVRNRYLALKKRRGHKKAIIAVARMLLTAIYNMLKKNEPYNSELYRKGDRPPAHREVSVEEAVFILQRQGYLVTAPPTP

SEQ ID NO: 336073 - protein, 368 aa, unidentified
MEVLYPRCSGLDVHKRFLIACLSCVQADGQRHKELRRCSTMTGEVLALKAWLKAAGCSHIAMESTGVYWKPIYHLLEDQFEIVLVNAQHMKAVPGRKTDVKDAEWIADLLQHGLLKASFIPKPQQQEVRDLTRTRTTLIQERSRLVNRIHKVLEDANLKIGSVVSDITGMTGSAILNALIHGQEDPERLADLAHGSLRKKREQLIAALQGQLKAHHLVLLQELLTLVASLDHSIARLDREIAERLNPFEELITRIDEVTGLARRGIEVLFGELGWDMSQFPDAAHAASWVGICPGNHETGGKRLSGRIRQGNRWAKAVLVQAAHAAAHTQSYLGEQYRRISARRGAKRAAVAVGHSILVIFASFGQDR

SEQ ID NO: 336074 - protein, 425 aa, unidentified
MNKSTNQPTLDPYAAFIAIDWADQQHTFSLQVAGQTKKEEGTLEQKPEVIGPWVAKLRERFGGRPVALEQSRGALIHALLSYDFLVLYPLHPTTVSKFREAFKFSGAKSDPLDTHQILEILTKHLDQLKALNPDTEQTRLLGRLVEDRRKIVDLRTTHIQALGASLKEYYPQAIELCNGNLTSRLAANLIKKWPTFADFQQAKPSTVKKFYYGHNIRSPKVIEQALKLAQSAQCLTTDPAIVESGSRISQAHAQMIQTLNPIIEEYERRIEVVLSEHPKAPIFRNLPGAGPALAPRLVSFFGTDLDRYESAGNVQSFTGIAPVTQSSGKTKVVYFRTACPKFDRQTFHEFARLSVANCQWARNYVDYYTAKGKKYHTIIRALAFKWIRILFRCWKNGTPYDDNRYMQNLQKRGSIFATFHLEQKT

SEQ ID NO: 336075 - protein, 398 aa, unidentified
MSKVFVGIDVSKEHSTAQGIGSDEKKLFYLRFSMDSAGFAELRTAIKGCGVNLEDIAVAMESTGCYHINLFSFLCAEGLRCAVVNPLLISKFVQGSLRKTKTDKKDAMTIAQFLLNNEKKLCVVTSSQDAQDLRDLARERESQSWMIASLKNDLKRLLQNTFPELETLRKNIYTETMLNFVRQYPSARLIRQAKRKDIDKALICPGEKRKRVQISADDLIDAAKRSVGSAGTAKELIVSEKATTILYLQEKCEKITEALVDACEATRIEDLEIIKTLDGVKNILGSSFLAEMGELSNFKSYKSLIAFMGLDPSTNQSGKHVGPSKISKRGNRHMRRIAHIMTLGSIKSDNIFREYYLRRLAEGLPKMKALMATTHKLIRVIFSMLTHRMPFKKEVPAV

SEQ ID NO: 336076 - protein, 349 aa, unidentified
MSQSLNSAIAVIGIDIGKNSFHVVGLDDRGAIVLRQKWSRGQIEVRLANMPPCLIGMEACVGAHHLSRKLQAFGHDARLMPAKYVRPYSKGQKNDFRDAEAIAEAVQRPTMKFVATKTAEQLDLQAMHRVRERLVSQRTGIINQIRAFLLERGMPVRQGLRFLRAELPRILATPPDVLSARMVQVISDLAEDWRRLDHRIDHLSNEITLLARQDTGCERLMSVPGIGSIISSAMVAAIGTGDAFSKGRDFAAWLGLVPKQISTGDRTILGKISKRGNRYLRVLFVQAAWVVLIKPMSWERHGLKHWIEAAKKRLHRNVLAIALANKLARIAWAVLAGSRTFEANKFQAA

SEQ ID NO: 336077 - protein, 478 aa, unidentified
MKAKPQEKNKRATNHHWHEMNRKQRRETMRKIQSEDLSLEVIHPDAAGIDIGNESHYAAVPPSRDSQPVRCFGCTTAELKAMAAWLQQCRIRTVAMQSTGVYWVAVYDILEQAGLEVYLVNARDTKNLPGHKSDVQESQWLMKLHTYGLLRNSFRPSQKIRTMRTYWRQRNDLVQSASRHILRVQKALTQMNVQLANVLSDISGVTGQAIIKAILAGERNPHKLAEFRDPRVQASEEEIAHYLEGNWQPDLLFVLKQEQDGYEFCQQQMAECDRQLEQYLQSTEDRSHGAPLPEEKRKGRLKKKKGNKPQFDLREGLFRMSGTDLTRIDGIDVMTATTVISEAGYDMSKWKTENHFVSWLRLCPDNRISGGKVIGKGRLPTNNPVSIALKMAATTLRQSKTYLGAQFRRLRTRLGAPIAIKAMAAKLARLVYRVLRYGMKYVDQGAAFYELKHRERQVHQLKWKAAQLGYKVTLLPAA

SEQ ID NO: 336078 - protein, 381 aa, unidentified
MFAETTRTDQYTTIQPHLYMAFELSQSKWMLGFTIGFGQRPRLRTIAARDLAALRDEIHLARARFRLGEDAPVLSCYEAGRDGFWLHRYLLSLGVTNLIVDSASIEVNRRAKQAKTDKLDLGKLLTMLMRYQAGEKKVWRVVHIPSPEVEDHRHLHRELTDLKEQRTQHINRIKGYLSNQGICLEVDDDFPEIVEQQRLWNGEPLPAGLQARLLCEYQCFQLVQQQIQALEAERREMIRSSTQPQAEQVRRLLRLRGIGINCAWLYVMEFFCWRAFRNRREVGALAGLTPMPHQSGEEDHELGISKVGNRHIRAMAIEIAWGWLRYQPNSELSLWYQRRFGKGSKRLRKIGIVALARKLLIAIWRYLEFGTLPAGAVLKST

SEQ ID NO: 336079 - protein, 411 aa, unidentified
MEQIRDRVAGLDVHRDEVTACVRTPGPRGGMHAERARFRTTTAGLAVLAGWLAEHEVTLVAMEATGVYWKPVYYALEDRFEVWLCNAHHVRNVPGRKTDMSDAEWLADVAAHGMVRPSFVPPLPVRELRELTRYRRKQTDVRASEIARLEKVLQDAGIKLTSVASKVLTQSGRAMIEALIAGERDPAALAGLAKGKLRPRIPELTEALHGHFGDHHAIAAARILAHLDFLEATISVLDGQIDARVADGYQSAARLLRDVPGIDRASAEVIIAETGADMSRFPSPAQLASWAGLCPGNHESAGKRRKVATTPGNQWLRRALIESARAAARTKGSYFGAQYRQIARRRGPNKAAVAVAHSLLDVIWHLLTTGEVFADLGADYFTSRHDTEHQTRRLVSQLEKLGYTVDLTTAA

SEQ ID NO: 336080 - protein, 341 aa, unidentified
MVNVVTVGLDIAKSVFQVHGVDVVGEVAIRRQLRRAQVLPFFAKLPACLIGIEACATAHYWARELGALGHQVKLIPPSYVKPYVKRQKNDAADAEAICEAVTRPTMRFVEAKSPEQQSVMVLHKVRLTLMRQRIQLSNTIRGHMAEFGLVAPIGREGLQQLIKLVEDSDPRVPDEARDCLAFLVAQLQLVNLQILETDRRIRTSARSTEVGRRLMSIPGVGPLLASALVATVANPTAFKSGRNLAAWIGLVPKQNSSGGKDRLGGITKQGDRYLRQLLVVGASAVVRYAERNGTRRSWLVQLLAKRPTKVATVALANKIARIAWAIMTSGESYREPEPAAA

SEQ ID NO: 336081 - protein, 448 aa, unidentified
MPHSPEAHTRSMPNAEAAAFDWYVGIDCGGATHHVGVLNAHGDRVGERAVAHSGQALTAFVAWLHELAGPSLARVAVGLETPHGGPVALCLEHGAAVFTINPKQLERFRERASAAGAKDDRRDAFVAASALRTDRAAFHRVVPEAAALVRVRELSRVSDELREEAARLSNRLRAQLERYFPPLLAVVPAADEPWLWALLTLAPTPAAAARLSERRLTRLLRDYRIRRLSAADVRALLQAPALPVAPGTVEAVSAHVALLVPQLELVTRQHRACLAQLEAALTALAGPGDDPPAAAPPNADGAAGPGPGGVDGLGTVVRLLGSLPGVGVGVAGVLLTEAAPALLAGDYHALRTHGGTAPVTKQSGKQRLVVMRHACNQRLRTALFHWARVSIQHDSAAHRYYATLRARGHSHARTLRSLADRWLRILTAMLTTGTAYDASRFAVAAPTP

SEQ ID NO: 336082 - protein, 482 aa, unidentified
MKPKQQEKTKEATCRATQGNWQQMNRKQRREMTRKIQSEDIRLEVVHCDAAGIDIGNESHYVAVPPARDSQPVRRFGCTTAELKEMAVWLKQCAIRTVAMQSTGVYWIAVYDILEEAGLEVYLVNARDTKNLPGRKSDVQESQWLMKLHTYGLLRNSFRPSQEIRTMRTYWRQRNDLVQSGGRHIQRMQKALTQMNIQLANVLSDVSGMTGQAIIKAILAGERDPHKLAAFRDPRVKASEEEIARSLEGNWEEDLLFVLQQEQDGYEFCHKQMAECDQRLAQYLERREDRSAGAHLPEEKRKGRLKKKSGNKPRFDLRTGLFRMSGADLTRIDGLDVMTAMTILSEAGWDMSKWETEDHFVSWLRLCPDNRISGDKIIGKGRLPTNNRVTTALKMAANSLRTSKTYLGAQFRRLRSRLDTPVAIKAMAAKLARLVYRMLRYGMKYVDRGAAFYEAQHRQLQITHLKSKATKLGFQIIQVPTA

SEQ ID NO: 336083 - protein, 343 aa, unidentified
MHTITTIGLDIAKSVFQVHGINAQGQVVTRRQLKRRYVLAFFQKLPACLVGIEACASSHHWSRELKALGHTVRLMPPAYVKPYVKRQKNDAADAEAICEAVTRVNMRFVATKTPEQQSGMVLHRTRHLFIRQQTSVINAIRAHLAEFGIVAPVGRKGVEELLDVVADPADKRVPEIARACLAALGTQLRRLKEQILDFDRMIRTWHRSDEMSMRLDKAPGVGPVLATALVGSVADPKVFRSGRNFAAWIGLVPKQHSSGGKERLGSISKQGDRYLRGLFVAGALAVIRYAKVHGTKHRPWLTALLARRPTKVAAIALANKIARMVWAMMARGERYKEPVALAA

SEQ ID NO: 336084 - protein, 316 aa, unidentified
MNPQVFIGLDVSKQQLDVAVRPQGRHFVTPNDDRGIKQLVKRLAALKPQLIVLEASGGYEFLVTAALAEAQMPVALVNPLTVRKFAGATGKLAKTDKIDAQVLAHFAEALRPEPRPLPDQAQQMLKAALQRRLQVVKMIGQEKNRLEKTFIPTLRQDIQAHLTWLSQRLEQLDRDLSDQIRQSPLWRDRDRLLRTIPGIGPVVSRAVIAQLPEAGTLPGKKAVALVGVAPYNRDSGRFRGKRMIRGGRSYLRRMLYMAAVVASRWNPVIRAFYQRLLAAGKPKKLALTACMRKLVLILNAMVKNNQPWNQFITQVP

SEQ ID NO: 336085 - protein, 353 aa, unidentified
MRILALDLGKNKSVYLDYAVGEGERTYGKIGTNARELRKLVERCLPDRLVIEAGPAAGWVCDLAESMKVPVQVANGNDERWRWKTVKEKTDRKDALKLAQLSEMDSLPRVHVPEASVRQWRSLIAYRHALVDRRTAIKNSIRAIYERQGISLASAGKAWSDRAVEALKKEAAAGSPEQPWLFQVHCELEQLESVRRQIEQVESKLKEIAESKRSVKHLRTAPCVGPRLSEAVAAILDDPHRFKNGRQVACYAGLTPRRWQSGNSDRQGRISHAGNRLLRELLVQVAWVGVRNRTWMLQVYQNVRRGSDKRKKIAIVAVARRLLVKLWAMMRDGTQWKEPVLPTPRTAAVAAGG

SEQ ID NO: 336086 - protein, 351 aa, unidentified
MDNTKYIGMDVHTETISIAVLNSAGKLVMESVIETKALTIIQFVQGLRGDLHVTLEEGTWAAWLYDLLRPHVNQVLVCDPRRNALLKVGNKSDRMDARKLAELLYMDKLNAVYHGEHGVRTLKELSRSYLAISGDLARVMTRLKAVYRSWAIACAGKQVYAPRCRAEWLGKLSEAGVRRRAEIYYEQLDALRSLRQQVRRELLAESAKHKASKLLCQIPSIGPIRAAQLIAILQTPYRFRGKRQLWAYGGLAIETHSSADHRYVKGQLQPSKRQVSLRGLNRNHNHELKNIFKGAAIIAATKPGPLQEFYANLVAKGMRPEMARLTLARKIAAIILIVWKKGATATPLGWL

SEQ ID NO: 336087 - protein, 337 aa, unidentified
MGKEYVGIDLHRRRSVIYRMDQAGEKVDSVRVDNEPIHFAKAVSAAPVGSNVIVEATYGWYWAADLLKEMGYEVHLANPHGNDWGHRRVKNDERDARDLADLLRLGRLAEAWIAPPKTRELREMIRFRIKLTHLRTGLKAQVHAVMAKNGILPSRGDMWGPGGNAQLDSLELPDAYFNRIAVLRDLVDIFDREIVYLDRDIHLILCDDAGYNAVQAIYGVGRLFAAVFVAEIGDVTRFDSPKALCSWAGLTPKHKESDIHVHRGRITKQGSRLVRWAAIEAVARYHGGAPFRDRFEAIAERRGNNRANVAIARKVLTLVYYGLRDGEIRCLADHDAA

SEQ ID NO: 336088 - protein, 398 aa, unidentified
MLSIGIDVSKGKSTVCGMKPGGEIVYTPFEVQHTREGMSELVSLLRGSGEEVRVVLESTGSYHCPVVATLLENGIFVSVVNSLRMKRFCSQSIRRVKTDQIDAMQIALYGLAYWQELQPTRLPENTYRELQLLARQYYQMTSLLIKAKVDFNALCDQVLPGMQELMSDHAGRHKLSDFVLRYHHTAHILKMGETRFRKDYCKWAEKKGYRNHERMAALIFATAQNGIPVLPNAPSTQIVITEAIRVLHTVEASRDAILTQMQALAKTLPEYSLVREMPCIGDTLAPRLIAEIGDVRRFHSKRALIAYAGIDAPPYQSGKFCANNRHISKRGNRYLRKTGYEVMQSYVMHKPANDPIFTFIEKKRSEGKSGKLAMVAGLNKFLRVYYGKVTELYRSLPQ

SEQ ID NO: 336089 - protein, 307 aa, unidentified
MQPCVGIDVAKHTLEWSIGSEGKIQHTRNEPRPIASLVRRLVAVDPERIVVESTGGYERRLVLKLAEAGLRVVVVNPRRVRSFGQGMGILAKTDAIDARLLALFGEKVEPPIRPILQGTDRLLADLVARRRQLVTIIVAEKCRRETACEAVRRSITAVLQMLERQVGALEQRIEKMLLEDAERAELSELLQTVPGVGPAVARTLLVDLPELGHLGRREIASLVGVAPFARDSGTFRGTRRIRGGRASVRTALYLAAMTGARFNPVLRELYERLRQAGKPPKLAFIALARKLLTILNAIARERNAWQA

SEQ ID NO: 336090 - protein, 457 aa, unidentified
MQTFYLGIDVSKGYADFIILNSQKQVVVENFQLDDTFDGHCLLFELLSRFFRDHPESIIYAAVESTGGYENNWYNALLAFQGSLNLQTARLNPLGVYHDSKAEMKRNVTDKISAKSVAEYMIGHPEKVSYQQQDHLSSLRKQWGFVKMLTKQSTQLLNQLEALLYSANPEILVSCKEGVPAWVFKLLVKYPTASNLAKAKVTSIARIPYVSSAKAQAIVLNAKRSVASATDKITQQLVVATVKEILHLKKNIKTQTEIMAKECSMPEVELLKTFIGISDYSAIGLVLNIQSVKQFKTAKKLASFFGLHPKLKISGDGVVVVRMSKTGRTEPRQILFMVAMTAITKNPLIRGIYQEHVRKGMEKMAAIGLCMHKILRIIYGMLKHNSAFDPEIDLRNRQKSVQRRKLSRKDNKIRRYQDYDPKAPISSRHKTKRMEQRQSQSDNGAEYGILAPVPFPT

SEQ ID NO: 336091 - protein, 292 aa, unidentified
MPIVGGLDIHRKQITFDYLDTLTGEVRRGQITPADRANLRAWLARFAGRSDVAFAVEGCTGWRYVAGELAAAGVAAHLAEPADTAAARGRKRHAKTDKTDSRHLRTLLAEGRLPECWIPPAHVLEYRALLETYHDLRRERTAWAQRIHAVLFHQGAPQLGDGTLRSEQGLAALREASAARLSPAGQLQIATALDMIAALEARTDMVRKQLLAAARHLTGAKVLAARLYGVGPVTALALTCWLGGAGRFSSSRKAVRFTGLDVTVWSSDRKGPPGRFYARAVTFDRKRSVIAL

SEQ ID NO: 336092 - protein, 341 aa, unidentified
MEQYVGLDVSMEETSVCIIDKNGAVIFEGEVPSQPEAIAELLRQRAADAVRVAFEAGALSSWLWHDLKALGIPVVCLDARHAKAALSMRLNKSDRNDARGLAELVRMGWYREARVKSMESRYIRALLIARAKLVNLKRDIENQMRGLLKSLGIVLGKVAGRPFLGKIVVVLRQAPHLRPIIEPMMTAQSALVTQILSYDEHVRALAKNAPTVRRLMTVPGVGPVTALAFVSTIDDPKRFASANDVGAYLGLTPRRHQSGEVDRTGRISKHGDRLMHYYLFEAANVLLNVVRRGSPLKTWGTTLKKRIGHKKAKVAVARKLAIILHCIWTDGTEFQWERAAV

SEQ ID NO: 336093 - protein, 415 aa, unidentified
MTMDILHTCVCGLDIHKASIQACVRRVVAGGRIEQEVRSFGTMTCDLLSLADWLASEGVTHVAMESTGVYWKPIYNIFEGRFEEILLVNAKHVKNVPGRKTDVKDSQWLAQLLQCGLLRGSLVPDRPRRELRELTRHRTQLVGERTAVVNRVHKTLEDANIKLGCVASDVVGVSGRAMLRALLEGRSSPQQMAQRAHPKMREKIPVLARALEGRVTDHHRFLLTELLDQMDDLDRRIERFNARIGELCLPFAKAIEALDAIPGLDVRGAQNVIAEIGTDMSRFPTAGHLASWAGMCPGNHKTGGKNRSGKTTQGSRWLRTTLIQAAVAAKQTKKSYFRAQYNRLVRRRGKKKSQKAVAHSLLVTIWHLFSTGRPYADLGVDYFDKLDEARIVRANIRRLEHLGYTVIATKTEQAA

SEQ ID NO: 336094 - protein, 342 aa, unidentified
MSIYVGMDVHRKRSQIAIVDAAGEEQRNRNVPNDPTELVPILGGLPPGTPVAFEAAYGWGWLVELLEELELEPHLVHPSRCKAIASARLKNDKVDARTLAQLLRADLLPEAWIAPQATRDLRALLRHRASLVRLSTMAKNRIHAVLADRGIRQQTGLWTGIGRVWLAELELPPTQRAIVEDYLALLDGLAEPITRLDHQIATLARADPRVQALMVLPGIGRLTAMTLVAEIGDIGRFPTARKLCAWAGLTPAVRNSDRKVRHGHITKQGSPWVRWILQEAAQTAKKRPPFADTYAQLARRRGRSIATVAIARRLLARCFHILNQLEAAPTGEGQTGCARETA

SEQ ID NO: 336095 - protein, 333 aa, unidentified
MLFVGVDGHKNTSQITVMDAGGKILKRQRILSSPEQFRQSLAEFSEPMKAVLEASYCWGPMYDWLDDLTEEVVLAHPSKVRAIAEARIKTDKIDSEILAHLLRADLIPRAYAPSKDVRAVKRVLRQRLFLVQLRTMVKNRIRALLTQHSIELPKISDLFSKSGLAWLQQVELPGPDGSIFREDLNLLKVFAEKIASTERLIDQLAQGDEAVPWLASLPGIGKFLSVVIRWEVDNINRFQEAKKFASYTGLVPSTYASASRMVHGRLTKRGNKWLRWAFIEAVTPAVRTSAHLRAHYQRIKNHSGAKDARTSIARKLAELAWTVWTEQRCYEER

SEQ ID NO: 336096 - protein, 355 aa, unidentified
MSEGSWVGLDVHARSVVAGVIDAGSGEVRSLRVSPGDGTVAWLQTLPAPVRVVYEAGPTGYGLARACAGAGISCVVAAPSRIRPAADRVKTDRRDAERLARLLRLGEIIPVRVPAPEEEAARDLVRAREDARSDLMRARHRLSKLLLRHGAVYDGTAWTRAHDAWLRRRWFESGPLAIVFDECYGRMLDAKTRRDALDKAIAELAAAPPYVDVVERLVCLRGVSTLTAFALTVELGDWNRFRPQSLGPFLGLTPSESSSGERRRQGAITKAGNSHVRRLLVEAAWHQRRPLRRSVTLERRRDGKSLAVQAQAERSARRLHGRWEALEARGKPRTIVVVAVARELAGHCWALATME

SEQ ID NO: 336097 - protein, 340 aa, unidentified
MEITTIGLDLAKSVFQLHAVDADGAVVWRKKVRRGALLETLGKVPACLVGMEACATAHYWAREISALGHEVRLMPPAYVKAYLRRQKNDAADAEAICEAVRRPTMRFVPAKGAERQAVLVLHRSRELLVRQRTMLINAIRGHCAEFGLVAAQGVSGSRDLATRIRQADSAVLPDMAKDAMVLLVEQLHLLVRQIQALNRRLLVWHRQDQASQRLATIPGVGVISATALAASVTDPSRFRSGREFSASLGLVPRQNSSGGKDRLGRISKMGDRYLRKLLVVGATSVVRRARTADSTAANWVRSLLERKPARLVTVAMANKTARIVWAVLARGETYRSPAAI

SEQ ID NO: 336098 - protein, 390 aa, unidentified
MHVVAHQPEAPGAIRSDLGAIFVSLELSRSTWLITSLSPCAGEKMSKHGVAAGDIGALLARFSEFKQKAFARTGKSFPIIVIQEAGLDGFWIHRVLQSEGIESHVVDPASIATSRRRRRAKTDRIDGEALLRALLAYKRGEPRVCAMVKAPTPEEEDRRRLSRERKTLIGERVEHVNRIKGLLFCQGVSDYEPLRRNRRQRLDELKTGDGRALPDHLKAQISRELDRLELLLEQIKAVEAGQNTLFAAAKAEAPTPAPVTMLLDIKGIGPEFAAILWMEAFFRSFANRKQIAAYAGLAPTPWQSGAVNREQGVSKSGNPRLRTTLIQLAWLWLRHQPQSALALWFKERVTRNGGRFKKTTIVALARKLLVALWKYVTAGIVIEGAVMKAA

SEQ ID NO: 336099 - protein, 429 aa, unidentified
MPSLKQETEGFSLATVEIVYPVCCGIDVHKNFLVACIAITGKHSNTTHLIRRFSTYKGDLRRLADWLASHNCKDVCMESTGKYWLPVFNTLEKTCNVCLTHPKYVKAIKGKKTDKRDAKWIVELFKCDLVRSSFIPPEDIRQIRDLCRYHAKLTNMNTSEKNRGQNCLTMCSFKLDAVFSDMFGKSATRVLDKLLECGNSDFDVAPLIHGRCKASLEEIQAALDGELTLAQAEKLKLIRLHMETIDKLKDDLECLILKLAERFQLQINLLLTAPGIGSPLTAIRILAEIGADMSVFETAKQLCSWAGLSPQNNESANKKKTTRISRTGAYLKPLLVQIVLAICKSNKHPELKDKYQALKKRRGHKKAVIAIARKLLTAIWHMLSKNESYNAELYHKADKPPVNRVLTPEQAFALLRSKGYHIIEPDSAA

SEQ ID NO: 336100 - protein, 301 aa, unidentified
MSEKKWVLAVQLPGVKRHSRHVVEARGDELAAFVERLKARCAVAGHNIKRVILTHEAGRDGFWLARFLARRGVEVHVMQPSSLPVDRRARRAKTDVIDVEMLLRTLMAWLRGEPRVCSMVPIPNEADEEARRAHREREELTGERRSIVNKIDGILATLGVKGFRALRRDRRDQLTSLRQPDGEPVPQMARARIERLLDRLELVLKLIDEVEATRDAVLKKVAPADDAERMIRSLANLRSIGPDFATLLVREAFVREFRNRRAVGGYVGLGGTPFSSGGSEREQGIGKDGNRRLRAAMVELA

SEQ ID NO: 336101 - protein, 354 aa, unidentified
MQQYVAFDVSKQSSEAVIVDVAGNRLMSRQVATDPSAMIAFVATYGRNVALVGFEAGPLSTWLYHELTGAGLPVVCIDSWRARAALSARLNKTDRTDAAGLADLLRAGFHHEVHVKSYAAHEVRTMLKARDSLVAQRRTLQNTIRGLLETFGLILRRGSGGRFAVLVEDALGSRPSLRPAIEPLLRVWHAAREAAAAMHRRLRAMARADADCRRLMTTPGVGPINALAFTSAIDDPARFHDSRAVGAYFGLTPRRYQSGKSDHVGKISRAGDGFMRSLLFEAAQCLVFEAAQCLAFRSSRAPALKAWFEALAARIGRKKALVALARKLAVILHAMLVHGRDFDETLQATAAAAA

SEQ ID NO: 336102 - protein, 310 aa, unidentified
MEQISVVGIDVSKDRLDVHVLPAGETWSVSRDGEGLGELCRRLGGTARLVALEATGGYETIVAATLSSQGVPVVVVNPAQVRAFANALGQRAKTDPIDARVIARFAEATQPEIRPLPDRATRLLADLVARRRQIVEMIVAERQRLHRTEPARVRTSIERLLKALEKELASVDHDIDGSVRRSPVWREKEDLMTSVPSVGPIIARTILAELPELGTLDHKRIAALVGLAPFTRQSGVWKGKASIGGGRRAVRTALFMGVQTAKRRNPALKAFYDRLIAAGKPKMVATIAVARKLLIILNAILRDKTPWQNA

SEQ ID NO: 336103 - protein, 330 aa, unidentified
MKQYDHVFGVDVSKKTVDITHVVNQQFTHRQFANDDSGMEQLMEWFKELTPAFDKSLFCMEATGLYCFTLTHFLASHSIDTWIEHALQIKRATALARGKNDKVDSQRIALYATKNLDRLRLWKPINAILEKIRHLASLRDRLVDTKKRLATPIKEFEDVGNLAMAKLLTKTIKSSLAAIDKDLKNIETKIIDIINEDDNLKLLYKLITSIVGIGFVTAVNLIVHTNGFTILKDSRKLACYCGVAPFEYSSGSSIRGRTKVHYMANKKLKCNLHMASLTAVKLDADLKAYYERKVGEGKSKLSVLNAVKNKLLARVIAVVNKQELYVKKVA

SEQ ID NO: 336104 - protein, 390 aa, unidentified
MVNFQGSAKAQYSVQNVQYRYIVSLDVHEKNTYIFAVDLKNDEVKFDHNVQGSITVALKAIDRLSMKKDETLVLYESGSCGFYPARLFAKVGYTCKIIAANSIPSKGSGKRKNDRNDAINNFQYFMAGSLRFVRMPSEAEVADREVVRYRRDVAQKIAKQKQMIYAYTKRYGLVFDLTKTPWTKAHRQWLKTVMAHPSARFVLDCHLRELEKLEALLSEVDHVLDEIFNTNTQYKALKELYSLLPGFGRVNTMVMVLEGGDLGRFPHPNALMSYTGLVPGKRSSGTSNPEVGITKEGNAYLRLTLVNAASVFRDNRLVHSKKDTGAAHCPIRKEFLERLQRRLCMRYRHLRDKGKKGNEPKCAIARELAGFVWELATKIAPKLNGYRLAA

SEQ ID NO: 336105 - protein, 405 aa, unidentified
MLEHQYQYLVGVDWGTERHEVCVMDARGEVVAKRQVEHTGEALGVLCDELTRLVQGHPDRIAVAIETPRGAVVESLVERGFHVYSINPKQLDRFRDRHTVAGSKDDELDAFVMADSLRTDRKCFRRVRIDDPLIIQVRELSRASDGLKVELGRLSNQLREQILRYLPQLLELCPGADEPWLWELMALVCENTQPTRVRLPQVRIVLKDHRIRRIDADTVVAKLRQEPPWRTAGTQQAVRAHIKLLLPRLRVTRQQSRDCEQQIEALLEEMALPPAQGASAEGEIREHRDVKILQSLPGAGKVVVATMLAEASQPLAERDYYTLRSQAGIAPVTKSSGKRSRAKATVSMRYGCNWRLRNAFYYWAMGALKKGFIARSGDRGGSGVAAAAGAVKALRASSATLRPYG

SEQ ID NO: 336106 - protein, 287 aa, unidentified
MSYAAVATCGERRIDLGKRDLHATLLQGDRSASKSVPNSQVGIAQLQTWLKNRNAERVHACLEATGGWSEQVTISLAEAGHVISIVNPARIKAFAQSEMVRTKTDGVDAALIARFCRLHQPEPWKPPAPEIPILQGLVRRQHSLIQMRVDEENRRAAPIVSPAVTASIDAALDHLERELERVDQEIAQLFDAHPTLRRQRELLISIPGIAGSTAAGILGEMPNITEFRDVKAIAAYAGLSPRLTSPARSNIVAGSRNPVTLTCGAIFTSQRFRQCVSTRPFARSLNA

SEQ ID NO: 336107 - protein, 349 aa, unidentified
MIGVDYHPSFQTIAFLIEETGECGEQELNHSDGQAEKFYRDLKQRGICVRVGMEATGYSRWFERLLAELGFEVWIGDPAEIKTKRVKKQKTDREDARLMRKLMLENRFPRIWVPDPENRDLRQLLWHRHRLVQMRTRIMNQLQALAMNEGYRWKKKLFSEQGRAQLEKLSLAPWASRRRQELLELLDRMNPTIEELTTAVEREARKRPAAQRLMTHPGVGPLTALAFVLIIGTWERFPRGKQIGNYVGMIPSEDSSAGKQRLGHISKQGNSLLRFLLVEAAQAAARCNPDWRRRYIHLAMRRHKSIAKVAMGRRLAVRLYWMWRNGCEYSQSLEFGSYAGQLGTGHGVK

SEQ ID NO: 336108 - protein, 407 aa, unidentified
MDIIIERACGLDVHKDNITACIITPTGKEIETFSTKTVYLIELVDWIKEHGCIHVAMESTSVYWKPIVNLLEAEDIEFLVVNAQHIKAVPGRKTDVKDAEWIAKLLRHGLLRASFIPDRNQRELRELVRYRRSIIEERARQLNRIQKVLEGANIKLGSVVSNITGVSSLDMLRSIANGVEDLDILADYARGVMKQKKEQLKLALQGYIQEHQRFMIKTIIDHYDYLTNTIDMLDKEIAQRMSKYQEDIDRLDSIPGIATRMAEQMLAELGTNIKEQFPSAAQMCSWAGLVPGNNESAGKRKSSKTRNGNKYLKSALIEAAHSVRGSKNYLGALYRRMAARKGRKRAAIVVAHAILRISYYLLTRKEMYVDLGEDYFDKQRKQSIVKHSLRRLESLGYTVDIKEQIAS

SEQ ID NO: 336109 - protein, 352 aa, unidentified
MRIIGCDLHARQQTLAVLDTATGQVMEKTLTHSGSNVQEFYAALPGPVRVGIEATGTMQWFLSLMEELGIECQVGHPAKIRAAEPRKQKHDRRDADLILQLLVENRFPSIWRPSKELVDLRALLLHRHQWVRMRTRIQNALQAIALANGLRRGPSLWSHDGQSTIASLPLAPHTAHRRSELQAMYAKFETDIEKLNQRVQEQADERPGATLLMTHPGVGPITALATDVFLGDPKRFADGKALASYVGIIPSEYSSGGRQRLGGLSKQGNPLLRFLWCEAAAHAVRRDPELQRFYRRKLVQKGLGKARVAAARKLGIRLWIMLRDQIDYHEFCRRGQMQHSSGDACAGMPGTR

SEQ ID NO: 336110 - protein, 479 aa, unidentified
MTPSKDAFPEPCPPVPTIPEPSVLRPSFSLPLYNPHAAGIDIGEAEHWVAVPPDRAPQPVRRFGTFTADLDALADWLLDCGITTVAMESTGVYWIPVFELLEARGLQVFLIDPRQAKRAPGRPKTDRLDCQWLQRLHAYGLLAAAFRPDDQVCVLRSYLRHRQMLLTYGAHHIQHMHKALQQMNLKLSQVVSDLTGATGMAILKAIIAGERDPLTLAKLRNPHCQHREDEIAKALQGTWRAEHLFALQQAVELYQFYHQQLTVCDQHLQTHLGTFADQSAGQPLPPKPRRHKKANEPHFDARTPLYRLAGVDLTTIEGIEEGTALVILAEIGTDMSRWPSVKHFCSWLGLAPQHKISGGKVLSRHVRPGAHRVAVALRLAARTVHHARTALGAFYRRMRSRLGAPKAITATAHKLARLVYSLLKHGSAYVKQGLDDYESQYRERKVKAMARQAKALGYTLVALGTPEVQSLDAVAAPTS

SEQ ID NO: 336111 - protein, 470 aa, unidentified
MVAVMIGIDPHKASHTAVAIDPAEAPLGQVRVRACGAQTERLLEWAQAWPQRTWAVEGAGGVGHLLAQQLAAAGERVLDVPPTLAARVRLLATGNINKNDPNDARSVAVAALRSAGVREVRRDDHAAVLKVWSKRYRDLGRARTQVACRLHQVLCELVPGGVPGEITAAQAERILASITPAEAVQAARWELAAELTEDLRGIDARIRQARTKLAAAVRAAGTSLTRLFGVGPVIAAAVIGDVGQVARFPDRDHFAAYNGTAPIEVSSGGRKIWRLSRRGNRRLNHAIHMAAVTQIRHRHSQGHAYYQKKLAEGKTGKEALRALKRQVSDAIYACLQADARRAAAHVKGPGGQPGNGSDSSAAGSHPGHRLFGQATPGPRHHTTTAASDPAPGPASARGRAGHSSIAATLPLAKPQVQVQRPQRSEDERPGGAARQRPYSAARKAWGQGSQAKPQRPEAASRAREKDRRNP

SEQ ID NO: 336112 - protein, 435 aa, unidentified
MRLQEYGRNPNKRKEYVHHPDLLLVGVDVSKAKHNACMGTQTTLSCRKLEFTHTREGFRRFEQTLQAHLVKNGRQHILIAMEPSGIYWQALYARLKNCGYEVCLVHCQAVRNNRKTMQDGTSKTDEKDAASVFDLLRQGKFFLPVARDPALTAAYRLLRRHMALKQRVSQLRNQLRAALHLAFPELNPLIQDLTQPTSLRFLQVNPTPESIIRQGRRCFLEQWQPRRCCGQWRPEKLQHIYDLATESIGLKDPYHIDEFEIKALAQDLTDALAKQHMWLTQAIGLLEVRQDFPLLIQLPRIGKPTAAAILTAIGDIHEYTNGKQLVKLAGLDVRRFESGTSIRKLPKISHVGSGYLRYWLYHYALRLVAHEPHFTTYYQRRKHQSPGKGAGQRALMAVCDKTIRMIYRILTDHASYSPQKDQSIAEYYAAQRKAA

SEQ ID NO: 336113 - protein, 358 aa, unidentified
MRIIGVDLHTRQQTIAMLDTDTGEVTEKKLPHEGEQVREFYAALPGPVQVGIEATGSMHWFLELMEELGIACRVGHPAEIRKAEARKQKHDRRDAALQLKLQVENRFPSIWMPSVELRDLRTLLTHRHQWVRMRTRVQNALQAIALSRGLRRGKTLWSQAGQHAIESLPLPPNAAHRRTELQRLYHKLDEQIDELDQRVRDQAVQRPGAKLLLTHPGVGPVTALATDVFLGDPARFADGKALVSYVGMIPSEYSSCGQQRFGRLSKQGNPLLRFLWCEAAVHAVRRDPDLQRFYRRKLQQKGLGKARVAAARKLGIRLWILLRDQIDYEEFCRRGQMRRNIGGARAGMPEVGHSPAMQ

SEQ ID NO: 336114 - protein, 408 aa, unidentified
MNPLYVGIDVSSKNNVIYLMLPNGDKHSSFSLANSHDGSTQLVKRIFTAMTSNNIDSVLIGLEATSVYGDNLVYFLKEDTTLASFDRKIHVLNPKQVNKFKESYNDLPKNDYVDAFVIADCLRFGRINKEVYMDDYRYKALQNLTRARYFAVTNLTKEKQRFINVLFKKYSTMTQEKVFSDTFSTTALAVYEKFESAETLAKMDLQELTAFIMEKGKNRFPDPDAVAKALQKAARSSYRLPKTVNDSVNQVLAISITSIRALESQIKAFDKAITKQMELLPNVLISIPGIGPVLSAGIMAEIGDINRFQNQAALAKYAGLAWQQHQSGDFEAQTTRMIHSGNRFLKYYLCEAAFSLVRCDKEYNRFYHLKYKEVNRFQHKRALALTARKFVRLVFALLKDNRLYRPAE

SEQ ID NO: 336115 - protein, 405 aa, unidentified
MEQTEHSDHVIIGVDPHKLSATIEIVDSHEKLLGSGRFATDQAGYAAMRTYAKAWPDRVWAVEGANGAGRPLAQRLLEDGERVLDVPAKLAARVRLFDTGHNRKTDALDAHSIAVVAVRTEGLRVLKIDGELEALRMLADRREALTRRRVQTVDRLQALLAELLPGQAKRDITTGQAKAMLATVRPRDIAGKTRRRIAAEELSELIVVEAKIKKATAELKTMVLARGSTLMNLHGVGPVVAARILADVGDVARFTDRNRFASWTGTAPLDASSGEQNRHRLSRAGNRKINHMIHIAAVTQLRLDTDGRAYCRRKRAEGKTPLEAIRCLKRRISDAVYRQLVADAQHPANAVAGAGPGGHCGASKESSAVDLPPHIDTSDQPLPGPAQPTLRPLASTRKRPLQPAG

SEQ ID NO: 336116 - protein, 377 aa, unidentified
MFREEWPAAVCTPRQAAGDRIVPTQSRFWLLRSEIVVSTFIGPGWLPEQLGSLHKAGSTKMTQTIITTAGIDTSKAKLDIAVHDRTERWQVANALSGWRGLARNLAKVGVTRVGIEATGGYERGVVEHLRGAGFTVLVLQPNQVKAFGQVHLRRAKNDVLDAVLIAACTATLDQPRIAPDPRLEALAEDLTFLDQIEEDIKRSKTRLEHIHEPRLRRMVLCDIARDKARRTAQIRYIAKQLRAHPDLATRFDLVLSIPGIGERTALALLIRMPELGRVSREEAAALAGLAPFDNDSGQHRGQRHIAGGRSRLRRSMFAAALPAAFRWNKALVALYARLKAAGKHHNAALIACARKLLIYANTVVQRGTPWVEKATQL

SEQ ID NO: 336117 - protein, 352 aa, unidentified
MDVSKDSISVGILHPEEESPVVEKISHDEQSVRRLIRKFPSPGRLVVCYEAGPTGYELHRLLVSMGVTCDVIAPSLIPKRAGDRVKTDKRDAKKLARLHRAGELTAIRVPSVEEEAVRDAARARADMVDDLGRARKRMQAFLLRHGQIYRDGSAWTIKHHQWLRSVDFEDRALRLTFGRYLAIVEAREAELEAMEAELRPYLEHRLFADEIARLCAYRGVAALGALTLASEVCDWRRFPSAGAFMGFCGLTVSEYSSGGTVSRGHLTKTGNNHIRTQLVESAWAYQHRPSLGAELRRRQTDLDPDTVARAWAAQQRLCARFHRLQARKNNKPVVVAAIARELAGFLWAEMVA

SEQ ID NO: 336118 - protein, 454 aa, unidentified
MGKNSEKAKKKIGFHDGLPQIRANAAGIDVGASELWVDVGGKDPEPVRRFETFTADLHEIGDWLKRCGIETAAMESTGVYWIPICQILESKGIEVVLVNARHAKNVSGRKTDMVDCQWLRILHSYGLLAASFRPARDIGVLRAYMRHRQMLIEYAAAHVQHMQKAMTQMNLQLHHVISDITGATGMRIIRAIVAGERDRGRLAAMRDSRTKANEETIAKALEGDYRPEHLFALKQSLELFDSYQKQIEACHQQIADHLKSLESKANPAEALKASRTTKKKRRNQPQFNLREEAFRISGVDLTQIDSINESAALGLLAEIGVDMRPWKTEKHFASWLTLCPNNKISGGRVLHRATRKSASRARDIFRLCAQTLLGSRSALGAYCRRMCGRLGSAKGIVAVAHKLALLVYRMIRFGRDYIDIGQERYEEKYKERVLKNLARRAKDFGFQLVPSIPK

SEQ ID NO: 336119 - protein, 422 aa, unidentified
MSYCPVAGIDVSKQFSDMCILSPDNKIFAQEKIYHDETSINRANALLQKAERLFFSKPVIVMESTSHYHLILFQFFSEHGYDVIVVNPLQSNSMKDFSIRKRKTDRVDAFKLAMMYRTKTLRPSQIPQTATRALRQLCRHRAELLNDVSSYKNRLTALLDQTFPGYDKVFSDVGGVTSCAVLVRFPTPTILLVEEESELVDVIAAASKAGYNLAKKNAGLLISAAQKAQTLGIHSCADETLIVCTIQMLRTLSESVLQIETAIDNLLAQIKEMRNNVSLLQSIPGVGSHSAALLLGEIGDILLFKKPKQLAAYFGLDPTERQSGSFRGTKNKLSKRGSPYARAALHMGVVNSICKRGKDSAANPVLLSYYEKKCKNKPAKVAQAASMHKLVFIVFAVLRDQKPFELKTPEQHAVEQGFVKAA

SEQ ID NO: 336120 - protein, 403 aa, unidentified
MISIGIDVSKLKSTFCILNEYGEVLQTAREISHTETDLNELIRQVKSFGGKDDVRVIMEATGAYSKPVLYSLIEEGIFVAEINPLAMKKYRSNINFRGVKNDPIDALAIASYGIDKWHRLKEYQKADKEYAAMKALSRQYLSYMKPHVSLTQNLDHLIDQVMPGIKDEFDGYDPATGKDRLTDFLEEFVHYDCIRSLGPKRFDERFKRWAKKKGYRPRQGKSGKIYSLAKEGIPTLAYDPISRLLVKQAAQALRSMNHVLNEILSQLRSLAKQRPEYPIIRAMSGVGDVLAPLLIAEVGDPRRYYSGSALIACVGIDVPPYESGQFKASERGITRKGSKQLRKLGYLMVKNLRKIKPVKDTAVYDYYLKKKSEGKKDKKAIVAAMNKFFRIYYARAMEAYKTE

SEQ ID NO: 336121 - protein, 353 aa, unidentified
MIVIGIDPHKSTHTATALDPATNSDVGSLRIEASITEYQRLIVWAKAWPERTWAIENADGLGHHLALWLLALGEVVLDIPTTATARVRELSRGGRRKNDRIDAAAAASVAALQGDARQVYPETTTDSLALLDERRVNLSRSRTRAVNHLHALLRELMAGGAPTSLTPLSAPRAVRGLRPRTGPDRIRVELAKELIADVRRFDEQLTANAAKMTALLDEHGTRLREIDGIGPILAARLLGRTGPANRFASAAAYANYTGTAPVQIASADSSRHRLSRYGDRQLNSAIYIIAMTQIRMPASAGRAFYDKKIAEGKTPRYATRALKRHLAGHLWRLMLADETRTARASSKVAANAS

SEQ ID NO: 336122 - protein, 386 aa, unidentified
MFEFLSTRSRQEQLAMQDESKKHCIMVGCDLHDKSMLLKVAAGKDKPETKTFENTAAQRVQMIKWLKGKSKAKHCKQIYFAYEASGQGFGLYDELKAAEIECWVLAPTRMERSVKEKSRKTDEKDALKILELVRGHLLAGNDLPAVWVADPELREDRMLMRRRETVAQQLTRTKTRVTFLLKLAKIERPEIVGDAWSAADRRWLREVGESEHYGWAMRMALQSLLRELAFLEDEEKELGKQINALAETEPYGEAVAKLCELAGIGVLTAMVLVTEMGDASRFKNRRELAAYWGLVPSSNESGEANDRKGHITRQGSGHVRRMLCQAVWAAVRTDGVIGAKYRRIVERNPRKKKIALVAMMRQMAIKAWHIVCLVQAQAACTSSADG

SEQ ID NO: 336123 - protein, 375 aa, unidentified
MVAEEFTSLNNERVYCTTDVSGYGSIAAIPILNNLTWGRQSVAGGAFAMTYFLGFDVAKAKLDYSLVNEQGIEQMYGKVANNEMDIATLLLTTCGNYPDISLQCVVESTSTYHLVLAETSFALGIGCQIYNPIITKQQIKATIRGKKTDRTDATMIARLGLRGEGKPYTPEPYLAAKYYARSAQKLGVLSGLFKKHHDHITSLLGDDLSPESQALLVGVQEAIAAARKQLNQDMAASAESETYRLLKTIKGVGPYVAASVIGEVQDIKRFKSAKALVAYAGLDPKIRQSGKVLNSTGRLTKRGSTHLRYSLFIAASVARQYDPQFKDLYDKKRAEGKCYKVATCAVARKLLLVVRSVWLSGKDYTVPESFQPRLT

SEQ ID NO: 336124 - protein, 346 aa, unidentified
MNYIGMDTHISTLDFAVVNEAGRLTKAKSIATNVKGFMEFVKQVPAPRTIYMEEGTLAAWALETCVQYGEKLVITDPKENHWIGSSGQKDDPLDSFKLAQLARGGYIKEIHHPVGQRRRFRELMEAYHDTVRMTTRLKNKIKAKFRQNGIPCTGDTVYSETYRGEWKGKLPRDATLLLILEGLWRQLEQSKQNEKEILAAARAQAKYYPEIKHFEAIPGIGFISAATISAILETPHRFANKRKIWMYAGLGLMKKSSGGKIYSEKLTIDYNRLLKYTIKQAAEATIQAKDNPFRHKYLDMTLLHGIAPNLAKLTIARNMLATMWAMWKKGEKYNPEIREKESHKQG

SEQ ID NO: 336125 - protein, 359 aa, unidentified
MASKVKKNKINFKGKMVSIGIDMHKISWRITALVEGDTVLAITLASPNYEAFKKIISRFKGNHVCIAYEAGPGGFDLYDKLTEDGIECIVTPPSLIPTESGSKVKTDKKDSYKLARLLESNMLKAVWVLSPKERAHRQLVRTRRQIVNHRSDVMRQIKSLLLFNSVDIPFKSTQHWRGPFMNWLLKLDLGYEPLNRSLKALVDLFNYLSAEKKRITEDVLGLAKEEKYAKRVELLESIPGIGTLSAMEILVEIQDITRFKTADELAAYLGLTPSQYSSGEHVRMGHITHAGNTRARTTLVESSWLLIGKDPEMKRKYQRIKERRGGKRAIVAVARNLSGRIRRMLLDHVPYELNFQKAA

SEQ ID NO: 336126 - protein, 344 aa, unidentified
MNHFAGLDVSVKETSVCIVDDTGKIVREVKVASEPEALLAVLTNPAYHFKRIGLEAGPLSQWLYSALAEADLPVVCVETRHMQAILKAQINKTDRNDARGIAQMMRVGLYRPVHVKTLRSQKLRMLLTHRKLLQSKAIAVENDLRGTLRNFGLKVGMVGKAKFEARIKELVENHPDLTILVEPLLVVRRVLREQIVILHRRLLTIVRDDAVCRRLMTTPGVGPVVALTYRATVDVPARFRKSKSVGAVFGLTCSKYQSGEIDRSGRISRCGDEMMRVMLYEAAQSMLRSKKWSWLKAWAMQIARRRGMKKAIVALARRLAVIMHRIWIDGTEFRWTREQAAAAA

SEQ ID NO: 336127 - protein, 344 aa, unidentified
MKEVSIIGVDLAKQVFQLHGATAEGEVVFRKKLSRKQFLTFLQTHPRCRVAMEACATAHHWARTLTAFGHDVRLIAPKFVKPYVKNQKNDMADAEAIAEAASRPTMRFVEVKTPEQQGLGMIFRLRDLLIGQRTQTINALRGHLAEFGVVTAKGRENVDKLRAALHQEEETADIPASVRHMAQLFFDQIDDLSRRIADIDAQIAAASRRSRFSARLQKMPGIGPITAMAMAAFAPPMESFRQGRDFSAWLGLVPRQHSSGGKPRLGRTSKSGQRDIRRLLIIGAMAVISGAKARPPSESSWLGRILARKPRMLAAIALANKMARMLWAMITKDEEFRGGPLSAT

SEQ ID NO: 336128 - protein, 355 aa, unidentified
MTVTIVEEARPVTCRAAVTGGVDTHADTHVAAALDPVGGLLGVGEFPATTAGYARLLGWLGGFGTVCLVGIEGTGSYGAGLARYVTAAGIRVVEVDRSDRQDRRRQGKSDPLDAVSAARAAQSGRASGAPKGRDGAVEAIRTLMVARRSAAGERTRTINQARALVLTGPDDLRARFAKHKPAALITGLAALRPRPGDVAGHATRIALRELGRRAQFLDGQLVRLDELIVPLVTARAPGLLAVYGAGPRTAALLLIAAGDHPERLRSEAAWAHLCGVAPIPASSGKVTRHRLNPGGDRQANHALWRIVFTRLGSDAATRAYAERRTAEGKSKAEIIRCLKRYVAREVYRQLRPAVG

SEQ ID NO: 336129 - protein, 416 aa, unidentified
MNAVGIDVSSRKSTVAVLRPLGEVVCLPFDVTHDIAGLASLAEKLKAIDGETRVVMEHTGRYYEAVAKALHEAGLFVCAVNPLLIKEYGANSLRRVKTDKADAVKIARYALDNWADLRDFTPMDAIRYDLKTLNRQFQLASKQRTASANNLIALLEQSFPGIRKCFDSPVRSDGTQKWVDFAHSFWHVDCVRKQPFAAFCERYRKWCKRHAYLFKLSNAEEVYALAKRAVVLTPKSKVVKVLVQEAANQLISISRSVEVYRAEIDRLAAMLPEYPVVMAMYGVGKSYGPQLMAEIGDVRRFERKQALVAFAGIDPMPNQSGDKNVRSNKSSKRGSPYLRKTLFNVIRTYLQCAPQDEPVFQFLNRKRAEGKPFYVYMLAAANKFLRRYYAKLRDYFASLDTLQSVDPIPTTLKASL

SEQ ID NO: 336130 - protein, 369 aa, unidentified
MVPTMPKRIALSNPDRAGEPLLVFGGVDTHADTHTVAAISHLGAMLGHQSFPATAKGYRQLYGWLAGHGTLMRVGMEGTSSYGAGLAAALTGHGVELVEVNRPARTTRRARGKSDPIDAEAAARAGLAGVATAVPKTHTGVVEEIRVIFVARRGAVQARTAAINTLHQMIITAPLQLRAQLQPLTRTQQITACAALHTGDITSPTRATKLALHRLARRIRHLTAEITDATNDLTTLVQAHAPHLLTQVGVGSLSAAQLLITAGDNPDRMTSPASFAALCGTSPIPVSSGKTNRHRLNRGGDRQANCALHTIALSRLRYHPETQAYAAKRQTEGKTERDIRRSLKRYLARRLFALILTASQATDNTLIAA

SEQ ID NO: 336131 - protein, 410 aa, unidentified
MFSIEVVIERACGMDVHKDNITACIMTPEGKEIQTFSTKTVFLIQLVDWIKKNNCTHVAMESTSVYWKPIVNLLEAEEIEFLVVNAQHMKAVPGRKTDVKDAEWIAKLLRHGLLKASYIPDRNQRELRELVRYRRSIIEERSRQHNRIQKVLEGANIKLGSVVSDVMGVSARDMLNAIAEGEEDPEKLANFARRTMKKKKDELELALKGYINSHQRLMLKTILKHIDFLTEQIEMLDQEVEERVSSYQEDVERLDSIPGIATRMAEQILSEIGTDIKKQFPSAAHMCSWAGLVPGHNESAGKRKSAKTKKGNKYLRSALTEAAHSVRGSKNYLGALYRRTASRKGKKRAGIVVAHAMLRISYYLLTRKEMYVDLGEDYFDKQRQQSIFRHSLRRLESLGYTVTLQEPEAS

SEQ ID NO: 336132 - protein, 398 aa, unidentified
MGSLWAGVDVGKTHHHVCVVDDDGTVVLSEKIPNDQQAISGIAGRLGKRRKPIRWAVDLRGGPASLLLAVLLDRGADVRYVSGTVTSRMAEAFHGERKTDAHDAYVIAQTLRMRNDLPTLTLADEVQQRLKLLVSRRLDLVADRVRITARIQDLLTMISPALEKTLNLRSKGALRLLEQWQTPAGLRRAGEARILAHLRQHGVRAAMALTVKVLTAARTQTVTVAGETTAAGIVAQMAADLEAVNDRITALEETIAGIVVEHELGEIVTSLPGIGTTLAAEFLAHAGTLTTYPSAAALAAHAGLAPISRDSGRRQGHQVRPHRYHRGLRRVFSMSSFTALTHCPRSRAYYDKKRAEGKTHRQATAALSRQRLNVLWACIRDQTPYQPKQPRSAELALC

SEQ ID NO: 336133 - protein, 338 aa, unidentified
MKQIYYIGVDISKEKLDIAVMDQSYQVLWEKVVQNRDDKLVVFFKAILKKLKAENDQLLICCEETGIYKRPLQRACLEMGLNLWVELALKIKRASSSLRGKSDKQDAIRIADYACRYKDKKVIYKEPAGSNKTLQVLLNSRETIIDQITRFTQQLNESKRFDKEKYEVQRTCFQPSLKVLKKQLLNIENKIDELISKSEELLRNLKLLTSIPGIGRQTALNFIVYTRNFTLFKNFKHLACYAGVAPFPNESGNMIKKARVSNLANKKLKKLLHLASMACIKAKGELKEYYIRKVKEGKNKMLVLNNLRNKLVKRMYAVINRNTEYISIKTETNACFSS

SEQ ID NO: 336134 - protein, 316 aa, unidentified
MSDAQVLVGIDVSKVQLDVALRPTDDCWHVSHDALGIAGLVERLRTVQPTLVVLEATGGLEVPVTGALAEAGRPVVVVNPRHARDVAQATGRLAKTDTLEARGLAHVAEAVRPTPRPLPEAQAQALSALLTRRRQLVQRLTAERRRLQTAPQPIRADIQAHITWLACRLARTDDDVAAAIRSSPLWRAKDEIVPSTPGVGPILSRTLVAEVPELGVLNRQEIAALIGVAPFNRDRGTRRGKRAVWGGRAHVRAVLYMSTLAAVRHNPVLKAFYERLRSVGKAPKVALTACMRQLLTILNAMLKHRTPWQENYAHHS

SEQ ID NO: 336135 - protein, 269 aa, unidentified
MPLKQGVRSQMEETLNYVGIDVSKARLDVYIRPLNITLKVANTKEEITTLVETLKQYNPKLIVIEATGGLETEAIIKLQEYQQPVALINPRQGRDFAKALGYLAKTDTIDARVLAHFGEAIQPKILAIESEESRQLSELVSRRRQLVEMQTAEKNRRDRARGKALLDIEEHLKYLDKRLNQINEEIEEMTKNNQEWSDKVKLLKTVPGIGPVISSTIVSDLPELGKLSAKCISKLVGVAPLNHDSGQFKGTCAKIKYQLIRNYSNIPFG

SEQ ID NO: 336136 - protein, 337 aa, unidentified
MGRFIGVDLHKTAFTVCFLEGEDKRLESYKIGEIERFRSELRRDDAVSLETTTNTRSFIKQIRDAVGSIHVINTMQFKVVSQSVKKTDANDAEAMAFFLSKGMLPEVRMKDERYAELESLAQTRHKLVQLRTALKNKIHNILNAQGIVTKKESLSSRKGLEAVLNHPISAVAAIELEVIVEQIKGLDAGIAKIDKELADKGKGLDGHENITSIKGVGDKGGAILLSVIGNIEDFEDEKKLAAYFGIVPRVSNSNETNRQGRITKRGSKLGRTTLVQCTLIAIRYSPYLKAFYEKLKAKKGSGKAIIATAKKLLGIIYLTLKNKWVFEDFPNFVLKET

SEQ ID NO: 336137 - protein, 392 aa, unidentified
MFYLGIDIAKVNHVASLISEDGSILVKAIKFTNSIEGLQKLLDSISNFDTSQIYCAMEATGTYWLSLFSALTDKGFNVSVFNPYQIKSFRGAYNNRKQKNDVIDSILIANFLSFNGTEQTSLPNDDLLALKNLTRYRSNLVDNICKAKTQVTGILDKVFPEYSDLFSDTFSEASKQILLNCPTPNEVVNFNTRKLANLLKKASRGHHSTDKVREVKSLAKNSFGIKFTGDACSFEIKQLVNQIIFLENQAHELEVKIKDIYSKLDNHLQSIPGIGKVTAPTILAEIGDINNFSSPSKLTAFAGLDPSENQSGNKKSSNEKTSKRGSPYLRHALYTAAMVAANNDPIMHDYYIKKRAEGKHHYVALTGVERKLLGIIFHVLKENRDYRPPKLS

SEQ ID NO: 336138 - protein, 367 aa, unidentified
MEKSSKVFVGMDVHKESIDVTLAEEGGEVRRLGQIGGDRGSLLKMVRKQQSKGGERVFVYEAGPCGFWIHRELAALGERCMVVSPALVPKRAGDHVKTDRRDSARLASLARAGELEAIHVPDIRDEAIRDLVRGRDDAVIAQRRVRQQLKALLLRNDIRYVGKTSWTGAHRRWLSELKLPEPAQRIVFEEYVDAITVATARIERLTLAIQTETLTWRFAPVVAGLQAMRGIQFVHAVTLIAELGDLTRFGSARQLMGYLGLVPRESSSGEQRRQGSITKAGNGYARRALIEAAWAYRYPARVTRIIATRQTGLPKTACDIAWRAQLRLAAKYRRLSARHLHHNKIVVALARELSGFVWAIGQSVKPH

SEQ ID NO: 336139 - protein, 365 aa, unidentified
MKKTITAAAANKRNFSGKLTIGLDLGDRWSWYCVLDEAGEVVQEERVATTPKAMQQAFAAMPRSRVALETGMHSPWVSRLVSELGHETIVAHARNVRLIGESRRKDDRLDARKLARLARIDPQLLAPVKHRSRQAQADLTVIRARASLVRARTALANAARGLTKSYGERLRGCNVRNLDFEKAQALSPELQAALEPLLQALESLSERIAEYNRQIESIAQQSYPQTALLKQVKGVGTLIALTYMLTLEDPHRFRKSRDAGCYAGLQPGRRNSGQSEPQMHISKEGDPYLRTLLVQGAHHILGPFGADSDLRRWGLKLAERGGKNGKKRAIIATARKLAVLLHRLWVSGEVYEPFHNRSVTMLATA

SEQ ID NO: 336140 - protein, 702 aa, unidentified
MHDLALPSSGRVSGTADACLFGLSLCSGAGGLDLGLTIAMPGYRTVGHIERETYAAATLVARMEDAALDRAPVWDDVATFDGRPWRGAVDIVTAGYPCQPFSVAGKRRGADDPRHLWPHVARIIGEVEPPFVFLENVAHHLRLGFPEVASGLVGMGYRLAAGLFTAAEVGAPHKRERLFILAIREGDELADPTRLLWDSFEWRKPDGDAAPLADAESQRQREPADEADALAGSGQARDEPRDDGRDVADAAVRQLSQPGRRSETPEGSGRHGAGLADADGQRRVQAERGQSQDSGSDKRQPHVDDADGAGSQGRGDDIGEHAGQRPAWPPDGVDAALPRRQRHVPHSWCLVPREEKEASMEKGIIVGVDLAKHSFQLHGSSADGTVLFRKKLSRPQFHRFMSEQPRCSVVMEACGGAHFWARELGRLGHDARLISARYVKPFIKRQKNDAADAEAIVEAATRPTMRFVEVKSAEQQARAVVFRTREQLLKQRTELVNALRSHLYEFGYVAPQGIHNLPRIAKILDDKNTDIPSLARETCCDLLSQISEQTTRINALTKRMGELARTADTTRRLQTMPGIGPIGALAIETFAPPMETFGCGRNFAAWLGLVPRQNSTGGKQRLGRTSKMGQQDIRRLLIIGAMAVVRWTSQKGARPGTWLARMLATKPRMLVAVALANKMARGIWAMLTRNEDYRDPGQLMAA

SEQ ID NO: 336141 - protein, 357 aa, unidentified
MITIGVDAHKSVHVAVALDDAGHEVSRWRGRNSIAGWIDAQRWAEAIGGVRQWGIEGAWSYGRGLAQQLVTSRETVYEINARWTALGRRSARKPGKTDRQDARAVALFLRQEVETLPRVHADDDSATLDLLSGEREAAIIDATRLRNQIHALLMQIDPEYRDRLPRLNSRAGVRAVVDYESPDERKLQQLRAAAVRRLGARLILTLGHVRELAHQIKELAAASYTPLTQLCGVNLLTAGTLAGILGPGNRFATDAQLAAYAGAAPLEASSAGLVRHRLSRGGNRRLNAVLYRIAITQAHHSPEARAYLTRRVSEGKTKREAIRALKRYLVRAVWRLWQECAAMPAAAMPAAEVQVAA

SEQ ID NO: 336142 - protein, 372 aa, unidentified
MNYNTVYVGMDVHKESFTLCSCKYEDEKASHYQRTPACYKNVLRYLAFLRTIYGEDTRFVCGYEAGCLGYSLYHQLENFNVECVILAPTTMLEQRSKRRIKTDKRDAEIIARSLAQHNYSPVHIPTETDNQTKEFIRMRDDHKAELKKIKQQILSFCLRQGYQYDGSGNWTAKHVKWLRSLKPAGLYKEILDEYLLTYTILTDKLNRLDQRIEELASKEEYTESVSKLTCFLGIKTHTALSVIVEVGDFQRFVSARKFAGYLGLVPGQHSSGDDRNGLGITKAGNTHVRRLLVESAQSYTRGKIGYKSRVLRSRQAGNSPQVINYADRANERLRRRYYKMVLKDGKKYNIAKTAIARELACFIWGMMTDNIY

SEQ ID NO: 336143 - protein, 391 aa, unidentified
MICVGIDIAKDKHDCCILDSDGTVRADCFTIPNNMDGFKQLLQTIRNCTKKSGKIKVGLEATGHYSYNILGFLLDNGLPTYVINPLHTNLYRKSLSLRKTKTDRVDARTIATMLLSDVDLKSYTDIAYHNEELKSLTRYRFEKVRERAKLKQSVSRLVTILFPELEKLVPSLHGASVYALLSEYPGAKQISEVHLTKLTNLLVTASKGHYGKEKATLIRETARASIGSVMPAKSLELKHTIKLIQELTSEINEIEDSIQKIIDELNPPILSIPGMGVNSAAVILAEIGDFSNFSSPDKILAYAGCSPSTYQSGKLTNCYAHMEKRGSRYLRYALYNATKYVCHWNPVFAEYLAKKRAEGKHYNVALSHSMKKLVRLIYALQKSGKTYLAAA

SEQ ID NO: 336144 - protein, 408 aa, unidentified
MLFVGDDWAEDHHDVELMDASGRTLAKARLPEGVAGIARLHAMIGERLGEGAEDTAGLVKIGIETDRGPWVQALIAAGYTVFAVNPLQAARYRERLGVSGAKRDAADAHMLADMVRTDAHQLRPVAGDTAGAEAVKVVTRAHKTLIWERTRAGQRLRHALREYFPAALEAFEDLDAADALELLAKAPDPASAARLSTAQISAALKRARRRDIAVKTAKIQAVLRGEHLGQPAVVASAYAVSVRALVAVLGTLNEQVKILQEQVEAHFGRHPDAEIILSQPGLGAILGARVLAEFGDEHDRYASAKARKNYAGTSPITRASGKKKVVAARFVHNDRLIDALMTQAFASLRVSPGARAYYDRQRARGADDNAALRQLANRLVGILHGCLKTDTPYSEATAWSHHLTESAA

SEQ ID NO: 336145 - protein, 380 aa, unidentified
MNRKSSKLYVGMDVHKESIDIAVAEEGGEVRHHGQIGGDTNALWRAVRKLESSGRELVFVYEAGPCGFGIYRGLTGRGHSCWVVAPSNTPRRVRDRIKTDRRDSLKLAGLARAGELTPIYVPDVRDEAMRDLVRTREDAVMMQRQARQRLAALLLRNDVRYAGKTAWTAAHRRWIADLRLPQPAQRLAFEEYVQAVEEASARVQRLSQCIEQELATWRWCSVVGALQACRGIQLIHAVRLVAELGDLSRFSHPRQLMGYLGLIPGEDSSGEHRHQGAITKAGNSSARRALVEAAWAYQYTAKVSALIARRQADVPKAVLDIAWKAQVRLCARFRRLAARGVNRNKIVVAIARELAGFVWAIAQHVKPVDSRPSRKEAAHP

SEQ ID NO: 336146 - protein, 398 aa, unidentified
MYEQFVGIDISKDSFDVVLLSSSGEIKLEKKLTMDRDGFNTLLEYLSSYSKEELLVAMEATGIYHLPLLSFLLKNSFKSAVINPILIKSFIGSTTLRKTKNDKKDAASIALFSLKSYQSLHLASFDNIENIKPLIRERENLSKEIARLKTEIKAILTQLFPELLKYTNIFTKSILNLLLKAPSRKAIRNLKKRTIQRILDDNSGNKATINADEILSLAKNSIAISDKYLEKVLSSKIRRLIYIQDELSFLDTELQNSLEDTDINDDIDILQSIPGIGSVTSKNFMVEVSSIDKFKSVKQLCAFIGIDPSIKQSGTSVNYRGKISKRGNANLRRTIWQMAIGVIRSCEKFNAYFTKKIEEGKKFKQAVIAVANKLLKTIFVLLKNKTKFDENLAYGVSK

SEQ ID NO: 336147 - protein, 371 aa, unidentified
MSADLGERPRRIPIQIRRRGMAIMAAHTVEVIGGIDTHKDLHTAAVISIDGTRLGVRTFATTRQGYNQLLEWMCSFGRVRKVGVEGSGSYGAGITRRLGRAGIAVLEVRPPEGSARRGRGKDDAIDALEAARAVIAGHRVSVARTRSGAIEALRVLRTTRATAVKSRRAALQQIHNTIIEAPEELRDQTRRMTRMQLVRTLAAWRPDRARGADPEIATRIALRSLARRVIELTDEIAELDELITPLVRELAPALIEAVGIGTEIAGQLLVTAGDNPERLTSEAGFAMLCGVAPIPASSGKTTRHRLNRGGDRDANRALHMAAVSRMRLDSRTKSYVARRLAEGRSKREIIRCLKRYIAREVYGLLSHPGPA

SEQ ID NO: 336148 - protein, 411 aa, unidentified
MQVVHERCSGLDVHQKTVVACALTPNGQKLRTFGTTTDDLRKLARWLRAQDIRHVAMESTGVYWIPVFNVLEEELDLEEILVVNARHIKAVPGRKTDVKDAEWIADLLRHGLVRGSFIPDRNHRELRELVRHRQTLIRQHAQVLNRIQKVLEGANIKLASVASTINGRSCLEMLQQIVEGNQDPAAIAELARTRMRSKLPELERALSGTVRPHHRFMLATLLRQHEFLVEEIAAQDREVAERMRPLQAAIDLLDEIPGVGRRTAECIIAELGVDMNIWPSHGHLASWAKVCPGNNQSGGKRRNAHTGKGNPWLYHTLVEAARAAVRTRNSYFGAQYRRLKGRRQADDNRAIVAVAHSILVIVYHMLSDGTKFRDLGADFYGQHDREQIARRAMTTLNKLGYEVTLKTPLAA

SEQ ID NO: 336149 - protein, 346 aa, unidentified
MKIVGCDFHPAWQQVAVFDDETGENEELKLTHEDGAAERFYRALMAPALVGVEATGNIQWFLDLLQHLGHEVWLGNAAEIRASYVRKQKTDKRDAGHILKLLIEGRFPRLWTPSAEERDLRQLLIHRQKQVEIRTRVKNGLQHLAMNRGLQKKRKLWSVRGRADLEKLSLEGWAARRRADLLGLLEQLDRQIGELDEAVNAAAEKHPQARLLMTQPGVGPITALAFALTIGDVNRFRRSKQVSSYLGLIPRERSSGGKQKLGSVSKQGNSFVRMLLVEAAQATNQWDEGFRKQYVARCHHKPKALAKVASARRLAVRLYWMLRTNTPYPEIARIESSPGVGMVSAS

SEQ ID NO: 336150 - protein, 363 aa, unidentified
MKIMVGIDLHSNNALCGLMDESGRRLVHKQLPCDLAAILQLLKPYKKRIATIAVESTFNWYWLVDGLQDQGYHVVLANPARMQPYSGMKYTDDVSDAYFLAELLRLNLLPTGHLCDRKTRPVRDLLRRRLLLVRQRTTLILSFKSLNERTLGQRVPLARVKAMKAEEAQARFTEPADQLLSGEQITLMGHLTDSIMKLEQHILGVVGKWPAYQRLQELPGIGKILGLTIALETGDAKRFADAGNFASYSRCVKSLRTSNGKKKGENNRKCGNKYLAWAFVEAAHFACRYDDQCRRFYDRKKQQTNPVIATKSLACKLAKAAWHVMAGDVPYDAARVFGPAKKNDFGETGREPAKGSGQPSQQD

SEQ ID NO: 336151 - protein, 427 aa, unidentified
MNENEVIRYEQFCQFKAEIRSSRDYLIVGIDVAKERHHAFFATASGRTLLRRLLFDNNQAGFKQLITRACQLQIEYGLSRVVYGLEPTGNYHKPLASWLLEHKQMLVLVSSKAISDNRETLDGRWDKNDTKDSANVADLIAQGKCQFFEMPDTRLVELRNLLSLRRRLKKDEHAVRMQIRNGLVAKYFPELDRHWGSCLTENLAIVRWCLDPRKIAAMGFDEFVRQVTRRDRGIRQQKRLERIYEAAAVSIGCPMDEAAHFEAKLLVERLEKISERIGQTEAEIEDLCSRFPAYRRLLTIPGFGPYVSSIVLARIGDPHRFIGRRQLIRLAGLDLNANRSGKSSPAAVPVISKRGNSELRYALYQAAQIATYHNDRFRALFTRHLEGRENERGIKTKMRVKLAAKMLVIAWTMMKTDTDFDPLLIKA

SEQ ID NO: 336152 - protein, 316 aa, unidentified
MPYVGIDVAKNKHDVTALNVSGKTVLKPLTFSNNKAGFELLDLSLRQLNQDYLIALEDTGHYAFNLLNFLHEQGYKVYTYNPLLIKKFAKSLLLRKTKTDKKDAHGIALKLLSDPNREQFQHDNRQVELKILARHIHRLKKKQSDWKVQYTRCLDIIFPELDKIVGKHSEYTYQLLTCYPNPQKRLEAGFDKLIEIKRLTASKIQDILSVAPRFIGTTSPAREFEIIEIIKHYKRLIDKAKKCVNDLMAEFNSVITTVTGIGGRLGAVILAEIRNIHAFDNPAQLQAFAGLDSSIYQSDQIDLAGRMVKRSSPHLR

SEQ ID NO: 336153 - protein, 353 aa, unidentified
MGDQSIQSEVILGVDTHLDTHVGAVISDTGKLLGTLAVATDAAGYLKLLTWANSFGRLRRAGVEGTGTYGAGLARLLCDHEIDVLEVNRPDRANRRLQGKSDPTDAESAARAVLSGSAAAIPKAQSGAAEAMRAISVARRSAVKAKTQAINQVRALLVSAPQDIRVRLWKVKPSECIDGCAHLRSLGTTPLLHTLGATLRMLARRWLMLAEELKELDAILERLTSQHAKRLRAQFGVGPQTAAVLIAVAGDNPERLRNEAALAARCGASPLKASSGKTTRHRLNRGGDRSANNALWTIAMVRMRSDQRTRAYVARRTAEGMSNKEIHRCLKRYIVRALYPLILADLADSARST

SEQ ID NO: 336154 - protein, 371 aa, unidentified
MKTKTTKTPPSVVLTPAARVCAAGFILGLDLGDRSHYVCVLDATGQILHEGTLVNDRLALAALLTHYPAATVALEAGTHSPWISRYLTGLGATVIVANPRKLHAISRHERKCDRRDAVMLARLARADVALLHPLQHGTAQAQHDLLGLKLRDSLVRTRVNLINTVRFTLKSLGHAVTNPSSEAFHKSILKVVPADCLPVVQPVLAVLALLTEKIKTLERELIARGKKDYPVSERLQQIAGVGPLTALCFVLKIGEPTRFGRSRDVGPYLGLCPGRDQSGGTDKQLRISKCGDGLLRRLLVSAAHYILGPFGPACALRAYGQHLVGTSVREKKRAVVAVARKLAVLLVSLWKHGTDYEPRVPAPVPLVLVAA

SEQ ID NO: 336155 - protein, 432 aa, unidentified
MNAALNHDEIPNDYAAFIAIDWADQKHVFSLQVAGQTKKETGTLEQKPEVIGPWVAKLQERFGGRPVAIAVEQSRGALIHALLSYHFLVIYPLHPTTVAKFREAFKSSGAKSDPLDTDQILEIVTKHRDLLKPLNPDTEETRLLGRLAEDRRKAVDLRTSHIQALLAALKEYFPHAIELVSGNLTSRLAGDLLKKWPTFEAFQQAKPSTIKRFYYGHNIRNPEVLEKVLNLAQTAKALTTDPAIVESGSRLSQFHAQLIQTLNPLIEGYDQRIEQLFHAHPEAHLFSQLPGAGPALAPRLLSFFGTDRSRYATAQNVQSFSGIAPVTKSSGKTKVVYFRRACPKFDRQTFHEFARLSLAKCQWARNYVDYYKAKGKNSHTIFRALAFKWIRILFRCWQNRTPYNDNQYLQTLKQRGSIFATFHLEQKHEKSI

SEQ ID NO: 336156 - protein, 346 aa, unidentified
MNNLNVVGVDLAKNTIQVSVVTPTGKELQNKALTRKKFSEFLARQKPSLVAFESCATAHYWSRIAQTHGHTARIIPAKAVTPFRQGHKTDSNDALAVAEAASRPNIKEAPMKTVEQQGIQAIQRSRELLVHDRTALSNHIRGLLMEFGVVIPQGFAALHRRIPEVLEDAENELPDLYRPTLNLLYGRLITIKDDIDVLNKQIAEIVKQNIACDRLTKLEGVGPISSVLLYATLGTGEAFANGRQFSAYLGLTPKQYSSGGKTVLIGISRYVANKRLRAVLIQGARAYVHRLKDPKTPKERWLWALIQRAGYGRAAVALANKNARTAWALLTQGEEYKREYEVPLAA

SEQ ID NO: 336157 - protein, 372 aa, unidentified
MRTQTLPPRHAILYVGVDVHKDTHTAVAINAFGEKLFEKVIDNSKEDFGTLVATVHQESIAHSLTPVFGLEDSFGNGIRLARYISLQKIMVKMVPPVLTDLFRKYETHPEKNDSLDAFAAAKVLIQRIDTLPSYTITKQDELSKEIKELALDREFLVKERTRIKNQLHRLLHKAYNGEYRKKFKDPFSMKALRYWKTHPVPSDTSDIPGDAVILKNQIKRKVKRLMDIREETKELEGELATLMERTGQKLTTLNGCGTVLAAKVMAEVRDVKRFHSPSALAKYAGLAPRERSSGNTFRHVKTKAGNRRLNMAMHRIALSQISRSGNQEAKTYFQRKVSEGKTKGQALCCLKRRLIDIIYMMLKYQQAYQYNP

SEQ ID NO: 336158 - protein, 338 aa, unidentified
MKIVRIGIDLAKNIFHLHGVDEHGKRVFSKQLKRKQVLPYLANIPECEIGMEACGGSHYWARSIMKLGHKVKMMAPQYVKPYVVGNKNDANDAAGICEAMSRPHMRFVEVKTVEQQDMALLHRIRSRAVRDRSALVNQVRGLLAEYGIAISKGISQVRNRLPDILEDGDNELSGYGRELFHSLYLELVEMDKRIGEMDKQLKRIANETKACQRLQTVPGLGPVVSGAIYSHIGNASQFKNGRQLAAYLGLVPKQHSSGGKDKLLGISKRGNVYVRTLIIHGARSVVNAAVNKTDPLSQWLNELVKRRGKNIATVALANKNARTVWAILTKEEVYKAAV

SEQ ID NO: 336159 - protein, 449 aa, unidentified
MQIVHPNAAGIDIGSKTHWVAVDQIPGNVREFGVYTRDHQRLIDHLKTYQITSVAMESTGSYWQTLFHALQKAGFEVILVQGNQTKNVQGKKTDVLDCMWIQKLHSLGLLSSSFLLSDYFQTLRSYYGHREHLIEQTAMYINKMQKALRLMNIRLDVAIRDLAGKSGRAILDAILAGHRDPNYLASLAHFRVKKSPDEIAAALHGNWREDLLFELRSCLAFYDAYRKEILICDQKIQAIMLEFIPDAEALTLESNAGEKPIRKQVNRNSPSFNIRHLAFAHFKIDLFQIPGVSHSTALCILCNMGNDIKRFTSAKRFASWPRLVPNNKLSGGRIISSKTPKGKNAIALALRQAANSIGNQKEHPLTPFFKRIAYRKGRNAAITATARKLAVIIWNMITKTQPYRQPNFELLLEKRKYAQVRNIKSRLFRLNLSDSEMMELFQKTSFPST

SEQ ID NO: 336160 - protein, 341 aa, unidentified
MYYIGLDVHKKTISYCVKDLSGRIQQEGKVGSTRRELDCWMKTLPQPWAVAMEATIFSGWIYDHLLPHATQIKVAHPLMLRAIAAAKKKNDQIDASKIADCLRCDFLPECHMMPAEIRDRRRTLRYRHLLVRQMVQMKNRVSGLLMETGVEYNKQRLHKVSYFRELLSGNEEVDPSIRPLLKLSRETIERCQRTEYALVNSLRDPMLADRIKRLRMVPGVGPITALTWALEIGDVSRFRTIKQAISYCGLCGDERNSADKAMRMPLSKQRNKHIQRTLVEAAKLAPRQSHELALIYDREKQKGNRNRATLAVARKMVAYLLAVDRQQRDFVPAEERKAAAA

SEQ ID NO: 336161 - protein, 317 aa, unidentified
MDVLGIDISKADFHACLIQGKKSAKNSFPNGPLGYRRLRTWLRNRGCTKVQACMEATGAYWLGLASALHVAGLEVSVVNPSRTVHFARSQLRRTKTDRVDAEIIAEFCQTQRPDRWSPPAPEILELRGLLSYRAQLVDDRTRLSQMVSQIRVSKELQRLHAKQIKTLEASIAAVEKQLHSFTKAQPILHRQLGKLMSVSGIGPITAYAIVAKLPVERLRNAKAAAAYVGLTPRERQSGTSIHGTPRICKTGNGSLRRDLFMSASVAMRHNEILKAFAQRLTADGKPAKVVTVAVMRKLTVLVFTILKRDLKEALAAA

SEQ ID NO: 336162 - protein, 344 aa, unidentified
MSIKVVGIDLAKHYFQVCVLSNENKVTSNKKVTRAKLLDVVRQFPENTLIAMEACGSSNYWARTIEKMGFSIRLIPPQHVKPFVGHQKNDANDARAICEAASRPNLHSVPIKTIELQDIKSLRCVRQRLVVQRIAISNQLRGLASEYGITIAKSFKSLREQVPEVLEDADNELSVVMRKLIYSLWQEVNALTEDIKSISSELEALCKQQPRYQALLAIPGFGPIVTAAFLSQVGTGKQFSNGRQLSAWCGLVPRQASSGGKPKLGRITKNGNNELRALLIHGARSVSKYTPDRTDALSRWFNALVIRSGKAKAIVALANKLTRIAWVIVTSNDEFKAACAFKDA

SEQ ID NO: 336163 - protein, 355 aa, unidentified
MNDENYIGLDVHQATIVVAVMDSTGKLVMESILETKASTILQFFAGLRGTLSVTFEEGTWAAWLYDLLQPRVDKLVVCNPRKNALLKDGNKSDRIDARKLAELLRGNQLKPVYHGETGVRMLRELSRSYLTIVKDLSRVMNRLKAVYRSWAIPCAGRDVYYTRHRAEWLGKIREAGVRRRAERLYEQLDMLQHLRQQARRELLTESRKHAITAKLRQIPYLGPIRSALAVALIQTPHRFRSKRQLWAYSGLALETRISAEYRFVEGQVRRSKKLLSIRGLNKDHNHDLKGLFKGAATMASVRPGPFQDFYQAALAKGIKPTMARLTLARKIAAITLTLWKKGENFDAEKVKSQAA

SEQ ID NO: 336164 - protein, 351 aa, unidentified
MNLAGDADLVIGVDTHLDTHTAALCDARGRALSRLQVPATAAGYAQLLAWARSAAAGSRAVWAVEGTRHYGLGLARHLVSQGEQVSEIDASHHAGKRRAGKSDAIDAVRAARELLARPHPAQMRADGDREALRLLMTGRDNAIQSCKTARTALAAILVTAPAPLRERLRQLPRERRARECAALTCPEAADRQTRILHQTLIRLGQRIAALAETAADLEAQITEIVEEMAPGLVAAEAGLGTLSAAQILLPWSHAGRIHSEAAFAMLPGTAPVPVSSGRTGQHRLNRLGDRQLNRALHIIAVTRMRCHPQTLAYVQRRRAEGKTDQEIRRCLKRYLARHHYRTLNSQISRPA

SEQ ID NO: 336165 - protein, 403 aa, unidentified
MNNVAGIDVSKGKSMVSVLRPFGEVVAKPFSVGHTGSELKELADYLKSLDGETRVVMEHTGRYYEPVARFLHEEGVFVSAVNPKLIKDYGNNTLRKVKTDKADSRKIARYGIDNWAELRQHTPMDTIRMQLKTLNRQQSLYSKTKTMMKNNLIALLDQTYPGVNALFDSPVREDGSQKWVDFATTFWHVDCVRNMSLTAFAERYRKWCKRHGYNFSQSKAVEVHAGAQDLIAMLPRDALTKTMVRQAIDALNAVSASLERLKAEMQALAAQLPEYPVVMAMHGVGDSLGPQLMAELGDVTRFTHRNAITAFAGVDPGADQSGTHEAKSTRVSKSGPPELRRALFLVMDCLLKTQPQDDPVYRFMDKKRAEGKPYLVYMTAGANKFLRIYYGRVKEYLAQLENS

SEQ ID NO: 336166 - protein, 411 aa, unidentified
MDIVVERCCGLDVHKDTVVACVRTPGKGGKRAQETRTFGTMTTDLLALRDWLVANEVTLVGMESTGVYWKCVFYILEDAMECWVLNARHLRNVPGRKTDVADAEWVCQLVEHGLVRPSFVPPKEIRELRDLTRYRKAQIDERGREAQRLDKVLQDAGVKLSSVATDILGKSGRDMLEALVRGTRDPEVLAELARGVMRKKIPQLRRALEGRFNTHHALIVGQILAKLDFLDEAIGTLSGEIDRVIAPFEAEVALLDTIPGVDRRIAECLIAEIGTDMGRFETSARLASWAGMCPGNHESGGKRKSGRTRKGSKWLAANLAQAAESAGRTKDTYLGAQFTRLRGRIGHPKARKAVEHSILVAAFHVLAGGVPYADLGADWFQRRRPEAHARRLAHQIEALGYRVTIEAAEAA

SEQ ID NO: 336167 - protein, 474 aa, unidentified
MPRRVKKVMLLEQGEGKRKSGSIMGIDVHKSILAVCILNETSYLHEQNYNNDSAGLNSILKLIKKYDVQDVAMEATSTYHFKICFLLTDLAIPVTLACPKQTADTQGKKTDKLDARRIAVAHRDGRLKPSVISPKEFAHLRRTTRKIVKVTQDKTKSKQRIQQLFQLYNCHITTDYSNFLKSKWSLNLLYSCLEITENGTDKNVREAILEYFPKKKLKKTSKRDLNKLEEELENLRQQLTFIERVNFITELAQIRFDSDLLEQLRLIYIAFAEQHPDFSRDMKLLLSIPGIGNDTAAAILAEVVDIKLFSKPEKLVKWAGLAPRVKQSGHRKKITGRIYKGGNKYLRRALALASSNIYSKGNDTNPIHEFIKKKKQEKDIYMVAIVAGARKLLTVVWILLTHQESWKTNSKAPVEVIQYLQFLTSRKIHLLTKKMAKYEAIQLQLSELLSQDISELDKSTVILKTLKPTFSQVL

SEQ ID NO: 336168 - protein, 402 aa, unidentified
MIYAGIDIAKSSHVIGAVDERGKDAAKPMQFANSAEGFGKCAAYLEGLGAPAEEMLVGMEATGHYWLPLFSFLHAQGYDVVVINPIRTDAMRRFKGSSRVKTDLVDCILIADTLRLGEFRPSKLGDESMVELRQLTRLHQGLKESVADLKRQVIVALDQVFPEYDSIFSDTFGESSKAFLRKCPTPEECRGVRVDALGNTLSRASRGKLGREKAEEIKGIAEESCGIDRVTRTLSFQIKLLVEQIDFIEGQIEEVEARIEEGIETTEPLILTIPGIGHVLGAQIASEIGDIHRFRNASAVVSYAGINPSVSQSGKFSSSENHITKQGSPYLRRALYLAATAQLRLSTPFRDYYDKKRADGKSHREALIAVARKLVHVIYAVLSKQEPYRSDAVNANPVSRSE

SEQ ID NO: 336169 - protein, 420 aa, unidentified
MKVVYQTCCGVDVHKSFLVATIIKTTSGVQPSYQKKRFSTFNNSILEFKKWLLDNSCRDVCMESTGKYWIPVFNLLEDELNVTIANPKWVKAVKGNKDDTKDSKWIGDLFRLGLVPGSYIPCKPIRILREFTRYRYKLTSCRSSEKNRFQNALTVCNVALDSVVSDIFGKSATSVIDYLLKQSDNSINHEEISSRLLRSLKKKSESVIESIEGYQMTDAQKYRMRLVHAHMDYITSTISDIDSMIDSLVEPYENAVQLLCTIPGIDRSSAITIISEIGTDMTQFSNSKRLCCWAGLTPGNNESAGKKKSVRITRAGVYLKPALVQVAHAAVKSNKSPYYKAKYERIMKRRGKKRAIIAVARMILTAVYHMLSTGEAWNPTDLYKIDMPEPLKNKQKEKAVKQAMKLLIAEGLIKESQLAS

SEQ ID NO: 336170 - protein, 404 aa, unidentified
MYYVGIDVAKDKHYVCILDDKQEMACKPFWIYSDILGLRELIERFSGISLNNDDFVIGVESTGAFSENLYEYVTDSDYPCVLLNSYQTAKYRDFSTMKKVKNDAIDAYVIAELLSTGKYKQSHISSDAFHSLKVLGRVKRSLADKIKTIKREISTVMATVNPEITRVFPNIFTKTALAVIKVYPTATQMEKATPKKLTKLFRHIKGNNFSEDKANFLIDLASTSVYAGRAYQARALMITTNIKLLELLSQEKDEIEFQISLLIATTNDEALESPIENLQSIPGVSEKTIVAVLGECGDLKRFTSAKAFIAYLGLYPTQYQSGNSIVVGHLAQRGIPIAKHALYMAAVASIRHNEQLRKIFIDKVSRGKSKKEALIIVAKKLATMMYSIVKYNKPYEPNRVLVSR

SEQ ID NO: 336171 - protein, 439 aa, unidentified
MNAVGIDVSKGKSKVAVIRPFGEIVAKPFDITHTPDQLTELVEYIRLLPSETKVVMEHTGKYSEPIANYLCDAGIFVCMVNAKLIHDYGGDTIRRDKTDKVDALKIAGFCLDKWVKLEPYAPVDECRRMLKTYNRQLSEYTKIKTMLKNNLISLLDQTFPGANELFSSPARERDGHEKWIDFVAAFPNCHCVASLSKGVFAAKYEKWCRKNGYNFSLHKAESVYSAALNCLPTLPNNDFAGRLIIQTVNQLNHLCETVAAVKSEMSKLASALPEYDTVLAMHGVGKVLAPQLIAEIGDIRRYPKRSSLARFAGIEPPENQSGAYNQHSRRISKQGSPHLRKALFQVMCCVLQNSNLDEPTFQFIDRKRAEGKPYKVYMIAGANKFLRIYYARVNECIEKLEIGDNSLTCKQDRATVETDLSGYAGFAIPIAERTAARIC

SEQ ID NO: 336172 - protein, 343 aa, unidentified
MRTITTIGLDIAKSVFQVHGVDAAGQVVIRRQLKRRYVLAFFQKLAPCLVGIEACASSHFWSRELRALGHTVRLMPPAYVKPYVKRQKNDMADAEAICEAVTRTNMRFVPTKTPEQQSCLMLHRTRHLFIRQQTAVINSIRAHLAEFGIVAPVGRKGVTELLHVVADPRDKRVPEVARACLTALGTQLLRLKEQILEFDRMIMAWHRSNQASKRLHYIPGVGPMLATALVASVADPKTFRSGRNFSAWIGLVPKQRSSGGRDRLGSISKQGDRYLRSLFVAGALAVIRYAKIHGTKHRPWLTALLARRPTKVVAIALANKIARMAWAMMARGERYKEPIALAR

SEQ ID NO: 336173 - protein, 343 aa, unidentified
MRKISTIGLDLAKNVFQVHGIDASGAVVLKKQLRRGALEKFFAQLPPCLVGVEACGSAHHWARVIGGYGHEVRLMPPAYVKPYVKRNKNDGRDAEAICEAVSRPTMRFVPVKSVEQQATLAVHGTRALLVRQRTMVANALRATLSEIGIVAAQGLEGLRELMARLEAPSAEIPEMMRGTLLVLAKHWQALDADERAHERQIAKAARCDRDARRLMEVPGVGPIIASTVLAKVPDAKVFRSGRDFAAWIGLTGRDHGTGGKHRPGRISKQGDRMLRALFISGASAHLRQQKRRGISDPWLRELLGRRPYKVAMVAFAAKIARIIWAMLVKGEAYRDRASASAAA

SEQ ID NO: 336174 - protein, 391 aa, unidentified
MNKVWAGVDAGKEFHWAHVLDASGTELLSRKVENDEADLLALIDEVLSLAEEIVWAVDQPGGGAALLLALLWERNQRILYVPGLTVDRARDTYRGESKTDARDACVIADQARMRPDLGELEPGEEELAELQLLLARRRDLITDQNRVVTRLRETLVSLFPALERALDVNSRGSLTLLTHYQTPAQLRRAGHKRIASYLRSRGVKGSKNVAQKALNAARSQSVTLPAQELASRIVAELAKDILALKERIESIDEELEKRFFARPEARILTSLPGMGLILGAEFLVAVGDICAFESADRLAAYAGLVPAARDSGKRTGQSRRMRGGNKTLKRVFYQSAFASLRSAPESRAFYDRKRAEGKRHTQALIALARRRVNVLWAMLRDGTTFETRSAA

SEQ ID NO: 336175 - protein, 358 aa, unidentified
MYSIGVDFHKMYSHMTVMDAQGQVVKAGKIANTAEAVHQFVAPYGADAQAVLEATRNWTVMHDLLEREVQAVYLAHPLKVRAIAEARIKTDRIDSKILAHLLRCDLLPTAYVRPREQRVSQQILRQRMFMVRVRTMVKNRIHVCIDRQLDIRHVAGQFTDLFGAAGLAWLQSVVLPDVERRLLNAELALFAAVQARIAESDGQVRMLAAGDSRVRWVRSIPGLGRFFAVLMVHEIGDIRRFPTAAKLSAYAGLVPSVHASGGKVFHGRLTKQGNKWLRWAAIEAVRPAVVTDPQLRRYYERLRHRKGPNPAKVAMARRLLLLTHRVLTQERPYRKPGAPVPPGPPPRTALMNPLPASA

SEQ ID NO: 336176 - protein, 351 aa, unidentified
MSMYFIGIDISKYKHDCCIISAANQKVVSKVIIKNNKAGFNELLTIIHSLANPADIRIGFESTAHYALNLELFLENSLLTFMEVNPVLISEYKKSKTLRRTKTDSVDCESIARWLMTVEYKPHSKGFYHAYSLKSLTRLRDKLIRQRSFYLVKITNVLDHTFPEFKPFFNERLSKTALYLLENYGSAEKMARMNSASYEKLRSVSRGKFSPQQFLRLKELAVNTVGVNNSIFDVELNSLLSLYKSLVKEIDTIKKEINQLIEEVHPHYMSVPGIGPLSTAVIYSEYGDISNFTNPGQMLAFAGIEPGINESGTESHGGKMVKRGSSQLRYTLINCCLPLIRFDMTFASSPE

SEQ ID NO: 336177 - protein, 373 aa, unidentified
MKEKVRFLGLDVHADTIAVAVAEANGEVRSLGTIPNRAESIRKLMKKLGAVEHLRACYEAGPTGYVLYWQLSELGVQCEVVAPTLVPVKAGDRVKTDRRDAEKLARSHRSGDLTAVWVPDAGSEALRDLVRAREAAKQDQLRARHRLSKFLLRTGQRPGPGVKAWTQGYLVWVRRLCYAQAAQTATLLDYLHEVEHMGERVGRLEQAITEAVKLASPQMQAVVRDLQALRGIAEISAVTIASELGRISRFQSARQLMGYSGTVPGEDSSGKRMRRGPITKTGNAHLRRIVVEAAWSYRLRPAVGPGLRKRQQEVPQEIKEIAWKAQIRLSKRYARLAAAGKDKRKIVTAVGRELLGFIWAIGIKTEASGQRAA

SEQ ID NO: 336178 - protein, 420 aa, unidentified
MKVYNVNDFAALIGIDWADTKHDICEHPNLTKKYQYTIIKSKPEALHEWAMSLKQRYPNQQIAVACELKKGPLIYALAKYNHLTLFTINPSTVAKYRKAFTPSGAKDDPTDAFIQVEILTLHMDKLCVIEPESAAIRSLAQLVEYRRSLVQDSVDLSNKITAALKNYYPQALEWFKEKDTFIFCDFVSKWPSLVHAKKAKKQTLLSFLNTHNSHYPDVNEARILSIKNAMPLTDDTGVIVPNQMLVEVIITQFKVLLKGIETLDKAIKLAYKAQQDNIIFDSLPGAGPQLAPRLLVAFGCNRDRYHDASELQKYAGIAPVIERSGKKMWTHWRYSCPTFLRQTFVEWAGFSVRYSFWAKAYYDQQKSKGKPHNSIIRSLAFKWIRIVFICWKTKKPYDESKYLEALKRRGSPLLKYAINS

SEQ ID NO: 336179 - protein, 350 aa, unidentified
MRFYHVQPQQQYFCGVDLHTKAMYLCVLDQAGQILLHKNIRTRPQAFLKAIAPYRQGLVVACECIFCWYWLADLCQREGLDFVLGHALYMRAIHGGKTKNDKLDAEKIALLLRGGMLPQAYVYPQEKRATRDLLRRRSYLVRMRADLLGHVQLTRHQYNLPAFKKRITYKANREGIAERFSDEVVQANVALDLEFIGSLDEQIRPLELYLVQQAKVHDPQAFYLLRSVPGIGKILALTILYEVENIRRFKRVQQFCSYARLVKGQKVSAGKRLGTMGAKMGNRHLKWAFSEATVLLLRESDQAKAYLARLESKHGKGKALSILSAKLGRAVYFMLLRKEPFDQERFFAQA

SEQ ID NO: 336180 - protein, 342 aa, unidentified
MEISTVGLDLAKSVFQVHAVDASGGTVVRKALRRAQVLPFFAKLPRCLIGMEACGTSHYWARELARLGHEVRLMPPAYVKPYVKRGKTDAADAEAICEAATRPSMRFVPVKSAEQQAALALHRTRDLLVKQRTQLVNMVRGLLAEFGIEMARGLHHALALAARLSAGDAPEVPPLAQRVVKSLADQIGALQVQLAALEKELLAWHRSSELSQRLATIPGVGVISATALAASVSEPERFRSGRQFAASLGLTPLQNCSGGKERMGRISRMGDRYLRRLLVIGMTSLVRRAKTRPDTVDPRFAAMLQRKPARVVTVAAANRTARVAWAIMTRGGIYQAPLAAAA

SEQ ID NO: 336181 - protein, 365 aa, unidentified
MTTRQRSTSSSTDPPVRREVVLGVDTHGEIHVAAVVSPLGEVLGTESFPATATGYVRLLVWARRLGVVRRAGVEGTGTFGAGLSRYLLAQDVQVYEVNRPDRSARRLLGKSDPLDAQAAARAVLSGRARARAKTGDGPVHSARMFKLAKDSAVKARTQAINQLKAVLVIADPALRERLSSLGNAELFRTCASLGLRDGGGDEDAVAQATHMTLSMLAERIEQLTGQIDELNRRLTRLVERHAPQLLVPVGIGPDSAVTLLITMGDNPERLNTEASFAALCGVSPVEYSSGRRSTRRLNHGGDRQANAALHRIVFTRLRHDPRTQAYYERRTQEGKTRREIIRCLKRYAAREVFNLVRTVSIAPQS

SEQ ID NO: 336182 - protein, 445 aa, unidentified
MHPQAPASPRLVNMNCSPTPAIQTEMKTNDYAAYLALDWGDSQHAFALQMADNQNIEKGHFGAQPEEIHDWLKELGGRCGHARVACAIEAGGDALVSALLEHKWIEVFPINAAMSARFRKALIPSGAKDDVPDANVLLTLLVRHGDQLKPLQLDSAQTRELAALVLARRGAVDRRSQLGNQLRAVLKGFSPQALMLVGDELHGIIALDFLERWPDLDTLQRARPATVQSFYLQHRVRRPELIKARLDLLARAQALTKDTAIIGPAVLQVQMLTSMIRTLQRHIARFDESIAEQFAVHAESSLFRQLPGAGPQLAPRLLVAFGDNRERYPDAPSLQKYAGLAPVKEKSGRQLWVHWRWTAPVFVRQTFVEWAGQTVVYCGWAGAFYARQKRAGKGHHAIIRALAFKWIRVLWHCWKHQEAYDETRYLAALRQRRSPLIEDLDQATT

SEQ ID NO: 336183 - protein, 367 aa, unidentified
MDSVTAAAEKIYLGMDTSIATIVVGVLRPGSEVPVVEAIPNDAESVRRLAGKFPDRRLLAACYEAGPGGYELHRLLVSMGVACDVVAPSLIPRGAGERVKTDRRDAVHLALLHRAGLLTPVRVPSPEEEAIRDLVRTQADLADDRKRMMQRINALLTRHGRVWKTARWTADHRTWLERQSFAEPPLQAALRTYLAALDAREAELAVLERQLRDCWAGVEWLAPAVRRLGCYRGIAELTALTLAAEVTDFRRFGSARAFMGFTGLTPSEYSSGARTRRAGITKADPQLIRSARVGLGLPAPARDRGHAAAPPAGRLPADPRQILEGAAAAACHLHQTDPARQDSHGRGDRGRPRARRVRLGRDDQLNP

SEQ ID NO: 336184 - protein, 346 aa, unidentified
MASVTIGIDLGDKNHEVCVLDSAGDVIERFEVDNTKIELQKAFAKYAGAVVAMETGTHSPWVSRTLEALSCKVLVGNARKLRAIWGSSQKSDVRDAEMLARIARLDPKLLYPIHHRNQKAQVDLEQIKARDLLVGLRTALINHVRGVVKSLGFRLSKYSAPAFHKKALKELPDELRTTLIPLLEQIGSLTRQIRAYEKQLELLAETVYPETACLRQVQGVGLITTLAFILTLESPDRFDKSRAVGPHLGLTPRKDQSGDSDKRLRISKQGNVYLRCLLVNCSQFILGPFGPDCDLRRYGERLIARGGGSAKRKAVIAVARKLAILLHHLWSTGEVYQPLHKGKPAA

SEQ ID NO: 336185 - protein, 441 aa, unidentified
MAVRVKEDEIFPNAAGIDVGASSHWVAVPSRSSDEPVREFGAMTDDLNAMATWLIACGVDMVALESTGVYWIPMFEVLEQRGLKVWLVDARQMKYVPGRKSDVQDCQWLQKLMSLGFLRAAFRPDAEVCELRAVARQRDILVTDQASWVQRMQKALVQMNIQLTEVLSDVMGLTGSLIIRDIVAGERDPKALARHRDSRVKASTEEIIKALTGNWREEHLFVLRQSLGMYDDIARHLADCDNKLNAGLKNLGQKSIDLGKTPRAGSKQRKEYDMRQVLANWAGVDLTRINGLGLAAVTKILTEIGPYLSRFPTVKHFCSWLGLCPGTKISGGKVLSAKTKRSVNRVRQVLKMAAMSLSRCDSALGAFYRRLSARMDKPSANTAVAHKLARMVYFMLTRGEEFVDKGQQHYEEQQLARSVAALKRRATTLGFVITPMAAAGA

SEQ ID NO: 336186 - protein, 343 aa, unidentified
MQTVTTIGLDIAKSVFQVHGVDAAGNVVIRRQLKRRYVLAFFEKLPPCLIGIEACASSHHWSRELHALGHTVRLMPPAYVKPYVKRHKNDATDAEAICEAVARPNMRFVPTKTKEQQNCLTLHRTRHLFIRQQTSVINAIRAHLAEFGIVAPIGRNGVEQLLGVVADANDERLPDVARGCVAALGAHLRLLKAQILQFDRMITAWHRSSEASRRLDDIPGVGPALATALIASVGDPKAFRSGRDFSAWIGLVPKQNSSGGKDRLGSISKRGDRYLRSLFTVGALAVIRYAKIHGTRHRPWLTALLARRPTKVAAIALANKMARMAWAMMAKGERYKEPVALAA

SEQ ID NO: 336187 - protein, 357 aa, unidentified
MEQSKGISFKGQNIYVGIDVHLKSWSVTILSETSVLKQMSQGADPDALYRFLTSHYPEAEYYSVYEAGFCGFWIHDRLTELGIHNIVVNPADVPTMSSEKLRKTDAVDSKKLAVSLRAKQLKGIYTPDSEALEIRSLIRLKNSITKDMTRQKNRIKSQLRYLGVEIPVGYLEPHSNWSKRFLNWLKQVGMRTPSGRQTLDILIMQFEALRKQKAEMTRKLRALSHTERFEETLELLMTVPGIGQTTGLALMAEIVDITRFDNAEQLAAYVGMIPMCHSSGEHEGVGDITLRKHAILRSNIIEAAWVAIRKDEAMQLCYLNNCKRMVPSKAIVKVARKLVNRIYFVLKRHQPYVNAMA

SEQ ID NO: 336188 - protein, 448 aa, unidentified
MSNGSGVSRGDRNRNARLSRLREAVSVTSAIVGIDLADRKQMVVVTDHDSRVLARRTYRCKAWDLGAALDRAAERGSRVGFAGVTVACEPTGHRWRVLGELAGQRGMSFVCVQPAACSWARKSEDLTTDKTDDKDAVLIARLTAQLRCYLPEPVDEIWARLRHLGGRREQLIEEHVRCVQQVRDLLECVWPAALEAAKWPFRSTTWVAAMSVVVDRDGGDLARTRRLGAARFEHAVRRDVTRRGKVRPCLRIVRKLFAALTDPAGVSAHRPAAFERIVWVVEDWDDARTKLAATEARMVAVLGELQLTELACSIDGLSPVGAAAILAQTGDLTRFTSARAVVKHAGLAPRERMSGTFTGRARLTGAGRPGLRVAAWRAVWGCLQTNRVYAARYRHLTTRETNKLTPTQAQTAVAAAILRQLYAVVVHQQAWDPAIAAHGTHTMEVAAA

SEQ ID NO: 336189 - protein, 404 aa, unidentified
MAAPCPHGDGSDSGWSQENADYLHYVGVLELSKSAWLIAASAPGSEKVSKYRVAAADVAALVALLARLKSQAERYRSGSVQVVSIHEAGLDGFWVHRMLEANGVESHVVDAASIAVNRRSRRAKTDRIDVEGLLRTLMGWARGERRICSMVRPPSPADEDERRLTRERGTLVTERTRHVNRIKGLLATQGVFGFEPLHKNRRKRLEELQQWNGQPLPARLKTELVRELDRLELVMSQLGALEAERDRALQARRTVVGNTTKAPSSGTASAGEVGSRLLRLRSIGPEIASVLTLEAFYRNFSNRREVAAYSGLAPSPWKSGGIDVEQGISKAGNARLRTTMIQLAWLWVRHQPSSALSRWFHERVGDKRGKIKRIALVAVARKLLVALWRYVAQGVVPAGAELKA

SEQ ID NO: 336190 - protein, 382 aa, unidentified
MQASTVDTLTADHCGTIFVTIELSQKTWLVTLHSPDRDRMSRHKLEGGDHAGLLALIESIRARAALKLGATPKVVSCYEAGYDGFWLHRLLAAAGIINLVFDPASIAVEQRSRRAKTDRIDGELMLRTLMAHLRGEPRVVRIVRVPSVAQEDARRASRERDRLVKEQTGHTNRIKALLRLVGIAVGYPRRRDWLNWLERQRDWQGQPMPPHVLAEVKREHARLMLVREQLAALEQTQAAQDPPVPGAMAERRDLLQRLKALGPAFATTLTNEVFYKDFRNRRQVGAYCGLTSSPWRSGGIDREQGISKAGNPRARLKAIELAWLWLRHQPESELSRWFRTRTANAGKRAKRIAIVALARKLIVALWRYLTTGLVPAGATMKA

SEQ ID NO: 336191 - protein, 415 aa, unidentified
MEPVLDSCAGMDVHEKKVDVCIAHGPLEKSPKFEIRTFSTMTSDLEDLKSWLKKYNVTTIGMESTGVYWKPIFNIMEGEFTIVLANAQRLKAIPRKKTDIMDCKRIAKLLRYGLLPNSFIPPREIRELRDLNRTRRKLVGMMTSEKNRLTKVLESSNIKLSSVVSKISGVSSMAMIRSLLEKDRLSKEEISQLAKGSLKKKVNLLEKALDGKLTDHHRFLLKMHMENLDHLARQIAKIDEQIERKMIPFQKESNLIQSIPGISKVSASAILAEIGTDMSQFPDEAHLSSWAGVCPGNNESAGKKKSGKTQKGNSFLKGTLAEAAWAASKVKRSTYNAFYQNIVRRRGKKRALVALAHRMLMDIYRVLKTGAPYQDTGAEEANERATKRKERSMIRLLEKAGYEVVRTCTSEIAAA

SEQ ID NO: 336192 - protein, 346 aa, unidentified
MEHYAGIDVSLELSSVCVVDTQGKIVKKAKVASDPEDLIAFFASLGFEVKRIGLEAGPLSQWLHAGLKRTGFDTVLLETRHVKAALSAMMVKTDRKDARGLAQLIRMGWFRPVHAKSMGSQEVRALLVARKQLLGRLIDVELSIRGILRGFGLKVGVVTRKGFEGRIRELVTGHITLERIAGAMLSARATLKVEYEKLHKIVLTIVREDAVCRRLMTVPSVGPLVAITYKTAMDDPNRIAKSKAAGALFGLTPKKYQSGEKDVTGGITRAGDEMARTALYEAANVLLARITRFSKLKRWGMDVAKRRGSKRAKVALARKIAVILHRMWVDGTTYRWTNAQPIAVQV

SEQ ID NO: 336193 - protein, 338 aa, unidentified
MKTFVGVDYHKGFSYGAIMNEAGEILKRGRFGNDADRVAEFLGEYGGPECSAVLEATRNWCVMHDWLEEEAGRVVLAHPLKVKAIAEAKIKTDKIDATILAHLLRCDLIPAAHVCSREGRVLKNVLRHRMFLVRLSTMTKNRIHAVVDRHPEVRAEWPCAELFTRPGVMWLRGVELPAYDRHILTAELDLLEHLEGQIKQADRWLRQVGRKDPRVARLMTIPGIGRSFAALLVSEIDDIRRFATAKKLHAYAGLVPSTYSSGGHTFHGRIIKAGNKYIRWAMVEAVWPAIQKDPDLYAYYYRLAGRKGANPAKVATARRLLTIVYRVLKEEREYRRAA

SEQ ID NO: 336194 - protein, 420 aa, unidentified
MKIVYPICCGIDVHKTFLVATIVSAMNPPVLTYKKERFSTFNNNLVRLKNWLIQHHCYNVYMEFSDKYWGPVFNILEPDVRVVIVNPKWVKAIKGNKDDVKDSKWIGELFCFGLVRSSFIPEKPIRILREFTWYRAKLVAHKSSKKNRFQNGFMVCNIALDSVVSDMFGTSATAITNYLLTDENPSAKICATFLQRSLKKKADTIISSIEGFQLTVEQKWRMLQVKNHMEYLASAIAQLDEQLDALAKPYEAAIHLLCTIPGVKRGSAITIISKIGTDMSQFTSSKRLCCWAGLTPGGNESAEKKKSVKITRAGVYLKPALVQVTHAAVKCLDQPYYKVKYEHIMRRRGKKRTIIAIARMILTAIYHMFQTGELFNPVDFPKIDMPLEVREHRKKVAIAEAVKLLKQQGLLPDTFSETCT

SEQ ID NO: 336195 - protein, 402 aa, unidentified
MNAVGIDVSKGKSMVAIMRPFGEIVSAPFEIKHTASDINSLVELINSVEGESRIVMEHTGRYYEVLAHQLSEANLFVSAINPKLIKDFDNDSLRKVKSDKADAIKIARYALDKWQNLKQYNVMDELRNQLKTMNRQFGFYMKHKTAMKNNLIGILDQTYPGVNTYFDSPARSDGSQKWVDFASTYWHVDCVRKMSLNAFIDHYQNWCKRKKYNFSQSKAEEIYGKAKELVPVLPKDAITKLIIKQAVDQLNSASTTVESLRTLMNETASKLPEYPVVMAMKGVGTSLGPQLMAEIGDVSRFTHKSAITAFAGVDPGVNESGSYEQKSVPTSKRGSSDLRKTLFQVMDVLIKTHPQDDPVYQFLDKKRAQGKPYYVYMTAGANKFLRIYYGRVKEYLASLPES

SEQ ID NO: 336196 - protein, 332 aa, unidentified
MEPVSARSGRQECLLSDVPCCIGLDVATAQLAIALRPSGERWAVPNDASGVTMLVDRLQALPPTLMVWEATGGLERMVTSALATAGLPVVVVNPRQSRECARATGQLAKTEAWDARALAHCADVIRPTPRPLPDAQTQELRALLGRRQPLMGRRTAEPHRRARTSGRLQSDIAAHITWLNARLATLDNALETVLRGRPLWRDNDDLWQSAPGMGPVCARTLRWELPELGTLTRQQIAAVVGVAPLHGDSGPLRGRRTMWGGRAPVRTVLYRGTLVATRSNPRIKAFYERLLATGKVKKVALTACMQKFLTILNARRKHQTPWQPQKEAMIAL

SEQ ID NO: 336197 - protein, 423 aa, unidentified
MVLEQAQDKQEIIQRVAALDIGKATLVCCTRIPGQAGRGRAQEVTEHSTMTRSLQLMIDRLLELGVTRVVMEATSDYWKPPFYLLEAHGLEVWLVNAKDVKHLPGRPKTDRLDAVWLCKIAERQMIRPSFVPPVPIRRLRDLTRYRVALIADRTREKNRVEKLLEDALIKLSVVASDIFGVSGRAMMDQLIAGERDPKVLAQSARGSMRGKIATLEQAFVGSFTDHHAFLLRRMLARIDGLSTDVAELDTRIDEQIAPFAHAVAQLDEIPGIGVTAAQAIIAEIGLDMSRFPTPAHLASWAKFAPGVKESAGRNKGNGSTGHGDPYLARVLGEAAVGASRTNTFLGERYRRIARRRGKKKAIVAVGRSILVIVWHLLSDPDAHFHDLGPDFYDKRRGPERIKQTHVRQLEALGYKVTLEPTAA

SEQ ID NO: 336198 - protein, 381 aa, unidentified
MKKNNKTAKTAKAVKRADKPTHAEKPGKGPITIGMDLGDRTSRYCVLDGDGKVVKEGSAATTRAGMTQVYGSMKRCRIAMEVGTHSPWVSRLLKGMGHEVIVANPRQLKAITDSSRKDDKVDAQMLGRLARVDPELLRPIRHRSEEAQLDLMMIRARASLVKTRTELVNAIRGFSKSVGERLASCDTDQMGWEKLAELPVGLQAVLKPLAEQISAMTASIKEYDKELEQIAKVKYPETRLLTQVGGVGTLIALTFVLTVEDKERFQRSRDAGCYVGLRPRRSDSGESQPQLRITKEGDMYLRSMLVQGAHHILSERGVDSDLKRWGLKLAERGGKNAKKRAIVAVARKLGILLHVLWVTGEVYEPLRNTHSAERRSGKQAA

SEQ ID NO: 336199 - protein, 445 aa, unidentified
MDVLINRCAGLDVHKKTIVVCVLVVGADGRVSKEIREYRTMTRDILNLADWLAQSEVTHVAMESTGVFWKPIYNLLDGRFEILLVNAQHIKQVPGRKTDVKDCEWIARCLQHGLLRASFIPSRATRDLRDLLRHRAQLASEKTRETNRIHKILEDANIKLGAVASDILGVSGRAMIRAMIDGEEDSEALAELARRKLRGKIPDLRVALEGKVLDHHRFMLRMHLAHVEYIESQIEEITVRVEQLMSPQGPSGGPDGGRSQELVADAVSQPVQQPFSYDQAIALLVPVPGLERSVIQNILAETGLDMAQFPSAAHISSWAGVCPGNNESAGKRRSGKTTKGSRWLRRSLCQAAWAAARSCDTYFSAQYKRLAPRRGKKRAIMAVAHSLLVTIYHMLKTRTPYRDLGANWFDQLHPEKLTRYLVRRLETLGYKVSLERTLSDQLVPA

SEQ ID NO: 336200 - protein, 456 aa, unidentified
MNNYLGIDVSKGYADFALIDEQKKPIVNSFQLDDTPDGHNQLGDFIRELFKQHPDLTLLASAESTGGYENNWLDCLIKLQRCYAIKVARLNPKGVHHYHEAKLNRAITDAISARLIAEYSMSHQEIIRFDQPDETYSLRKQWTLIKLLSKQKTQLLNQLDNLVYQSNTELMIYCRSYWPAWLLQLLRIFPTAKDLAQANVDQLTKIPYLGTDKAQKILQQARQSVASATDLVSGEMIKTVIAEIIQREKVIATCKKTLTENCSLPDVELLASIIGIGKFSAVGLIIEIGTWLRFSSAAKMAAFFGLHPILRQSGDKTWVARMSKQGSSEVRALLFMCAMVAIRHNPIIKDLYAHSLAKGKSKMSAIGICMHKLLRIVYGVLKSGKAFDPAIDQTNRTRKPDQRKPKKQEIRRLQPVDENAPVSSRQNKKRKEQSQSQSELVTKCEIKTPALSHCAT

SEQ ID NO: 336201 - protein, 392 aa, unidentified
MIYAGVDIAKTDHVIGAVDETGAEVAKPMGFKNAEAGFERCVAWLESVAESEDDVFVGMEATGHYWMACFAHLAAAGYRVCVVNPMQVHAMRRLKGLAGVKNDRVDSRLIAETLRQGDYDETRLATDEVQALKQLTRYRQGLKQELAAVKTQAICVLDAYFPEYAGLFSDMFGAASLKVLAECPTPAEVDRRRASTIARLLSEGSRGRLGADKAARLKAAAKSSVGIRLGEDAASFQIKTMVSQVEFLNRTIAKVEREVAALLAGIEPNITTIPGVSTATGAQIVAEIGDVRRFAGAAAIVKYAGLNPGVSESGKFSAEGVPIAKHGSPHLRRALWLAANRARQYDPRLREFYEKKRREGKPHRVAVTAVARKLCHIVYAVMRDGEPYDPLK

SEQ ID NO: 336202 - protein, 340 aa, unidentified
MGSVTTIGLDLAKNVFQVHGVDAEGVAVIRQRLTRGRMLKFFAKLPQCLVGIEACATSHYWARELVALGHDVKLMPAQYVKPYVKRGKNDAADAEAICEAVTRPTMRFVGIKSPEQQSAMMLHRVRLILNRQRTQLSNAMRAHLAEFGIAAPIGRNGIEQLLDVIADPADERVPTDARFCLEMLAAQLRIVKEQILENDRRILASARETELGRRLMEIPGVGPLLASAIVATVPDPAIFRSGRNLAAWIGLVPRQNSSGGKERLGGITKAGHQYLRQMLIVGAMAVVRYAERNGAKRPWLVQLLDRRKTKVAAVALANKNARMIWAMMASGERYREPQVA

SEQ ID NO: 336203 - protein, 344 aa, unidentified
MVIIGCDFHSGFQQIAIFDNQTGEIQEKRLLHPEEAAEFYRSQSTPVRVGMEAGVPCQWFRRLLSECGHQLWVGDAARIRAAEPRKQKTDRRDAELILKLMVEERFPRIWLPSEEERDVRQLLMDRHHRMRRRTQVKNQLQALALNQGLQKGRKLWSEAGIEQLRRLPMMEHAARRRDELLRTVVELDAQIAELDVLVRRQAEGREDARRLMTHPGVGPQTALAMVLTLGEVERFESAKKVASYLGLIPGEYSSGNKQRLGHISKQGSSLMRFLLVEAGQTAVRGDERLRRAYARLAAKKSRAVAKVMVARRLAVRLYWMLRNRWTYAELARHAGEPGSLCGEK

SEQ ID NO: 336204 - protein, 390 aa, unidentified
MIYAGIDVAKEKHDCLIVDTDGTILYEPFTFTNNQAGFDALFSKLISCSSDLRKIKVGLEATGHYSNNLLEFLIAKGLTTHVINPLHTNLYRKSLSLRKTKTDRVDAHSIVTMLRTENLKSYSHSSYHIRELKSLTRYRFCLIKDLAKLKISYARLCVILFPELENFVPTLHLVSIYTLLSELPSAKAIATCHLSRLKNILTASSKGHYGTDKATQIREAAKVSIGSFSEVKALELQQTIQRIKALEDMIIQVENKINPIIDSLKSPLMSVPGISYRMAAIIIAETQNFEGFSHAEKVLAYAGLEPSVYQSGQLTSTHAKMVKRGSKYLRYALFNATKYVCRWDPHFNTYLAKKRAEGKPYHVAVSHAAKKLVRVLFYLVKTDQTFVSQA

SEQ ID NO: 336205 - protein, 316 aa, unidentified
MKAEDVFVGIDVSKDRLDVALFSEGQSWSVGNDDRGIAQLVSQLRELRPELVVMEATGGLEIGVAAELGVAGMPVAIVNPRHVRDFAKALGILAKTDRLDAHVLAKFAQAVRPEPRALADVQTRQLEALVTRRRQVVEMITAERNRLHKALPAVQPRIKQHIAWLEQELKALDGDLHDSIRNSPIWREKEELLRSVPGVGPVLTCTLLAELPELGRLNRKQIAALVGVAPLNRDSGKLHGRRTTWGGRASVRVALYMATLAATQHNAVIKAFYERLIAAGKLRKVALVACMHKLLIILNSMLQHQTSWHPACAPTQ

SEQ ID NO: 336206 - protein, 379 aa, unidentified
MYDAITGMPAETILHGALELSKNSWLLAVQFPDRAQPSLHPIRGGDTEGLMAKLMAARDRWAKLSGKTPSIVLCYEAGYDAFWLARFLKARGIECLVVDAASMQVNRRARRAKTDRIDVGMLLRALIAWGQGDRHVWSVVRVPSVDEEDLRRSHRERDRLVRERTAHINRIKGLLFGQGIRGINVKSKYKTLQIDKLVTGDGCPLPPRLASEITREIARLALIQEQIATLECERDQAPTPCKATERKRVQLMCLTGIGPAIAAVMTREVYYRQFDNRRQVAGFLGLATSPHDSGDVERSQGISRAGRGQVRGTIIQAAWLWLKHQPKSAITRWFVQRTAGQSGRIRRIIIVAVARKLAIALWRFLEHGLVPQGAMLANR

SEQ ID NO: 336207 - protein, 368 aa, unidentified
MAKRTTTVGFDVHKDSIDVVVAEAGAHGEVRHFGTIGGDLGSIDRMVKRLEAPGRRLEFVYEAGPCGFHLYRHLKAQRLACTVVSPSMTPRRSGDRIKTDRRDAESLARLHRAGELRGIYIPGAQDEAFRDLVRAREDAVVSQSRARHRLKALLLRHGYRYEGRAAWTFRYRQWLSNLKFPTAAQQIAFQEYIDTIGEAERRVERLTEQIRALLPEWKWAPVVGSLQALRGVSMVTAVTLVAEIGDITRFSNPRELMAYLGLVPSEYSSGPKTRRGGITKTGNAHVRRVLAEAAWAYRGQPRVGQALLCRQNGLPQRIIEIAWKAQLRLTGRFRRLAARGKSHPKVATAIARELTGFVWDIARHVTVA

SEQ ID NO: 336208 - protein, 334 aa, unidentified
MNAKLNKQASNPTDVAIYCGIDVGKKVFVVSLSCKDKTKTFSNTGGDIKQAVAYLNTNAGIHLSLVVLESTGGLEIPLAKALYQAGFRVVIANPNKISQFARSYSNAKTDNQDAKMLALYAKFLTLDELELTKHLYAPPSKEQEHLEALVVRRTQLVSMRVQEKNRLHQIHQSQLDSVKQVISYLDEQIARLEQDIDTLNKHFDDTTKKFKDIKGVGNLTLATLMSMLPELGTLNNKQIASLVGVAPHPKESGTMKWKSHCTGGRQSVRNVLYNATNVARQHEPKFKQFYERLINKGKPFKVAINACMRKLLTVINAIVKNDSVWQADYHLRCC

SEQ ID NO: 336209 - protein, 339 aa, unidentified
MHPTTIAVDLAKSVFQVSIANQADRIIDRKRLTRSQFERFISQQEPTMIVMEACATANYWSQFAQAHGHETKLLHPLYVKPFVRRNKTDAADADGLLRAHGDPQLLPVPTKQPAQQALQGLHRIRQQLIRTRTGRITLARALLAEFGVSLPRGTGDICNRLTLQIEHLPVIIHHDLQEVVAEIQSLKQRLDQLDKTLAGLAKHDPVAQQLMSIPGIGITTATAMIASVPNIHLFTRARQFASWLGLTPREHSSGNKRRLGAISKQGDSYLRMLLVHGARSAITQAHRQRAKDETNLSDLQRWVLKLDAEKPRNIATVALANKMARLIWVTWTEARAYTP

SEQ ID NO: 336210 - protein, 373 aa, unidentified
MSKSSVAYRSFVGVDLHKTVVTLVAVDARGEKIAQLTAPTKCSDKITDWLRSLPEPVWMAVEACPFVEWFIDRFRWCVFQMDIADATELARLRGKRRKNDPNDAHDAAIRLADGRCPLGFIADEELMQLRKLGRHWRQLSHLLSRTKHAMRSMFHAANLAGPKVLDAASGHRWFLGEQHLLKPVQQQTFADFLDTLALVERQRERLRRDITLANRSEPFRATTELLKTVPGIDEVWACVIAAEIGPFKRFPNADALEFWAGMTADLKESAGRRQSGNITKAGSRALRWAVCKAAVTLCFSDAKQEATRQRLIKRTGGIKPKANVAMGRRLLRILFAMVRDGKSYQNAQPVARNLAANKARAAKRARKVGKEAA

SEQ ID NO: 336211 - protein, 348 aa, unidentified
MDYYAGIDVSLEASSVCVVDADGQIVREAKVLSEPEALIVWFEELGLGIARIGLEAGPLSQWLYAAMKKAGLAAELLETRHVRDAFKAMPVKTDRKDARGIAQLMRLGWFRSVHCKSMSAQEVRALLTARKLVQSKLVDMEMSLRGILRGFGLKVGPTRPNRFGNRIEELVAGHATLEIVAKALLAAHDVLLRELNGFEKRVRAMARDDKRVRLLMSAPGVGVIVGLTYVAAIDDPGRFKSSKQIGPHFGLTPKKYQSGEKDISGRISKIGDASVRTALYEAAHIILTRPLKGTSLLKSWAMKLARRAGMKKAKVALARKLGVILHRMWVDGTPFAGEPVRSLKPVAA

SEQ ID NO: 336212 - protein, 444 aa, unidentified
MAMRKRDDEVFPNAAGIDVGASSHWVAVPRHLAEAAGCEPVREIGAMTDDLNALADWLLALGVDTVALESTGVYWIPLYEVLEQRGLKVWLVDARQMKYVPGRKSDVQDCQWLQKLMSLGLLRAAWRPDGEVCVVRAVARQREVLITEQASWVQRMQKSLVQMNIQLTEVLADVMGMTGQAIIRAIVAGERDPLVLARHRHSRVKASAQEITKALTGNWREEHLFVLRQALAMYDDIARHLVECDAKLQALLDLRSQARVDLGKAPKVGSKSRVEFDVRQALANWAGVDLTRINGLGVTVVMKLLSEIGPDVSRFASVKHFCSWLGLCPGTKISGGKVLSSGTKRSANRARQALKMAAMNLSHSDSALGAFYRRLCGRMDKPRANTATAHKLARMVYFMLTRGEAFVDQGQHRYEEQQRERSIAALKRRAAALGFRINPLEAAA

SEQ ID NO: 336213 - protein, 328 aa, unidentified
MCTLGIDVSKNKIDVCLLTAGPGGKKKHKVLTNEPDVSSKVIDWLSAQKCVPESVTVVLEATGIYHENLAYGLHEAGVRVCMANPYRVREFASGMGILNKNDAVDAFVLACYGELKHPNAWVPPSPEVRKLRALLRQRDALKEDVQRTVNRLEKANSTTTPQEVIRSLERTKSWLSDELARIEKLITDHTDNDPGLKADLDLLKSIKGVKDQVGREMLALLKDGTFKSASQVAAYLGITPVEKTSGSSVRGRPHMSKTGPSEVRAKLYVAALSACRWNKQAKAVYERLVAKGKAKKAALGAVMRKLVHLCFGVLKTRLLWDENYAATA

SEQ ID NO: 336214 - protein, 383 aa, unidentified
MENRPLKFGARRIFGLDLSKKTLKACRLDEDSGFEKQNIFDEKMTDDGRHHLASRLRKGDYVAMEGGSSTSFLARYLMENTEAEIFVLNPCKLHIIFESACKTDKQDCIKIAKYIRDTNPSNWCLIPVPTYEETSLRSLINSHISTRQERTRAINQLHAFFNLNGISFLKKSDLGDSARRHDLVEHYFSQNDLRGMQARLMLQDIDNIELSADCYEELIRQALVSRPRESLIWMSIPGVGPLTALACVAYIGDGKRFSTPDQLRNYVGLVPRIDQSGIREAIYGVNHYGCMPVRRNIIQAAWSVDRLLSDCNLKRRWVLLKAAGKNKQRIAVKVANDILTIGWTLLKKGELYNGLGDFSYLQEKLHRYKMTAIDSSCFGECLK

SEQ ID NO: 336215 - protein, 394 aa, unidentified
MREKILYVGLDVHKHSIDMAITGSEVNSPVRSYGQIDNRLGILDRIIGKLESKGSELRFVYEAGPCGYQIYRHLAAKGYRCSVVAPSLIPKRSGERIKTDRRDAINLVRLFRAGELTSIYIATEEDEAIRDLLRCRDDMRRAERKARQRLLAFLLRNGHRYSGTTHWTKAHMKWLSGIKFGHAAQQIVFQEYLDSINECTDRVDRITGQIRSQVPLWSRAPFVKAYQALRGVSLIVATTVVAEIGDMRRFKNPKELMAYVGLVPSEHSSGKVVRRGPITKTGNSHARTALVEAAWTYRMWPRKSQTILKRQEQLPKSICDISWKAQMRLHNRYWRLRMRGKSKQTTITALARELRAFIWAIDREVQQVSLMKNARLFEEARPRKGESSIPAMGI

SEQ ID NO: 336216 - protein, 386 aa, unidentified
MQRNDLSRSLVAFEQNSTLVAVVELSLKTWLVAGLVPGLTRQPLKKQGADPETLLALLDRWRNEASKAGRVISRIVVAFEAGRDGFWLARWLRARGIEAYVIHAASIPVSREHRRAKTDRLDTALLMRAVLGWLRGEAKHCSMVAIATLAEEDARRCNREHEHLVGERTRIVNRLKAAMIRHGIRDFNVKRRKASERLERLCGPEGVPLPPNTLAELRRDMARLRLISDQIKEIEKMRLQRLRQAPQEATHPMLLMLARVKGIGIETADMLVHEVLSRNLRDQRALARYAGMTGAPDESGSKRREKGLARAGNGRARRGMLQLAWRWLMFQKNSALAQWYWARTAGARRDVRKTMIVALARKLLIALWRYVTSGELPAGAVLHPAR

SEQ ID NO: 336217 - protein, 370 aa, unidentified
MDERIKFFVGLDAHKDSIAIAACEAGREPARFVGTMGPDVNGLLKLLAKAGDPAQVSVVYEAGPTGYGLHRELCRRGYRSQIAAPSLIPRRPGVRIKNDRRDCVRLAELSRAGELKAIWVPDEAHEAMRNLWRAREDAVGMRLKARQQLQAFLLRHGRRYPGKTHWTKSHERWIAEQHFEHTGDRIALTEYQLAVQGADQRVQRLTTALIEATQGWRLEPVVAALRALRGIDTVCAIGLVTEIGDISRFATARQLMAYLGLVPSEHSSGNSIRRGSITKTGNGHARRLLTEAAWSYRFPARMSQHLRQRSQALPEPLRNHAWKAQQRLCGRFARLSSRGVQVNKVCVAVARELAGFVWAIAHQAARTQTH

SEQ ID NO: 336218 - protein, 403 aa, unidentified
MSTPNSKPERYLGLDIHKHYLVAVGVNQEKEEVYGPRRVAYNQLEQWLEREVTDRDAVVLEMTTNTWQMVDLLDGRVHSLTVVHPPHVALITRAQVMTDKIAARSLARLHAAGLLPSVWIPPQPVRELRALVAQRTKMTRLSTQAKNRLHAVLHRHHLALPEGDPFAQGNQSWWGDLPLSLAEQSLVQSDLATLRFAQQQVEQLTAELTRLAAEDERVPLLVQLPGIAIVAAMTILAAIGDISRFPTAKQLVGYAGLGSRVHDSGQTERRGRITKAGRRDLRAIMVEAAQTAANSHPHWQAELNRLQPRLGRNKAIVAIARKLLVAVWHILTQEKPDRFSQPERLARRYLQHAYRLGQANRPPGQSPAAYVRQQLNRLHIGADLTEVPWGSRRAVPLPPSAPG

SEQ ID NO: 336219 - protein, 344 aa, unidentified
MPYNFYLGIDVSKASLSVVLMNSDSKVLWSSKKIANQPSGFKQMVEHASKIASKHADGDDYSIAAGMESTGVYGEQLSYYLADNNMSGRISLYVLNPFAVKSYRKATMHLNKNDAADARLIASYLISMITTGQITPWQAPSLAERLLRELTRRRAELVTLREAEYNRLEKFRAVGSHPHPVIESVQELIAHLEQQIREIDEAIEKHIDDAGLRDTAELLRSIDGIGKVSSASFIGEAGDISRYRSVKQLVSRLGIAPCENQSGTSIHKKPVMSRMGSAVLRHAMYMAALVATRKNKVISAFYNRLLARGKCKKLAVIASMRKLLHIIWGVLTHRVKFDPEYAPA

SEQ ID NO: 336220 - protein, 437 aa, unidentified
MSQNKNHAKKSVCLQSLPLIHPHAAGIDVGAKEHVVAVPADRDPRPVRSFKAFTPDLYELAEWLQQCGVKTVALESTGIYWITLYEILEERGFEVRVVNARHVKNVPGRTKTDVLDCQWIQKLHSFGLLSGSFRPDQQIRTLRSLMRLRDNLVVQSTQSVHHMQKALFEMNVQLSNVISDIVGESGMRILEAILAGEHDPARLATLCSPRIKAARETVAKSLHGNWREELLFSLRVALDSFRFAQGKIAECDARITEHLAQFADRAVLETPPSSLKSELHRVCGVDLTKIPGIKEQAAQIIISEVGLDMTRWNTEKQFSSFLGLCPNNSISGGKVLRRSTRKVYNRAADALRLCSQSLTHSKTALGAKYRRLKGRLGAPNAIVAMAHHLARLVYRMLRYGRQYVEKGIAEYEIKFRLQRLKWLKHEAKSLDMQLLPA

SEQ ID NO: 336221 - protein, 343 aa, unidentified
MADIFALDVSMGKSYCVWYRGKHCLKEFSLVHTKAGFNALRDMIKKAQKPIVYFEATGIYSRVIEHFCETNGLRFCHLNPLELHLKSESLRRVKTDQKDAHRIALTVQENTFRLIVPWKKDYLQLHELSRFYNQLNADWNYRLNHLHTALEQVFSELKQLFVNRTSKLALNIVELFPHPALVRPYSRVKLKNILMASTDKRISKMKAYKYADRLIDLAQKSYPTVSGDAIQVDEVCYYARQLIALTRKKEEVIKRMESIAQRLPDYILYCSFPGIGKQTAAQLMGELGDISRFDNANQLNAFVGIDIRRCQSGTYLGQDHINKRGNPIARKLLYFTVGNMIRQ

SEQ ID NO: 336222 - protein, 357 aa, unidentified
MTHLSVTSPKPLYFGLDVGDRTTHVCCVDPERVVVERLRFPTTPEGVLRVFGNRPPARVVLEVGSQSPWMSDLLRTLGHEVTVADARRVAELTRAGRKTDRRDAETLARLLQGMPELLGAVHHRGRAAQADLALIRARDLLVRTRTSLVLHVRGTLKMFGLRARMCSAQAFHKKARESVPEDLAPALHPLLDQLSELEQRIRHFDREIERIAKERHPEAARLRQVCGVGALTSMAFVLTMDDPARFKKSRKVGSWIGLCPKVQASGDRDPQLSISKAGCSYLRRLLVQSAHYILGPFGKDGDLRRFGLRLCERGGKAAKRRAAVAVARKLAVLLHRLWTTAEPYEPLRNSLRATAAT

SEQ ID NO: 336223 - protein, 387 aa, unidentified
MQKPHDDSKACLTAFVQDSTLTVVIEMSLRSWLVAGMVPGVNREPRKKIAPNPELLLQLLYRWRDEAIKAGKEITRIAVAYETGRDGFWLARWLRARGIDAHVIHATSVAVSREHRRAKTDRIDTAMLQRGFLGWLRGERGHCSMAIVPTVAEEDGRCPHRERETLIKQRTSTANRMKSVLIQFGVRHFNPSLRKAPKKLDSVRTPEGIPLPSNAVAALQRHMERFRIINEQIKAIERTRLQRLQRDPAEKFNAMVFLLVRIIGLGVETAEQLVREILSRNLRDRKAVARYAGLTGSPDESGSMRREKGLSRSGNGRVRNILIQLSWRLLKFQPQSDLVLWFNNRTANAQGARKPMIVAFARKLIIAIWRYVNTGVVPEGFQLRSAA

SEQ ID NO: 336224 - protein, 411 aa, unidentified
MLYTYVGIDSHKDEHTAVLLDCFFEKLGEIRFGTMPSEFPIFLEKAERLKADGTELMFGLEDTGSFGRNLAVFLTDRRRLVKHVNSILVARERRNQNITQKTDSVDAQCAARVLLAKFAELPDADPQDKYWILRSLVVRWNQIVRSNTTMKIHLHTLLTQHYPNYRTFFKYIEGKTSLAFFKKYPSPGTLEGVTVKELAEFFRDVSRDIFGEEKADLILGSLENTTAPYQEIRDISVRSTIRQIEFNLEEMERLKQAMGDYLYSFDCTLTSMAGIDVVSACQLMSCIGDIRKFPTPAKLARYAGIAPVTYASGKKDLQFANLRGNRELNSLFYRLAVRLTSPVGPNNKILNMFFYEYFHKKQAEGKTKRQALKCVQRRLVNIIWNMLTYGEEYIGPPVFDKPEENKEEPEK

SEQ ID NO: 336225 - protein, 348 aa, unidentified
MTVYIGVDFHARQQTISYLTTEDGEMHHLVLQHESLTEVRTFYEQFRGQQVVVGFESSGYAAWFEELLEELGYEIWIGHATYIRQFAKRRQKNDRRDADLILELLYSGDFPRIHRYSPATRQVLQQLRYRQRLVKMRTMVVNMLLFMASSRGATFRTQLQSKRGQARLAQLPLPQPLAHQRDELLQLLQELDSKIAKEEQGLEKQAAQDVAVQRLRTHPGIGLLTGICVRYTLESVDRFATTRKVSAFAGFDPMEDRSDERRHMGAISKQGSRWLRFFLVEAGQVAMRKDADLARLYKRVSLRGGHAKAKVAVGRRLLVRAFIMLRDEIDYAEFQRRGVAARSSRGTA

SEQ ID NO: 336226 - protein, 412 aa, unidentified
MYYVGIDIAKRTHVAVIMNEDNTLKVKPFSFGNDKSGFKKLLIHLQTLCCDLSDIVIGMEATGLLFENLYRHLQSLDYNVVLLNPYQTAKFREMDTMKRVKNDNIDSVMIAALLKSGRFSEGYVSQEQLQSLRELYRHRASIENQLKALKRQTSAMLTVVFPELESVIRDPFNVTGLALIEKYPTAKHYHHASVERILKTFRGIKGNNFNRAKAQALLNASKNSIYSGIASEARALNIRMNIAQIRLLQTQLDEILLTMQSLFTGTQVKKEDQEVMEELIDNLRTIPGVADKTILALLAECGNLDRFYAPKALIGFLGLYPTLSQSGDSTRNGRLAKRGASLAKKAIYLASISAIRHNDEMRTIYMNYRSKGRAKKEAIIIVARKLLTIMYTIYTRNVPYDPQRVFVAKPNQ

SEQ ID NO: 336227 - protein, 345 aa, unidentified
MDHFAGLDVSVKETSVCIVDDTGKIVREVKVASEPEDLLQILSNPSYHFKRIGLEAGPLSQWLYSALAEAGLPAICVETRHMRAVLKAQINKTDRNDARGMAQMMRVGLYRPVHVKTLRSQKLRMLLTHRKLLQSKAIAIDNDLRGTLRNFGLKVGMVGTVKFEARIKELVENLPDLAELVEPLLVVRRVLREQFCIQHRRLLAIVRDDEVCRRLMTTPGVGPVVALTYRATVDVPARFRKSKSVGAVFGLTCAKHQSGESERSGRISRCGDEMMRVMLYEAAQSMLLHSKRWSWLKAWAMQIARRRGMKKAIVALARRLAVIMHRIWVDGTEFRWTREQAAAAA

SEQ ID NO: 336228 - protein, 425 aa, unidentified
MNYKQNEKINQVKESTLVVGIDIGSTTQYSRAFHWRGIELGKVFPFSNSREGFESFKAWMQHLQDKYKKLDAIVGIEPTGHYWFDLGAYLEDEGILLVMVNPYAVKQTKELDDNSQSKNDRKDPKVIAKLVTEGRYSAPYTPDGVYADLRIMVANRKRLIREMTQIKNRFARWFAIYFPEYTDVFGDYEAQSSMLLLKKVCTPEAIVELGAEKINQIWRDAKLRAVGMKRATTLCETAKRSIGLKKGSSAARYEMKLLLEDYEYKKAQLDAVMEEIEKLCRKIPESEQMLAIKGIGVITVAGFLAEVGDVRRFESPRQIQKLAGLSLRENSSGKHKGQTTISKRGRSKLRAVLFNAAMPLIAKKPEFKSLHEYYTTRANNPLKKKQSVIAISCKLIRVFYAILANGVTYDAQKMLSDIHRQPQAA

SEQ ID NO: 336229 - protein, 446 aa, unidentified
MTTVPEEIADEEHEQVTERVCAIDVAKESGKVCVRMPHETRPGRVSKVWDVPATMRAVTELGEVLVSQQVEVVTIESTGDYWRIFFYLLEAGGLKVQLVNARDVKNVPGRPKTDKLDAVWLAKLTEKGLLRPSFVPPAEIRVLRDYTRMRSDLIRERTRHWQRLEKLLEDALIKVTSVASKIDGQSVRDMIEALIAGERDPWVLAGLARGRMKAKRAPLVQALTGQFDEHHAELARLLLDQIDGLSAQIDKLTARVEQLIADLPEAPLPGPSGAAHIADQDGGPLPPLERLTEIPGIARRSAQVILAEIGLDMTRFPTASHLVSWAKLCPRTIQSGAKSTAARAGKGNPYLKGILGEAAAAAAKTDTFLGERYRRVVKRRGKLRALVAVARSILVIIWHLLANPAARYYDLGSDYHANRIGKDRQARGHIRQLEALGFTVTLTAAA

SEQ ID NO: 336230 - protein, 278 aa, unidentified
MSKAILGIDVAKKKLDVALIFSDKVLVKKFDNAVKGFKLLQGWLMSLHLEQVHACLEATGAYSEALAEFLHERGHLVSVVNPLRIKGFAKSDLQRNKTDTADARTIAEFCLAIDPEEWHPLPPEIKQLQALTRRIESLQGILNSEQNRLELAASEVRPSLKRIIRTLEKEIELVQDLIKEHIDNHPDLKGQSDLLQSIPGIGEKTAQVLLGELEFAAFPSARALAAHSGVTPQKFQSGTSVDRTRLSKLGNGRFEKRCISQRLSPRNTTELSKSLPVV

SEQ ID NO: 336231 - protein, 342 aa, unidentified
MKFYCGIDLSARDCHVCVIDEQLKIVIEQKLRNELPKICQLLEPYKAKLKIVVESTFNWYWLIDGLQAEGFEVVLAHTLGLYLITGAKVKTDRRDAYSLAKLLLVGAVPAAYIYPVETRPVRDLLRRRMHLVQVRAGEYGSLRCLLLRQGILSSKQQEIKTATEAELEQWFEHPLVRLHASQELQRIALYSQQIAELEKTILGLAQTEHSYELLLKLPGVGQTIALTILYEVGELTRFASVKDFSSYCRVVPGIAQSGNVTRRGRASKQGNHYLKAAFSQAAVHAVRCYPKVRRYYKRQLKRHQGRGRQMICYNIIAHKLAQAAFHVLKEQTAYREELLFGR

SEQ ID NO: 336232 - protein, 311 aa, unidentified
MPYANRFVGIDISKSSFDVCVLPDEEHATFANTDEGIGAFLALLGRFKGIERLILEPTGGYERAVEASLLAARMPVAKINAKQVRQFARACGQLSKTDRIDAFILADYGRRLETRLLDPRSPAQSLLKELVQRYRQLAHMIVQEKNRREKLTGKTKVLIEESLRFLSDQRHAVTEDMQLCIKSDPDLAKKAEVLMSLKGIGLKTACFLLADLPELGTLTKGQIAKLVGVAPLNRDSGLMRGKRMISGGRRQIRDALYIAALPAIRFDPTMKGFYTRLKTNAKPSKVALVAVMRKMIIILNARLRATVPTPS

SEQ ID NO: 336233 - protein, 357 aa, unidentified
MAVAEGGREGEIRYLGEFDNTPDATIKLVRKLTERYETVQFGYEAGPTGYGLYRQIVDLGQSCTVAAPSLIPRRPGERVKTNRRDAQALARLLRAGELTAVWVPDETHEAVRDLVRTRGMAVEDHRRKRQHVTSFLLRHGRRYERSMTWKGEHLRWLNRQSFEHPAQRLAFQEMLNAVRSSAERIARLDAALAEIVPQWTMAPVVAAFQAMRGISLVNATTVVAEAGDVRRFDHPRQLMAFLGLVPSERSTGETRKQGGITKAGNTRARKALIEAAWTYQHSAGVGEHHEKRQSGLPEIVRDIAWKAQTRLCARYRRLTARGKKKTVAVVAIAREIGAFLWDIARHVEPLPTKPGKA

SEQ ID NO: 336234 - protein, 318 aa, unidentified
MNTNTLQNINVGIDTGKSQLDIYIRPLDIYFTVPNTEKGIKEAITTIKKYQPQRVVIEATGRLEMPFILACDKVNLPYVIANPLHVKRFAGAIGQRAKNDRLDAALIAHYAEAIQPKLTQLKSENIRLMSDLVIRRNQLLSMQTMEKNRFQVQPQSLKSSIKPILTALKNQITKIEEKITKLIENCPEYRAKNEILQSMPGVGKIAAASIISNVPELGYITNKQASSLIGVAPITRESGRFKGKRMIQGGRSQVRTVLYMAMMSAIQCNPTFKVTYERLLTAGKPKKVAIVACMRKMVVILNSMLRDGVMWDKDSVKN

SEQ ID NO: 336235 - protein, 428 aa, unidentified
MKKHSFSKLAAISPDTLLIGVDIAKNAHWARFTDYRGIPLGKALKVLNNKEGFENILTTIKVVCKQHGLDRVILGLEPTGHYWKTLAHYLISHEIKVVLINPYHTKRAKELDDNSPTKNDKKDALTIARLLRDGRFSQLYLPQDVYGELRVLSSTRVSLMKRHNAIKNTIKAVLDEYFPELVTVFKYPLKGKACRQILKSCPFPSLILQLGRDKVLTQMKKAVKKTIGQKRVEKLFKTAKDSIGVTYGIPSAYLKLTLLLGELELMEKQLDQLETAMEEALTHTGFKEIILSIPGVGIITAASFLGNTGDPLRFTHPRQISKLAGYNLIEDSSGENKSRTTISKRGRKQLRNMLYQMARTTVAVNPQMKALYHYLKTRPANPLKKKQALVVISKKIITIIHSLLKKQTQYQPELVFNQFRKNQMKQVA

SEQ ID NO: 336236 - protein, 348 aa, unidentified
MRFYTQPHQFYCGIDLHTRWMYVCILSQTGEVVYHKNLPASPEPFLKAIAPFREDLVVGAECMFTWYWLADLCAQEEIKFVLGHALYMRAIHGAKVKNDRVDSQKIAALLRGGNFPMAYVYPRQMRSTRDLLRRRTYMVRRRADLLAHIQNTNAQYNLPEFGKKIARKAHREGITESFTDPAVQRSIEVDLELIDHLDLLIEELHADIERTARRHDPQALALLRTVHGIGKVLALVILYEIHTIERFDTVQQFCSYARLVKSKHESAGKKSGRSWSKIGNEHLKWAFSEAAVLFLRENPEGMKYKKRLEKKHGKAKAMSILAHRLGRAVYFMLKRGKVFDMKTFLATT

SEQ ID NO: 336237 - protein, 359 aa, unidentified
MLVERTCVGLDVHARSVVAAAIDGVTGELSEARLTPSHAHIRSWVERFDGPVAVVYEAGPTGFGLYRALNPVGVRCVVAAPSKLQRPPGDRVKTDAKDAVHLARLLRLGEITAVTVPTVHQEAARDLVRAREDCRGELMRARHRLSKLLLRHGFVYSGGQAWTGVHDQWLRRQRFDHRATTMAFESGYEAVTAITARRGRLEKAIAELAAGSEFTPIVHRLGCLRGIATLTAFALAVEIGDWNRFTGSSIASFVGLVPSEHSSGASRVQGSITKTGNTHVRRLLVEAAWQHRPAYRPGKVMRDRWDLADPAARARGDAGNRRLHQRWVQFNLRRKRPVIANIAIARELAGWCWSLAVMG

SEQ ID NO: 336238 - protein, 384 aa, unidentified
MLKVRSGSDAEIGPPPDTDGVDAPRRHRCAKVEVLNTTAKEASVEEVITIGLDLAKSVFQAHGADRAGGVVFRKKLRRDQLLAFFASQPRCLVAMEACASAHYWAREIGGLGHEVRLIPPAYVKPFVKRQKNDMADAEAICEAAQRPTMRFVTPKSAEAQGSAVVFRTRDLLIRQRTQLINALRGHLAEFGFVVRQGAAHTARLIDAVDEPSSDLPAEARPVLAIIAQSLRALQGQIAQLDAEIAARAKRDSVARRLMTIPGVGPVVATALVALAPAACTFKRGRDFAAWVGLTPRQHSSGGKERLGRTSKMGERSLRRLLILGASSAAKAAGRECAPANSWLKSMLARKPRMLVTVALANKMARIVWALMAHGGTYRAPAMAV

SEQ ID NO: 336239 - protein, 345 aa, unidentified
METMYYIGLDVHKRAISYCVKDVSGRVYAEGSVPATRFDLDRWMKTLPQPWTAAMEATVFTGWIYDHLQPHAAALKVAHPLMLRAIAAAKKKNDRIDAKKICDCLRCDFLPECYMASTAIRERRRTLRYRNLLVRQMVQMKNKIAMLLMEAGVSYNKQKLHKAGYFRELLATNPDINEGLCSLLRVCRETVVRLQRTESALVRSLERDSLLMDRVERLMTIPAVGPITALTWALEVGDVQRFSSIKKAISYCGLCSAEKSSGNTVQRTPLSKQRNKHLQTTLIEAAKMAPRNSPELAMLYDKEKRKGHANRATLAVARKLVAYLVAVDRGQRNFQVVETSNCIAA

SEQ ID NO: 336240 - protein, 392 aa, unidentified
MEVMVTHCCGLDVHQKSITACVLVGKLTSSRPKKTQKTFGTTTFDLRSLSEWLKELEVSHVLMESTGQYWKPVWNILEPEDFHLILANPQHIKNVPGRKTDMKDAEWIALLGRCGLVNASYVPDKETQELRYLTRQRSSVKQEKTKRVNEIHNILQRANIKLTSYLSNIFGKTGKALLTLFINGEKITEEVVAREIHGKVKASIAELVRAMDGCLSKCDRALLNLHLQTILRLEEEISELNQLIDEYTEKFSDVYLRLIEIPGISKLTAEVILAEIGCTVNAFQTAENLASWAGLCPGNYESAGIKKRSNATKGNKYLKVALCRAGISAGRSKSGTFHSFFVKLSQRMPKAKAAVATAHKLLRIVYVLLKTGQRYDELIINKEKGSITTGMA

SEQ ID NO: 336241 - protein, 341 aa, unidentified
MSELALVGIDLGKHTFHLHGQDVSGREMFRKKLSRVQMMRFFGNCPTCTVVMEACAGSHFVARELATMGHVTKLISPQFVRPFVKSNKNDFVDAEAICEAASRPSMRFVSPKTEAQQTLSVLHRMRESLVRDRTKTINQLHGFLLEFGISLPLGWTVIKRLPSVLAEHELPIRLSTLLQRLHAHFGYLDEQITQLDKQMAGQLADDDLGSHLLSMPGVGPITASLLAVEMGDGKQFGCSRDFAASIGLVPRQYSTGGRSNLKGISKRGDKSLRCLLVQCARVYMQRLDSQKGALADWVRSLLQRRHSNVVACALANKLARIAWAISAHHTVFEVGSDAIAA

SEQ ID NO: 336242 - protein, 315 aa, unidentified
MACLQHAPSHVLGFDVAKDTITLHDTRDARTVTIANRPAAIGRVLSALEGDVFCVLEPTGGYERPLLAELAAAGLACHRADTLKLKAFLRSFGRLAKTDTIDAEALARYGAERWSQLPLFMPVDATRAALAGLVSRRHDLVSFKVAEQNRAKAPAPKRIRASCAAVLRTLLREISAIDKEIDALIAASPDLARRRAVCQTLPGVGPRTAISLLATMPELGSLTRRQAASLAGLAPHPNDSGTLKGYRRMRGGRPGVRASLFMAALAASRAKGPLKAQYQRLRDNGKKPIVAIAALMRKIIVILNARIRDDLAKQS

SEQ ID NO: 336243 - protein, 370 aa, unidentified
MRDRFIGLDVHKATIAVAIAEDGRAGEIRHYGTIQHRPEHIAKLMKRLAAKGAGLHFCYEAGPCGYGLHRQIIEAGHTCIVVAPSVLPVKPGVRIKTDRRDAMKLARLLRAGELEAIWVPDAAHEAIRDLIRTRADAVDAVKRSKQQLLSFLLRHGRSFTGRGVWTRSHFAWLAEQKFEHTAHQIVCQDYINAIHDGQQRRKQLEKLVFDQLPSWSMKPVVDALCNIRGINVVAATTILSATGDLRRFPTPTKLGSYFGLVPGEHSSCDCVHRRGITKRGNMEVRRVLTQSAWTYRFPARVTADFEKQNFDADKKVRELAWRAQVRLCGRYRKLSARGKRAQVVCMAVARELTCFIWELGQLIEPRRAEP

SEQ ID NO: 336244 - protein, 363 aa, unidentified
MKKPSTFVGADVHATSIALAVWRPGADKPEVSEIPNDPKAIRRTFTRLQGAGPLRCCYEAGPCGFELYRQLTAMGVPCDVIAPALIPQRPGERVKTDRRDATKLARLYRAGELTPIRVPTTDEEAVRDLVRAREDIRKDLMAARHRLSKFLLRHGRLYSEGTKWTKRYWAWVRTQTFDHAAARATFDHYILQVHHLEERLHALEADLAQVAASAAYRPAVDRLTCLRGISQLSAISLLAELQDFRRFAHPRQLMAFVGLVPSERSSGLKERRGHITKTGNSHARRLLIEAAWSYRHPPALGPRARRLLPGQPPEVVALVKKAQARLHKRYLRLVGRGKRSPVAVTAVARELCGFLWAVMAQAA

SEQ ID NO: 336245 - protein, 412 aa, unidentified
MLKIVYPICCGMDVHKSFVVACIATTNDHGVTTYKSKRFSTFTGDLRRCAAWLSENNCKDICMESTGKYWIPIYNILEATCNIVLAHPKYVKAIRGKKTDKRDAKWIADIFKHDLVSGSFIPPADIRQLRDLVRYHWKLTNFNVGEKNRAQNCLTVSNIKLDDVFSDVFGKAATAITTRLLESNEPFDVKPYLTKNIKKPIEQIQAAVDGKMCAEQAEKLRIIRSHMDSLELCRLNLESLILTTAEKYLPQLNLVMTAPGINSFSAIGIISEIGVDMSVFPSSKHLCSWAGLTPQNNESAGKKKTTRISRAGAYIKPLLVQCALASLKSRRYPEVQARYISLKKRRGHKKAIIAIARMLLTSIYNMLKRNEAYNPDLYRKADRPPTHREVSVEEAVFILQRQGYWVTAPTVT

SEQ ID NO: 336246 - protein, 344 aa, unidentified
MNASKPVSRMGVDLGKNSFHLWGVDHLERLALRKKLTRNTLLKQLSNMPRCLIGMEACGSAHHWARELEKLGHEVKLIAPQFVKPYVKGNKNDYNDAEAICEAVGRPNMRFVGIKSVQQQELLALHRIRQSVVKARTAQANQIRGLLAEFGVVIGKGISQVRRRLPEILEDGENHLSAESRAWLRELHEHFLHLDGRVQTYDQRIEGQFNAQEPCQRLAAIEGVGKIGATAVVATFGKATEFGNGRQFSAAMGLVPRQHSTGGREVLLGISKRGDRYIRTLLIHGARSVVARVLNSSKDDARSRWIRRIALERGINKAAVALANKNARIIWALLSRESVYRPAV

SEQ ID NO: 336247 - protein, 356 aa, unidentified
MISSGDVNGVSVIVGVDTHRDEHVAVALDQLGTRVGTLRLATTVQGYIDLERWARELGEVAAFGVEGTGSYGAGLARFLMGRGYRVVEVNRPDRSTRRRVGKSDPTDAEMAARAVLAGVADSTPKSGLDQVEMIRMLKSTKSSALKARTQAMNQIKALLVTAPAPLRQALRSLTSGRLVLRCAGLRSGALVTPLAAAKRALHLLARRYQHLTSEIRGLDLDLAQLTAAVAPALVSAFGIGADSAAALLVTAGSNPERLRSEAAFAALCGVSPIPASSGRTNRHRLNRGGDRQANAALHRIVIVRLRFDPRTQAYMQRRRAEGLSKTEVIRCLKRYVAREVFAALHELGQRNVAMVA

SEQ ID NO: 336248 - protein, 339 aa, unidentified
MELCCGMDLHSSNTVIGMIDEKRKHVIDRKLPNDPELIRSFLKPYKSDLKGIVVESTYNWYWLAELLQEEGYRVHLSHPVANEQYNGLKHSNDKHEAFWLAELLSLGILKEGYIYPRQVRSVRDVLRKRAHLVRVRTALIVSLQHMISRNCAVKVKTGDIKRLTADVISPCLEKEEALLLAGKTSKEVIDCLTRQIDKIEGWALKRLRREEVFNRLVTLPGVGDILGMTILLETGPISRFRAVGNYASYCRKVSSQWTSNDKVKGRGNIRNGNRYLAWSFSEAAAHARQTNEACRRFYDRKLRQTNTKVAHNALAHKLTRAAYYIIRDHVSYQEEKMFS

SEQ ID NO: 336249 - protein, 417 aa, unidentified
MTDDARWFVGVDWASQAHQACLIDAGGKIISEQAFAHGGAGLAELCTWLLAKTAAAPTAIAVAIEVPHGPIVETLLERGFQVYAINPKQLDRFRDRFTVAGAKDDRRDAHVLSDSLRTDRHCFRRLAAGNAVVIELREWSHMAEELQQERNRLANRMREQLWRYYPQALAIGEDLAADWFLELWAAAPMPAKAARLRASAVERVLKAHRIRRITVPEVLRILRQPALAVAPGTAEAATAHIRALAERLKLVNRQIREAHRRLDGLCAKLAGDDRENSPGPETEQRDVTILRSLPGVGRIVLATLLAEAAEPVRRRDYHALRTLSGVAPVTKRSGRRCVVIMRRACHRRLRTAVYHWARAAIQHDELSRRRYASLRQRGHSHGRALRSVADRLLAVACVMLTRQALFDPEHAGNRAAA

SEQ ID NO: 336250 - protein, 363 aa, unidentified
MKIVGCDLHARQQTIAMVDTETGEFTEKTLCHEGNAVRAFYAALQGPVVVGIEATGAMQWFLELLDELGIEGRVGHPAKIRAQETRKQKHDRRDARLLLQLLSEDRFPEIWIPSTEQRDLRTLLRDRDQWVRMRTRAQHTLQAIALNHALRQGRALWSATGQTALEALPLPPYTRQRRDELLALYAQLQKRIQELDKEVEAQARQRPQARRLLTHPGVGPVTALATDVFLGDPSRFATGNQVASYIGMIPSERTSGKRQRLGKMSKQGNALLRYLWTEAAMSTVRKDPELQRFYRRKLIQKGMGKARIAAARKLGIRLWIMMRDQIDYQEFCRRGKLRQTGEPMRGCLINNSGPAQAVTGSTE

SEQ ID NO: 336251 - protein, 449 aa, unidentified
MSKQRNKPVSLPVIEPNAAGIDVGATEIFVAVPADRDPEPVRCFPTFTVDLERLADWLQQCHIRTVAMESTGVYWIPLFQILEKRKIDVRLVNAHHVKNVPGRKTDVSDCQWIQHLHSVGLLRGSFRPDDEICAIRSLWRHRDNLIQLATLHLQHMQKALDQMNLQIHHVISDLAGTTGLAIMDAILAGERDPQKLAQLRNRHIQASEETIMKSLVGDYREEHLFTLRQSLTSYRHYQGLIQEVDLQVKQMVQRLPSRIAAGEKPPKGDKIRRTPWRNEPPQLRNDLYRAFGVDLTEVPGINSLTAQMLLTEIGPNLSRFPTAAAFCSWLRLCPNPKISGGQVLSSRTQPTKNRAALALRMATQGLHRSDTFLGDYFRRMKARMGAPKAMTATAHKLARIVYHMVTTQQEYDSTVFQQQEQRRRLQKSARLYAQARELGFHLVPINAVP

SEQ ID NO: 336252 - protein, 266 aa, unidentified
MADAKRFVGIDVAKAQLDVAIGPNGESFSVANDETGISELLRRLEPADLVIIEATGGLEVPVASALATAGIAVAVVNPRQVRDFARATGQLAKTDALDAQVLARFGEAVKPQVRALRDAQAQALEALVNRRRQLVEMLTAEKNRRANSPKVIHKGIDEHIRWLEKRLSGLDDELAGLVRETPIWRERDELLRSVPGVGKVLSTTLLAHLPELGALNRKQIAALVGLAPFNRDSGSLRGSRCIWGGRAQVRRVLYTWRWSPPCVPIQ

SEQ ID NO: 336253 - protein, 351 aa, unidentified
MDIIGCDLHTRYQNVAWVEAETGEIRSRRLEHENGEARAFYLSRPRGMVVGIEATFPALWFERLLAEGGHELWVGDAARIRASEVRQQKTDTRDAEHLLDLLQAGRFPRIWVPAAAERDLRQLLVHRSKLVRMRTAVKNQLHALAISQGVCRKGQLWSARGRAELASLALLPWASRRRQALLEWLEQLQGPLAELDRAVAEAAQQREAAVRLMTHPGVGPVVGLAFALTLGPVERFPNSRKLVSYLGLNPREHSSGGRQRLGAISKQGNTMLRWLLVEAAQTAARYDPELRRAYQRLKFRRVSGVAKVAIARRLAVRLYWMLRARVDYAQLVRMSGSPSSAVVPPRAGSKL

SEQ ID NO: 336254 - protein, 364 aa, unidentified
MLYVGIDQHRKQLTVSVRDESGSVILRRQVSTEWKKVRAFFDEVRDQAIPHGGYLAVVEICGFNEWLLKLLPGHGCRDTIIVQPGEQSSHKTDRRDASGLSETLWINRDRIAQGLPVRGLRRIQMPSAAEQADRRLTSQRHDVGRELTRSINRMKAILRRHNLEQECPTKGIQTQRARKWLEGLSLSLVERAELNHQLARQDLLRKQLKELQAEILRRYEAHPVAQLISTLPGAAAYSSLGLASRIGDIRRFKHPRSLANYWGLTPGSRNSGEATQRLGSITKQGSALARFLLGQLVLHVLRKDTWTRTWFRGIKRRRGSKIARVAVMRRLATILWHMLTKNEAYACGGPPRARLQRQASVARA

SEQ ID NO: 336255 - protein, 360 aa, unidentified
MIGGDGHKEMVTVGIDLGDRTSQCCVLGKDGKVREEFSLPTTKQALRRRFSGQEQACIVLEAGMHSPWASRLLAELGHEVIVANPRRLRLIYGNDSKNDKADATYLARVGKLDPSLLSPLVHRSATSQSDSALIRSRDALVRTRATLINHTRGMVKSFGERLPRCSTRAFAKKVDAHLPEPLRPALGPVLGMISALTAEIRGLDQKIQALARDSYPDTSLLTQVQGVGSLTALAYMLRVEDPARFPQARAVGSYFGLRPRQADSGKLKPQLRITKAGDQMLRSLLVGSAQYILGPFGPDTDLRRFGLALAARGGKSAKKRAAVAVARKLSVLLLRLWVTGEIYEPLRNARLRGEMVPAPA

SEQ ID NO: 336256 - protein, 391 aa, unidentified
MIYVGIDVAKDKHDCFITNSDGEVLFKSFTIPNNRKGFETLFQKVQSVSDDLTKVKVGLEATGHYSYNLLGFLLDKGLPTYVINPLHTNLYRKSLSLRKTKTDKVDAHTIASMIMSDVNLKSYSDTSYHNEELKSLTRYRFDKVQERAKLKTSVSRLICILFPELEKLVATIHMASVYALLSEFPSAHAVASAHLTRLTNLLSESSHGRYGKDTAVMFREAARNSIGSNMPAKSLELKHTIKLIQELTSEIDEIETEIKSIMDEVNSPILSIPGINYRMGAMIIAEIGDFSRFDSPDKILAYAGMSPSTYQSGQLDNCYSHMEKRGSRYLRYALYNATKYVCHWDESFGTYLAKKRAEGKHYNVALSHATKKLVRTIYAMEKTGQSYSSAS

SEQ ID NO: 336257 - protein, 314 aa, unidentified
MKKSSTEAAASKRNFDQKLTVGLDLGDRSSWYCVLDESGEVVGEQKLGTTPKAVREVFAAMPRSRVALETGMHSPWVSRLLSELGHEVIVAHARNVRLIGESRRKDDRLDARTLARLARIDPQLLSPVKHRSAQAQADLTVIRARASLVRARTALVNAARGLTKSYGERLRGCNPRNLDTEKAQALSPELQAALGPLLQALESLSERIAEYNRQIEAIAQQSYPQTALLKQVKGVGTLIALTYMLTLEDPHRFRKSRDVGCYAGLQPAAETPDRAHRRCTSAKRAIRICEPCWCRERTTFWDRLEPTAICDDGV

SEQ ID NO: 336258 - protein, 340 aa, unidentified
MENFAGADLHKKVTQLGLLRRGKPPSQYRFPNDRHTVEKVLGKLPAGTKIAVEATSNWWWFVEKVRELGHEVYLSHPKQTKAIASARLKSDKVDALMLARLLKADLLPMVWIPGERERYVRELLSHRGRLVKSRTAVINEMHAVYAKRNMEVVGKAWLKVDPVPYRAKELSGYGPRIVEENVELLRFVNEQIRGLDKELRKIANEDAQAKRLMSIIGVGPVTAVAVSCWVGDINRFANSKKLVSYFGIAPKVRQSAERERHGHISKEGSRMVRWLLIQAALSHTHKSRGPVRKHYLGVSSRQGKMIARVAATRKLIGVMYHMMKDEIDYEEFLRRGSSAQ

SEQ ID NO: 336259 - protein, 394 aa, unidentified
MKLIGIDIGKNKHFFCVMDQQTGEIISQPVSFSNDKEGFDFLVQKIKSYPKDSILIGMEDTGHYHFALLKYLLDLQYTVALINPKTTDFNRKMQGGITKNDKLDTINICDVLDTPERKKQYRITKVNSFDLYEQKQLTRHHHNLKEEENVYKNRLQKCIDIVFPEFNKLFNSKYGIVYMNILKMFGSAENIANTDIRTIRKCFEIECRGNRISLTPERLKECARSSIGISSSAEVIQIKHLTAQIELIEEQLTEIDKKIEEFSIQNNSPILSIPGISHFSGTSILAELGDISNYSKPSQIIKFAGVAPLHYESSQFNAQHTAITKKGSKYLRKTLYQIILPVIRHNPVFNKYYQLKISQGKGHRCAQGHCVRKLLRIIYHLLKTNQQFDPQLLR

SEQ ID NO: 336260 - protein, 416 aa, unidentified
MEKVYTHCAGLDVHKVTVVACRLRLDHAGHKQKESATFGTTTAELLRLSDWLTAGQCTHVAMESTGEFWKPVWNILEGNFELLLVNAQHIKRVPGRKTDVQDAEWLAELLQHGLVTASFIPPRAQRERRDLTRQRTQLVRERAGVVNRLQKVLEDANLKVSAVLSDITGLSGRAILDAIVAETFALGQLSALVHGRAREKLPALEQALTGHVRAHHRFLLRHHLAQLDFLDAQIAAYSAEIARVTQPHEELVQLLDTIPGIARPTAEVLLAEVGPDLSRFPSAGHLAAWAGVAPGNNESAGKHRSGKTRKGSQWLRTGLVQAAQTVARQKQTYLSAHYHQIAARRGKKRAVMALAHTLLVIAYHVITRKEPYRELGANYLDERRRTSVVNRLGRRLAKLGYAVVPLPHTPAITASV

SEQ ID NO: 336261 - protein, 402 aa, unidentified
MNAVGIDVSKSKSVVAIMRPFGEIVSTPFEIKHTASDIHSLIELINSVEGESRIVMEHTGRYYEVLAHQLSEANLFVSAINPKLIKDFDNDSLRKVKSDKADAVKIARYALDKWQNLKQYNVMDELRNQLKTMNRQFGFYMKHKTAMKNNLIGILDQTYPGVNTYFDSPARSDGSQKWVDFASTYWHVDCVRKMSLNAFIDHYQNWCKRKKYNFSQSKAEEIYGKAKELVPVLPKDAITKLIIKQAVDQLNSASTTVESLRTLMNETASKLPEYPVVMAMKGVGTSLGPQLMAEIGDVSRFTHKSAITAFAGVDPGVNESGTYEQKSVPTSKRGSADLRKALFQVMDVLIKTHPQDDPVYQFLDKKRAQGKPYYVYMTAGANKFLRIYYGRVKEYLSSLSES

SEQ ID NO: 336262 - protein, 358 aa, unidentified
MTATSIADVSATVTVGVDTHKHTHTATARDGLGRGLGEIVVDTTPRGYAALVAWAIGFSGEVTFGVEGTSSYGAGLARYLRARGHPVIEVLRPTRQDRRLRGKSDRIDTDAAAAAVQTGKARAVPKAGDDAVETIRALKIAKTTAIKARTQCMNAIKALITTGPDEIRTQLRDLKPKALIATAGAFRVSEVADPKSAAKWSLRSMARRYAALDDEVTELERQLDQLTQRFAPDLRQRMGVGQDVAAALILAAGLNGDRIRTEASFSMLCGASPIPASSGVTHRHRLNRGGDRQANAALHRIVLVRMRYHEPTKAYVAKRRTEGKSKAEIFRCLKRYVAREVFTALIKPTGSQVEVIAA

SEQ ID NO: 336263 - protein, 338 aa, unidentified
MKTYAAIDLHSNNGVLVVTDETDRVLRQKKLANKLELFVAELEPFRATLQGVAVESTFNWYWLVDGLLRHGFPMMLVNTAAIQQYEGLKYTDDPYDARWLAHMMRLGILATGYIYPREERAVRDLLRKRSSLVQQRTANILSVQNLEQRNRGTKISSREVKKLTEESIGELYDNEDLGLALTTTIKVIEALTEQIRCLEKAVLKKARLRDEFKLLLTVWGIGDILGLTIVYEAGDMSRFADAGPFASYCRCVQAQRLSNGKKKGENNRKNGNRYLAWAFVEAAHYAIRYYPEAKRFYDRKAARTLPVVAIKAIAHKLARASYHVLCDQKPFDPKKVFP

SEQ ID NO: 336264 - protein, 334 aa, unidentified
MEKITTVGIDLAKNVFSLHGVDALGKPVLRRTVGRDQLEALIAKLPACVIGMEACSGAHEWARRFARYGHTVRLMAPKFVSPYRKSGKNDGNDAEAICEAVSRPSMRFVPVKTVEQQALLTLHRVRQGFVSERTAIINRLRGLLAEFGVVLPLRANTVRAQATAAGEQLPELVRRAAGELLDHLRLLDSRIAAYEHEIESQAKLSEPAQRLMKIRGIGAITALALVASVGRAREFKNGRQFSAWIGLVPRQHSTGGKTRLGHISKHGDPYLRCLLFQGARAVLHSAAAHQDRFSRWVLELQARRGYYRTLVAIANKNARIAWALLSRNEEFKAA

SEQ ID NO: 336265 - protein, 386 aa, unidentified
MQKFDDLSRSLTTLEPGGTLIAVIEMSLSSWLVAGIVPGVERQRLKKLAIDESALLKLLHRWREEAKKAGHRIERIAVAFEAGRDGFWLARWLKTRGIEAYVIHASSIAVSREHRRAKTDRLDTELLKRSFLGWLRGERDHCKMVEIPTIKDEDAKRPNRERDNLIGERSRIINRMKAALVRLGIRGFNPKLKRAAARLDGLRTPEGEPIPPNTQAELRRDMERRRLVSDHIRQIEEARLERIEQAPSNGPHAIVRLLARVMGVGIETADMLVHEVLSRNMRDRRAVARYAGLTGSPDESGRKRREKGLARSGNARVRRGMIQLAWRFLLHQKDSALTKWFRSRTENARGTRKPMIVALARKLLIALWRLVREGVVPDGVVMRPAQ

SEQ ID NO: 336266 - protein, 424 aa, unidentified
MKPLEQQAGHWLANRGFGALDWASEKHSVVVVNAQGQVLEDFEIEHSASGWKKFGERIKPYGSIPFAIETSQGAAVEQLLEAGMEVYPLNPKSAQAYRARKAPSGVKDDQLDAWSFADALRVDGQNWKPLRPESPLIKELRLLCRDEVGLIEQRSAFINQLRHALAEYYPTALEAFEDWGSISAWAFLERFPSAQLLEKAGKRQWEKFLHSRHLWRNESGPKRMELFAKATEFCGGEATTRAKSMLALSLVKMLFALEKQLSEYRQRIEALFESHPDHDLFGSLPGAGPKLAPRLFAEIGDDRGRFGGEAQNLQCLAGTAPVTKRSGKHRECHQRWACNKHLRHAVHLFSEHSITRCTWAEIYYKAHRAKDHSHARTLRCLGQRWLKIIHKMWMDRTPYNPELHHLNQIKHGSWVFELKTVNCK

SEQ ID NO: 336267 - protein, 351 aa, unidentified
MENIALIGIDLGKNSFHIHCQDRRGKAVYRKKFTRPKLIEFLATCPATTIAMEACGGSHFMARKLEELGHSPKLISPQFVRPFVKSNKNDFVDAEAICEAASRPSMRFVQPRTESQQAMRALHRVRESLVQDKVKTTNQMHAFLLEFGISVPRGAAVISRLSTILEDNSLPLYLSQLLLKLQQHYHYLVEQIKDLESQLKRKLDEDEVGQRLLSIPCVGTLTASTISTEIGDGKQYASSRDFAAATGLVPRQYSTGGRTTLLGISKRGNKKIRTLLVQCAGIHTKTGTPVWQIGRLGQGFTVPEKQLCRHLCSGKQAGQNSLGPNGTTANLCSITAEIHRFKELLIWFCEY

SEQ ID NO: 336268 - protein, 423 aa, unidentified
MKALSHIRPEDVLPEIMKNPAQVLFIGIDISSKDHVVRAVLGNKNHLKDKFIFSSSYDDLIHFCEWVHQLKKRYNANHVFIGLEPTGQYWMPVYEFLRDNLPEYGIYEVATRAVCWYRRMNNSNSSKTDPIDAYTIAELVANGKCCRPIQHTALTRNLRETMRLYNEASKRLKQARQQLMAMVQKSFPEALSSVSGSQGIDGIFNILQDSIEPKEIIKIPQEQWVELKVRSGLARKKLRNLYSLAQHSLGQINNDNFRHSLWKIQWTSWKNNLQRTNELKNILKNIIDLHEATPFLLTIDGVATITIAAFLAGVGDINQYSSEKQVEKVFGFDFFRWQSGNMDCKPHITKRGYAIGRSYLVLAGERFITYPEPKECYNRRPKKNKKGKPGMPGVIALTAKLIRIMFAVAKTKKPYNASLAFKS

SEQ ID NO: 336269 - protein, 407 aa, unidentified
MSYYIGCDWASAAHSVCVIDEHGQVLWQEIVPHTADGFAALRRRLQRVAAPADLPVAIERPSGLVVDALVEWGFPVVPIHPNVLKASRPRYGMSGAKSDAGDAFILADLLRTDGHRFRPLQPLSEETRALRALVRARDDLVATRVGLANQLRAVLESFWPGAAHIFADVDSAIALAFLERYPTPQSAEHLGEKRLAAFLGRHSYCGRRSAPTLLDRLRRAPTTTRGDADTDALGEVVRALVAVLVPLVTQIQKLTSAIAQALPAHPDGPLVMSFPRAGCINAAQILAELGQERQRFTSAEHLAAEAGVAPVTQASGKHRTVTFRWACNKRLRRAITTFADNSRHASPWAAGLYQRALARGCDHPHAIRILAKAWLRVLWRCWQSSTPYQLSHHTTAQGLTIPAPKPA

SEQ ID NO: 336270 - protein, 347 aa, unidentified
MVADRFDVVIGVDTHRDAHALALVRCRDGVLVAEEELPANRAGYRAALRLGKRSGRRRLWALEGTGSYGAGLARFLAERGERVLEVERPARAGRRRRLKSDSLDALRAARAALAGESLASPRAAGRREALRVLLQTREGAVQTRRSGLNQLRALVVSAPEELRERLRGRGRDALVRACTRRRPQQRSRPELYATALALRSCARRVEQATREAAELGDELRRLVVELAPQLLSLDGVGPISAAQVLVSWSHPGRFRSEAAFARLAGAPPIPASSGQTVRHRLDRGGDRRLNRALHTIVLTRRRGDAATIAYIARRVSEGKSERDAVRCLKRYLARSLFRLLEAPPTTG

SEQ ID NO: 336271 - protein, 357 aa, unidentified
MKIIGVDLHTRQQTIAMLDDQTGELVEKQLSHEGEQVREFYADLPKPVLVGLEATGSMHWFLRLLEELAIEFRVGHPAKIRAAEPRKQKNDRRDARLLLTLLAENRFPAIWMPSREQHDLQILLRHRDQFVRIRTRVQLSLQALALSHGLRRGHSLWTCGGQHTLRALPLAAHASEQRDTLLALYPQLQGPIKDLDRQVEKEAQQRSQSRRLMTHPGVGPITALATEVFLGDPQRFADGKAVASYIGMIPREHSSGGRQRFGRISKQGNSLLRFLWGEAAIHAVRRDPELRRFYRRKLVQKGMGKARVAAARKLGIRLWIMLRDEIDYTEFCRRGHQRRQCSGAACAGMLHGDSGPN

SEQ ID NO: 336272 - protein, 318 aa, unidentified
MKRRCIIGIDVSKYSLDCFYYPEETIHQEVNTNRGIDTLIRNLKNISPDIIIVEATGQYHRLLVEKLHHSLLPVKVVNQRQVRNFARSLNKLCKTDAIDAKILVEFALSRCIISDTPKSEHGTKLSALLVRREQLQFLITQEKCHIESTEGQYAHYIEAILDTLKAQLKEIDASISQVVKKDEKFAQDNKIIQSIPGVGPIVSATILTECPEITRIGRKQLAFLVGVAPFNRDSGRFRGQRHITAGRAKIRKVLYCAMRPCLRWNSTVRNWFEHFLSSGKPYKVAVVACMRKLLMVLRAMLISQRRWHPSLKEDAETI

SEQ ID NO: 336273 - protein, 357 aa, unidentified
MCNACIKDREGNILRELKFPNKSTGTDKLLEAIEGREAKAVIESTGNMWLRLYLSLEEAGVEVVLANPKKTKAIAEAKLKNDKVDARTLADLLRANLIAPCYVPPEQTRELRSLVRHRINLARDMTRVKNRIQAILDKYELEFNGTDMFGKAGMKWLKCIVSELSEVDQFIFDAELRHIETLKELVKEAEARIAKESEESEDVKLLMGIPGVDYYIALLFTSEIGDYSRFSSANKLISWLGLAPRVHQSGDTSYNGRITKEGSPRVRWALVQAARSAVQWDNHFRTKYQRIRERRGDGKAIVAIAREIAVTMYHMLNRREAYRFSSDAFKTRKLKRLERESNKWAKRREVPVGGVTA

SEQ ID NO: 336274 - protein, 319 aa, unidentified
MTKIVLGIDVWKKTLDAALIFNNQTFSKQFKNSSEGFKSLAAWLESLKIEQVHACLEATGTYSEAAALFLHERGHRVSVVNPLRIKGYANANMQRNKTDRLDARLIASFCQTQEPDEWLPPSAEVKQLQVLMRRIEVLEEMRQAEENRLANAASEVQPSIERMIALLKEEIIQFERQIKEHIDRHPNLKQQSRLLQTIPGIGERTAHLLLSEIEFERYGSARSIAAQAGVTPRKKQSGTSLKQTNLSKLGNARLRKALYFPAIVARQHNEIVKEFAKRLKSRGKTPMQIVCAAMRKLLHIAFGVLKHKRAFDSSLAFSA

SEQ ID NO: 336275 - protein, 418 aa, unidentified
MNRTLTKKLAQVKPGTLYIGVDMGRKHNVAVVLNERAERLTRFRFPNEKDGYDYLHRRGAALQERQQAPAVLVGMEPTNYFWKLLAADLEQRKVEYRLVNAYTVKKHREGDQLDRSKDDARDAFTIADLLRTGKFTETQLLHGGYAELRQYVALRDRLSKDIRRQKNLIHNTAGQLFPELSSVFKSLAGQTALAMLRRHGAAAVIRHMPLESFIAGVRADLRGRRLMVSRLRRAHELAATSIGLQDGIPALQLAQRSYIETLEKLQSQMKTVQSALLETFLALPESRYMLSLSGLGAITAAIILAEVGDPSRYRNASQWIKLAGIQPVPNLSGRKTRSRTPMSHKGRVRLRTALYFAVLRLVRTDEAFAREYQRFQQRERNPLTKMQALGALMNRLLRILWALVRHQQLYDPRYQLTA

SEQ ID NO: 336276 - protein, 343 aa, unidentified
MVHYIGLDVSLKRTSICVVNQVGSVVREGVVESEPEAIAAFVRSKAPGAVRVGLETGPTATWLWTELKRLGLPVICIDARHARAVLKMQINKSDRNDAAGIARIMQTGWFKEVRVKDLDSHSVRALLASRALLVKIKRDLENQIRGLLKNVGLVIGRAKFNVFTMRTEELIADRPQMIAVVGPLLKARQAIEQQTDDLDRKVLKLARYDAQVRRFMTVPGIGPITALCFKATIDDPTRFKRSRSVGAYVGLTTRRHASGEIDWTGRISKCGDAMLRSYLFEAAGVLLTRVPKWSALKAWGMRLAKRNGLRKATVAVARKLAVILHRMWIDGTEFNWSKKEVAA

SEQ ID NO: 336277 - protein, 409 aa, unidentified
MERLIERVCGLDVHKQTVAACVRVPGSKGTREQHVQTFGTTAAELLALRDWLEAHEVTHVAMESTGVYWKPIYYVLEERFTCLLVNAAHVKQVPGRKTDVQDCVWIAQLLEHGLLRGSFVPPAPIRELRDLTRYRKVLIQDRTREANRLHKLLEDAGIKLASVATDILGVSGRAMLEALVRGTTDPEVLAELARGKLRAKLPALRQALRGRFRPHHAFLVSQLLAHLDYVDETITTLSERIEEVIGPFADELARLDTIHGVARRTAEVLIAELGVDMSQFPSDRHLASWAGLCPGNNESAGKHKSGKTRRGNRWLRAALTEAALAAIRTSNSAFTARYRRIMRHRGHKKAVLAVAHAMLVTAYHVLARQTTYQELGADYFDRRHGERVTRRAVQLLERQGYRVMLERAA

SEQ ID NO: 336278 - protein, 415 aa, unidentified
MFKIIRSKCCGLDVHKTWIYACIGIADSNSRVDYKQARFSSFSKGLKQLSEWLAKYGCTEVCMESSGKYWIPVFNVLETTCDVTLAHPKYTKPQKGNKTDRKDAMWICDLFMCGMIKRSFIPPADIRELRELVRYRTKLTNMITGEKNRALNCLTVSNLKLDDVFSDVFGKTSSSIIQFMLDNPGVYFDVKPFIDSRCKTPVEEIQAAVDGAMSPAHAVKLRECMSHIDQLESHKRMVEEDILRLAAPYESELALIRTVPGLNSNPMTAIAILSEVGADMSVFPTAKHLVSWAGCCPRNDQSAKKIKSTRISRAGVYLKPLLVQVANALIKSKHHPEFRERYRKLKARRGHKKAIIAICRMLLTAIWNVLSKAEPYSPAGYLSDHQVTEVRTLTQKQALNLLKSRGYVITDEESA

SEQ ID NO: 336279 - protein, 360 aa, unidentified
MEVQNRATLLRGSVTVKITTIGIDLAKAVFQVHGVDGRGKVLVRKQLKRKDVVGFFANLEPCLIGMEACGSAHHWGRTLSGLGHTVRLMAPQFVKPYVKTNKNDRNDAEAICEAVGRPNMRFVSIKSVEMQAVLALHRARQGFVKGRTAQANQIRGLLGEFGIVIAKGIGHIGERLPAILEDGENALPGMMRQLLARLGENLKELDQQVGELERQITLWHRDNEQSRKLEAIAGIGPITATAFVATVGDVKSFKNARQVPAWLGMVPRHEGTGGKATLGCISKRGDVYLRTMLIHGARTVVAQLERKRDATDEWLRKLVARRNKNIAAVALAAKNARIAWAVLAHERSYQHNYVANRAGA

SEQ ID NO: 336280 - protein, 421 aa, unidentified
MNQLADTEYSAYVGIDWAAAKHDICVQAADGGRREFACISSQPEGIDAWAQALYRRFGGPIAVALELSKGPIVSALQKYDFFVLYPINPSTLAKYRETFTPSGAKDDPTDAELAVDLITRHAERFSPLKPQSVGMRKLIGLVEQRDKFVSDQGRLVNRLGHALKQYYPQVLEWFSEHNTVVFCDFLSRWPTLTQVKRARKASLERFFKHHHVHSVQLIERRITAIKAAMPLTADPAVIEPHRLQVEILIEQLRITIKALKRFDDEIAATANKLPDYDLLFSPLPGAAKVLAPRLLAAFGEDRQRYPQADALQKYSGIAPVTKRSGKTTWVHWRWQCPSFVRQTFIEWSAQTINKSAWAGAYYRQQRAKGCSYQVAVRALAFKWIRILHRCWQDRTPYDESKYLEALRRKGSPLLKYLAQSA

SEQ ID NO: 336281 - protein, 355 aa, unidentified
MDSKKYIGMDVHKESISIAVMNAAGKIVMECVIETKANMILDFIHGLRGDLHVTFEEGTWAAWLYDLLKPHVTKLVVCDPRKNRSMREGNQNDKIDARRLAELLRVDHLNPVYHREHGLRTLKELVRSYLTITKDLGRVMSRVKAIYRSWAIPCTGKQVYSSRHRAAWLGKISEPGVRRRAEFYYQQLDALRLLRQEVRRDLLAESKKHQAWKRLCQIPSIGPIRSAELLGILQTPHRFRTKRQLWTYCGLGIEMHSSADHRVVEGQLQRAKKQVEVRGLNENCNHELKNLFKGAAIVAATKPGPFEEFYAKLLAKGMRSEMARLTLARKIATIVLIVWKREVCFDAQHLKPQTA

SEQ ID NO: 336282 - protein, 419 aa, unidentified
MNKLYVGLDLSLKDFKVSIIDQEGVVVTKPFAATNDLYGSQVLVEAIEDCCKRLDAYTVFIGFESTSVYGWHIQHLLADSPSLKPFHPNIICFNPKIIERFKESLGNLPKNDYVDANTIAERLRFGRLPKSCPVDFRYLALQRLTRHRFHIVDNIVREKSYFLSNLFLKFSGLCQGKVFSNKFGAVATELFQEYLTVEDIATRSLDDLIDFIMEHGKKHFDDPKATASALKEVARKSYRLNPSVDNSLNFVLRSCLDNMKALEKQKKAVEKAIENELPFFNNEYLCLTSVKGIGPVIAAGLISEIGGISRFDNDSALAKFSGLYWSEYQSADFVADDTYIKKTGNVYLRYYFVQAAEQLRKYLPEYTAFYSRKFKESKTHHHKRALVLTARKAVRLIFALLREEKLYNPSARKGEVDIT

SEQ ID NO: 336283 - protein, 385 aa, unidentified
MQTAADRPEAPTAIRTDLGAIFVSLELSRSTWLITSLSPGGGEKMSKHVVRGGDVAALLERFAQLRKKTRARTGKVFPFVVIQEAGLEGFWIDRVLRNEGIESHVVDPASIATSRRRRRAKTDRIDGEALVRALLAYKRGEPRVCAMVKAPTPEEEDRRRLCRERKVLIAERVRHVNRVKGLLFSQGISGYEPQRRDRRERLDTLQTGDGHLLPDHLKAQVCRELDRLELLLEQIKAVEAERDVLLAAQQVTAPATMLLDIKGIGPEFAAILWSEGLFRHFDNRRQVASYAGLAPTPWQSGSVDREQGVSKAGNPRLRTIIQLAWLRLRHQPQSALALWFEERVRRNGGRHKKTTIVALARKLLVALWKYVTAGVVIEGAVMKAA

SEQ ID NO: 336284 - protein, 416 aa, unidentified
MTDPRKSSPFERYLAIDAHKHYIVVGGLNAQLEIVLPARRMDMERYPQWAKENLTRQDCLVIEASTNTWDLYDITADVAGKVLVAHPLAVKLIANARVKTDKQDVFRLARLLAGGLIPEVWVPPQPVRELRTLIAHRRRLIQMRTMTRNRLHSLAHRYNLILPEGGPFADKNQDWWKGLSLSPVEKLRLQQNLALLEFLEPEVKAVDAELARLSNSDPWKEAFPYLVQLPGFGLIVVMTLLSAIGDIQRFPTSKQLVGYSGLGASLHQSGEENYSGHITKQGRKELRYALVEAAWVAITSSPYWREKYQKLSHRMSANKAIVAIARHLLVAVWHVLTERAADRRADPDMVAAKLMVWSWKLNDVQRGGLTSRQFVRYGLMRLKIGREIAHVKRQGNRPIASVEEVLERLPELNLNI

SEQ ID NO: 336285 - protein, 338 aa, unidentified
MKKFSGIDVHSNNSLIVVSDEADKIVYQRRHPNDLEEILRALEPHRKELVGIVVESTYNWYWLVDGLMNAGYVVHLANTAAIKKYEGLKYSGDDADAAYLAKLLRLGLLPEGYIFPPEGRATRDLSRKRMQLVRCRTLQILSIESILARQTGSRLKSAQVQRLTAEEIEKLGFSPDVTLALQANAAVMRTLQNQILVLEERLQQRVRLSEEFALLKSVPGIGTILATTIMLEVGTVKRFVKVGNFSSYCRCVQSLRVSNGKKKGEGNSKNGNQYLAWAFVEAAHFALRHCPQAKSFYERKKQQRNAVVATKALAHKLARACYHMLRERKSFEVERCFV

SEQ ID NO: 336286 - protein, 485 aa, unidentified
MKARRVKASRSSKITGDSKGPIRPAASLPLLNPHASGIDVGSVEHYVCVPEDAVPSGQANVRSFGAYTADLDQLVEWLKACGVQSVALESTGVYWVPLVQKLEAAKIEAVLVNARHLKHVPGRKSDVKDCQWLQQLHSYGLLNGSFRPAQDIGRVRRLMRHRENLIQSCGVEVQHMQQALQLMNIHLHHAVSELGGATGLRILDAILAGERDPKKLVELRDGQCRKTTPEELEKVLIGDWQEEHLFVLQQALETYRHLLKQLGECDVQVEKALAAVVIPERAEGEITPPKNPKAKEESGSKKKKRFHHRKTGTCLKRDLTEELRRICGVALTQVIGLNVLSVLIIISEIGLDMSRWRNAKAFCAWLGLCPGNKISGGRVLSSQTAHVVNRVAILLRTLGPSVGKTDTWLGIFHRRMRARLGPGGANTATARKLAQLIYHLLKYKEEYIDVDHVLLLERIRKQRIGRLRKQAEELGLEVVEKQMAA

SEQ ID NO: 336287 - protein, 351 aa, unidentified
MDKIKYVGIDLHQSTCLIAVHDEHGKRESEEIVETNAGKLRAFFDRLKGNVHVAFEVGTQSAWLYEILKSLVSTITVCDVRKHKRRGNKSDRIDANKLANLLRLGELKAVYQGDQNIRKLRDLAHGYLATVSDSIRTMNRIKALYRGWSIRSAGRDVYYKRNRQVWLSKFPIAESRIRANLYYSQLDLLKEQRKEIKKVFLKEARRYPIQKILRGIPGFGPIRAAFVIAVIGTPHRFRTERQLWSYSGLSVVIHSTSDHEIIAGHIFRKQHKHATRGLTRDYNRILKMVFKSAAVEAIRKEPIKTLFRKKILKGIRPEMAILSIARKLAAITLVLWKRGEKFSTAKMISSN

SEQ ID NO: 336288 - protein, 350 aa, unidentified
MKTKVTATAKLYIGIDIHKRSWKIHTATDLFDGKSFSMKPDAIALKKYVEKFYRGYEVYTAYESGSCGYSAHRSFKSFGWHSQVVNPADISKIGKSSHQKTDQLDARRICKELKDGRLSGIEVPDREREELRSLFRRRNDLVKKFRKIKTQIKMKLLYFGIEIPKEYDNPNWSHAFRDWLKTIELAYEPGKLSIDSMLLEYEFIDNQVRLVSNHLRAYCRKHYKDDYYLLRSVPGIGGIVSCGILSEIGDLRRFSLKELAGYVGLCPTMFQSGDSFRTQGMSYRANRLIRSYFVEATWQAIRFDPVMQSYYRRHQGKDTKKILVKVARKLLSRTLAVIKSGVAYEIGVVS

SEQ ID NO: 336289 - protein, 365 aa, unidentified
MNCVGIDVSHGKSIIVVMRPFGEVVVSPFEVLHTDSELSKLAGLLKSLDGETRVVMESTGYHHTPVAWLLHDAGLYVSVVNAMLVHDYGNNSLKRAKTDKKDAVKLANCGLDHWLTLPRYVPEEDTRLMLKTCYRKYQQYSKVQTMLKNNLISLLDIAFPDANRLFTSPPRADGSEKWVDFVAAFWHCECVCNLSEKAFTAKYHKWCRKHRYKFCEDKTLDIYSSACGHFGVIPKTDTAKLLVEQAVFQIRATSTTLAALKQEMQSLAASLPEYPVVMGMFGIGPALGPPLMAEIGDVRRFHSKKALVAFAGIDAPPYQSGQIDVRSRSISKRGSASLRRTLFLVMGVILQWAPTDEPVYQFMNK

SEQ ID NO: 336290 - protein, 341 aa, unidentified
MFKNKSMKVVYLGVDVSKKKLDLCLRSNGKDILYDVIPNDLSSIKSWLTRTFEKFFLSEDSLVVCAEHTGQYTYPLVCATKSIGVYLCLEDAAKIKYCHGIPRGKNDKIDACRIAMYAERYNDCLQPYTASELIIQKLKNLSTERSMLVADRAKYQSQLKDQVDYMEHSIYIAKCNRVEGIINTFTDYIAQIDLEIKELINQAPVIAHQMDLLMSVDGVGERVALKMIMETDAFTSFTDPRKFCCHAGVVPFVYVSGSSQRSKNRVSNRADKSIKHLLHMAALSVSQVKNSPLKKYYDRKVEEGKNKMSVLNAVRAKLVTIMFAVIRTDAFFSRNYQNSLA

SEQ ID NO: 336291 - protein, 347 aa, unidentified
MDHIGIDVHKKESQICILAEGGELIEQRIRTELECFAAVLGARPRARIVIEASTDSEWVARCLEGLGHEVVVADPNFAPMYATRTRKVKTDRRDARALADANLLGAYRPAHRLSDPQRHVRGRLAVRDAIVRTRTRYISLIRALLRQQGYRVPSGSAEGFLSRVRALTLPGRLVSTIAPLLAVMRHLNAQLAYSDETIARVTAHDARVQRLRTVPSVGPVTAAAFVATLDDAQRFRHAHEVEAYLGLVPRELSSGETQHRGHITKAGPTRMRWLLVQVAVSILRRRPPQAEALHAWALHIAARRGKHIAAVALARRVAGILYALLRDGTTFDPRHCRPRAMATSLSA

SEQ ID NO: 336292 - protein, 318 aa, unidentified
MNTNTLQNINVGVDTGKSQLDIYIRPLDIYFTVPNTEKGIRDAIKTIKKHKPQRIVIEATGRLEMPFILECDKAKLPYVIANPLRIKKFAGAIGQRAKNDRLDAALIAHYAERMQPELTKLKSENIRLMSDLVARRNQLLTMQTMERNRLQILPKNISSTITPILTALKNQIEKVEAKIAKLIDSCPEYQAKNTILQSMPGVGKVLAASLISNVPELGFISNKQASSLIGVAPITRESGRFKGKRMIQGGRAQVRTVMYMAMMSAIQCNPVFKVIYERLLAAGKPKKVAIVACMRKMVVILNSMLRDGVMWDKNSVKN

SEQ ID NO: 336293 - protein, 367 aa, unidentified
MTVTIVDVARPVPGGVDAHLEGNAALGLVTGGVDTHLDLNVAAALDGIGGLLAVAEFPTTSAGHRELLGWLSGFGPVARVGVEGTGSYGAGLARFLRAAGVAVVEVDRPNRQARRRSGKSDPLDAVEAARAALSGRARGAAKSRDGNVEAIRALVVAKRSARSAKIQTLNQIRHLSFTAPGQLRQRLAGVSRHQLAARAAALRPGSQEGADPVVAATKTALRLLGRRVLALDEEKARIDALLTGLVTQTAPQLLAVFGVGVDTAAALLVTAGDNPGRLRSEAAWAHLCGTAPIPASSGKVTRDRLNRGGDRQANRALRGIVITRLRNDPRTKAYMDRRRGEGRSKPEVIRILKRYVAREVYHHLPRT

SEQ ID NO: 336294 - protein, 409 aa, unidentified
MNKVDIAPFEVFCGIDVGKSLNHIVALDRYDDKPLINRKVPQEEAEIRAALEEAGDFGLALVIVDQFGAFGRLVVGVAKSMDIPVAHMSPRRFRQVAETYGEDKFDEKDAFILADASRTTPRNIEFVGNRAESMAEIKVLSSRRDDIVEERTRCYNRLHDFIHQVSPPLEELFSKRKLHNDLEIRLIARYGGPIGFRQAGRARASTWAAELKYHCVDGPKKVEQVFDVLDRQTVMLPGAAVIEEQIRSIALRIIELLAEEKRLNLMIEQRAKMIPEVDLLQSIPGVGPVYAALIAVEIGDIGRFRDSNHLASYAGVAPRKEESGTSVHKRRKRKGGNRRLKNALMQSSQRSVQCDSLARAYYERKRAEGKKHLQALRALARHRVTVIFAMLNEGTFYEPPVEVDENGRG

SEQ ID NO: 336295 - protein, 346 aa, unidentified
MAKDTVVIVGLDVSDRFSSYCMIDALSGEVIEEGKVATRAASISARFDAKTPLRVVLETGTHATWIARLLRGLGHEAVVADARRLRFIWGSERKDDEVDARKLAKVGRLDPSLLHPVRTRSPETDRGLAVLRSRDVLVETRTKLVNSLRGQMKRMGRPLPRLTTAAFAAKAREHVPEELLPVFGPMLDAVAALTAQIRVYDEQVEELCAARPETAKLRQVKGVGPVTALAYALVVDDPSRFAKSRQVGPYLGLAPGRDQSGDTDKQLRVTRAGDKLLRRLLVGSAHYVLGPFGPDTDLRRWGLLRAARGGGQGKKRAVVAVARRLSVLLHALWVGGEPYRPLRAAT

SEQ ID NO: 336296 - protein, 344 aa, unidentified
MKFNRCGLDIAKQVFQVHGVNEHGVVKGRKTLPRAKVLEFFAQLPSCHVGIEACGSSHYWARELSKLGHTVKLMATQYVMAYRKRGKNDANDAEAICEAVGRPNMRFVAIKSEEQQAVLMVHRARTLTMANRTAQVNQVRGLLGEFGLVVPKGVARLRRELPGILEDAENGLPVLAREVLAGLLEQLRESDVRITAYDRRIRALAEASEPARRLMRMESIGPQTATALVATVGDPHVFKNGRGFAAWLGITPRQHSSGGKERLGQITRQGDSYLRTLLVHGARAHLRVIDKKTDAKSQWARRLKERRHANVAAVALAAKHARIAWAILAHGTEYRPGGPQSAAA

SEQ ID NO: 336297 - protein, 385 aa, unidentified
MSQPNDLSRSLTSLEQDSTIIAVIEMSQSSWLVAGIVPGIERHPLKKIEPSEEELICLLMRWRAEATKHGRTITRIAVAFEAGRDGFWLARWLRARDIEIYVIHPTSVAVSREHRRAKIDRLDTGLLKRVFIGWLRGEPDHCHMAAIPTLAEEDAKRPNRERERLVGERTRIVNRMKSCLVRFGVRNFKPTLRKAPERLETLQTPEGVPLPPNTLLELRRDMARLRFVMDQIKQVEEARAQRLEQAPQEKSHAMVRLLARVIGVGIETADMLVHEVLARNLRDRRAVARYAGLTGAPDESGSKRREKGLAKAGNARVRRGMIQLAWRFLIFQKDSALAQWYQTRTASVGKKRKTMIVALARKLLIALWRLVTTGEVPAGVVLRAA

SEQ ID NO: 336298 - protein, 420 aa, unidentified
MTDCSKVTTYSSWLAIDIAKDFNVVMLETIDGNKKRFRMANSAKDHDRLIELIHQLPQPCRIGFEANGNYHRTLAYRLVTEGFQVNLISSLASARYREVIYNSWDKNDPKDAGILLELLKQGVIQIYVDPVQSGFHDVQELSKTFANVTLSRTRLQHSILNHYIPLYFPEMGAWWVNYLLRFPTPDAVTCLDLQEFIKIATPLVGRKVNKAAKLLELYTIAQQSMGLPLPEASPACHTFRLQLQRYQELNRIRQELESQAQSTLERNPDYIVLKTIPGIGPIVALTILAEGGDIRRFAHHRQFLKYCGLDLAKNQSGTFRSQEKISKRGNARLRLALYIASTVAIRQRENSFRDKFDRYTKLTPTDTDCKRKAMTAVMAKMARVIHGLIKSNQPYQSYFEVSPSGSIPLLGPLGPQGPRR

SEQ ID NO: 336299 - protein, 402 aa, unidentified
MAYCGGLDWGSAEHGVCIIEHDSGKIIARFPVAHDAAGIADLMRRLARLARPADLPIAIERPSGLIVDALVAAGHPVVPIHPNVVKASRPRYRAAGGKSDRGDPYLLADLLRTDGHRFRRLMPCSDEIKALRALVRGRDALVAQRLVLANQLRALLDSFWPGAVAIFADIDSPIALAFMQRYPTPDSAARLGEKRIKAFMAQHRYCGRRSASELLARLRRAPPCLAGDSEADAKGELVRAWAAVLTVLVAQIAELASRIEHTIGELPDGKIVTSFPRAGRICAAQILAELGDVRERFQAEDQLAAEAGVCPVTHQSGKSRGVVFRWACNHRLRAAVTCFADNSRHSSPWASDIYQRAKGRGCDHPHAVRILARAWVRVLWRAWQDRTLYDPARHRSSRASAV

SEQ ID NO: 336300 - protein, 402 aa, unidentified
MNSVGIDISKGRSTVAVMRPFGEVVLSPFEVCHTDSKLSELARRLKSLDGETRVVMEATGNYHAPVAKLLHDAGLYVSVVNAKLVHGYGNNDLRRVKTDRKDAVKLANYGLDRWLTLPKYIPEEDTRLLLKNCYRQYRQYSKVQTVLKNNLISLLDIVFPDVNHLFSSSARADGSEKWVDFVAEFWHCECVCERSEKAFVNKYQRWRRKHGYNFSVEKAHTIYDEASGHIGVMPKSETTKLLVQQAVSQLRTTSVALAALKQEMQSLASQLPEYPVVMDMFGVGPVLGPQLIAEIGDVRRFYSKKALVAFAGIDAPPNDSGDVTGRHKSMSKVGSSSLRRTLFLIMNVYLQNSPPDEPVYQFMDKKRAEGKPYRVYMMASANKFLRIYYATVKAYLEAVKHV

SEQ ID NO: 336301 - protein, 348 aa, unidentified
MNKITTLGIDLAKTVFQLHGVDVAGKIVLRREVRRGQLMTTIAQLEPCLIGIEACGGANYWARRFAEFGHQVKMMSPQFVKPYRKSDKNDRNDAEAICEAVARPSMRFVAVKSVEQQDMLTMHRVREGLMKERVALINRIRGSLSEYGIVIAKNVSNLRRELPGILEDAENELTVAARQLFSDLYEDLGAREQRIAHLERSIRALGSQHDVVRRLETVPGIGYLSATALYGAVADAKNYKNGRQLAAWMGLVPRQSSSGGKQRLLGITKRGDKYLRKLLVHGARSIATRAQRTPRPHDQWLNDLRERRGKPRSYVAQANKTARIAWAIMAKGEVYRAPVATLETNMAV

SEQ ID NO: 336302 - protein, 416 aa, unidentified
MNDEPISIPIERYIAIDAHKHYVMVGGLNARQETVLPTRRVDMENYPKWAKANLRPGDAVVIEATTNTWTLYDVTLPYVSKVVVAHPLEVKQIANARVKTDKHDVNCLARLLVADLVPEVWVPPMEVRELRTLIAHRRRLIKMRTMTHNRLHSVVHRNNLVPPEGGFFADKNRSWWESLSLSPVEKLQTRQNLAMLDHLEPQIAEVDQELARLSTTPPWSEHSAYLLQLPGFGVINTMTVLSAIGDITRFPTSKKLVGYAGLGGSVHDSGQSHYTGPITKQGRKELRWCLVEAAWVAVEHHPFWKQEFQKLNHRMKSTKAIVAIARRLLVAIWHVMTERVADRKADPEMVAFKLMKWSWQLNDWQRGGLTTRQFVRYQLMQLKIGEELTCIRRAHTMSIASVEEILALKPELRPAA

SEQ ID NO: 336303 - protein, 339 aa, unidentified
MARYIGVDLHRNRFTVCVLAENGREYLSEHRLEQLPQFVRKLRPTDELAVEVTGNTRLFYNAVVSHVAKVVVVNPTQFRLIRQSVKKTDPHDARTLAFYLSKDMLPEVRMKDTLHAQLASLTQTRDTLVKQRTALKNKVNNILSAHGINLRKESLASGVGLDRVLGMTFDAIVETELRVIVGQIRALNQSIAELENTIKTEGAKLPGHRNLKSIKGIGDLGAAVLLSAIGSIDDFAHPGKLAAYFGIVPRVRNSNETEHSGRITKRGTKLGRTTLVQCALIAMRYSPYLARFYHKVAGRRGTGKAIIALARKFLGVIYHTLKNNWVFEDFPNFVLADVA

SEQ ID NO: 336304 - protein, 385 aa, unidentified
MRSQTFIPRDYDVFSGLDVDKRSILVTFTDHNGFLKSLRMPYSVEHLLNHVRKHFPNQKVAFVYEAGPTGYGLYDGIVAQGYPCLIAAPSMIPKAPGQRVKTNRLDSKALSESLRGGQLKSIHVPSAVYRELRHLTQLRDVLVSELVGMKQRIKSLLLFEGIEFPPAPSGSQWSSIVKNKLRKLPCSGTVRFKLDQLLDSLEFNEKQILKTIREIRRYCQNDPELSQCMKYLMSLPGIGWIVASQLLARIGDWRELHNIRQLGGFLGLAPTEHSTGERIDRGSITRTGDERLRSKVIQASWSAIRQDNELREFFRAVCRKHPREVASRVAIVAVARKLSVRIAVVLMKQRPYEVREKVHLAPLTQEETSPQGTTRREPEAGEKNS

SEQ ID NO: 336305 - protein, 346 aa, unidentified
MMIIGCDFHPSWQQVNWLDTETGETGEQKLVHASGDAKQFYQRLAAPVLIGMEATGNSQWFVELVEDLGHEIWIGDAAQIRASYVRKQKTDKRDAAHIRKLVVEGRFPRLWSPDREQRDLRQLVLHRHKLVEIRSRVKNELQHLSMNKGMQRKGKLWSQAGQKLLRELPLKPWAACRREDLLGLLAMLNQQVGQLDAAVQHAAEQNPQARLLMTQPGVGPNTALAYVLTIGDVSRFPRGKQVASYLGLIPREHSSGGKQKLGVITKQGNRMLRSLLVEAAQIAVRFDPGMKKQYLHRCHQKPKGVAKVATARKLAVRLYWMLRTNVAYPEIVRIESSPRVPLVGAN

SEQ ID NO: 336306 - protein, 350 aa, unidentified
MIIGCDFHPSWQQVSWLDTETGESGERKLVQASGDAERFYRQLAEPALIGMEATGNCHWLVDLLSELGHELWVGDAAQIRASFVRRQKTDKRDAAHILKLLVEGRFPRIWVPSGEVRDLRQLLVHRSKLVEMRARVKNELQHLSLNQGVQRKCRLWSAAGQQMLRELPLKRWAGRRREDLLHLLAMFDQQIAPLDEAVRQEAQRDKKALLLQTQPGVGPITALAYVLTMGDVSRFARGKQVASYLGLVPREHSSGGSQKLGAITKQGNRMLRMLLVEAAQSAVRHDPGFRKEYQHHCHSKQKAVAKVAAARKLAVRMYWMLRTQKPYPQIVEREVVRIESSPRVPLVGAS

SEQ ID NO: 336307 - protein, 441 aa, unidentified
MAMRKRELTVMHPNAAGIDIGSASHYVAVAPDQSEEPVKEFGCFTEDIEAMADWLIECGVDIVAMESTGVYWIAPYEILESRGLTVYLVNARHVRHVSGRKSDVLDCQWLQQLMSFGLLSGAFRPAGEICALRAISRQRDTLLNEQARQVQRMQKALTQMNVQLTNVIADIVGKTGQDIIRAIVAGERDPHKLAKLRNYRVHASAETIAKSLEGSWREEHVFCLSQALSLFDTYQALIVAVDAKLEEMIKPMRQHQEALAANKNKGRGKNAPAFDARNALYQWAGVDLTRIGGIDVSTALKVLVEIGPDLSKFENAKRFASWLGLCPGTKISGGKKLSSASKRIPNRVAQALKLAAQGLHRSHCALGAYYRRMAARMGVGKAITATAHKLARLVFAMLTKGGEYVERSQEQYEDQMRKRTVAYLKRKAAAMGFSMQPIEAV

SEQ ID NO: 336308 - protein, 344 aa, unidentified
MEHYAAIDVSLEWSSVCVVDATGEIVREVRVPSEPEALVAFFAAAGLCIARIGLEAGPLSQWLHAGLIEAGLPAILIETRHVKAALKAMTVKTDRNDARGMAQLMRMGWFRPVHVKTLQAQEIRALLTARKLLVAKLRDVQSSIRGILRGFGLKVGAISKGKFEARIRELVSGQAMLERVAEPLLRVRAALGAEYRALHRQLLAAVRQDQVCGRLMTVPGVGAVVAMTFRSAIDQPGRFAKSKAVGAHFGLTPKKYQSGEIDRIGRISKVGDAMARTALFEAANVMLTRTGRFSTLKAWALRVAGRHGAKKAKVALARKLAVVMHRMWVDGTTFRWGEASVSAA

SEQ ID NO: 336309 - protein, 348 aa, unidentified
MALTIVETRAVTGGVDTHADVHVAAALDPVGGLLGVGEFPATPAGYARLLDWLGGFGTVCLVGIEGTGSYGAGLSRHVTTAGVRVVEVDRSDRQDRRRQGKSDPLDAVSAARAAQSGRARGAPKGRDGTVEAVRALMVAKRSARSERTQTINQARALVLTGPADLRTRFARHTVVALVAQTAALRPRPGDVVSYATRIALRELGRRAEFLDSQLGRLDELIVPLVTAHAPGLLALYGIGPDTAALLLIAAGDHPERLRSEAAWAHLCAAAPIPASSGKVTRHRLNPGGDREANHALWRIVITRMSSHPPTRAYVERRSKEGLSKKEIIRCLKRYVAREVYPHLRPPAG

SEQ ID NO: 336310 - protein, 353 aa, unidentified
MMIVLGADMHKSSHTIAGIAAATGEMLGDKTARVGTRGFGEVLVWARGLGADRVWALEDCRHVSGSFERFLIARGERVVRVPTRLMASSRRSSRERGKSDRIDAVAVARAALAEGIETLPTAALAGPELDIRLLVDHRERLVRTRCALNNTLQWHLHDLWPELELPGSSLFYGKWGPRIARRLARTEQTMRVRIARDELRRLRELTQAIKALEAEIAKLVGQVAPQLLTEPGFGALTAAKLVGEIAGAGRFASDAKLARSAGLAPIPVSSGRTDRHRLDRGGNRQVNAAIHRVAVTRARCHQETIEFIARKQSEGKTHREAIRCLKRHLARRIWQLLRAPHPESETAPHPSIS

SEQ ID NO: 336311 - protein, 470 aa, unidentified
MSKGSGMTRGDRRRNARRERLRAVLPRDGAVIGIDLAEDKQAIAVIDHDVRVLARKTVQVKAFRLGEALDWAIGQARAKGFTHVTVACEPTGPRWLQVQRLCAERGLPLVCIQPLMSHIAREQQDYTTHKTDEADCVLIARLAVELHCYLPEELDETWAHLRHLGRRRQQLITAATASAQRIRDFLSVAWPVVTETCAQPLESKTWLAALQVVTSRCGADPGKLAVTGPEAFTALVRGAVPGWGGKKGWGTICGRIFAALTSTEGVVVSSRRGLLRRCADELGDLQRARAQLRAVEADMAAVLAELGLSRLADIPALTAVGAAAILAEAGDPRRYDSSSSLVKHAGMSPSDNASGAFYGEAHISRRGRPGLRLTVWRAVWPMLRFNPVMAAKYAAMTQAAGAAAQTAEAQADAGSRQVSAAAAAARARRARARVACAASLLRWIYSMVVHDTSWDPAIASGAASCPAEAA

SEQ ID NO: 336312 - protein, 426 aa, unidentified
MRVLYDRVAAIDVHKDMVKVAIRVPGAKRGTRKTDVLEFRTFYGVLQAMARELRGRGVTHVVMEASGVYTDPVYYALRELDFTEVMVTGPAHAKALKGHKTDAKDAIRLLDLYECGLLSGSYMPSEDLREVRDLARYRMKTVQARTSEIQRLQKTLETAGIKLSSVVSDVTGGSATAMIEALISGERRGSVMADLAQARLRTAGKMADLSMALTGRFTDHHALMCRLHRDRITIFGDAVKDLDAKIAPLVARYAREAGLLKTLPGFGDVIAAGWLGAIGPAPHQHFATASRLASWATICPGNYMSAKKSKGGRTGDGGAYIKPLLIQAAWAAIRVPGRLQARFRRLVRKFGGPRNKGAQKRAITAIAHTLLKIAYSVLKTGKPYADLGADFYTRRESPDARQDYLMRQLRKLNPGCVITITPAEAA

SEQ ID NO: 336313 - protein, 343 aa, unidentified
MDMIRVGIDLAKNVFQVHGIDRSEKAVWRRKLSRSEWLEVLQQTVPLHAEIGMEACGSAHHWARRLRALGYTVKLIAPQFVKPYVKSNKNDANDAEAICEAMSRPAMRFVAIKTIEQQDVQAVHRVRSGLMEQRNAKANQIRGLTSEYGVVAPREIAQLRRAVPVWLEDINCGLSDRFRRLLVGLWEDLRSLDDRIHELDREIMEIAASDPVARRLQQLRGVGPMVATALIATVGNAKQFANGRQMAASLGLTPKQNSSGGKERLLGISKRGDAYVRCLLIHGARAMIQMARRRTDALSVWVMCIAGKRHPNVAAVALANKTARIAWAMITRGTDYQPERSAC

SEQ ID NO: 336314 - protein, 369 aa, unidentified
MNTTTFVGLDVHARSIKAVALDAMTGEVRSAAFAYDAAAVAEWVRSLDPAAKCVYESGVTGFDLQKRLAALGVDCVVGAVSKMIKPSADRKRKNDRNDAEFLARMLSVGNVVEVWVPDDECEAARDLVRALDDAREDLKRRKQRLSKFLLRHGYVFSETTPTGRRKGNWTAAHWAWIKSISFPEKADNDVLAYYVDAVRQAMEDKARLERLVEAEASKPRWKRRIDSIRCLKGIDVTSAADLVFEAGEFSRFKSARSFAAWLGLTPSEHSSGESVRQGGITKAGNKHLRRVLVESAWHYLGCSPHSKDLAKGQVPDPAARRHAAKGVRRLVERRRAMLERGVHKNKANVATARELACWCWAVGRMIENG

SEQ ID NO: 336315 - protein, 335 aa, unidentified
MPIKLYGNQHEILRKTKPTPVVFNKRIPNQLPAIVSALKPFKSKLATVAVESTYNWYWLVDGLMAQGYPVVLANPAAIDQYDGIKDANDLTDAAFLAHLARLDILPTGYIYPKEERPVRDLLRRRTLLVRQRTATKLSLQNMFVRQAALNINWRKIRKLTQGQRADLLGDNDCLLFVAESQIELIEVFNKRILQFEAKVLEHAELRPEYELLLSIPGVGLILALTIMLETGTIDRFKKVGDFTSYCRCVRAKKQSNGKSKGSNNSKNGNPHLAWAFVEVVHHAIRRSPQAKKFYDRKKSKRNGALATKALGAKWSKGAYYVMKRQEPFDLKRLFS

SEQ ID NO: 336316 - protein, 331 aa, unidentified
MKNVKESIGIDVSKKTIDVYQYTSNLHKQFSNDQSGFKKMMAWIKSNKLPANNLLFCFEHTGWYCIMLGYFLHQNRLIYCCINPMEIKRSMGLKRGKTDKADSMEIARYAWLRRGELIPSIPPPVKLIELQRMMSLREQLVKHTTSLKCLQKGMQVLVESNSNDKALDIVKQTICQLEQQITTIEKAMSDLIKTDQAMLKNYKLSRSVKGVGMVLAIQMLLHTHNYTRFGSWRQFSSYCGLAPFPYQSGTSIHGRNKIHPISDQKMKSLLSMSAISAIQHDKELKTYYHKRVEEGKPKMLVLNIIRNKLVSRIFATINRGTPYVELNQYAA

SEQ ID NO: 336317 - protein, 346 aa, unidentified
MNNSNSTFDPCGIEVSARPLLVAFGAQGRAASLREFPNTPPGHQALLGFRARSSPRVRVVLESTGLYGLDLALGLHQAGLALMVANPRAVRHFAHALMQRSKTDRLDAEVLRQFAARMPFVAWRPPSAATLQLVAVARRLEALTDMLTAEKNRLHAASLSAALPAIVRRDIERSIQNQQRALERLSRAAQEFVLSDPELARRFQLLLSIPGFGITSALHVLAELALLPAALDVRQWVASAGLDPRQHSSGSSVEKKTRISKAGNKHLRRALYMPALVAVRHQDHLRAFYQHLQARGKTKLQALVAAMRKLLHAIFGMFKHDQLFDGAKVYALLHIPTPLPQEVACT

SEQ ID NO: 336318 - protein, 346 aa, unidentified
MLYAGLDLSRQRLDVHVLDEEGRTTEVTAVRPDGDALRTLASHVLRHGQEVTAVIESMTGSRFVHDQLEMAGWDVAIGDAVRVKGLAPLAAKTDKIDAWVLAELARRDLVPEIWLPTPDVRAERERARFRLHLVRHRTALKNRIHATLMTFGHPVPVADLFGVSGRKLLDRFALPSPWSETLSTSLRMVDELDDRIRTCTEELRSLGADHPSIPLLVTVPGVGWVLAYTIGSEIGDVHRFASPKKLVGYTGLCPIVRQSGERDVRGPLAKNGPKYLRWALVEAATHAARDARYKERYERTKHRLGRQRGAKVARVELARRLAETIWHILTKNEPFAPAGPAMRLVA

SEQ ID NO: 336319 - protein, 414 aa, unidentified
MSYKIAGIDVHKKVLMVVVIDASTPEGKPERRRFATMASDLRRLSTWLREQGVQEAVMESTAQYWRSVWLELEPCMLLHLAQAFSNRAPRGRKHDFKDAERLVRRLIADELILSFVPDGEQRTWRNMTRMKTQLTRDRVRLQNQMECLLEEMRIKLSIVVSDLLGGSGLRMLRALAEGETDPKKLAALGDDRLKCSEEQLVDALTGRPEPMHRAMLGLQLERLQLIDRQIAQLNGMIAQAMKPHQDAVIRLAEVPGLGVDSAQQVISEVGPQASTFASAAELTSWVGTCPGKEESAEQNHSSRSAKGNKYLRRVLNQAAHAAVRKNGSHFQAVFRRLLPRLGYQSAIWAIAHRLCRVIWKILHEGVRFIEQGSESDPKIRKQRARTLARALRKLGYDVAITPRNPATTEMGIQM

SEQ ID NO: 336320 - protein, 399 aa, unidentified
MINGHDQFAVFLGLDVGKGEHHAVAQSRPGKKLLDRALPNDEAKLRELYRRLRKHGPVLLVVDQPATIGALPVAVALDEGITVAYLPGLAMRRIADLHPGSAKTDARDAAVIADAARTMPHTLRALKLDDETIAELTVLSGFDDDLAQQITATSNRIRGLLTEIHPALERVLGPRMDHPAVLDLLETWPVPADLTAAGKSKVRTRLLKRAPRIGGRLTEEIFAALAAQTVVVTGTNAAAVVLPRLAAQLASLRAQRAEVAEKVEELVAAHPLSKVLTTMPGVGVRTCARLLTEVVGKDFPTAGHLASYAGLAPVTRRSGSSIRGEHPPRGGNKVLKRALFLSAFAALSDPVSRAYYDRKIAQHKRHNEALIALARRRCDVLYAMLRDGKPYVQPPAAAA

SEQ ID NO: 336321 - protein, 459 aa, unidentified
MKRKRTYQAVPVEEVRLEEVLPMLITLGCIVALDVAKEKFVAALATAAGEIVKLFRFKHPTETSKFLELVTTLKGQVPSERLKVAMEPTGTYGDAVRHQLYTAGVPVWMVSPKRTHDGQALFDNVQSLHDPKSAVLVAKLCAMGLASEWTPPSDMRRRLRALVELRAHHQQQRERCFGRLEASQARHWPELGRWMDVRVQKSALRLLEAHGSPAPTQAKPDETRLLLVAESHGRLSKEVIDGVVTEAMTTSGVPPVPEEASLVRHLAAEALELERRIDKIDVQLAALGSDDKGFAQLQTWMGTYTAAVIVTFCDPRQYANARQLEKACGLNLREKSSGEHRGRLSIAKRGPALVRQVLYLFALRMIRASDVVRAWYMRRRGYTEDSKQRAVVAVMRKVVKAMFHVARGKEFDASKLFDTRRLEVVPQTTTARNTFTSRTTPRSIARRSKAASRQDVVAT

SEQ ID NO: 336322 - protein, 394 aa, unidentified
MKLVGIDVGKNSHHFCVMDKETGEFNVTPSSFSNSKEGFDFLINSLKPYSKKSILLGMEDTGHYHVALLKFLLSNGYTVALINPKTTDLTRKMEGAITKNDKLDTITICDVLDTPERKKQYRITKVDRFDLYEQRQLTRHHHNLKEELNIYCNRLQKSIDLVFPEFNTLFGSKYGVVYMNLLKTFGSAEAIASTDIRTIRKCFEIKGRGGRISLTAEKLKECAKNSIGISSEVETIQIKHLVSQIMLIKEQIAEIDKKIEEFSIKNNSPILSIPGISHFSGTSILAELGDIGNYSKPSRIIKFAGVAPYHYESSQYNAQHTAITKKGSKYLRKTLYQVILPVINNNPVFKKYYRLKISQGKGHRCAQGHCIRKLLRVIYHLLETGQSFDPALLR

SEQ ID NO: 336323 - protein, 353 aa, unidentified
MFIGVDTHKKTHTLVGIDDHGQTCGTRTVANSPHGWTIALRWVRDHGDVGCWGIENSGSLGKGFAQFLLAHGDTDVREVSPQRTAQYRRRGRSQDKTDDADALAIARLLRAEGQQLPLVQADDASTELRLLSDHRDNLIAERTRLINQLHAQMLQIDPCYAEKSGTLTGRAGVRYCQTLDPPHADGILQTRLLIVRQLADQLLRLWEEIEIIETTLRQRVAATRTPLLQLCGVGTIIAARLIGELGCVPRIHSAAALAALAGIAPVAVSSGGRHGHRLNRGGNRQLNRVFHMIALSQLRCEPLAQAYYAKKRAEGKTARSALRCLKRRLIDVVYRLLPTGKPAAFEVSISAAA

SEQ ID NO: 336324 - protein, 362 aa, unidentified
MEDAKQRYVGIDLGKRTYEMAIVGKNGKVTMSNGRTTIEGRQKLYKKLTSNDKVAIEAGNLAFTLAKELEKTVGCEIRVLNPSHLPLIYGTMKKTDKEDALKLAHILEDYKDDRLPAVPVPGDEEMKRRKMVGSYRREQRARNQAINRLHSLFLARGITDVVKSDLATGAARAETAKALTGLEREEAEHLLECLKLYEKRIEVLEAHMEQEAEGDEVIERLQTVPGVGPKISFTFAAHVAPERFENGSQVSNYLGLVPRVYMSGDTVRYGRITKRGNGFLRALLVQGSWAMVRSKNGGVLKERYKYMTEEKGISKKKAIVAIARRLSELLYTLMKNGTGYEVRKLQCGKGEGKRLAQLAISA

SEQ ID NO: 336325 - protein, 437 aa, unidentified
MEELSDEPLYRDRVCGIDIGKAGLAATIRVPSDKNPARRAAETRSFGTTRREVLALADWLRSWQVPAVVMEATGDYWKGPFYRLEAEGFECVLADAKQVKHLPGRPKHDPGDSRWLAACFERGAVTSCFVATEEFRLIRLHTRYRRDLTDERTREKQRAEKLLESAAIKLSSVVTDLHGVTGRDIMDHLIAGERNPKVLAQLARARARRKIAELEEALEGAEFFTPAHAALLATMLARIDQLNTQIARLTEVIETLLAPYEEQLQQAESMPGWGRRSAEDTVAETGADMTRFPTGAHLASWAGRTPLDNKSGKRKGRAKSKKGNRYLAAVTGETAVAAGKTQTREGARYRRLARRRGKAKAQVAVGNTQLKVYHKLLSTPGTRYQDLGADYYDRQASTRRQIAHHVGKLSALGFEVTLCRIPSADPDPSEPANTHAA

SEQ ID NO: 336326 - protein, 366 aa, unidentified
MKKIITGAKNRNEIFKQQQLTIGVDLGDRISHYCILDETGNVILEQSVPTTPKGIQQVFSKISRSRMALETGTHSPWVSRLLTQLGHEVIVAHARNVRLITESSRKDDRLDARTLAKLARIDPELLGPVRHRSAQAQIHLTAIRARATLVGARTALVNAARGLTKSYGERLPKCGTEQMNREIAKGLSPELRDVLEPLLGEIESLKERIAEYDRRIEQIAKEVHPEVALLKQVKGVGTLIALTYVLTLDDPHRFGRSRDAGCFLGLRPGRRNSGMSEPQMHISKEGDAYLRTLMVQGAHYILGPFGQDSDLRRWGLKLAERGGKNAKKRAVIAVARKLAVLLHKLWVSGEVYEPLRNNHKVVSAVA

SEQ ID NO: 336327 - protein, 334 aa, unidentified
MEQITTVGIDLAKNVFSLHGVDASGKTLLRRTVRRDRLAEALAALSPCLIGMEACSGAHEWGRRFQQQGHTVKLMAPKFVSPYRKSEKNDGNDAEAVCEAVTRPNMRFVPVKSVEQQALLTLHRVRQGFVVERTALINRLRGLMAEFGVVMPLRSVTVRRQAAQAAEALPHLARRAIEDLLGQLRLLDERIAAYDTEIHAQAKLSEPARRLMRIRGIGATTALAIVATVGNAREFKNGRQFAAWIGLVPGQYSTGGRSRLGHISKRGDAYLRNLLVQGARSVLQTAPAHQDRLSRWALELQERRGYYRALVAIANKNARIAWALLARDQELRTI

SEQ ID NO: 336328 - protein, 394 aa, unidentified
MKMYEKLTQVGLDVHRNFSTASLRDAAGKVIARERLEHMDRQKLNERISQWPRHTPVILEATFGWGWLCDELQALNMQPHLASSRKVAAWRDGRGMAKSNKIDADLLGELWNEKPILKGGLMKHWWEVWLAPQEVRDQRELLRYRMALVRAQTQTKNRIHAILHRHGILTELSDLFGVAGRRLLSLLSQDKNLRASTRQTLKGELILLDTLRRLIARATRQFRATIRRSEIGQRLITLPGVSTVLAYTLVAEIGRIERFASSRCLLQYSLLAPQANDSGEERDGKPIGRHIGHAGRTTLQWAFIQAAHSAVRRDAFLRELFNRRTNGGKQDRGRGYITVANRMCRIVHGMWKNQQDYQEVPPPRPGSKKYQELLSSGNGPALARIGHESQAIGT

SEQ ID NO: 336329 - protein, 446 aa, unidentified
MDAVFTHCAGLDVHKKSVTVCRLVSDSTGQNPEGVAELRTFGTMTIELLALADWLLEAGVTHIAMESTGEYWKPVYNLLEGVVTIFLVNASHVKNVPGRKTDPADARWLAKLMRYGLLQASFIPPVAQRDLRDLTRYRTKLVQERAREVNRVQGVLERANIKLASVASDVLGVSGRAMLEALIAGQTDPAAMAALAKRRMRSKIPALEQALTGRVRDHHRHLLTLQLRHIDFLETQIEALNSAIASCMTTLSQEAGADTTPSSPTPAAVPPPAEPLPPLTFTRAVALLDTIPGVNQRGAEMIVAEIGIDMARFGTAPRLAAWSGVAPGNDESAGKQRSGKTRKGNQVLRAGLTQLAHGAVRTKGTYLSALYRRLAARRGKRRAILAVAHSIMVSVFHRLTRNAPYHELGGNYFDERRRQYTVDRLTSRIEHLGYRVHLEPLPTAAA

SEQ ID NO: 336330 - protein, 479 aa, unidentified
MLAQAMPRVSLMTGHLRTSITVEIVSPGPSRATIEARPERAADRAPAHGRTSLPPRGPVGCCRRGTRRPRRLIGKCRAGAAAGNVSAEGEAIRSNDYRKDTTVKAPSTRPAAVLGLDVGKSSHWACLIDRDGEVLASAPVRNREAELDALFASAPAGTLVVVDQFRNIGSLAVRRARAAGLGVAYLPGLAASRAAGLFAGEAKTDERDAAVIARTALGVPDSLSGVPGRGEALEAARALSSQRDHVVACATRDKNRLRAVLLESCPALEAAVDLSDRRWLELLAGFGGAWGIARSGAGGPRAEAAGEAAAASTAPPPALVEAENRQVRFLAARISEALDEAGALEAETAALLEGDETYACLLTVPGIGPRTAAQLAVSVDIGRFPDHDHLASYCGIAPRVRSSGTSVRSVRASRRGDARLKSLLIFSCNSLVRSSGRYGEYYRACRARGMGHGRALKAVARKRLRAIYAVMRDRVPYRE

SEQ ID NO: 336331 - protein, 428 aa, unidentified
MADPANATPACNLVAIDIGRYGNAVLIEATSGKRHRFKMANTAADFGRLLGFLHGLPGNCRVGLEPTGDYHRPLAHRLLRAGFEVVSINSVALSRYREAIFNSWDKNDPKDAGVILEMLRRGDVQRYVDPIMVGTHDLQELAKTYYQVSRARTKVQHSLINHGLTLYFPEMHRYWCTTRNDWFVRFLLQFPTPAHVRSLSCAEFVDAAWDVVGRKVNKRAKLEEIWEMAGATAALPHAPDSLAVETFRITLRRYQQLNALRAELEVRAEQALASNEDFAHLKTLPGIGSVIAMTVLAEGGDLRRFGHHRQFLKYCGFDLAKNQSGTQRGKEQLSKRGNARLRLAFWLAAVAAVHMKENSFRAKYERYIRAAPEDPDLRRKALTAVAAKMARVAHGMIKKNQPYRQFFEQSLPSGSIPLSAAVGAHATP

SEQ ID NO: 336332 - protein, 442 aa, unidentified
MPTVHPNAAGIDIGSQFHVAAIPPDRSEEVVKSFKSFTGDLHAMASWLRASGIETVAMESTGIYWIPAFEILESYGFEVFLVNARDAKNVPGRKTDFNDAQWLQKLHQFGLLRASFQPAADIAELRAYLRQREKLLDYKAAHIQHMQKALMQMNIQLHHVVTTITGITGMSIIQAIVAGNQNAQELVKFRDARCKNSVETMTAALTGNYKPEHLFSLKQSLELYDIYNEKAEACDQEIKAVLERIQQGITPPAESLPKAKHKAVNKNAPDFDIRQALFNIIGVDLTQITGLGPYLALKLVSECGADMSKWPTAKHFSSWLCLAPGNKISGGKILSSRTRPSSSRAAALLRLAAAAISRTDTALGAFCRRLAARVGKAKAITATARKIAVLFYNTLRYGMHYVDPGADYYEEQYKSKVLGHLRRRADSFGFTLQPKDVSATAI

SEQ ID NO: 336333 - protein, 351 aa, unidentified
MKAQTTAIPKLFIGMDVHKKSWTVHFKTDLFDNKTVTMPAEPTGLIKYVQNEFPDHEVSCCYEAGCCGYWIARALQQQQWKVSVVNPADVPRTDKQDWQKTDKIDSRNLCKHLASGNLKSIYIPEEEQEQFRSLFRRRVHLSRQLRTIKNHIKSQLLYFGIKLPEQYDNPNWSREMKDWLSKLKWKHSCATEALRSRLRQLEFVWYEELHISNQLRAYCRKYFKKDYYLYKSVPGIGGITAAGILAELGDIRRFNRLDELAAIVGLVPGIYQSSDNKINLGLTKRSNRQLRSLLVESSWVAVRTDMALQQYYRKHAHKEPNKAIIKVAHKLLSRIRAVITSGIPYQIGLVK

SEQ ID NO: 336334 - protein, 309 aa, unidentified
MADKPVVGVDVAKGWLDMCVSGACERIDNTAAAVLSWLDRVRPGLVACEPTGGYERVLLDALRARAIPFVRVHPNQLVAFRQSQGMRAKTDRIDARLIYAFVCHRLSQRGLHTAIPGDPALAALAARRRQLVETLHAERCRLAMAHLNVLRDSHQDVIAALSHSLDLIESELAATIADNPHTQKLAALLQTIFGIGPAVATALIADLPELGLLSAKQIAALVGLAPHTNRSGKAQYREPTGHGRPGVRRALFNAARAAIRHPSPLRDFYDRLVQQNQRPGKVALTAVMRKILVCANAVARDQQPWKHAA

SEQ ID NO: 336335 - protein, 334 aa, unidentified
MRKASMHGTIVETSGAAGIDVGKDWLDVALAAGEATLRQPNHAKGHAAIVGFLRRHGICRVGMEATGGYERGLLAALGAAGFQTLVLQPRQVRAYATFRLNRAKSDRIDARLIASCTAAAAPQEGRDARDARLLPLAEHLTVIEQIEEDLARARVRREHVSEPRLIALQATEIARLKSLRKAELERLEADVLAHPDLARRFQLLISIDGIGARTALALIVRMPELGHLTREEAAALLGVAPYVRESGRLKSERHVAGGRSRPRKSSTQPPRQPVAGGTASSSPSTTVSPEPESRIASLSSPARESSSSSQMQCSPEEQNGTPLNDSCFSLKARR

SEQ ID NO: 336336 - protein, 317 aa, unidentified
MKTTEVIDYAYIGVDVSKDKLDLYRSSTKKSETITNEVASIEQFCKSLKKVKKPVMVVMEATGGYETILVRALAKHNICAAVVNPRQVRDFAKGIGIDAKTDKIDAMVIARFAEVVKPAPMVKASEHNQKHSALVTRRGQLLQLINQESNRLRQSYDEDAKTSIRNTLDFLRKEAKAIDEQLAKMLETDEANKRTIEILDSVKGVGTVTISTIVAKLPELGKLNRGEIAKLVGLAPINRDSGTKNGKRFISGGRGDVRRVLYMATLSAIRYNPTFKEFYQRLKAKGKESKVALVACMRKLIIILNTLIKTNQCWQTK

SEQ ID NO: 336337 - protein, 365 aa, unidentified
MKKISTAAVKESRNISEQKLTIGFDLGDRSSWYCVWDEAGSVLLEQRVGTTPKAMKEVFGGMPRSRIALETGMHSPWVSRLLSELGHEVIVAHARNVRLIGESRKKDDRLDARTLARLARIDPQLLCPVKHRSAKAQADLTVIRARAGLVRARTALVNTARGLAKSYGERLRGCNVRNMNPEKAEGLSPELQRALEPLLAAIESLSDRIGECNEGIETLARESYPQVARLKQVKGVGTLIALTFLLTLEDPHRFRKSRDVGCYLGLQPGRRNSGQSEPQLHISKEGDPYLRTLLVQGAHHILGPFGADSDLRRWGLKLAERGGKNGKKRAVIATARKLAVLLHRLWVSGEAYEPLRNQKTMPAAA

SEQ ID NO: 336338 - protein, 417 aa, unidentified
MEQFAAFVAIDWSDAKHDICLLDVATGKKEAGILKHTPEELEAWATALRTRFAGQPIAVCLEQSRGPLIYALLKYDFLVLYPINPATLAKYREAFSPSRAKDDPRDADYILELLLHHRNRLRAWRPDNAKTRTLQYLVEHRRRLVNDRTRISNRMTALLKAYFPQALQWFDDIRTLLVCDVLLRWPTVEALKKVRPPTLEKFFHEHNSVRKETIAHRIAAIKEAIPLVTAQAVMHASVLMIKALAAQMKTTIEAIREFDQEIEQLCSTHEDYPLLASLPGAGPVYAARLTAAMGTVRDRWTTVEELLCYSGVAPVMERSGKSMWIRWRYFCPKFLRQSFHEYAGESINHSFWARAYYMSQRARGKSHQAAVRALAFKWIRIIYSCWQTRTPYSEVRYLESLRKERSPLLAFAANNPS

SEQ ID NO: 336339 - protein, 375 aa, unidentified
MSDRELALPAPFMEWPAPLLHHVRVGEMEGEAMNVDVLGIDLGKNSCSVVGLDPTGRVMLRRRMRRESIVPLAAKLSGCVVAMEACCGAHHLGRLLAAQGHEVRLMSPEYVRPYVKAQKNDDRDAEAIAEAATRPTMRFVALKTEAQLDVQVLHRVRDRLVGQRTALMNQVRSILLERGIVVPQGRRSLLNALGELSAESDGDGVGPRVRLLLDDMLDQWRGLDRRIAALDDEFAGMARNDPAARRLATIPGVGVLNATALVAAIGDGRTFSRGRDLSAWLGLVPRQATTGGRPKLLGITKRGSKYLRKLIIQGARAALPSLSRTATPLGNWLRGLLSRAHGNTVVVALASKLVRIAWALLRNETAFAAGGLAAA

SEQ ID NO: 336340 - protein, 329 aa, unidentified
MEVSQAVVGLDVSKATLAVCHQVGAHLQHLEVANTPAGFRQLVRCGGATSLYVLEATGPYYLAVAYHLVAAGAQVAALNPLVVKHFIQMHLGKGKSDRKDAQWLLRYGQQQATPRWQPEEAALVECRQLEHVIELLIRQKTMVYNALEALQMQPVVNPSARKPLQHILCQLTQQVRELEAKLLTSVELRYAREMALLGSIPGIGRKTAAPLLLFAGGFTSFQNHRQLIAKAGLCPREFSSGTSVRGKARITKMGGGLIRSKLFMCSWSARKANTACRELYDRLVAKGKNGKLALIAVCNKLLKQAFAIVTSGIPYQADFAKIKAPTLAF

SEQ ID NO: 336341 - protein, 344 aa, unidentified
MANLNQFCDFTKLIGIDIAKRVFQIYSCDTQTGEITNVQVKRDKVLESFANCGKCLIGMEACGSSQYWARKLQALGHTVRLMDPKLVKPFVRHNKSDKADAEGIYHAMVSRVRSVAVKTETERDIQTLLTMRALLVKQRTARINHVRGLLAEYGHVMPTNVAQFDEKVDECINNLEGDAVQLVIDTLRDTIKSIRDDQERIKTLQREISRLANQTRNSKHFLTVPGVGDTIMAYMCVLLADPTQFSSGRQFAAYLGLVPMHTGSGGKTVTTKIPGRCDKALRAVLVQGAHAVARSKYRTEWVKNILAKKPKKVAMVAIANRMARQCWAVASKGQDWRRMPVTAA

SEQ ID NO: 336342 - protein, 488 aa, unidentified
MVMKTLRNGDWNPVCIQISGASSVEVAGAVERLRPTTCLTQSLHLNQSVYAGNGSTRPCLIDIAQALPVASTGTNMNESYWIAGIDIHKSMLAVVIADAAEGEFRFERRKFGTLGTDLDELSAWLGERGVREVVMESTALYWKPIWRRLEEQCKLHLAQAHSNRAPRGRKRDFQDAERLVRRFLASELILSFVPDSDQRLWRTLTRAKHQLTRDRVRLYSQVESLLEDARIKLSTCVSDLFGVSSRRILHGLAQGATDPAALAGMAEPELQVTPLQLANALSAAPTMNPMHRQILNLFLQRLELVEQQMATLRLHIAASLDAHQQAVVRLAAVPGYGIDSAQQVIAEVGPQAATFDSPEQLASWVGVCPGREESAEVSRSNRTPKGNRAMRRVLNQVANAAVKTRGSKFQLIYRLFLPRLGHNRAIWAIAHRLCRLTWKILRQGAAYIEYGELPNPKRLRARVAKFTRELRALGYQVIPPAPAPGSSV

SEQ ID NO: 336343 - protein, 346 aa, unidentified
MKNITTVGVDLAKEVIQVCNVTRDKVTSNTEMTPQEFRCFLTKTKPCIVVFEACATSNYWKQVSLSQGHDARLISAKLVSQIRQNQKTDKNDALAIVQASQLTDIRFIQGKQFSQQELQSISRMRELAVKQKTATSNQLGALLLEFNIRVSNRNGGLNGVVQATLEDADNDFSSEFREALYETWQGYLALVSRIAKYDEHLSTSVENTPSCKKLMALEGVSTINAVNLYTTLACSGDSIFSSAKDASASIGVTPIQYSSGGRVKLGGIGRRVKNGLVRSNLISGAMAVIRQVSQREPRTVKERWLKALIERRGKKCAAVALANKTVRTAFAMLRDGTEYHAQALNA

SEQ ID NO: 336344 - protein, 348 aa, unidentified
MRFYSRSHAFTCGVDLHGRTLYLCVLDGSAQIVLHRNLPCKPGAVLEALAPFRDDLVVGCECIFCWYWLADLCEDEGIAFALGHALGMRLIHGTKTKSDKLDSEKIARLLRSGHFPLAYTYPRTLRATRDLLRRRLFFVRRRAELLSHLQISQSQYNLERTPARLDRAANRAGLAERFPSGSARLSIGADCSQLDALDALIDELERTLVRAVKVDDLASFYRLRTIPGIGETLAMTIHYEVPDFDRFDTVQQFASYARLVAPRGESSGKLGGSRGRRQGNVHLKWAFSEAAVLLLRANPRAQRLHARLVKRFGRAKALSVLAHKLGRAVFHMQKRQQPFDAERFYREA

SEQ ID NO: 336345 - protein, 341 aa, unidentified
MEAYYIGLDLHKKIIVYCIKNVGGIIMGRGTIAATRSALNDWVEKLPKPWVAAMEATMFTGWVYDFLKPHAQELKVAHPEMLKAITAAKKKNDRADAEKICDLLRVDLLPQCYMAPQELRELRRVLRYRNHVVRMATTVKNKMSGLLMEVGAEYSKKRLHGRSYFTNLLETVKEVPPSVKELLKFSRAGLEIFSAVQKKLLVALRENSLIRVRVQRLMTIPGVGEVTALTWVLEIGDPSRFSTRQAISYCGLCSAQRESAGKETRGPISKKRNKHLQTILVEAAKLAPHWNPHLEQIHARELTKGNRNRATLAVARKLVTYLLAVDKTAMDFIMPCELAAA

SEQ ID NO: 336346 - protein, 333 aa, unidentified
MKKYLFHVGVDVSKQKLDFNILDVSSFKSEHFVVDNDIKSISFFVKNLSKRIGMGQTLFCCENTGVYTNHLSSVLANLHLDLWVVPAIEIKKSKGISRGKTDKSDAKDIAYYSYRNIDKLKLFTLADTDIQKLKILYTEREKMLKSLLLLETTKENKDFVSKEVFKEVSSINQALVKTIKNSIRKIEAKIKEIIKSNNQLSKQTQLIRTIPGIGEQTSVYLIIATKGFTAFKNWRKFACYSGVAPFKYGSGTSVRGRTKVDHLADKKMKSLLQMCAMTTLKYDPQLKEYYNRKKAEGKNSMVVLNNIRCKLISRVFAVVNRETSYINTYKFAS

SEQ ID NO: 336347 - protein, 359 aa, unidentified
MRRIVERVADRYDVVVGVDTHTDTHTAAVVDRLGGVLAQVTVSTDPDGLSRLLAFAVAHTPPQGRRLWAVEGTRSHGQGLCRLLTAADEPVCEAPKPPAAARRRGGKSDQLDAVAAAHTVLALPAERIAVPRSDGPREALRLLLICRRHHTDARTAAVNLVKALILTADDTLREALRGLSTTIQIARLAALELPETTALPCEEHTRRRELVTLARHIHILDATLADNHQRLRALVTELCPPLLDQPGVGPVTAAIALTAWSHPGRVRSEAAYATLAGAAPIPVASGRTDRHRLNRGGDRTLNSALHTIALTRRRIHPETRDYITRRHAEGRTTREIPRCLKRYIARQLYRTITTHHQTP

SEQ ID NO: 336348 - protein, 336 aa, unidentified
MSHYCGIDLHSNNHVVVVIDERDKRVLDKRLSNDLSLTLEVLSPYRDSLQGIAVESTFNWYWLVDGLQDNDFDVQLVNTAAVKQYDGLKFSGDHQEAFHLAHLMRLGILPTGYIYPKEQRAIRDLLRRRMSLVRSASTQLISVQSQIWRSTGIRIKSGDLRKLEFIPPLMDKYTLQAVHAGLMVYQAIQQEINVLEKSAFEAIKLTQDFKILQTITGIGKILGLTIMLETGDIHRFASAGNFASYCRTVDATRTSNGKKKGTGNAKAGNKYLSWAYSEAAHFAVRFEPLAQRFYERKKAKTNGIIAIRAVARKLARATWMMLRHQVPYDARLMFPN

SEQ ID NO: 336349 - protein, 391 aa, unidentified
MIYVGIDVAKDKHDCFITNSDGDVLFKAFTITNNLDGFNELHQKIASVMDDVTKVKVGLEATGHYSYNLLGYLIDKGLPTYVINPLHTNLYRKSLSLRQTKTDKVDARTIASMLMSDVNLKSYSDISYHNEELKSLTRYRFDKVKERAKLKTSVSRLVCILFPELEKLVPTLHITSVYALLSEFPGAKHVATAHLTRLTNLLSEASKGRYGKDTAITFRDAARASIGSNMPAKSLELKHTIKLIQELDSEIDEIENEIKIIMDEINSPILSIPGINYRMGAMIIAEIGDFNRFDSPDKILAYAGFSPSTYQSGQLDGAYAHMEKRGSRYLRYALYNATKYVCHWDPTFAAYLAKKRAEGKHYNVAISHAVKKLVRVIYHLEKTKQQYIKAA

SEQ ID NO: 336350 - protein, 320 aa, unidentified
METEKVYVGIDVSKETLDMAVHASEQRWEFANTVKGIDEALSILENLSPALVVMEATGGMEYPSAAALAVANIPVAVVNPRQVRAFARAIGRLAKTDAIDAKVIAHFAAAVHPTPHPLPDAQGQELKAILTRRRQLIEMLTAERNRLGSSRSKAVKAHIQAHIAWLEKEMIQINDDLGHSIRETPVWQEKDDLLKSVPGVGPVLSTTLLADLPELGALNRRRIAALVGVAPFNRDSGHLRGKRTIWGGRAVVRSALYMSTLVATRYNPVIRDFYQHLLAAGKPKKVALTACMRKLLTILNAMLKHQTPWCYPTSKTAQTP

SEQ ID NO: 336351 - protein, 431 aa, unidentified
MHYTQNDKIAQVGHDSLVIGVDVGSEKQHARAFGPMQIEYTRKAFSFNNSAEGFDQFLKWAQDMQFKKGLKKIMVGFEPTGHYWFNLVDCLEEQGIEYVLVAPQHVKHTKELDDNIQQKDDNKDPRVIAKLVFGGRYFYAYRPKGIYAELRVGFIRRCEIMEHLVETKNRISRWFNIYFPEYLKVYRKVDASTGMKILRQAPLPKDIIALGVDGVNKIWRDAKQRGAGKKRATTLVTAAQSSIGSKQADQAARMDLWQLLDEYDLIEKQLREINDLLLNLLTGIPDAQRMLAIQGVGMVTVAGFLAEAGDIRRFTDPKQIVKYAGMAVIKPNDSGKHNGKGKLSRRGRKRLRTILVQAARSLVKSNPDFQQIHKYFTTRECNPLKKIQSICAIANKLIHVFYGMIINDQPYDGEKMLRDIHRPIKAAAKAA

SEQ ID NO: 336352 - protein, 452 aa, unidentified
MVSAQNHTLSHARNGKRTYSNIVAKRRPRSYNAKTEENMMSRKTAEVELHYERCCGIDVHKEMIVACFRDGSKNTIKEFGTTSKELQRLAEWLISVNCEMTVMESTGSYWKPVYNILELLGVEGMVSNARDVKNLPGRKTDVKDAEWMARLLAQGLLRPSYTPDREQRELREVTRYRRSLTDERAREINRLGKMLEGANIKLTSVVDNVLGSSSRKLLEAALAGEPLTELTIEGMLKGKIRGKSALLADAMDGVLSKTQRRLIRAVLDHIDDMTRRISDMDDIIRDEMEKYDEAIKRLDNIPGIGVSSAQAILAEIGLDMNQFPTAGHLAVWAGVCPGNNVSAGKSKSGRTRKGNQTLRTTLVQCAQSATLTKGSFFRAQYDRLVVRRGKNRAKMAVAHSIIIAIWHMLKHGTEYHELGGDYYNRFNPEKKINMYLKKLAELGWSPPDPAAA

SEQ ID NO: 336353 - protein, 404 aa, unidentified
MVRYIGMDVHREFAQLAVVEDRLVRDEGRIGVTPEALRQWAAGLRADDQVALEATGNSDAIANLLVPLVARVVVSNPSKTRAIAEAKVKTDKVDARILAQLLAADFLPPVWLPDERTRCLRRQVTRRAHIVRQRTRIKNQVHAILARNLAPTPPVSDLFGTTGRHWLSRQDLPADERAAVQALLRQLDFHGAELNAVDRELAVEAIGDPVVARLMTIPGVDSIAAISIVAAVGDFSRFDDPDKLVSYVGLNPKVRQSGNSAPVHGRISKAGRAQVRGVLVEAAWSACRAPGPLRAFYQRINARRGFQKAVVATARKMTILAWHLATRDEDYAFARPGLVTHKRRKLELAAGAQSRRGNHGQPGAAYNSKQQRSEERAVAEQAERTYQILVAHWQQKKPATRAPA

SEQ ID NO: 336354 - protein, 341 aa, unidentified
MGSFIGIDTHKDSLSCSAVDDVGREVESVHAVNDGRGFRKIERFAQRVEATRIGIECSGSFGLALAQHLLAAGFDVREMPGQLVKRDRRSMAKGKSDTLDALLIARVVSREDKLPPPPFRGLTHDLKALVDHRETLLNEATRHRNRAHAILTQIRPGYSRAVPALTSARQLDAALELVEGDSGVRATILRDALKRVAELDSTAHVLEQQIDALVKASGTSLTQIVGIAAITAGRILGELRDVSRLSGQAAFGALTGTAPVPASSGKTDRWRLNRGGNRQLNRAMHTIALTQSHHDPRARAYLERKRTAGKTDKEAMRCLKRHLARVVYRRLADDRTLVLLT

SEQ ID NO: 336355 - protein, 315 aa, unidentified
MGKNTAQGINVGVDVGKHQLDVFIHERNIHFTEENTPEGVRRVVSRLNRYTLARIVAEATGRYERLLVDEALRRSAPIVVVNPLQVRRFAGAIGQIAKTDRIDAAVIAQYAALVQPEVQPINQNTRKIKDMLVRRRQLIEMATMEKNRPLIMPKNQRTDIRRHVLHLQKQIEKVDVLLDALIESETAWQDKRTVMLSMPGVGPGVVNTLLGDLPELGDLSNKQIAALTGVAPFNRDSGSMRGKRRIRGGRHSVRTVLFMAVMSAVQHNPVMRHFYQRLVKEGKHKKVALTACIRKMIIILNAMVRDGAMWKPNMA

SEQ ID NO: 336356 - protein, 345 aa, unidentified
MKHLFIGLDVHKKSWSVTIQEGQVVLKRFSMEANADTLTHYVNKYYKGYTIQCCYEACCCGYHIYRSLSAAGWDVLVVNPADIPRINKQSTNKSDKIDSRYLCHHLASGHLRGIHIPEEKQEQFRSLFRRRNDLVKSLRRIKCHIKSMLLYYGINLPAHYDNINWSKAMGLWLSKLKWRYPTAAQTMKSRLDEYDFLRKQYLSVCNELRSYARKNYRKDYYLLRSIPGVGPFIAIAILSEVGDLRRFKGIDRLSSYVGLVPSLHSSGEKSYSRGITYRSKNLLRSYLIEGAWIAAKKDEELMQYYLERKGCDHRKIIIKMAAKTLSRIYHVIKKGEPYKASKAAA

SEQ ID NO: 336357 - protein, 342 aa, unidentified
MSIASVGIDIGKLTFHLVALDDHGKVVVKKKFSRKQLLAYTAKLSTALIGTEACSGAHFLGAALRDQGHDVRLIPAQFVKPFLKSNKNDFLDAEAIAEAVTRENMRFVAIKTDDQLDLQALHRVRDRLVQRRTAVINQIRGFLLERGITFAQGPANLRRGMPSLLEDAEQNLTPRMRHLLAHLWEEWKQLESDVARISDEIDTIAEHDPACQRLRQIPGVGPLVSTATVAAIGNGAAFRKGREFAAWLGLIPRQHSTGGKARLLGISKRGSVYLRRMFIHGARAVLLIVKYDTGRLGQWARQLALRAPRNKVIVAVANKLARIAWAVLSSGNEYRAAAVAAA

SEQ ID NO: 336358 - protein, 399 aa, unidentified
MFVGWDWASATHDVTVLDDAGVVVDRWAFRHTEQDLVEALERLARLAEPAALPVIIERTSGLVVERLLAAGHPVVPVHPTAFWAARPRWGASGAKSDPGDSYKLADYLRTDGHRLRRLDPPDVGLQELQALVRLREDHVRARTATSNQLGALLEAHWPGPKAVFFRLASPIALAFLTDYPTPQAAARLGQARMASFCRRHSYRGGKTPAQLLAKLHSAPTAPVGIPAATLAILVRAQIELLRTLLGTIAELNAAIATRVAAYPRARLLAALPGVGTINLAQLLAEVGPVLDRVANAEQAAAECGAAPVTRASGKTTGVYFRWAANRRARKALTAFAHNARMQSPWASRLYGDARARGKRNPHATRIVARAWLRVIWACWHTSTPYDPHAHLAEQRLAAA

SEQ ID NO: 336359 - protein, 417 aa, unidentified
MESAYNLVAGLDIHKKTVVVVVLQNAQPEQDYASSTFGTTQFGLKELAAFLRQHGVTHVAMESTAQYWRPVWMTLEEEFTLTLAQARSTRARRGRKWDKADARRIAKRLLSGDLTVSYVPPPEQRDWRLLSRTQVAMRESLVRLRNQVEVLLEQAQIKLSSVVSDLFGKSGRRMLEALLQGMENPAELASLGDRRLHASKEQLADALTGQLTEAHRIVLRLLLQQIDQIEQHVIDLDRALAQALAAHQEAVERLCEIPGISVRTAQYLIAETGPGAEPFESPGKLASWVAICPGQQESAGVTVSNRSAKGNWMMRRTLSQTAWAAVASKGSEARRRFLAWRPRLGTQKAIWAVAHYQLRVVWKVLHDRVRYRSPDTEALSHRALMARATRVFNQLRNLGYDVSITPPSKPVYINSEG

SEQ ID NO: 336360 - protein, 432 aa, unidentified
MITIGVDPHKRTHTATALEEATHRPVASMQIESALSGYRALLRWAGRFEHRRWAVENARGLGRHLAQWLVARGETVLDVPSTATARVRELSRGGRRKNDVIDAAAAASVAALQGDASPVPAEDLSTVLSLLQERRANLAAARTRAVNQLHALLRDLIPGGAPTDLSAAMASDLLAGVRPASPVEQARKQLARDLITEIRGVDARMATIAQRMRATLAEYGSRLPDVDGIGPVLAARIVGRTGHATRFPSAAAFASYAGVAPIEVASGDRARHRLSRAGDRQLNCALHLVAVTQIRMRTSKGRAYYDTKTAAGKTHNEAMRCLKRRIADHVWRLMVADERRRCTLTGPGGHGGDCAIQRGWLNPYHQLFGQVTSRTRRPKDYDRTPSGCLTNTEAPTRGRSRSPSPLRTARGRAGSSTSRRRPARRRRGRATR

SEQ ID NO: 336361 - protein, 397 aa, unidentified
MYIVGIDIAKRKHEAAVIDGEGAVIIKPFSFTNNCSGYNRLLAMLVKAKLPLDEVSFAMEATGHYWLALFTRLQKEGFRVQVINPVQTNSIRSFYIRQAKTDPRDALLIAEVIRFGHFSESTLHPENIYELRELCRGRHAIVSMQADVKRKVVALLDQVFPEYETAFTNLFSDTSMAILQTCPTPKELSEMPLEELCHLIEVSSRKRFRMAKAQELQALARGSFGFAMAGDVFSTMIRLYAKHLDFLKQQVREMDRKIAEIMKTLDTPITTITGIGPTLGAYILSEIGDISRFSSAAKLAAYAGIDPTMRQSGEYNGVRNRMSKRGSPYLRHAIWLAASSAVLHDPALKLYFQKKRDEGKPYMASVGHACRKMVSIIYAVMRDNKAYTPHIPNEISA

SEQ ID NO: 336362 - protein, 480 aa, unidentified
MVVPNEEPKKPTKSKKPAKPKTPAKPRKSRESSLPVPASAAALNVINPDAAGIDVHSDMHMVCVPADRDANPVRQFGANTADLQEIVAWLKKCRIKTVALESTGVYWIPLFELLESEGFEVNLVEPGQLSRCGARPKTDVLDAQWIQRLHSYGLLRASFRPPDSVLALRAYWRQRQMQVRYAASHVQHMQKAMEQINVKLTEVVSDITGVTGMLIIGAILEGERDPIKLAQLRDERCHHSEEQIALALEGTWRPEHLFELRQAHELYQFHHRQITECDQQVQAELERFPNRAGEKTRAHKPRKRGRKSNDVRFDATGPLFQALGVDLTLIEGIDVGTALVILGEIGVDVSRFPTEKHFASWLRLCPPQDESNKTKKRRGHRKGTNPVTIALRMCARSLGKTMTPLGMFYRRIRSRIGGLGAVKATAHKLACLVYRMLEYGQEYVTQSMEEYEAKVKANMLKALKRKAAALGFQLSPRPTQ

SEQ ID NO: 336363 - protein, 450 aa, unidentified
MNLYIGVDIGKELNYASFLNEKGVEIDKRFKFKNNYLGFLKLKDNIDKLTYDYNLKYDDILVGFESTGHYWINVDWFLTEKLNIKTVMVRNDAVRHTRALNSQGKGKNDSLDSRTIAECLKNGYYFDVQGRKEDYIVLRRLTRERSELEKEIARYKNRFRAWLDVNNPIFLEIFSNVFSSGALALLKVYPSPLDIIKDSYLEVREKLREVGYSRTNKTLKIYYEEVQTYKNIINGISYADRLEISEYIEALEMYIKKKENLDERIEALMNFLEGKVYNSLSEIKGMPKAQVASLIAEIGNINNFKSAIHLLSYAGLNLQGEGSGKNKGHSWISKTGNRKIRKELYVITFNLVRHNDYFRGLYCYYKSYKRPNEKSSKEMLIALMCKLLRVVYGMLKYNVEFNLNEMLKNYDFRNINKEKFIDEFLGNSEKKQKIIPQEIEDIFLNNRKSN

SEQ ID NO: 336364 - protein, 362 aa, unidentified
MAEYSRKMAERTMGLDLGDKNSHYCVLDREGEEIETGRVATRAGALEEKFRSMGPTRVVMETGTHSPWVSRLAEGCGHEVIVANARKVQLISQNRKKRDKVDAELLARLGRSEPELLYRVRHRGEEAQRGLVLLKSREALVKARTELITHLRGAVKSLGSRLEPCSPECFHRRMVGKLPRGLAGLEGWMLEMIGKLTEQIRQLDRAVERLGEEKYPETELLRQVKGVGPLTSLAYVLVLEDTERFERARAVGSYLGLCPALDESGEQSPQLRISKEGDQMLRRLLVSCAQYILGPKGQDSDLRRWGKKLEGRGGKHAKKRAVVAVARKLAVLLYVLWSRGEVYEPLRGSWMKSLEAAPAGTV

SEQ ID NO: 336365 - protein, 347 aa, unidentified
MNEITASMKVLAIDLAKHVFQAAGEDDRGVVVWEERIGSRDAFYALVQKLPPGLEVVMEAGSGAQAWARQMQSRGLSVRLLPAQHVAEHRSGAKNDRNDALALLRAGRDSAIHAVPIKSAERLAMQAVHRTRSGYVRRRTSVSNQIRGLLLEHGVAMAKGNAPLVACLTRVLGDASVPLPMLLRELIADLWAEWTHLGERIERLSAQVASLVRDDPLAQRLMTIPGIGPITASALVCKELTHERFADARQFAASFGLVPDQHSSGSKTRLGDMSKRGDRYIRSLLIQGAHAVLVRVQPAEQDTEHDRLRRWVRRHGRKGAAIRLANRNLRIVWRLLRDDVPYCHEAR

SEQ ID NO: 336366 - protein, 433 aa, unidentified
MKVMYERVAGIDVHKDMIKVAIRSPGDKPWTRKTEILEYRTFYGVLQEMARELRRRGVTHVVMEASGVYTEPVYYALCEQDFTEVAVINPVHAKALKGHKTDAKDCARLAELFECGLLRGSCIPSAEQKEVRDLTRYRIKTVQARTSEIQRLGKALESAGIKLASVASEITGKASTAMIEALIDGERRGGVLADLAIGRMRSAGKLADLSMALTGRFTGHHATLCRLHLDRIAVFDDAVDGLDDRIAAGAARWQREAGLLTSVPGFGDVVTCAWLAEIGPAPHKWFSRHEKLASWVTLCPGNNISARKRKHDRTGDAGTYIKPMLIQAAWSAIRVRGRLQARYNRLVRRFGGEKNPGAKKKAITAIAHTLLKIAYQVLKSGTPYQDLGADFYTRRNSPEEQQKYLERQLQRLHPGCTITITISPPEAALPPGE

SEQ ID NO: 336367 - protein, 331 aa, unidentified
MEKSDFKFFVGVDISKKSFDIAIIQGDDTDSFVFDNSQKGTRAFIRLLKNRGIPLENTLVCLEHTGIYGRLVIARLLEKQANFCVEMSLRIIRSLGIQRGKNDRLDAIRIARYAAKNHNEIELYRPVPEILEKVNALLKVRDQLVRFRADLCKHPNELKTFDPELGKLVQRHIKKTTKCLNDEIRRMEGEIEALVLSDERLNNTVRLATSVTGIGMFTALYFTIYTNFFTKYENPKQLACYCGVVPFEHTSGSSIQKRARVHHMANKTMKKQLHMCALAEVRHDPELKAYYERKAGEGKNKMLVLNNVRNKLVLRVCAVVKRQRPYQKSVA

SEQ ID NO: 336368 - protein, 343 aa, unidentified
MQTITTIGLDIAKSVFQVHGVDAAGQVVIRRQLKRRQVLTFFERLPPCLVGIEACASSHHWSREIQALGHTVRLMPPAYVKPYVKRQKNDMADAEAICEAVTRANMRFVPTKTLEQQGCLMLHRTRHLFIRQQTAVINSIRAHLAEFGIVAPVGRKGVTELLHVVADPGDKRVPEVARACLAALGAQLLSLKEQILEFDRLIMAWHRSNQTSKRLHCIPGVGPMLATALVASVADPRTFRSGRNFSAWIGLVPKQHSSGGKDRLGSISKQGDRYLRSLFVAGALAVIRYAKIHGTGHRPWLTALLARRPTKVAAIALANKIARMAWAMMAKGERYKQPVALAA

SEQ ID NO: 336369 - protein, 340 aa, unidentified
MEQYVGLDVSLEETAVCVLDSAGKIVWRGRCSSDPEAIARIVRERAPFAVRIGLETGQLSTWLVHSLRHLGLPVVCLDARHAKAALSLQVNKTDDNDAHGLAQIVRTGWYREVAVKSMDSQAVRVLLMARAQLISQRQATANQIRGLLKTFGLMVGQAGGSRFAVRVRELVPEHPVLVAIVEPLLTVWQTLREQVAELDRQVRMRVREDAAARRLMTAPGVGAGVALAYTAVIDDPARFAKSASVGAYLGLTPRRYQSGEVDYDGHISRCGDGLLRSYLFEAANVLLSRITKPSWLKTWGQTLTQRIGARKAKVAVARKLAVVLHRMWRDNTEFRWEPAR

SEQ ID NO: 336370 - protein, 355 aa, unidentified
MSGEKYIGLDVHQATISVAVRDSQGNIIMESILETKASTLLEFLAGLRGSLFVTFEEGTWAAWLYDLLKPHVTEVLVCNPRKIPLHKQGNKNDKIDARKLAERLRLHDLKPVYHGENGVRMLRELARSYLTIVKDLARVMSRVKALYRSWAIPCAGRDVYYTRHRSQWLDKIPEAGVRCRAEQLYAQLDMLQQLRQQARRELLAESRKHTITAKLRQIPSLGPIRSALAVALIQTPNRFRTKRQLWTYSGLGLETRDSGEYQFVQGQVRRRKKQVFVRGLNKDYNHDLKGLFKAAAVRASVQPGPFQDFYQRSLAKGIKPTMVRLTLARKIAAVTLTLWKKGENFDAEKLKSQAA

SEQ ID NO: 336371 - protein, 379 aa, unidentified
MPDVISNAPADVRLWVALDVHKLSIVAATLPPGGGKPELARIETTEKAIRRFITKLGGPEGLAVSYEAGAGGFALWRLLTGMGVACDVIAPSLIPVRAGDRVKTDKRDAKKLVSLFRAGLLRFVQPPTVETEGLRDLLRCRDDLRCARTAARHRVLKQLLRHGRVYRDGTTMWTKTHRGWVNAQRLDDQLAHLALQQMLCHLDSVEIQLDTLDAELQRIAQSERWAGQVDTLIRFRGISTLTALGLIAEIGDFNRFSHPRELASWLGITPSEYSSGESQHRGHITKAGNTHARRLLCEAAWHYRHPPRRPVSGPAPDERAWQAQIRLHHRYRHLTQNGKRTTVTNIAIARELTGFLWAAMTNQPLRVADPANNQEAAVA

SEQ ID NO: 336372 - protein, 338 aa, unidentified
MKLYGGMDLHSTNVVTQLINKEDRVIYRKKQSCDLDLILQGLEPFKDRIEGLAVESTYNWYWLVDGLIEAGYRVHLVNTAAVKQYEGLKYTDDDSDAFWLAHLLRLGVLPTGYIYPKQSRAVRDLLRKRGQLVRQRTAHIVSIENLYTRNTGNRLSCNATKCLTQAQIQQQFDDPNVALAIDSNRAIMNALDQQIKVLEQAILKQAKLDDRYRCLLSIGGVGEILALTIMLETGDIERFAHVGNFTSYCRCVGSEKLSNGKKKGQGNTKNGNKYLAWAFIEAANFAIRFNEQAKRFYQRKAAKRSRVVALKAVAHKLARASFYVMRDQVPFDSAKLFV

SEQ ID NO: 336373 - protein, 372 aa, unidentified
MQQTIIYIGLDVDDTQYHGSALDKNTGEVIHFKCRPTLNGLLGQLEKLRQYFPGSTLTLCYEASYIGFTLQRDLTDKGYACVVVAPTSIPSPRSKQIKTDRIDASQLAQFYANGLLTLVSVPEREQEQDRDLIRSRQHLVQQRTELRTHVQALLRRNGLHYKEQTGNKTHWTKYHYCWLARTVEAATGSLKANLELLLQQLKGLNALLVDYTQQIEALANTPRYQKPVQALTCYKGIKNLFALTMITEIGDIKRFPHPRQLVSWIGMDIREYSSGGKHNRFGITKQGNRYLRTAFIEANQRGYRTARITKDIKARRAHTAPELIDIADRCLRRLNKKGNRLLIGGKHPNKVKVACAREMVGFVWESLNKVAA

SEQ ID NO: 336374 - protein, 358 aa, unidentified
MFQYDFALGIDVSKNSLDCCIGHHKDGRFKVVCTKSFKNMHTGFNSLQSWLQTKIGSSGKLHIVVEATGVYHEDLAYYLHENLNYPISILLPIKAKYYFKSHNIKTKTDSVDSKVLSMYGLERKSENWKPISPMLRTLKQLCREYHTNKKLLNQLKNQLHAKEHSYKPNKMVVRLLKKKIINITSVCNLLESEIKSIVLEDDFLTDKIEKITSIPGVGVLTAITTVAETNGFELMTNSRQLCSYVGLDVVHKVSGTMKGKSKISKRGNSYIRGALYMPALCASKHNRELSKLYQRINENRQCKKIGLIAVVRKLLVLIYTLWKKDQKYIENYESRVKTSGYHEERSSSSSVELKIQNS

SEQ ID NO: 336375 - protein, 369 aa, unidentified
MGEYSELFVAFDVAKKKHAVAIAEGGRRGEVRFVGEIENNPATIERMIKKLAARYDRLHVCFEAGPTGYELYRQIRALGHDCMVVAPALIPKRAGERVKTNRRDAITLARLHRAGELTSVWVPDATHEAIRDLVRAREAAADDLRRKRQQLLSFLLRCGRIYSGGGHWTLAHRRWLARQAFEHAAQQIVFQEGIDAIEDAAQRLHRLEQQLAVIVPGWSMAPVVAAYQAMRGASFLVAVTFAAEIGDVRRFDTPRQLMSFLGLVPAESSTGDTVRRKGLTLAGNRRARRALVEAAWTYRYPARVSETLRARIEGLPKPVRDIAWKAQLRLCARYRRLSAAGKKLPVVVAAIAREMAAFLWAIGREVAAV

SEQ ID NO: 336376 - protein, 346 aa, unidentified
MMIIGCDYHPSWQQICWVDTLTGETGEKKLEHASGEAEKFYRGLPAPALIGMESTGNCQWFVEMAAAAGHDLWIGDAAKIRACEVRAQKHDRRDATLILKLLLEGRFPRIWTPSSQEKDLRQLLIHRYKLVRIRAQVKTELQHLAMNQGVMKKRKLWSKAGEKVLRELPLAPWTSRRREDLFRVREMLSAQIDLLDQAVVEVAEKNEKARLLMTQPGVGPITSMAFVLTMGDVSRFQRGKQVASYLGLIPREYSSGGHQRFGSISKQGNWFMRMLLVEAAQNAVRCDPGFRNEYLHRCHNKAKGVAKVAAARKLAIRLYWMLRTNTGYPGVVRVESSSRVPLVSAS

SEQ ID NO: 336377 - protein, 366 aa, unidentified
MESYVGLDVHSKRSVFVIEAADGRVVARGDIPTTPAGFRQLREQPALAAETPVALETGTVAFYAARELARVGLRPVVIDAHEVRVKAHRPRQKSDRRDAFELCEGLRRGQYRAIVHVPPARIGALRETLSRRRHFVAVRVAEGNAVKRLLRAAGLVHLSKSLGTDAAWAKLLAALATEPALRTYVVQHQALWRCAQEQIAALETTLATQPTTITTVAARLQTVPGVGPIVSLTAVAVFSDVHRFPSAKHAASYAGLVPSTDQSGDRDTHGHITKRGSGALRTMLCEAAHHAQRPSHPLHPYFARLCAQRGYKMAVVAVAHRLCRILFALLRDGAEFDVAKLAIEEGPFRRTTVQRYRLKRGAAAHA

SEQ ID NO: 336378 - protein, 421 aa, unidentified
MPYTIAAIDVHKRVLMVVVATASEQVKDPAGEALEFECRRFGALEADRRQLVDWLKERGVQEVVMESTAQYWKPVWLDLEPHVPKLHLAQAQSNRAPKGRKDDFRDAKRLARRLLAGELMLSFVPDGEQRTWRELARAKDHYVAERVRLQNRVEALLEEMRIKLSGVISDLFGVSGRRILNALSEGETDPMRLAELGDASLRCGPETLADALCGHPTPVQLAILKLHLELLRKFDEMLGSLDQLMAGELKKHEEAVIRLAETPGFGVDSAQRLIAEIGEDAEAFPSAEEFGSWFGGCPGSNISAEQKHGSRSPKGNRYVRRLLTQAAQAAVKKKGCHFQSLFRRFLPRLGYKGAIWLVAHRLGKLAWKILHDGVRYIEQGNETNPKARKRRAQKLAQALRKLGYAVTLSPVIPATLAEIEG

SEQ ID NO: 336379 - protein, 362 aa, unidentified
MYIGVDTHKKQHVLVALDGRGQACGTHSVANTPSGWAAALQWAHDRDATCIWGIENSGSLGKGFAQFLVSSGESAVHEIVPHRTAQYRRRGRTQDKTDHTDALAMARLLQAESEHLPCVERDDLSTELRLLSDHRDNLVAERTRLINQVHAQMLQIDPCYGEHSGALTSRTGIRYCHALDLPHADSVVQTRLLIVHQLTEQLLRLWEEIETVESALAARVRETETPLLGLCGIGVVAAARLIGELGCTPRIRSAAALAALAGIAPVAVSSGGRNGHRLNRGGNRRLNRTFHMIAVCQLRCEPLAQAYYAKKRAEGKTGRSALRCLKRRLVDVVYRLLRGQERATAPDARAGNVLGSFLQPAA

SEQ ID NO: 336380 - protein, 361 aa, unidentified
MPGVHYPVMESKLRTLTRRCRMELYAGIDLHASNNFIAVIDANGKRVFKKKVPNEAEIILSILGSFKEEVIGVVVESTFNWYWLVDLLSEAGYRVHLANPCAIQKYSGLKHSDDKHDAFWLAEMLRLAILPEGYIYPKEERPIRDLLRKRGHLVRLRTSLILSLQNIVARNCSIRLSVNDAKRLKENVLLPLLKSNDDLAMAGMVSKESIDFLTREIWTVETMVEQRVKLKNEYRYLLSLPGIGKILALTVMLETGPISRFPKVGDYVSYCRKVSSKWTSNDKTKGKGNKKNGNKYLAWAFSEAAELARRYDTQCRGYYNRKMQKTNFMVAHQALAHKLARAAYCVIKDQVPFMPEKLFAC

SEQ ID NO: 336381 - protein, 356 aa, unidentified
MSREVKYIGMDVHKEAIVIAVRDSRGHVVMESIVETKASSLLQFMHGLQGELHVTWEEGTWAAWLYDLLKAHVHQVLVCNPRRNALLKEGSKNDKVDARKLADLLRTGMLRPVYHGEHGLRTLRELARTYQTLSQDLNRVMNRLKALYRGWGIACGGTQVYAPRYREEWLGKIEHVGVRRRAELLYQQLDGLQALRRTLRPELLAESRKHKATKLLRQIPCIGPIRAARLIALMQTPHRFRSKRQLWTYSGLGIATRDSAQYRFVRGQLQRSKKPQQIRGLNQNHNHEMKEIFKGAATRASCGVGPLRDFYVGLLDKGMKPEMARLTLARKIAAIALTLWKKEERFDAEELKTQAA

SEQ ID NO: 336382 - protein, 410 aa, unidentified
MRRVIGIDVHRTFGEVVFWEDGRLRPAGRINMTRTALEGFGKALLASDEVVIEATANSMAVSRVLAPFVARVIIANPLQVKAIAQAHVKTDKIDAGTLASLQAAGYLPQIWTPDAATERKRRLAARRYQVVRHRTRLKNEVHSILHAHLIPKCPHADLFNARGRAWLAAQQLPDDERAAIDRHVRELDRLAEDLTLLDREIAQDAIDDPAVARLMTITGVNLTVAAGIVAAIGDIGRFSSPQKLVSYFGLNPRVRQSGLGAAHHGRISKVGRSHARAMLVEAAWAAAKAPGPLHAFFVRIRARRGHQVAAVAVARKLTVLCWHLLTKGEDYLWARPALVANKTRAMQLQAGHPQQRGSRRGPAYAYNIKALRDREMMVAAQAERSYERFVAQWKPRRPKPGARAPQLGKT

SEQ ID NO: 336383 - protein, 366 aa, unidentified
MREQQNNRQERTIIGLDLGDRWHRFCVLGESGQVVEEGSVANNRVALSELSSRYPGALVVMEAGCHSPWVSRHLKQAGCEVIVSNPRKTRAIYQHEHKSDRRDALMLARIARMEPALLYPVRHGSEEAQQDLLRIKLRDSLVRARVGLINSLRFTLKSLGYTIANPSTERFHKVIQSALPESVVQMIAPSVQAIEELSLRIKLLDREIRTLAHTKYPETTWLEQIPGVGPITALYFVLKIGDPARFERVRDVGAFIGLCPRRNQSGENDPQLRISKRGDAYLRRLLVSSAQYILGPFAPPSALRQYGLALAAGATARAKKRAVVAVARKLAVLLLTLWKNKSPYQAFPQQREKMRTHDLERLRCIA

SEQ ID NO: 336384 - protein, 343 aa, unidentified
MAALSIADVPAKVTVGVDTHKHSHIARAKDGLGRHLGQLEIETDPRGYASLLAWAQGFGPVVTFGIEGTSSYGAGLTRFLRAQGQAVIEVLRPVRRDRRFGGKSDPIDADAAAGAVLAGRATAVPKAGDAGVEMIRALKIAKQSAIKARTQAVNAVKGLVVMAPDPIREQLRNLKTPALVRTCSAYRVDRASDPTSAIKLSLRSLCRRYVALDQEVRSLEKELDALTIRLVPQLRQLFGVGQDVAATLVLAAGNSGDRLRSEASFSMLCGASPIPASSGMVQRHRLNRGGDRQANAALHHVIIVRLRHDKATRAYFACLKRYVAREVYRTLVDPREEAARSAA

SEQ ID NO: 336385 - protein, 421 aa, unidentified
MRRKNDNRQVEKRQRITDATLVIGMDIGCECNAMCLMSKEGTILGRYPKIYNSRKGFDYFHGIVESMKKKYGFTDVLIGMEPTGHYWRKIAYFAMDKQYEVRFIRTTALKHQRELDESSSAKNDIRDAYTIANIAREGKYIDTVIEDNIFRQLRTLAHTREKIQRISTGAKHALKGMLEDYFPELKHIFWSMKAKGLWALLEHYPFPEDVLKTDIDTVTELIAQSTRRKIQAHEKALQIYKAAQHSIGLQRVGDADRWRVAAYLSEIRHSETQLKEIGAQMEALLKKIPFAEYILSMPGIGTLTCGVFLGELGNPCNFTNPKQIVKYAGYDPKEHDSGQRTGRRIISKKGRWLLRKYLYFMAMRVVHRSPFLKDYYENKQKTMTKKEALCAVVIKLIKVIFALLRDKRTFTEKQSCLKQAA

SEQ ID NO: 336386 - protein, 349 aa, unidentified
MAVTIVEEARPITGGVDTHADTHVAAALDSVGGLLGVREFPATAAGYSGLLGWLGGFGTVCLAGIEGTGSYGAGLARHVTAAGIRVVEAARSDRQDRRRQGKSDPLDAVSAARAAQSGRARGAPKGRDGAVEAIRALMVARRSAAGERTRTIGQARALILTGPDDLRARFTRHTPAALAAALASLRPRPGDVPGYAVRVALRELGRRAQFPDGQPGRLDELIVPLVTARAPGLPALYGIGPRTAALLLIAAGDHPGRLRSEAAWAHLCGAAPIPASSGKVTRHRLNPGGDRQANHALWRIVFTRLGSDPATRAYAERRTAEGKSKAEIIRCLKRYVARQVYPHLRPAGG

SEQ ID NO: 336387 - protein, 433 aa, unidentified
MLKLNYMSTLFVGIDVSSKTNAVYAMDFEENKYISSSFGNNQPGADKLVNMIAECMHKHKNLNTILIVLESTSVYSVHISNFLSTSEVLMPYKPYVFCVNPKATSNYRKSYIGMEKTDPTDAYLIADFGRVGRTKKLEPWRGGQFISLKRLTRHRMHLSECITREKTYMVSNLYLKFSELQLLEGDDKPFGSLYGATSSAVLTEFLSPQEIIDMPEEELLTFLAGKSRNRISDLSKTSELLRKAARDSYRLDKCMYEPLNVSLASSFNCIHAYQKEIKLIEQAIEKCINGMNPNALLILQSIPGIGPIWASGILSEIGDITVFHSSDALAKYAGLYWPKGDSGDFTSEDNKMSKAGSPYLRYYLGEAANSVRKHIPEYADFYARKYAEVTKHQHKRALALTSRKFVRLVFGLLVKNQLYTGEKLDAEYNIKSN

SEQ ID NO: 336388 - protein, 387 aa, unidentified
MNSVGIDVGKRSHEVCLLDAEGRQIGRFLRFQHSRQGVTALVELLRRQPELCVIALEATGHYWLALYQHLLQEGFRVVTVNPLQVHAYRRSTIRKVKNDQRDAWVIADLLRIGRVRPGYVPGPDIQSLRDLARFRMELVNQVGDAKRRILGVLDKVFPEYERLFSSVFISTSKELLKRAATAEEFAALDLKEITQVIRKASRGRLGLERAEHLQQTARTSLGLPYLRDAATVELRCLLAQMEFLEAQVKAVEAALERLFRQFPQHLTSIKGIGVMSAATIYAEIGDIQRFSTLESLVAYAGIDPTIFSSGEFEGTQRHISKRGSPYLRKALWMAASGARRWNPDLDAFFTKKLQEGKSYGVAMGALCRKLLGRIYVILQENRPYEVR

SEQ ID NO: 336389 - protein, 368 aa, unidentified
MDEVSAFIGLDVHKETVSVAVAEAGRNGEIRHLGNFRNTPDAIGKLARRLGRLHGAVEFVYEAGSCGYAIQRQLSGLGFVCRICAPSMTPRRPGDRIKHDRRDSIALARLLRAGELTYVWVPDLLHEAIRDLVRARHAASKDVRRARIRIQAFLLRNDLRFVGKAWSHRHRMWLCNRGFAHPAQQIAFQTYLNALEYEERRKLELEAQIKEAIELSPWSRLVRALQALKGVGPIVAATIVTEVGDFSRFTHPRQLVAYFGLAPGEHSSGSSVRPRGITKAGNATARSILCEAAWNYRTTPKVGQWMKQHRPEVPQEIIDIAWKAQLRLHKTYKRLTSRGKRTVVATAAVARELLCFMWSIGRALPANA

SEQ ID NO: 336390 - protein, 351 aa, unidentified
MSADRSHLGPDDIAVGLDLGSQGHQAVILASDGRRLTSFRVDHSRAGLAELVRRATPERWHARRAVYAFEATGHLWEAVAYVLREQGLPYVLVNPLATFRVREARQMGRDKRDVTDADQIAHLLRTGMTTRTQLEPEPYLMLRRAWGAFLRLRKERARLKTLVSHQLYGAFPELLGVWSDIFAPGALAVLRVGLTPFEIAALSLCDFASQVADARRGRRVWRFKVAQAHAHAQSTVALPHGAVPMMREIRRVIARVDLLSDQMTDLETEIRTLLPTLDEAAYLMTMPGVGWTTVAGVIAEIGTIDKYRHGRQLVKLAGLNPSRHESGAMRGRTMLSRRGRAGLRTVVYLAT

SEQ ID NO: 336391 - protein, 452 aa, unidentified
MRYSKGLRREHKNTQRKKEVVAGRTLICSFDLAKHKHAYHVVDAERKVLVRGHVPHSLEGLEQLLKELETLREKEKYDRLVFFMEGASYFWMPIASFVVRKGYTYRLVQNRAVKHQRQLAGQAGHKNDPRDAAHIATLASTLHFTFTQLPLQPAWIALRACALEYQELVDLVTAEKNRIHAFLGTVFPGYYGVFAEPFGDSSLAALRALPLVARLECEEFVSQVRKYFQGQNLQVRRCRAVWEYARSKDPWGYVEARSALSERIATSAARIQLLLEQQDSVREQLLAAYRQIPYHEDADSIHGSSSVENAVLLGILGDPKEFGDARTLVRVAGLDPGEQASGEYQGESKITKAGRTHLRRAAVSATMAVLKSRRNPDFVRRFFRLQQRPDHPLKELQALCACAAKYLRTVWWLCVTGSRYEPKVAHHGFAEEAHDGYNSTAIKGIEPALTME

SEQ ID NO: 336392 - protein, 339 aa, unidentified
MTHTIVGVDIAKNVMQVHWVDPETGEIVNRPVKRAAFLEYFANRSPCLIGMESCSGSQHWARRLIEMGHRVKLMPAKFVKAFNIRNKNDAADARAIWMATQMDSKEVAVKTEAQQAVLALHRMRQQLVKFRTMQINSLRGLLTEYGEVMGVGRAALDKSVVGVLERLSGRLPAILIETLREQWKGLDDLDRQIGQIERRLHEWMKDDPSAKAIAMIPGVGLLTATAAVATMGQAKAFKSGREFAAGLGLVPGQTGSGGKIELQGISKRGDTYLRTLLVHGARSIIYRVREPGLWVTQMKQRRPLNVVIVAMANKLARIIWAMLAHQRPYRKDYESVKPA

SEQ ID NO: 336393 - protein, 421 aa, unidentified
MKKIQAKTERIVNGRTLIVTVDLGKTTNVGYCRCPDGTDNKPFNFFNDGHGFNKFWSCVSEMMRIHNMEDVVVGFESTGPYGEPLVHYLQKRGVRLVQVNPMHTKRLKELHGNSPNKTDEKDPKVIADIIELGHALSLVIPEGVAAELRRLTQARERGIARRTALLNQLHDLVFILFPEFLQIMGSMKGKSAQYLLTYHTIPQEIIGLGLETLTLVLRRISRGTLGAERASALYEAAQGSVGIKEGEDSIVFEMRNILAIVEASDRFTEDVETKMSHYLGQIPYSRSILSLKGVGKITAAGLIGEVGDFRKFKTISEITKLAGLDLFEISSGKHKGKRRISKRGRPLMRKLLFFAAVNVVRKGGILHEQYQQCLQRGMVKMKALTAMARKLLRIIYALVRDHSDYVHGYTKTQKLSLPEAA

SEQ ID NO: 336394 - protein, 354 aa, unidentified
MLIIGCDYHPGFQQIAFVDTENGELRERRLTHREEAEQFYTGLKGQSVRVGMEASGHSRWFERLLGELQFELWIGNAAEIRTKRVRKQKTDRQDAQLLLRLMMEERFPRIWVPDSENRDLRQLLWHRHRLVQMRTRVMNQLHVVALNEGLRRKKALWRPAGRQELESFVLARWASRRRQDLLDLLDQLTPKILELTRALEAEVERRPVTRRLMTHPGVGPLTALAFELVIGTPERFHCGKQVASYVGLVPSEESSGDRRRLGHISKQGNALLRFLLVEAAQVTVRSQPQWRSRFFHLAMRRGRKIAKVAMARKLAVHLYWMWRQGWDYGQFEKLGSQGRKLSSHTAVVTEGSTR

SEQ ID NO: 336395 - protein, 364 aa, unidentified
MYIVGIDIAKRKHEAAVIDGEGTVIIKPFSFTNNCSGYNRLLAMLAKAKLPLDEVSFAMEATGHYWLALFTRLQKEGFRVQVINPVQTNSIRSFYLRQAKTDPRDALLIAEVIRFGHFSESTLHPENIYELRELCRGRHAIVSMQADVKRKVVALLDQVFPEYETAFTNMFGDTSMAILQACPTPKELSEMPLEELCHLIEVSSHKRFRMAKAQELQALARNSFGFAMAGDVFSTMIRLYAKHLDFLKQQVREMDRKIAEIMDTLDTPITTITGIGPTLGAYILSEIGDISRFSSAAKLAAYAGIDPTMRQSDEYNGVRNRMSKRGSPYLRHAIWLAASSAVLHDPALKLYFQKKRDEGKPYMA

SEQ ID NO: 336396 - protein, 340 aa, unidentified
MSSMQIGVDLAKTVFEVAVSPVPGHVHERRRLSRSAFGRFFAQRPPAEVLLEACGSAHHWGRELQRLGHRVTLLHPRAVAPYRTGNKTDRADAKALLEAARNETIRPVPVKSLEQQAVVALHRLRQGYLHTRTARINAVRGHLREFGCVIPVGAQHVLPRAYAALDQDTVPAFLRPALHAALEDIAALEAKAAAIRAELTRLAAQMPDTQLLLTVPGIGVLTATALVAFVGDPGRFRSGRHFAAYLGLTPREHSTGQVRRLGPISKHGNTYVRLLLIHGARSALRAGTVAQHPDDLRTWARAVAARKGHNVAAVALANKLARVCWRVWRDQRSFERRDPR

SEQ ID NO: 336397 - protein, 338 aa, unidentified
MKTYAGIDLHSSNNYLGIINEKDKRLFSKRLPNCIDNIVAALDPFRDSLTGIAVESTYNWYWLVDGLQEVGFKMHLTNPSAMQQYEGLKYTDDKWDSFWLAHMLRLGILPEGYIYPKKQRSIRDLLRRRLFFVQKRTSHIQSLQSMFTRHLGGKISSNEIKKLNPEHADQFFQDPYVALAVKNNIETIGFLTTKIKNMEKMILSKSKMKKSFQVLTSTPGIGPILGLTIMLEVGNIGRFAAAGNYASYCRCVKSIKFSNKKKKGQGNRKNGNKYLAWAYVEAVHLITRYCPEANTFYQRKKAKANGALATKALANKLARSHFYMLRDQVTFKKENLFP

SEQ ID NO: 336398 - protein, 376 aa, unidentified
MGTPSAQTLDDVGVREIFQELEEVPLMTMVGGLDVHRAQVTFDYVDDDGLVHWGQIRAATRKTLRGWLAEHCPDGDAEFALEGCTGWRYVSEELAGAGVGVHLGDPAEIAVLRGPKKRAKTDRADAWLLRTLLLQGRFPESWIAPAHVLEIRTLGRLYCTLMDERRAWQQRIHAQLFHQGCPPVRALLSVTGRAALAGAELSAVGGQYVDTALGRIDELSTEIEPLRAQLVNFARHQTGCQALQRHYGIGWLCAAIIWAEIGDARRFSSSDQLVRFAGLDVTVYSSDGKSSPGHRSRQGSPERRWAAFEAAKCAARRGSPDYGYYRKLAAKRDGHNGKNPTLAVERKILRRCHHTLRELGDAAVALPVAEPQEVAA

SEQ ID NO: 336399 - protein, 342 aa, unidentified
MYYIALDVHKKTISYCVKDASGQVHGEGKIGATRNDLDWWMKTLPQPWTVAMEATIFTGWIYDHLHPHASQVKVAHPVMLRAIALAKKKNDRIDAGKIADCLRCDFLPECHMASTAIRERRRSLRYRHLLVRQMVQMKNRISGLLLETGVSHNKQRLHKVGYFRELISNNEEVPESIRPLLRLSRETIVRCQKTEYALVSSLQWDPLLADRVQRLKTIPGVGPITALTWALEIGDVSRFRSIKQAISYCGLCGDEKSSADKVLRTPLSKQRNKHIQHVLVEAAKLAPRQSHELALIHEREQQKGNPNRATLAVARKMVAYLPAVDRRGQDFVPAEARNTAAA

SEQ ID NO: 336400 - protein, 409 aa, unidentified
MDVVITRCAGLDVHQATVVATVRVPDDQGGRRVVTDTFGTMTADLLALRDWLHAYGVAHVALESTGVYWKPVYYMLEDAFTLLLINMQELKRVPGRKTDVKDSEWLAQLLECGLLRPSFVPPPPIRELRDLTRYRVQQVRDRSQEVNRLCKVLEDAGLKLTTVISDVMGKSGRAMLQALVDGTTDPAVLAELARGKLRKKLPELRRALQGRFRPHHAFLIEQIFAKIDFLDEALERLTTEIDQRLVPFEPMLTALDTIPGVDRIGAISIVAETGGDMTRFLTAGHLCSWGAMCPGQNESAGKRRSGKTRKGNRYLRGTLIQAGLGAMRKNGSALQARYRRVARHRGHKKAVVAVGHQILEIAFYIMRDGVTYEELGADYFNRRHAEKAVRRHVKQLEALGFHVTIEKAA

SEQ ID NO: 336401 - protein, 399 aa, unidentified
MAQQLWVGVDAGKSDHHCVVIDVDANRLFSQRVANDESALLELIAAVTTLADGGEITWAIDLNGGGAALLIALLMAADQRLLYIPGRTVYHAAASYRGEGKTDAKDAAIIADQARMRRDLQPLRAGDDIAVELGILTSRRTDLVADRTRAINRLRAQLLEYFPALERAFDYSKSQAALILLTGYQTPAGLRRAGTARLAAWLRKRKARNADTIAARALQAANAQHSIVPGQQLAATVVARLAKEVIDLDTEIAETETMIEDRFRRHRHAEIILSMSGFGVTLGAEFIAATGGDLGVFASVDRLAGVAGLAPVPRDSGRINGNLKRPRRYDRRLLRACYLSALASIRTDPASRTYYDRKRAEGKRHTQAVLALARRRLNVLWAMLRDHAIYQPTITTVAA

SEQ ID NO: 336402 - protein, 360 aa, unidentified
MLVSLPFYLKLEQIIRPLSLHLGLISKQVEYFSYKTFIMCKIIGIDISKQTFDVGFMKESIWYHFVFKNNEKGFSKLLKKVEAEDWIVMEASGPYYFQLALFFHKENKNVCVLNPLIIRRYSQTRLYRAKTDKKDAQTIAEYGAQYDLKKWKPETEDIIEIKQLYTALELINKEIHQSERQLESFVSGGALSKELASALRSIIKFLKVKSNKLERQIECKAEQHYKSTLERLKSIPGIGTKTAIMLTVITNDFDKFENHKQLIAYVGFSPRLYQSGTSVRGKGHICKMGKSQIRKLMYLCSWSAKRCNPDCIKMYNRLKEKGKPERVIKVALANKLLKQAFSIVKNQTYYSENFMEKACF

SEQ ID NO: 336403 - protein, 405 aa, unidentified
MDIIVERGAGLDVHKGTVVACVMGTGIKKEIRTYRTMTNDLFRLKEWLKENRVTHVAMESTGVYWKPVFNVLEDSFKVMLVNARHVKNVPGRKTDVQDSEWLCKLLRSGLVRGSFIPPKPVRELRDLTRYKRKLIQTITSEKQRVEKILEDANIKLSSIASDTLGASGARIIQELLKGELEPEEMAELSKGRLRKRKEELKEALVGNVEEHHKRMIRTSLGHIKAMEEILFTMEQKIQENIERHFKEEYELLKTLPPMKDSASVIIAEMGVDMDLFPTDGHLSSWAGMSPGNNESAGKKKPGTTTHGNKHLKTILTEFAWIASKMKGTYLWAKYQSLVGRRGKKKTLVAVGHKILIMCYHILKYKVPYKELGSNYLDVRKKDRIAKSYIKRLTNLGYAVTLKEVA

SEQ ID NO: 336404 - protein, 376 aa, unidentified
MLSARPAGATTRPHRFERMAITTMAHPTPPRVTVGVDTHKDTHVAAARDQLGRRLGTTQVPASSAGYAQLLAWAHALGEVAAWGVEGTGSYGAGLARFLAGHGQRVVEVNRPDRQARRRRGKSDAVDADAAARAVQAGEATGVPKAQDGVVEMLRALRAARQTAVKARTQAINALKGLLVTAPAELREQLGGLPTGRLVGAAAELELGTLTTPTAAVRLALRGLGQRYQHLDAEIALLTEQLDALTAGHAPKLRDLHGVGPDCAAALLIAAGDNPRRLHSEAAFAALCGTSPVEASSGKTRRHRLNRGGDRQANAALHRVVVVRLRWHQPTRDYATRRTTQGKTSKEILRCLKRYVAREVFAVLRQIDDPGLAAAA

SEQ ID NO: 336405 - protein, 403 aa, unidentified
MNAVGIDVSKGKSMIAVMRPFGEVVASPYEISHTERKLKELTRFLKSLSGETKVVMEYTGKYYQPIARYLREAGIFVSVVNAILVHDYGGISLRRVKTDKKDAIKIANYGINRWVDLAEYTPEEEIRQILKTLNRQYNQYVKVKVMFKNNLIALLDQSFPGANCLFNSPARKDGHEKWVDFAAAFWHCKCVSDVSENAFKERYAKWCKKHRYNYSPVKAEAIYNKASNLVSTLPKNDTAKLLVTQAIAQLNIIAETLAAVMTEMHRLTMLLPEYDVVMGMYGVGPTLGPQLMAEIGDVRRFYAKKALIAFAGLDSPPNQSGAFESKSRSMSKRGSASLRKTLFQVMSVILQNSPPDEPVFQFLDKKRAEGKHYGVYMMAAANKFLRIYYARTKEYLTNLDEVA

SEQ ID NO: 336406 - protein, 461 aa, unidentified
MKGKSQRRSAQRAQREQRILEKIHLNAAGIDIGSESHWVAVPGDRDDRPVREFKSFTHELLALADWLEACGIETVAMESTGVYWIPLYEILEARGIEVLLVNARHVKGVPGRKTDILDCQWLQQLHTFGLLRGSFRPDAPIAALRSLVRHRDQLVAAAASYVQRMQKAMVLMNLQLHNVISDVTGGTGIAILRDIVAGQTDPSVLAHHRHPRCKATEAEIAASLTGHYRDEHLFVLRQALEIYDFYQEKLRACDMEIETRIHALEASCDPVEGRLPASRVKTRRANEPGFDIRSPLFTLCGGVDLTQLPGIGAYGALKLISEIGLDMSRWPSEKHFASWLTVAPRNQISGGKLLSSRTQPSANRAAKTLRMAAMSLWRSDHALGAFYRRLGARVGKAKAITATARKLALLVYRMLRNKIHYQEPSAADYDRQQRARILRGLRKRAASLGFELVDTCAGLAT

SEQ ID NO: 336407 - protein, 351 aa, unidentified
MSGKHNSVIAAIGIDIGKTWFHVVGLDGRGAIALRQKWSRGQVEARLANMPACLIGMEACVGAHHLSRRLRLLGHDARLMPAKYVRPYSKGQKNDFRDAEAIAEAVQRPTMKFVATKTTDQLDLQALHRVRERLVSQRTGVINQIRAFLLERGVAVRQGRHFLRAELPGILATGCAVLSGRMVHLIADLAGDWRRLDERIEGLSGEIAALARQDAGCERLMSVPGIGPIISSAMVAAIGVGDTFTKGRDFAAWLGLVPKQFSTGDRTVLGKISKRGNRYLRALFVQAAWVVLIRSKNWERYGLKPWIEAAKRRLHRNVLAIALANKLARIAWGVLAHGRSFEAAKVATLPA

SEQ ID NO: 336408 - protein, 378 aa, unidentified
MSKIRFVGLDVHADTIAVAVAESGGEVRSLGVIPNRLESIRKLIGKLGPIGSLKVCYEAGPTGYVLYWQLTQLGVACEVIAPSLVPTKAGDRVKTDRRDGEKLARCYRAGELTPVWVPDAAHEALRDLVRAREAAKKDQLRARRRLGKFLLRHGRRPEGLKAWTKKYLEWIKTHVHFDQAALEVTLADYLEEVDQVAARILKLEKAIDEAVRQAPPEIRAVIEALQALRGVAQTTAATIVSELGSVSRFQSPRQLMGYSGLVAREHSSGNRVRRGGITKTGNSPLRRVLVEAAWAYQHRPNVTGFLLRRQKNLALSDEVKKIAWKAQQRLHKRYQAFAARDKNKNQIVTALGRELLGFIWAIAVHSERQQKPVVGKTV

SEQ ID NO: 336409 - protein, 304 aa, unidentified
MFGIGIDVSKATLDVAVHGEQFRQFSNDKRGFLRLIRWLKTWPIKQVVLEASGGYERAALDALHAAGLPMVRINPARARRFAQGTGRAAKTDRLDATVLAQMAHLLPLTRYVPPAPWQQRLAEFAQCRRHLVQMRVSEMQRLRRLVDPDLIAMKQRYIAQLSDDLKQLDKAIAEQLEGQPGWKNIGALKGVGPILISTLACELPELGSLGSKAIASLVGLAPMNRESGTWQGQRRISGGRAVVREALYMAALTAIRYEPRLRAFYAGLKAKGKASKVALVAVMRKMLVILNARKRDAEVALGCP

SEQ ID NO: 336410 - protein, 305 aa, unidentified
MKTYIGIDIAKLNLDIYQDGKASRIPNNEKSITAFLKSLSDHSIIVCESSGGFEALLISLAHIHLRSIARINARQVRDFAKAKGRLAKSDAIDAQILAEFGHTFHPSPLSIPDRLQQEIAALVKLRSHFLTQITQNNNLTETISDKSLLAIIKKTVSSLKMQADKIQKLIAEKIKSSPSLQSKVSRLQEVQGIGEITASSLLGLMPELGSLSDTQAASLAGVAPFNHDSGQFRGQRHIRGGRSQVRSVLYMSALVASRHNPILKTLYQRLLVAGKPKKLALTALMRKLIILANRLLKNPNFSLAN

SEQ ID NO: 336411 - protein, 406 aa, unidentified
MFTGIDWASNEHAVCVIDAEGRVVDRFSIDHSAAGFERLISCLGAYAPPDQMPVAIERPDGRLVDRLLEAGHPVVPVKPTAIKAWREAEIGSGAKSDAGDARIIAEYLCTRQHQLRQLQPFSAETRALRAVVRTRGDLVDARVAATNQLSALLAAFWPGAGALFADLASQISLAFLERYPTPASAAHLGEQRLERFLRRHGYSGRRSAAELLGRLRAAPAGLADGPESEARRDAVLAMVRLVRALNQSIKDLDRSVIARLDEHPDGLTFGSLPRAGRISAAQVLAEWGDCREAYADAEAVSALAGASPVTKRSGKHHAVAFRWACNTRFRDAITRFADNSRHGSPWAASVYAAAIGRGADHPHAVRILARAWIRVIFRCWIDRVAYDPARHGAVLSLEAASTPAAA

SEQ ID NO: 336412 - protein, 344 aa, unidentified
MNISVLGIDLGKNVCSVVGLDASGAVVMRRKMRRDTLIGLAEKLPACVVGMEACCGSHHVGRVFASHGHDVRLMSPEYVRPYVKAQKNDDRDAEGIAEATTRPTMRFVELKSQDQLDMQTLHRSRDRLVGERTALINQLRAILLERGLVAPQGKWKLKEFLNVLMDKQGGASLSPRMILLVEDARAQWAELDRRIAAFDAEFVRWAKENEEARRLTTIPGIGAIVASALVAAVGRAESFNHGRDLAAWLGLVPRQFTTGGKPKLLGISKRGNKYLRKQLIHGARAALPHIAERDTPLGRWAKELMRRAHRNVAVVALANKLARIAWAVLQRRKPFDANAVSVAA

SEQ ID NO: 336413 - protein, 389 aa, unidentified
MAKVVIGVDPHKRLNAVVVINLKGKVLARRQFPNSAEGFRELRSFGRQWRPRTWAVEGCNGVGKYLAQRLVAAGERVVDVSTRRAALVRVFAGGNGRKNDDVDAHSVALVGLHTRDLPEVRKDDRSASLRLLANRRKELVDLRTQCVNRLHRDLVGLISGGAPQALTAVKAKALLASIRPRDEMGRLRRRLAADQLADLVALDKKLAAVEAEIRAMVKRTPTGLPDIYGIGPVITATVIGEVGDVARFQDRHHFASYNGTAPDDKGSAGRPVHCVNLKGNRRLNHAIHMAAITQIRNRRSPGRAYYERKLAETKTNKEALRCLKRRISDVVYRQLLADADRQTKAGPGGQTGTTLQSSVTSPTPTAGSSDKPQPGPATEATPTPLRAAG

SEQ ID NO: 336414 - protein, 445 aa, unidentified
MNVYVGIDVGSEEHAICAIDKEDDNPVYQTTVTTDKDGLNQLEEFLSEHSTGSIHLGLEATGNYWKPIFDYLMDLREKLDITLSLINPNEIHQFKKMDLCRVKTDTVDAKAIARYVLRFKPKSTPRTNERLRSLRKLCRYRASRVEEKTRLLQQLDDVLIGVFPEYSDCFSKLSAVSSLAILSKYPGPKEIAQLDVDGLASLRYGKANHKLGKEKAEKLIELATDTVGEGYGPEVEITISHLAEHITIVKREVEDLDERIEKSFTEIAPNKLESVDGIGPVNAAVMTTEIWDVNRFATATKLNGYVGAYPELSESGNYKNPHPEMTNKGNPRLKSAVFTSTMSAVTCNPVIKRHYQKQLAKGKDRMVAIGSCMRKLVHIIYGILTSGEKFDPNYEQNREEKDKDEERTRKPQSGSYPEDERSSELSPKTNIGKKIPNYQLSGGET

SEQ ID NO: 336415 - protein, 318 aa, unidentified
MSHGYDKFVGIDVSKDGLDVHGLPDGSPSRFDNTAAGRAKLLSLLPQAGACLSVVEATGGYERDLVAEAVTAGHHIAVVNPRQVRDFAKALGLLAKTDRIDASVIARFAETTRPVPKGYDERQEQLRELIVRRRQLLDHRTAEKNRSEMAHSSLVRKSVLKLIETLNKDIQRIEKAILQLVESNDDWRERFEKLKGVPGVGGQTAATLMAELPELGHLNRQQVAALVGVAPFNRDSGQFRGRRAIWGGRQSVRNALYMAALSAKKHNPVIREFAARLMAKGKPPKLVLTACMRKLLIILNAMLHSGDSWSPRVATLTP

SEQ ID NO: 336416 - protein, 349 aa, unidentified
MSVDPVYKVARSGARVEEMRWRDRTVIDGILGIDVCKNTLDVSISSYTKVRTKSFTNSPDGWRHLLDWLIAQKIQRVHACLESTGRYSLGIACALYEADHVVSIINPAQIRDFVRTKLGRNKTDGVDASHIREYCELFKPSPWAPPSKAHRRLGELQTIRSGIIAGLTEWKNRKNSGIVDAEAQALADATISHFTSQLGAVDKAIALTIDNDCNLQSKRDLLLSISGVGETLAGVVLAELPGPDVLRSSAEVVAYAGLNPRQHQSGTSIDRATRISKIGNAVLRAALYMPALSAMRYNSAIVALVTRLKSRGRLKPKQIVVAAMRKLLVLCFGVLKTGRPFDAAIAMGG

SEQ ID NO: 336417 - protein, 342 aa, unidentified
MLYVGIDVAKNKHDVTALNVPGKTVLKPLTFSNNKAGFELLDLSLRQLNQDCLIALENTGHYAFNLLNFLHEQGYKVYTYTPLLIKEFAKSLSLRKTKTDKKDAHGIALKLLSDPNREQFQHDNRQVELKILARHIHRLKRKQSDWKVQYTRCLDIIFPELDKIVGKHSEYTYQLLTCYPNPQKRLEAGFNKLIEIKRLTASKIQDILSVAPRSIGTTSSAREFEIIENIKHYKRLIDKAETCVNDLMAEFNSVITTVTGIGGRLGAVILAEIRNIHAFDNPAQLQVFAGLDSSIYQSGQIDLAGRMVKQGSPHLRWALIQAAKACARFSPAFKAYLKTKLE

SEQ ID NO: 336418 - protein, 349 aa, unidentified
MLADELDYVVGVDTHLDEHVLAVVAAPSGAVLARRAVLANARGYVAALRFAREAASGSRVWAVEGTGSYGAGLARYLADRGETVLEVSRTPRAERRLRGKDDSLDAARTARAALASETLALPRSGQRREALRLLLVARRSAVDVRREALGQLRGVIVTAPDQLRQELRELPVGRLLERCSRLRRSSSASADELANRLVLRSLARRIEAATLEAAELERELLGHVRALVPRLLDEPGVGPIVAAQLIVTWSHHGRVRSEAAFARLAGVAPVPASSGQTTRHRLSRGGDRQLNRALHTIVLHRRQHDAKTKDYIAQRIAEGKTRRDATRLLKRYLARHLYRLLQQTEPLMT

SEQ ID NO: 336419 - protein, 353 aa, unidentified
MAVKYVALDLHQASTSISIRDVRGRVVRREVVPTSAARILEVIDSAGGTIHVTLEEGTLSQWIYDQLISRVARVIVCDPRHNRLLAAGNKSDRIDADKLSDLLRLGALRSVYHERSAVSALRELVRSYNTLVEDTTRVMLRVKAIFRSRAIDCSGIAVYHPKNRARFLAALSDRGARLRAEHFYAQLDGLLAVRAQARHQMLEEAKCHPAVRLLRSVPFIGPVRAAEIVAMVITPERFRTRRQLWPYAGLAVTTRSSADHRFDHGTAVRSGKTINRGLNRNFNRTLKKVFKEAAASAVCSPGPLHDCYERLIARGMRPQLARLTIARKIASIVLAIWKKGVPFDPAILNAQNA

SEQ ID NO: 336420 - protein, 573 aa, unidentified
MRGQSGFFEIDERLKELSAKGDDLERLNAIVDFEAFRADLAKAVPRSDGSKGGRPPFDHVFMWKVLILQASHSLSDERAEFLIKDRLSFMRFLGLGLSDAVPDANTIWTFREALTRAMIGGKPAIEVLFGAYDTALRKAGFLAIGGQIIDATIVAAPKQIPWAGGLRPALWQSEVAQRTTLEATMELVTDRPETSTAIRSELGAIFVSLELSRSSWLITSLSPGNGETLSKHVVRSGDTAGLLTRFARLMEKAQTRTGLCFPIIVIQEAGLDGFWLHRALQAERIESHVVDPASIAISRRRRRAKTDKLDGETLVRALLAYKRGEPRVCAMVKAPSPEEEDHRRISRERKVLTNERVQHVNRIKGLLFAQGISGYEPLRRDRRERLEMLLTGDGRLLPDHLKAQIGRELDRLELLLEQIKSVEVERDKQMAAARSAATPAPAAMLLHVKGIGPEFAAVLWSEGLFRHFDNRRQVASYAGLAPTPWQSGAVDREQGVSKAGNPRLRTTMIQLAWLWLGHQPHSAATRWFRERVERNGGRLRKTMIVALARKLLVALWKYVSAGVVIEGAVMKAA

SEQ ID NO: 336421 - protein, 448 aa, unidentified
MSLDRSVEQEPQFAAFVGIDWADQKHVWSLQGAGSQKRESGELEHAPEAVEVWVAQLCQRFAQGPIAVALEQSRGSLVFMLSKYERLHLFPVPSTMAGNMRDALYPSGAKDDPRDADLLLDLLLKHRDKLRRLSPDTEATRRVQNLVEERRKLVDEKTEQINRLTSHLKIYFPQMLDWFDRLDREAACALLERWPTLEELQKVPPAKLRTFFGKHHCRDQEVIERRIVGIRQAVPAIRDRAVIEAKSAVVKVITQLIRILVQGIAELDRKIEEEAAAHPDFFIFNSLPGAGPALAPRLLSAFGSQRARYGSAQEVQAYSGIAPVIERSGKKKWVHFRWAAPKFLRQSFHEWAGRSITQSQWARSYYEQQRQRGKGHHAAVRALAFKWIRIAFRCWKDSVAYDESRYQATLVRRASPLGASMVASTLAQRCEIFVNIRRKIRAGPPTNC

SEQ ID NO: 336422 - protein, 388 aa, unidentified
MNVGADKSEPLTAIHTDLGAIFVSLELSRSSWLITSLSPGGGEKMSKHSVPGGDFAGLMERFAQLQEKARLRTGQSFRIIVIQEAGLDGFWIHRALQNEGIESHVVDAASIATSRRRRRAKTDKIDGETLVRALLAYKRGEPRVCAMVKAPTPGEEDRRHLCRERKALTAERVRHVNRIKGLLFSQGISGYQPLRRDRRQRLEELQTGDGRAFPQHLKALVNRELDRLELLLKQIKTVEAARDALLAVGQTAKPAPAAMLLDIRGIGPEFAAILWSEGLFRHFENRRQIAAYAGLAPTPWQSGAVDREQGVSKAGNPRLRTTLIQLAWLWLRNQPRSALSVWFHERVSRNGGRLRKTTIVALARKLLVALWKYVTAGVVIEGVTMKVA

SEQ ID NO: 336423 - protein, 310 aa, unidentified
MQDTIGIDISKDTFDIYRLSDRRHERFGSDKAGLAALRRWIGKAPVRIVYEATGRYHRDLEAVLGAAGHDLVKVNPTRARRFAQAVSQGAKTDRVDAAMLARMGAVLELDAKPVRSETMHEIRELHIARRALNKDRTACRNRLEAARNKVVLAQLRARLRQVDSQLEQIDTELARLIAEDPALARRQEILCSIPGIGAVTAVAMIVEMPELGMMEPKEAASLSGLAPITRESGKWKGRSKIGGGRRGVRNALYMPALVAIRHNLHLAETYRKLVDAGKPAKLAIAAIMRKLVILANALIRDDRTWTKTAP

SEQ ID NO: 336424 - protein, 339 aa, unidentified
MINTNFFIGIDVSKPYFDASLMTVISHVKQAIQSARFENTASGIKTFEKWLKFHKVTFNPDTLVVIENTGIYHRLIWSFCSNKHVPIHIGNAAHIKWSFGIARGKNDKIDSVRLCKYAFKESDTLKATEALDPQLLHLKDFISARTKLLKQATGLSVSIKELGNVNEKSHQKLIEKALKSAIDGIAKSIKNIEEQIRKIIKENSAFQRNYNLLTGIPGIGHVTAVYLIGCTANFASNPSGKQLACYAGVAPFEHSSGISVKGKTRVHRMANKDLKKLLHLCALSVIQHNMEFKNYYQRKKDEGKHSMSILNAVRNKITLRIAAVIKTQQPYKSNYNIAA

SEQ ID NO: 336425 - protein, 356 aa, unidentified
METAYDGRQVAGMDLHRRRPVLVRMTGDGRRLGTVRITNSQEELRREIARAGKNPQVVLEATYGWYWAADTLAAAGAEVHLAHPLGVKAFSYRRVKNDERDSADLADLLRMGRLPEAWIAPREVRELRELTRYRHKLVHLRTSCKDQVHGVLAKLGVEVTCSDIFGKAGSQWLNGLGLPQPYSGKVTSLRHLAGELTTEITMLGEVIADLLAGDRGYQVIQQLPGIGPVLAAVIVAEIGDVTRFRSPAQLCSWAGLTPRHRESDVKVNRGHVTKQGSRLLRWALIEAIQRIPKDSVIGGAKDAIIARRGKEAKNIAKVAAARKLLTLVFYGMRDGQIRCLSRPRQEPPAPQTARAA

SEQ ID NO: 336426 - protein, 413 aa, unidentified
MTWSLLMAAVMIGVDPHKGSHTAVAIGVAEEPLGELRVRSSASQADQLVAWAAAWPERTWAVEGAGGLGHLLAQQLVTAGERVLDVQPKLGARVRLLSTGATNKNDPNDARSVAVAALRSATRRAVTADDHATVLKVWSKRHRDLGRARNQVACRLHAVLCELVPGGISKEITAAKATAVLEQAEPSGAVEAARCELAAEFLEDLRRFDVQMRDTRKKLAVVVRAAGTTVTEIFGVGPVVAATVIGVVVDVSRFPGRDHFAAYNGTAPIEVSSGNRKIYRLSRRGNWRLNHAIHMAAVTQIRHRHSDGRACYDRKLAEGKTHKEALRSLKRRVSDAIFARLQADARRAAAAAAVEGPGGQPGNDSVASAAGLHPEHRLFGQATPGPESTLRPATVRRRPVAPKRISKNTPSTP

SEQ ID NO: 336427 - protein, 361 aa, unidentified
MKSTTVIAFDQHAATTVAAVLLPGHRAPALQTLASDSPTILKFVERLRRTAPLTCCYEAGPCGFELQRALRARDIRCDVIAPALIPRRAGDRIKTDRRDAGQLAVLYRAGALTAIHIPTEQEEAARDLLRCREDIRADLLRARHRLSKFLLRHGRRFTATKKAWSKRHAVWLRAQTWPIAALDQTHRAYLRAVDEVLARLRDVEQELRTLLDLEPLQPRVQRLRCFRGIDDLTALTIAAELGDPRRFPTAPSTMAFVGLVPSEHSSGTKRAQGGITKTGNAHLRRVLVESAWHYRHHPFVSATLRARQRGAPADVIARAWAAQQRLHRRYQRLAARGKPKQHIVTAVARELTGFVWAALTQ

SEQ ID NO: 336428 - protein, 320 aa, unidentified
MDAVLGIDIAKAKFAAALLRPDGKVRHKSCANTPTGFADLAAWLLRQQVTHVHATLEATGTYGEALALWLHDAGHLVSVVNPSVIHAYARTQLTRSKTDRIDAELIARFTASHQPAPWTPPAPEIRQLQALVRRLDALQGMRTQELNRLASGVTVAEVRASIEMVIASLDAQIAHVHQLIRDHLDRHPGLRAQRELLITIPGIGEATAAVLIAELFDKRYTSARQAAAFAGLVPRLVESGTLRGRTRLSKIGPGRLRKALYMPAMTALRWNPTIRAVRARLHAAGKPPMVIIGAAMRKLIHLAYGVLKSGRAYEPTCAHP

SEQ ID NO: 336429 - protein, 322 aa, unidentified
MAMLSFAGIDVSKDRLDVMVLPEEQCSSVSNDPTGWAKLVEQLRGSSIAAIGLEASGGYERGVMRSLLAAGMSVRQVNPFKLRQFAKASGVLAKNDPLDARMIASFVAIMPTRPAQPRAPALERLVEMLAVRRQLSAEKVAAENASRLLENAMLQRLSRRRIARIAADIDMLDERLVEIVVADAALAHRCRLLTSMPGVGPVLACTLIALLPELGRMSRKQVAALVGVAPYAFESGKLKGKRCVWGGRAPIRHVLFMAAMSASNWNPLLKRFHDRLAATGKLPKVVIVAVMRKMITTLNAMVRDDVVWADRHRGQHTLPTAR

SEQ ID NO: 336430 - protein, 542 aa, unidentified
MGKGSGTTRVDRRRDARRERLRGLLPRDGAVIGIDLRDEKQAIAVVDHDVRVLARKTVRVKAFRLGEAVAQARVRGFTAVAVACEPTGPRWLQVQRLCAERELPLVCIQPLVSHIARQQQDYTTHKTDECDCVMIARLAIELHCYIPEELDEAWAQLRHLGRRRAQLITSATASVQRVRDFLSVAWPVAPEACARPFDSVTWLAAMQVVTSRCGGRPEKLAAIGLAEFTALVRQAVAGWGGQRPASLVCRAVFAALASTEGVVVSHRRALLRRCADELGDLQRTRAQLRAVEADMVAVLGELGLSRLADIPGLTAVGAAAILAETGDPRRYDSSSSLARHAGLSPSGNASGAFEGQARISRRGRPGLRLTVWRAIWPLLIHNSVMAAKYAAMIAAADAAAAQAAQAQSGTGSRQASAAAAAQARRARARVACAASLLRWIYSMADCDAGWDPDVASGAASCQHAPAARRRPPEQSFAASIRTGALDLLPDGGERARIRPEDHLADNPGQLSPGRPDLLTSPVERCRSRPARTRGRAQPACTT

SEQ ID NO: 336431 - protein, 329 aa, unidentified
MDHFAGLDVSVKETSICIVDDTGRIVREVKVASEPEALLAVLKNPAYHFKQIGLEAGPLSQWLYGALAEAELPVVCVETRHMRAVLKAQINKTDRNDARGMAQMMRVGLYRPVHVKTLRSQQLRMLLTHRKLLQSKAIAIENDLRATLRNFGLKVGMVGTVKFEARIKELVENLPDLSVLVEPLLTVRRVLREQTAILHRRLLAIVRDDDVCRRLMTIPGIGPVVALTYRATVDVPARFKNSRAVGAVFGLTPSKYQSGESDRTGRISRCGDDMMRSMLYEAAQSLLFRSAKWSWLKAWAMKIARHRGMKKAIVALSATVGRDYAPHLG

SEQ ID NO: 336432 - protein, 375 aa, unidentified
MSNVRFIGLDVHAETIAVAVAEPAGEIRSLGVIPNRADALRKLVHKLGPVDQLRICYEAGPTGYVVYWQLTELGVQCEVMAPTLVPVKSGDRVKTDRRDALKLARSYRGGDLTPVWVPDAAHEALRDLVRAREAAKKDQLRARHRLSKFLLRQGRRPPTGVRAWTVRHRDWMKTLQFDQPAHNTTLVDYLHEVEHQADRLSRLERALDSAISGTSLRWRAVIEALQALRGVAQITALTLVTEIGAFSRVATPRQLMGYSGAVPCEDSSGERTWRGGITKTGNAHLRRVIGEAAWAYRHRPAIGAGLRHRHKALSPEVKAIAWKAQHRLYARYRHLIARGKCPPEAVTAVGRELLGFIWAIGTHVETTARTGSAAA

SEQ ID NO: 336433 - protein, 359 aa, unidentified
MTETRTLPSSVSEPTLYVAFELGKKTWNLAMTSGFGIAPWLRSVASRDWRSVEQALAQGRVRFGLPAAVPVVSCYEAGRDGFWIHRALEARGIRNRVVDSASIEVNRRARRAKTDRLDALKLVTMLVRVCYGEKKVWNEVHVPSVVAEAARQVSRERTALTQEQTRLTNQLRGWLATWGAALPRRRTSAWWTRVRDWAEAPLPVEVQARLARAEARLTVLEAQVAELDGQQRAAVTTAAPASALRPLVRLKGIATTGASVLLDEGLVWRAFRNRRQIGGLLGFAPTPYDSGDSVREQGISRAGNNRLQAISIQLAWNWVHWQPLSVLTQWYRAHFGRGKRARRIGIVAVARKLVIALWR

SEQ ID NO: 336434 - protein, 345 aa, unidentified
MKPQQQYVGLDVSLEQTSVCVVDDAGATIWRGKCSSTPESIHAVVAKHASEAVRIGLETGQLSTWLFHELRARQLPVICIDARHAKAALSLQINKTDANDAHGIAQIVRVGWYREIGVKSMDTHAIRAMLVARAQLVTQKVKLMNCIRGLLKTFGIVLGGGKGRRFEAMVREQIAENPMLISILEPMLIVLLTTREQLAVFDRLVRQRARADGDVRRLMTAPGVGAVIALAYTTTVEDPARFKRSSSVAAYLGLTPRRFQSGEMDRTGRISRCGDAMLRTYLYEAANVMLRRSTRPSQLSIWGRALSERIGARKSLVAVARKLAVVLHTMWRHRMEFRFEQAAAR

SEQ ID NO: 336435 - protein, 306 aa, unidentified
MGLYAAFDLHANNSQPGIVNDEGKRIHRKKLLNEPSSILQDLEPYRTEIMGIAVESTYNWYWLVDLLQSAGYETHLANPAAIQQYSGLKHVDDRHDAFWLAEMLRLGILPEGHICPREYRALRDLLRKRGHLVRLRTSLIISLQNTITRNCGIQVDVNDVKILKEDRISPLLKGNEDLELSGSVSKESIDFLTKQIKKVEKTVEKRVALSAAYKNLLRMPGIGKILGLTIMLETGEIGRFAGVGNYASYCRKVNTKWSSNGKSKGKGNKNNGNKYLAWAFSEASELARRFDAQARIVIVADRAASH

SEQ ID NO: 336436 - protein, 334 aa, unidentified
MGKVTTVGIDLAKNVFSIHAVDESGAVIFRKTVTRSRLLSVVGQWPACLIGMEACSGAHEWARRFQVMGHAVRIVAPRFVTPYRRSGKNDGNDAEAICEAIQRPSMRFVPVKSVEQQAVLTLHRVRQGFIEERTALINRTRGLLAEFGIVLPNRAIEVRRGAAACAERLPELARRAVSDLIAHLLVLEERIGSYDRELESLARANEAATRLMSIPGVGPVTALAAVATVGHAHEFANGRQFAAWLGLVPRQWSTGGRARLGRITKRGDAYLRTLLVMGARAALQMAARRHDKLSRWAMALKERCGYHKAVVALAAKNARIVWALLTRGTAFRSA

SEQ ID NO: 336437 - protein, 353 aa, unidentified
MRMYYVAMDVHQASIVIVVLNGAGKVVMESIIETGAETVRGFLKQLHGKVYVTFEEGTQANWLYDVVRPLVTEVVVCDPRHNKLLQSGNKSDRVDARKLAELLRNGSLQAVYHGDKGQRTLKELVRNYDCLVGDTTRVMLRLKAIFRGRAIACGGHEVYRSDRRRQWLGKLSEPGVKQRASFLYEQLTALQGLRHEAKLVMLKEARRHPAYQLLLSIPRLGRVSVAQLIAVVGTPFRFRSKRQFWAYVGLAVVTRTSAEYVLVNGVVRRSSRPVATRGLNRNHNHLLKKVFKSAATSACVSGPFKAAYDARVAQGMDPSLARLTIARQLAAVTLVVWKRGEQFAPERMKQPVA

SEQ ID NO: 336438 - protein, 323 aa, unidentified
MSSFVGVDIAKNTFDIATHLPNGKHKTKAKLTNDPKGFREFEAWLEKQVEPSALIVMEATSVYHLELAEFVYNKGYRVCVVNPATTKAYADSELRRIKTDKSDAKLIADFAREKDQKLQPWAPEPLKYRQLKAMVRRLDDLQEMEQMELNRLDVSDEKVKDSINSVLRHIEKEIAETHKAIKKHIDDDPDMRRMRDLIVTIDGIGQKTLERLLAELGDLRKYTDPRQLVAAAGLNPKLQESGKFKGHTLISKIGSARVRAGLYMPGMVALKHNKVIKAMKERLKANGKAPKQIICAAMRKLLHFIYGVLKSGLPYDPEFALAR

SEQ ID NO: 336439 - protein, 426 aa, unidentified
MPRTIGLDLSKHTAEVAVLVPGTSLPRRWRFAATPASIRAFAARLEPDDQIVFESCTNAFAFHRLLCQHARKVVVSNPLKTRIIAEAKIKTDKVDAEVLARLLAADFLPTVWVPDRVTDQLRHLVFHRQGLVTQRTQGKNRIHAILHRNLIVPMMTDLFGKAGRQFLAGADLPEAERELLDADLRTINFLDTEIAAAERSMAAAVHQDAQVQRLVTIPGISLTSAAALRAAIGDVRRFKTAPNLVSYFGLNPSVYQSGLKAYTGHISRRGRSHARSVCIEVAHVLARVPGPFHAFFQRLRRRKPYNVALTAVARKLVVLVWHMLTHEEDYRFAPPARTRDKINRMRRLASVPDRTTAARPDPARDRDLAVQAQLEYEQFIASRFGLLGPEAIQHPHRTVGSTPSEVKKRTSTKKGQGPSGKPHIGA

SEQ ID NO: 336440 - protein, 336 aa, unidentified
MNTVCAAVGIDVSKKKLDIALFVDGKTKSKVVENSAQGYQSLLEWLTKSKLPFTSMHACLEATGVYSEPLALALYEAGILVSVVNPSCVKSFGQSENIRNKNDTVDANLIARYCAKMAPALWVPPPLEQRQLRAWSQRIQSLKDIRQQEENRLEALNFSGMQDVAQHVEQHIGWLSGEIKKLEEDIDDHIDRHPGLKQDKELLTSIPGLGASTAAKILGHVGDIRRFDSAKAFAAFLGVTPKQRSSGTSLKGRTNISRTGNTALRAALYMPSLVARKYNPILNKFAERLASAGMAKKAVIGAVMHKLAHQIYGVISNNKPFDPNYLYKGLAIQDGI

SEQ ID NO: 336441 - protein, 334 aa, unidentified
MDFKNFIGIDVSKGTFDIALLRESAANSIVSAQYGNDFNGLVNLEEFVKKQGLNMDETLFCMEHTGIYCRLLSHYLVENKYHVWLEMPVQIIRSLGIQRGKNDRIDAVRIAQYACLKKDKAVLWQPPREIVNQINDLLTLRDRLIESRKSLKQPIKEFIDAGFKDTAKLIENMCCNTLKALDKEIEQVEKELYKIINKDSNLKKLFKLATSVPGIGKITALTLLYFTNEFKLYTNANQLACYCGVAPFERTSGTSVKGKSRVSSFANKRLKKLLHMVAMSTISCDKQLSVYYQRKVNEGKNKMLVINAIRNKVLHRLCSVIKRGTPYQVEYQIA

SEQ ID NO: 336442 - protein, 345 aa, unidentified
MKITTIGLDLAKDVFQIHGVDGRGKRVVSKQLRRRQVLGYFAQLEPCLVGMEACAGSHYWARELSALGHEVKLMAPQFVKPYVKTNKTDAADAEAICEAVRRPNMRFVPVKDVEQQALLSLHRARAGFVKSRTAQANQMRGLLSEYGVVLGRGIRQVRVGVPAIMSEAQSALPEMFRKLLGRLYEHLVVLDDAVAALESEILGWHRSNADSQRLAQIPGVGVLTATALVASIGDARSFHNGRQLAAWLGLVPRQHSSGGKPLLLGISKRGDAYLRTLMIHGARAAERVAQRGRCATDRWSVDLGRRRPRNVVFVARANKNARIAWALLAHQRDYDANYQSMAAAA

SEQ ID NO: 336443 - protein, 337 aa, unidentified
MKRYLGVDLHRTQFTVCTRLENGRTYLRQWPIRELKLFAAQLSKEDEVAVESTGNTRLFHDAVVEHVAHVAVVNPSQFKLISQSVKKTDKNDAERLALYLAKGLLPEVRMKERSQREMSHLAQTRDLLVKQRSALKAKINNLLSAEGINLKREALSSNKALERVLGLPLSPLMLAEARVLVGQIRGLNQSIAELEELIEEEGPKLAGHENLMSIKGIGPVSAAVLLSVIGDIRDFSDPGKLAAYLGLVPRVQNSNETEHSGRITKQGNKLARTALVQCALVAKRYSSFLQNFYQRIQRRRGGGKANIALARKFLGVIYHTLKNNWVFEDFPNFVLAS

SEQ ID NO: 336444 - protein, 358 aa, unidentified
MTTMPQPAPTQVTVGVDTHADIHVAVAKDGFGRRLDAISVPTTPAGYAELLGWARRLGQLDAWGIEGTGSFGAGLARFLRAEDQVVVEVNRPDRQTRRRRGKSDPIDAEAAARAVQAREGSIPKAGDGQVEMIRSLRVARASSIKARTQAINALKALVVTAPAELREQLRGLSTVRLVQTTAALEPGAVTTPLAAAMLGLQTLGRRYQALSAELTTLDAELDRLTRAAAPKLRARFGVGADSAGALLVAAGDNPERLHSDAAFSMLCGASPIQASSGKTRRHRLNRGGDRQANAALYRIVVARLRHDQPTKDYLARRIRQGKSKKEAIRCLKRYVAREVFAVLPRMSQRLPGHPANAT

SEQ ID NO: 336445 - protein, 355 aa, unidentified
MQSNKISFKGQNIYVGIDVHLKTWHVTTLTESGYKYSFAQHSDAKELFDRLNKKFPEAHFKSAYETGFCGFSVHYALTAQGFENIVVNPADIPTTGKEKAMKTDAVDSEKIAWSLKRGELTGIYIKDKCYMDDTNLIRLRQRFIRDLSRQKNRTKHLLYTQGVAYPERFSKKGTHWSRNFMKWLREDVELLSDEKRTLMLLCNQVENIRKDILAITREIRRLSTADKYKENFSLLSSVPGFGLITSMSILTEYDNNLMRFPNERKFVAILGLIPTCHDSGEKKVNGVKTFRGNKQLGLLIVEASWVAIRRDYQLGCYYTNCCQSMNPQKAIIKVARKLACKAYAVMKTKKTYVLS

SEQ ID NO: 336446 - protein, 405 aa, unidentified
MDVVYERCCGLDIHKKIVVACLITPGPDRKPTKEIRSFGTMTADLLELSDWLLAAGCTHVAMESTGVFWKPIYNLLEDRFNLLLVNAQHIKRVPGRKTDVQDCEWIADLLQHGLLKGSFVPERAERELRELTRYRSSLVRERSAEVNRLQKTLEGANIKLASVLSDITGASARRLLAALLNGDTAARLDELVDPRLRDKLPELQRALAGQFGPHQRFLVAEQLAHIAELDARIERVSGEIGERLRPFDPQIALLDTIPGVGRWTAEVILAEIGTDMSRFPTVRHLVSWAGMCPGNNESAGKRKSGKMRKGSPWLRVALTEAAYAAGRGTTYLSAQYHRLITRRGKSARPLPSATPSSSSSTICSLAVCPSRTSASSTSTSVSAPHSSDASSVACKRWATRSSLHP

SEQ ID NO: 336447 - protein, 404 aa, unidentified
MWYVGLDWADTHHDVEVLDEAGKRVGVRRFPHSHDGLNQLKQFVLGIATSPEQLACIVETNHGLLITFLLEAGIPVYPVNPKTANHLRKAAGAKTDQIDAHLLAKMGRLDLGELRRLEPDSAIVQELKTLTRDQDALIQTQTRLVNQLTACLKEYYPAALQLFAKVQQRSTLVFLQAYPTPQAAQAASLEEISATLHSGKHTNPTQVAPKIFEELHRPHLVASPVIVRAKSRLMLSLVKQLLVVIEDIASYDKEISPLFLTHNDQEIWSSLPRAAKRLAPRLLAEWGDDRTRYVDAGSVQALAGTAPVPFQSGNYAKAHKRFACLKPLRNALHQFAWQSTLQEGWAREYYQRKRAEGKTHSMAVRSLANVWVRIIYRMWVSKTAYQTATFEAAKLAHAPRQRVA

SEQ ID NO: 336448 - protein, 343 aa, unidentified
MDHYVGIDVSLELSSLCVLDATGRIVREAKVPSEPEALIGFLTGLALPLARIGLEAGPLSQWLHAALIQAGFAAVLLETRHVKAALSAMIVKTDRRDARGIAQLLRMGWFRSVHCKSPPAQEVRALLMARKQLQAKMRDVELSLRGLLRGFGLKVGEISKGQFAARVRTLVSGHTMLERVAEAMLRAREALRAEFSKLHRAMLAIVRTDEVCRRLMTVPGVGALIAVTFTSGVDDPGRFARSRDVGAHFGLTPRKYQSGETDITGAVSRVGDVMVRTALYEGAHILLTRATRFSALKRWALAVAKRRGMKRAKVALARKLAVVLHRMWVDGTSFRWGRESALA

SEQ ID NO: 336449 - protein, 424 aa, unidentified
MKVTYQTCCGVDVHKSFLVATIIKTTGGIEPYYQKKRFSTFNNSILAFKQWLLDNVCRDVCMESTGKYWVPVFNLLEDEINVVIANPKWVKAVKGNKDDAKDSKWIGDLFRLGLVKGSYIPCKTVRVLREYSRYRYKLVSCRSSEKNWYQNALTVCNVALDSVVSDIFGKSSTSIIDYLLEQPDTSINHEEIASKLLRSLKSKEDAVIESIEGYQMTDAQKYRMRLVRAHMDYITAEINDVDKMIENMISSNADFENAVQFLCTIPGVKRDSAVTIISEIGTDMSQFSSSKRLCCRTGLTPGSNESAGKKKSVRITRAGVYLKPALVQCAHAAVKSDKSPYYKKKYESLVKRRGKKRAIIAIARMILTAIYQMLSTGEQWNPSDLYKIDMPVALVEKQKAKAIKQAKKLLQREGLLSPDEPLAS

SEQ ID NO: 336450 - protein, 322 aa, unidentified
MTNQDHRVGGIDSHKDTIHVAVITAIGQPVTDREFPTTVAGYRRAVAWLIEHGPLSAVGVEGTSSYGIGITTELLAAGIRVVEVNRTRAAEKRKQGKTDPLDAYRAARSVLSGEASTEPKNPSIEPLRALTIARRSAVKSQQAAWRQIGSLLVTTRPALRDRFRDLPETKLIATLRDCRPDQIHDVDDADTLYALRTLARRYLALQDEITALEERMLRRATRANPALMAIKGVGPAVGAQLLITAGDNPDRLRTSASFAALCGTAPIPVSSGRTDKHRLSRGGDRQANAALHHIVKVRMSYDQRTRAYRDTRLANGWTTKEV

SEQ ID NO: 336451 - protein, 297 aa, unidentified
MDYFAGLDVSVKETSVCIVDDAGKIVREARVASEPEALLQVLTNTIYRLKRVGLEAGPLSQWLYSVLAEAGLPVICVETRHMRAVLKAQINKTDRNDARGIAQMMRVGLYRPVHVKTLRSQKLRMLLTHRKLLQSKAIAIENDLRATLRNFGLKVGIVGTVKFEARIKELVANLPDVALRVEPLLVVRRVLREQVGILHRRLLAAVRDDDVCRRLMTIPGVGPVVALTYRVTVDVPARFRNSKAVGAVFGLTPAKYQSGENDRTGAISRCGDEMMRMMLYEAAQSMLVRSTPWPSDA

SEQ ID NO: 336452 - protein, 325 aa, unidentified
MSDSVTVGIDVSKLTLDVHVSPAQLRQTLSNSDAGFEELKTLLSMQQVSLVLLESTGGYEDAVVCFLQSLGYDVSVINPRQARDFARSMGRLAKTDRIDAELLAQLASVIDSRPDRARFVKKITDDRRRKLACMVTRRRQVVNMISTEQQRKSAASVYSTESINRVLSFLRSELKSIDADISLHVRSHFADISGLLASFKGIGPATIGVLLGEVPELGRLNRRQISALIGVAPFNRDSGIMRGRRTVWGGRTMVRNALYMPTLSAVRFNPVIREFYTRLISQGKPRKLAQVAAMRKLLCIINAMLSSGTMFNPALHLHSVQEAQQ

SEQ ID NO: 336453 - protein, 382 aa, unidentified
MQASTTGTPTAEHCGTIFVAIELSQKSWLLTVHGPDRDRISRHKLEGGDHAGLLALIVRTKARAAEKLGSVPEVVSCYEAGYDGFWLHRLLEAAGIRSFVFDAASIAVEQRTRRAKTDRIDGELLLRTLMAYLRGEPRVVRIVRVPSVEAEDARRASRERDRLITEQTAHTNRIKALLRLCGMAVGNPRRRDWLSWLARQRDWQGQPVPPHLLAEVTREHARLMLMRDQLAALEEAQAAQATAVPAPTAERQKLLLNLKALGPAFTATLVNELFYKDFRNRREVASYCGLTPSPWKSGGIDREQGISKAGNRRVRHKAIELAWLWLRHQPDSALSRWFRTRTANAGKRAKRIAIVALARKLIVALWRYLTTGLVPEQATMKA

SEQ ID NO: 336454 - protein, 354 aa, unidentified
MRIIGCDFHSRYQQIAMLDTETGEVVERRLEHENGEARAFYASLPRPVRVGIEATGYTQWFERLLQELRHELWVGDAAEIRARAVRKQKYDQRDAQHILGLMEQNNFPRIWMPSLSERDLRQLLIHRVRLVQWRTRIQNQLHAVAMGQGLCRKKKLWTTRGRQELESLPLDRWASRRRRELLELYDRLNQPIEELNQAVQREAHGNASAVRLMTHPGVGPMTSLAFVLTMGPASRFARGKKVASYLGLNPSENSSGGHRRTGAISKQGSSLLRWLLVEAGQTAARRDADLHRMYQRVKYRRGSQIAKVAVARKLAVRLYWMLRNQSDYAPGKSAAVPVPGSSGSAVMSGSASGR

SEQ ID NO: 336455 - protein, 428 aa, unidentified
MNRLTKNIAQITPGTLFIGIDVGKKRHQVTIMTEKAKVVARFGIDATREGFDRLVNEALSHKERLRGSALLFGSEPAGHYWRPLAYYLEGKGYTFKLVNSFSVKRYREGMDLARIKNDRRDADTVADMLRSGRFIQTVLPYGVHAELRRTYRHYCRLRAELTQKRNLLIAAVDSLFPEYRRVFKDILGKTSIATLRACPAPAIIRRLTAEEWESLVRSHYQGKAFRERKKVNLLYELSQDSVGIPVEGQSLHREISMLVESISYVGAQMQALERDLLFHLDKVNGHELLLAIRGIGIITAAGILAEIGDIQRFGRIKGPVKLAGINPTEKQSCEYRGRSVMTKKGQALLRCALYSAAVGLVLNNKAFHEYYYSLRKREVRPLSRMKAIGAVMNKLLRVVYAILKKREPFDEAKVFPKSEQKEVVLQIA

SEQ ID NO: 336456 - protein, 412 aa, unidentified
MTEENFAWFAGIDWGSERHQACLVDAQGCIVGEREFPHGGAGLADLCDWLLSAGGAADTVAVGIEVPHGPVVDTLIDRGFVVHAINPKQLDRLRDRLSVAGAKDDRRDAYVLADGVRTDRRLFRRVHVTDPRLVELRAWSRLAEELTEGRVRLSNRVHHELWRYYPQLLQVSDDLTEPWVLDLWDLAPTPAKARRLRAAPIEKLLKQHRIRQTSADTVLRILREPAIKVGKGVAEAASVHLRSLFTRLRVVNRELRRAGPQLDALCAAIGETDADSGDGLQPRDVMILRSMPGIGRINLATLLCEGSGPLSRRDYPALRTLCGAAPVTKRSGKSHIVIMRYASHVRLRNVVYHWARVATQHDPKSRDRYAALRRRGKSHGRALRGVADRLLGLACVLLERQTPFDPDFAQAK

SEQ ID NO: 336457 - protein, 367 aa, unidentified
MSEHTLYVGLDTDKRGIDVAVADPLPGGEVRYWGRIVNDPVSLDHLMKRLTKGGRGLEVCYEAGPCGYAIHRQLAGKAGVRCRVVAPSMTPRRPGSRVKTNRRDALMLARLLRAEELTAVWVPDATHEAMRDLVRLRGSATEDLRRCRQRISGFLLRQRIDYAGKPWTKKHRTWLGQLEFEHQAHRLMFTVMLQTLDQAQAQHDQLVDHIAETVAGWSLYWLVEALQVLRGFRLINAVTMATEIGDPRRFAHPRQLMAYVGMVPSEHSTGDRVCRGGLTKAGNRRVRTAVIEAAWTYTRPIKSPAARCHDAALVAIADKARHRLSRRYRQLQARGKKAPVAATAVARELLGFVWAIAHAAGAQQQPR

SEQ ID NO: 336458 - protein, 321 aa, unidentified
METVEFDRVISRGCGIDVHKKTVVATIDGEGLKRSTREFGTFTRSLTELKDWLLENGITHVAMESTGVYWKPVYHVLEPSGIVVWIVNARHVKNVPGHKTDKKDSAWLCKLLLAGLLKPSYIPPKEQRELRDLTRYRKKLIQDIASNKNRIIRILEDCNVKLSSVLSDTSGVTATKLIDKLCDGKQITMQDIEAVYHKKIEATKEDLWEACNGIVSEHHIYLLQTIRANNRHLDTLIAELNEKIKKALSPYENALERLREIPGLSRKTVEDLIAEIGLDMEVFPTAEHLCSWVGVSPGNNESAGKKKADEPRTETNRQKPH

SEQ ID NO: 336459 - protein, 347 aa, unidentified
MVTLGADAHKRSHSLVAVDELGRQLDKHTVAATPAGHLEAWRWAQSWPERRWAVEDCRHVSRGLEKDLLSAGEVVVRVPPHMSADARRSLRERGKSDPIDALAIARTTLREVGLPEARLEEHYREVKLLLDHREDLVGERTRTQNRLLWLLHELEPGFEVASGALSRRPALKRVESLLQGRGGVVPELAGELTSRTMQLNTRIDELELQLAGMMPSLTPSLLALPGCGVLTAAKLVGETADATRFHSCAAFAMHNGTAPIPASSGNQQRHRLNRGGNRQINAALHRIAVCQIRRSGRSREYFQRRLAAGNTKREAYRALRRRLSDEVFRLMLNDQRTRAHDAHNMAA

SEQ ID NO: 336460 - protein, 337 aa, unidentified
MANAHMLSIDLAKRSFQVCATDRAGSVLYNRTISRSKLEALLREQPRCIVAMEACATSHFWGRFAGAEGHEVRLIPPIYVKPFVKRQKNDAADAAAIAEAAVRPNLHFVAVKSAEHQARAVAYRTHQCFVSQRIQTINALRGHLAEFGLIFPQGVPHLKEIRTAMADDDVDVPPGIREIAGLYLEHIDTLTAKIDELSLRLREAMAVSAELRRLCTVPGVGPVTAGAIMAFAPDLRTFDSGRNFAAWLGLVPKQRSTGGKSRLGSMSKMGQSDIRKLLVVGAMSRIRWIVRKGVLPDNWLGRMMARRPRMVVAVALANKMARTIWAMMTREEDHRLA

SEQ ID NO: 336461 - protein, 349 aa, unidentified
MTDQRISYCGRIVYVGIDVHKETYTVTCVCNKQIVKTATVQADPAALAASLPRWFPGATLYSVYEAGFSAFVLHRVLTKAGITNLIVNPASVAVAANDKVKTDRRDATKLAIDLADGRLRGIYVPTEAEELARLLPRTRAQIVKHRATIARQIKAKLHQFGLIAPSSRRLISRRYLREMAAWSLPPELSVRLTLLAEQWRFATRQLIEMRRLLRDQAQAQEAIEKVYRSVPGIGEVVARTLATELGDMTRFANERALFSSTGLTPSEYSSGASVRRGHMSRQGSSRVRHWLVETAWRALPRDGVLKEMFDRIAATRGKKRAIVAIARRLTGRIRACFRQGTTYAVGTYA

SEQ ID NO: 336462 - protein, 357 aa, unidentified
MVDFTPEAKSSGKGVTSPYHRTEHCENIHEYRSDNKVGVIGIDVSKEHLITSKGRVRKFTNNEEGYEKILSMKPNIIIIEPTGVYSTRPSQYFKERGVKVLQVSPNLLWKQKDVRGKKTDFYDAEKLENMVNNAREYTHNPLKELVSLYLFMKDIQIKQENRLKRTLFLVTDDEKISEERLEKFSKGDFSDVKLYQLEYTNTVLREIQVLAKTLLQTREELERVRGMIEEQVPEDHVLLTIPGVGRLAAGIIIGVVEDIKRFPSPESFVAYCGLDPVVERSGRVEIRKGISKRGNKYLRSLFYFLALTQYSRNPTLLKFHESHKDRLKGRKLYTALARKLARIVWSVWYNNKPYEVK

SEQ ID NO: 336463 - protein, 344 aa, unidentified
MEHFAGLDVSVKETSICIVDDTGKIVREVKVASEPDALLQVLKNNAYHFKRIGLEAGPLSQWLYSAFAEANLPVICVETRHMRAVLKAQINKTDRNDARGIAQMMRAGLYRPVHVKTLRSQKLRMLLTHRKLLQSKAIAIENDLRGTLRNFGLKVGIVGKLKFETRIRELVENLPDLAVLVEPLLVVCRVLREQIAVLHRRLLVIVRDDDVCRRLMTVPGVGPVVALTFRATLDVPARFRNSRAVGAALGLTPGKYQSGESDHTGGISRCGDEMMRVMLYEAAQVMLVRSTRWSWLKAWAMQVARRRGMKKAIVALARRLAVIMHRIWVDGTEFSWSRQEAAEA

SEQ ID NO: 336464 - protein, 433 aa, unidentified
MQDAQDEPLFAERVAGLDIAKAGVDAAIRVPSDSSPGRRQQETRAFGTTRKELLALADWLACWGVTKVGMEATGDYWKPVFFLLESQGLDCDLYNAAQVKALPGRPKTDRADSIWLARITERGMISSSFVPPEPVRRLRTHTRYRRHLTQARTAEKQRVEKLLEDGHLKLSSVISDIHGVSGRDMLDAVAAGQRDPRALAQLARGTMRGKIRRLEEALDCSFFTSEHAGVLAMMLAAIDHYTAQITQLTARIEVLIEPWMHQVGQLDQIDGIGIICAQDIIAEIGTDMTVFPTAAHLVSWAKWSPQVRQSAGKRKGSNSTGRGNPYLGAALGEAASCAGRTQSFLGARYRRLTRRMPKKKALVATGNSMLTIIHALLADPDATYTDLGAGYYEQRMHARRQARSHIQSLERLGYKVTIQALNPDTGELQAAAG

SEQ ID NO: 336465 - protein, 383 aa, unidentified
MGAVARTQLRETPVKQNRTCVGLDVHARSVWACTVDDDSGEMRTARISPKTAEIVKWAKALPGEVEVAYEAGPTGFGLARALIAAGVTCRVLAPSKMERPSGDRVKTDKRDSEWIARLVRLGELPVVVIPSEGQEAARDLVRAREDVRGDLMRSRHRLSKLLLRQGFVYEGTAWTAAHDVWLRSQSFDKPGVRFAFDEAYDTVLTTLARRERLDQAITSMAAEPAWSPVVSRLGCLRGVGTLTGFGLAVEIGDWHRFTGNSIGAFLGLTPSEHSSGGSRSVGSITKAGNGHARRLLVESSWHHRKPYRLSAEMIRRRDGQSPAVRARADQANRRLNQRWRTFDARKKRSTTAAVGVARELAGWCWSLAVMDEDKDNSARNRQG

SEQ ID NO: 336466 - protein, 349 aa, unidentified
MNQPVKPVVVRMGIDIGKSAFHVVGLDFAGKPVFRSRFTRERVIEFLACASPTVVGMEACPGSNWLARKAALSGHEVRIVPAQFVKPFVKSNKTDMIDAEAIAEAISRPTMRFAQPKTEAQLDLQALHRVRQRLVSNKTSVINQARAFLLEYGLTISVGATYFVRDMPSILSDDQNGLTPSMRRLLEELWQEYRSIEARLLQLRQQIESIASADDAATRLKSVPGIGQLTATAITAFAGTGTQFKSGPHLAAWLGLVPKEFSTGGKQCLLGISKRGNPYLRRLLVHGARSCVLHLDRTKDHLGAWIGRMEARGIHRNKIIVALANKLARIAWAVLTRQGAFYLRQPKQQ

SEQ ID NO: 336467 - protein, 443 aa, unidentified
MNTSHPYDLVIGLDRSDKKADLCLIDTRTGQRRAEIIVTAPEALWEWLLELRQQHPQARVGLCLEQPAVHLIPFLEAYDWITLHPINPITLQKYREAFVTSRAKDDTKDADFLADLLLTHHAKLPVWAPQDSATRAVQQLVFHRRAVVDERTALSNRLIALLKQYFPQALLLCGEDLWRPLATAFLLKWPSLQAVQKVKPTTLKAFYYLHGSRSAKLLEQRLALIAKAVPVTGETAVIGSFTLRAQLVCRQLQLVQQSVSEFDRQVAAAYATHPDRMIYASLPGAGPVLGPRLMASMGSQRQRFGAAENLQHYTGIAPVTKRSGGSCYIHRRYLCPKFHRQSFHEYAKESILWSRWAAAYYLQQRTKGSPHHTAVRALAFKWQRIIWRCWQDHKPYDEPTYEAALHKNGSPLVALFDRVELGKSPFKKTVNKLQKNVDGLPQR

SEQ ID NO: 336468 - protein, 398 aa, unidentified
MEAARGVVLGFDVGRYSHHMTAIDARTGEVVASRGVEQTEPDIREAVGPYARGGAAVVVDQPGDLSSLLLAVARDMGFEVGFITPRAMAKGIELYGGELKSDAHDSFVIADLAARIPSLVRPVPERRADVEELASLMSYDRELTDDVRRAASRIHELLLATCPALGAVYAGQRVKQRLPLAMLARFGGAGGLSAAGRGEVEGWARGQPRCGARGLAFVGSALDAVGSQGVVTTSSPFYDELLRIEAASLRSALDAREAVGARVDELLGRIPDAQVLLSMPGVGRVTAATFVSEVPDVGAFASAAKLAAYAGLAPRVRQSGRSLNSVTKPRAGNRRLKRALVLSAARSVDFCEESRAYYDRKRSEGRCHYSAVVALARRRINVMYAMLRDGKRYESRLG

SEQ ID NO: 336469 - protein, 410 aa, unidentified
MEVLYPHCAGLDVHKATVVACARHMVNGTVTREVRTFRTTTRDLLALSEWLASQGCTHVALEATGIYWKPVWHILSDGDVTLVLANAGHVKNVPGRKTDVNDATWLADLMAHGLIRGSFVPDIQTQELRGLLRTRKQFVRERSSHVQRLQKTLEDANIKLDGVISDIVGLSGRRMIEALIAGESDPEALAGLAHRRIKAPPAALREALRGRVTHHHRFLLQLHVHHIEALDAALNAIDREVDSHVEPFREAVLLLTTIPGVSDLSAQVIRAEIGGDMSRFATVGHLISWAGLCPRNDESAGKRRSNRMRKGAPWLKTTLIQCAWAATRKNGSYLQAQFHRLRARRGAKKAIGAVAASILTAAYHMLKDGTLYHDLGPDHFDRCAKTVQTRRLLTRLQRLGYAVQITPLAA

SEQ ID NO: 336470 - protein, 344 aa, unidentified
MKIVSLDVHKDASQLYAVTEKGEVILEMKVPTEPQTLRTIIGGIPGPKRVVFEEGPLSGMLSDALTGVADEIVSCDPTLNALIARNENSNDKRDARSLATLARMEKLHPVFVPPEPYRTLRSLLVYDERVQRSITTTKNRIKALCRRCGIRYSGADVYRLANRDGVLAQITEPGLRWQMQSLCRQLDLLRRERIGAHRTKGKLSRKLPIVRLLDTAPGVGPMTAQTVAAWIVAPGRFKSRSAISSYAGLGLGQGWTNWKPVGRARASKRGQRQLKRMLFVAAAAALKGKNALARRYEARIRAGWEHSKAIRDIARTLLLTLCGMWKNRKEYDDERVIIPDLADS

SEQ ID NO: 336471 - protein, 316 aa, unidentified
MSKVERAVGIDVSKGLLDVAVLPEGEFWSATNDEEGVTQVVKRLKALRPRLVVLEATGGMETALVGAAATARLPVVVVNPRQVRDFAKSVGTLAKTDAIDARVLARFAEAVRPEVRPLKDKEASQFSALIARRRQLVAMLTAEKNRLGTAPEAIHPSIEEHIEWLEQRLTDINGKLKKAIKKSPVWRAKEQLLRTAPGVGPVLSATLVAGLPELGTLNRKRIAALVGVAPFNRDSGKYRGKRCIWGGRGSIRAVLYMGTLAATRFNPVIRAFYLRLCAAGKEHKVALTACMRKLLTILNAMVKTGTPWRPRCQQTT

SEQ ID NO: 336472 - protein, 390 aa, unidentified
MAPGDKIIRRPFDVKHTKEELQPLVDEIRVQAKYDEIKVVMESTGVYHLSIAYFLQQNGIFVSVVNALKVANFNKAENFRHTKTDSIDSTNIARYGIAYWAKLPQFDLNGDKYFLLKRLCDAYLNFSEERSRILLQLQSQLEQTMPGIFDLFGGFDINSGKDKLLDFLERYCHIKDIIAKSEAEFVASYREWAKEKGYRSNESKAATIYAQAKNGIPSIPNNPIVRETIMWYVGLLRRADEALMASLTRMEDIAKDLPEYELVGEMGGVGRVTRVALIAQIGDVRRFKNKHSLICFAGLTPSIHESGKFRASQNHIVKKGPARLRKVLYQVMMSLVMHKIPKDDAVYRFIKKKEAEGKYKKVAKVAGMAKFLRIYYGRVMHLYRDLGLAA

SEQ ID NO: 336473 - protein, 442 aa, unidentified
MPEEIPDADHELVMERVCAIDVAKASGVVCVRTPREHRRVSKVWDVESTTGAVSDLAGQLMELGVEKVTVESTSDYWRIWYYLLEAAGLDVQLVNARDVKNVPGRPKTDKLDAVWLAKLTEKGLLRPSFVPPAPIRQLRDYTRLRVDLTRERSRYWQRLEKLLEDALIKLSSVASTLNTLSARDMIEALIAGERDPRRLADLARGRMQTKRSALIKALDGRFDDHHAELARMLLDQIDTLSAQIGTLTARIDHLLAEDDPDDADGGGSVADQVAAASTRPGAVERLTEIPGIGQTGAQIILAEIGLDMTQFPTAGHLVSWAKLCPRTVQSGPVTRGGKTGKGNPYLRRTRRGRRSSRQNRHLPRRTLQTHRQTPWQTQSPGRGRPIHPRHRLAPAHRPVRPVLRPRIRLSQQPHQHRTQDPQPHRPTHRNGLPRHPRTRRLS

SEQ ID NO: 336474 - protein, 437 aa, unidentified
MGNFKVVHEKAAGIDIGSDKIYASHDGIQVKVYDTYTGSLEKCAQDLLGFEIRTVALEATGVYWIVLYDILEKAGFDVWLVNGAEVKNLPGRKSDVKDCQWIQQLHSHGLLKRCFIPEEKIRELRSYTRLRDDHVQMASNHIQHIQKSYTQMGIRLHQVISDTMGVSGLRILEAILNGERDAVKLLSLCDIRIIKNKKEDVIRSLKGNYKEEYLFALRQAYQCWQFYQQQIQECDGKISALLDKFNEGKDTLITVDHGKVIKHDKTTIPDLDKKLVKAVDGRNAIRIPGISEYTFLQLISETGEDMRRWKSAKEFVSWLKLAPAVDRSGKSRKKIHNPSIPKAGQLFKQVSQSLLQSKYNALGEFARRLRARKGPAIAIKATARKLATMYYWVMTEGIEYVEAGIEMYKEKQRNQKIAYLNKKAKELNFILTPQLVQ

SEQ ID NO: 336475 - protein, 387 aa, unidentified
MPQVDDLSRSLVAFDQDASLIVVVEMSEASWLVAGMAPGVDRRPLKKLGPDPDALLRLVERWRDEAVKAGKMIERIALAFEAGRDGFWLARWLQARGIEVHVIHSTSVAVSREHRRAKTDRLDTAMLRRVFLGWLRSERGHCGMVAIPTLEDEDARRPSRERESLVGERTRIINRMKAILAWLGVRGFNPKLRKAPQRLDDLRTPEDLPLPPNTVDELRRDMARLAMVCEQIKALEQARLANLEQAPGTGSHAMVRLIANVIGVGIETADMLVQEVLSRNLRDRRAVARFAGLTGSPNESGSRRRERGLAKSGNARVRRGLIQLAWRFLRFQKDSALAQWYRARTEGPAAARRTKMIVALARKLLIAFWRMVTVGEIPAGFALRQPA

SEQ ID NO: 336476 - protein, 347 aa, unidentified
MRFYNQQHRHYCGIDLHVKTMYVCILDAAGQVLVHRNVALTPVAFLEIVAPYRDDLVVSAECMFTWYWLADVCAAEGIHFVLGHALAMKAIHGSKSKNDKIDSHKIAHLLRGGLLPQSYVYPAAMRSTRDLLRRRLHLVRKRGQLLAHIQHTRAQYQVPEFARRLAYPANRDGVAERFLDASVRKSVEVDLALLERYDSLITDLEYTLVRTAKQHDADAFHRLRSVPGIGKILALTILYELHDVHRFDRVQEFASYARLVKGRKQSGGKTLGTSGAKMGNVHLKWAFSEAAVLFLRHATGGKRFLARIEKKHGKGKALSILAHKLGRAVYYVLARDTVFSLEKFMAA

SEQ ID NO: 336477 - protein, 366 aa, unidentified
MGMLAELVDYVIGVDTHRDTHSAAVVAAGSGAVDADVTIAANPIGYKRLLRFAGHHAPGRRVWAVESSGSFGAGLATFLLEHGEWVVEVDRPARPARRNGAKSDELDAIRAAHEALGREHLAQPRQRGEREAVRVLLITRRGAIRARTRAINHLKALVVTAREELRHQLRGLDTDELVACCARLRTLPSHSTEHRATVIALRRTAQRVLTLEAEANDLESELEKLVVAAVPALLAETGVGPISAAQLYVSWSHQGRLRNDGAFAMLGGSAPIPASSGQTIRYRLNRGGDRQLNCALHTIVLSRLLHDPATRTYAARRAAEGKTPREIKRCLKRYVARRMFRILEATGPQPTPTSPRRRPRTIGVCS

SEQ ID NO: 336478 - protein, 403 aa, unidentified
MANPRSKKKSTHTTDSTGTQVVPVGAITGGVDTHKQFHVAAAKDSLGRDLGTERFDATQAGYTQLLAWLQAFGPLEAVGIEGTGCYGAGLTTHLLEHGVTVVEVNRPNRQKRRRTGKSDVKDAIAAAAAVQSGDATAAPRPRTGPVESVRVIKETRDHLVKARTAALNLLHDLIVTAPPALRETLTDMTTKVLIGHCAEFTAPALPAKHSRGHTRAHATTQLTESLLDSPTTTRMMLGDLARTIQHYDTRLAELTRCLHTLLTRIAPRTSALFGVGPGHAAQLLLTAGDHPDRVHSEAAFAALTGTAPQDCSSGNNHSHHRLSRAGDRQANSTLYYIVLTRLAHHHPTRDYITTRLRPGTKMTKKHLIRCLKRYLAREIYPHLMADLTNLTNLTKQATPTIAA

SEQ ID NO: 336479 - protein, 417 aa, unidentified
MSDFAALVGIDWSDRKHDLCLIDPATGRREAAVLPHSPHQIEEWAASLRARFGGQPIAVCLEQSRGPLIYALLKYDFLTLFPINPRTLSRFREAFAPSRHKDDPADAEYLAELLLHHRERLRAWVPDDEQTRRLRLLVEHRRRLVGDRTRLSNRLTSLLKCYFPQVLGWFPDLRTELVCDFLLRWPELSALKRVRRETLLKFMRAHHSVRRETLERRVNSMKEAVPLTTDAAVLRSSVAMARALCAQMKATLGAIHEFDRQIGELCAAHEDYALFESLPGAGEVYASRLTAALGSDRQRWQSADELSCLVGVAPVMERSGQSCWVRWRYFCPKFLRQTFVEYAGESIRHSFWARAYYESQRANGKSHHAAVRALAFKWVRIIFRCWQSRTPYDEVKYLESLRRKGSPLLTYAATNPA

SEQ ID NO: 336480 - protein, 400 aa, unidentified
MLSIGIDVSKGKSTVCGMKPGGEIVYAPFEVQHTREGMSELVSLLRSSGEEVRAVLESTGSYHCPVVTALLENGIFVSVVNSLRMKRFCSQSIRKVKTDRIDAMQIALYGLAYWQELQPARLPEDTYRELQLLARQYYQMTSMLIKAKVDFNALCDQVLPGMQELMSDHAGRHKLSDFVLRYHHTTHILEMGETRFRKDYCKWAEKKGYRNCERMAALIFATAQNGIPVLPNAPSTQIVITEAIRVLHTVEASRDAILTQMQALAKTLPEYSLVREMPCIGDTLAPRLIAEIGDVRRFHSKRALIAYAGIDAPPYQSGKFCANNRHISKRGNRYLRKTGYEVMQSYVMHKPANDPIFTFIEKKRGEGKSGKLAMVAGLNKFLRVYYGKVTELYRSLSAIE

SEQ ID NO: 336481 - protein, 312 aa, unidentified
MNRIICGVDVSKARLDGCIQPGNSHLSFGNDAEGIAALAAVCREHKVELVALEATGGLERLAFLLLWQEEIACAIVNPRMVRRFAEAMGYLEKTDKIDAQVIAHFAGAKGLQPVPAPSAKDRRLKAFVLRLRQLTQDIAANSLRRAAAKELAVVDGIGDVLSLLRQQAKTLEGEIMSLIDDDPLWQALNKAFRTIKGVASRTISRLMAEVPEIGIYNNKAIAKLAGLAPLAKDSGKSQGKRYIRGGRSPIRSTLYIVSYIVAKHDPRMKIFADRLKAQGKPAMAVRTAVARKLLVWLNAKARDARANLAYAT

SEQ ID NO: 336482 - protein, 321 aa, unidentified
MEPATPATFVGIDVSKAKLDVAIGDEPSFTVPNTPEGHAALVERLAAAKPHRVVMEATGGYEAAAAAALYRAGLPVVIVNPRQARNFAKAMGYLAKTDAIDAKALAHFAAAIKVEPRPIADDDARELDALLDRRRQLVGMRVMEANRKATATGRVLRDVEAHLRWLDEHIARIDRELDERIRSSPVWREKDDLLRGIPGIGPVLSRTLLAGLPELGQVSHRCVAALVGLAPMADDSGQHHGVRRIVGGRAQVRSVLYMAALAARRCNPVLRAFAERLTAAGKRPKVVLVAVARKLLVIANAILRSAQPWNPNVRTTALEIA

SEQ ID NO: 336483 - protein, 426 aa, unidentified
MKSNTQNAKIKAITEKTLIVGIDVGSETHYARAFDWRGYEFSKTPLAFSNTEEGFETFRIWIEELKKGHGMENVISGMEPTGHYWFNLGCFLRARGMNPVHVNPHHVKKSKELDDNNPSKNDRKDPKVIAGLVKDGRYFRPYMPDGIYADIRKLAELRARAQSAITRLRNRIARWFSIYFPNYKEVYRNVYASSGLMVLKEAPLPEDIVKLGVDGVNRIWRDAKLRGVGRKRATTLVTAAGHSIGSRDAQSAARIELKTLLADYEMYAEREAGLMEMIEEKIKEVPCVDKLLEIRGIGMKTVIGFVAEVGDIRRFDNPKQIQKLAGYSIVKNESGKHKGESHISYRGRKRLRYVLYEAAVSVVSHSPEFKEIHRYYTTRSKNPLKKMQSIIAVACKLVRVFYMILQTGATYDAAKLMGDIRRPAAA

SEQ ID NO: 336484 - protein, 311 aa, unidentified
MTMTENYIGVDIAKDWIDSFDEQTGKHRRVTTTPRALKDFARRCAGKRVIFEASGGYERPFISALEGAGVPFARINPRHAREFARATGRLAKTDRVDAALLARMGAALALKADPPRDKTADRLAMLTARRDALVEHRKQEKQRLQQATDRFIVRDIASLITLLSRRIAKLEAEIAAHIANHDHIRTRNEQLRSVPGVGPVVAATLLAKLPELGRINRRAIANLAGLAPHACDSGHMRGKRMIWGGRSEVRRALYAAAFIASRCDPGLKAYRQKLDAAGKPFKVAIVACARRLLTQINAMIRDGRTYEARSA

SEQ ID NO: 336485 - protein, 395 aa, unidentified
MDASEAGGVMEANGSDVVGARSATFYIAVELSRSSWLAAVLGPGAQRPSRHKLKAGDVDGLLALIGRARGTATRVCSCYEAGYEGFWLHRRLLAAGIESSIVDPSSLQVDRRARRKKTDAIDVEMILRALVAWDRGERGLCTMVRAPDTAAVDARRTSRERERLIREQTGHVNRIRGLLMTMGIYDFDPRRANRLASLAALVTGDDRTLPPRLSVEIRREIERLQLVERQIAELERDRDPPAPRGRPRKDAVSRQPDPASPRGRIAHLQQLRGVGPEIAGVLQSEVFYRSLCNRRELTAYCGLDPTPFASGNSHREQGISKAGNRRARHAAVELAWLWLHWQPDTALARWFHARVGAATGRLKRTMIVALARKLLIALWRFLECGVVPDGAILKA

SEQ ID NO: 336486 - protein, 387 aa, unidentified
MPKTSDRSEVPAAVHTRIAAIFVSLELSRKVWLVTSLSPGAGEKMSKHSVPAGDVAALLLRFAELRRKVQARTGDCFSIVTIQEAGLDGFWLHRLLESEGVESHVVDPASIAAPRRRRNAKTDRLDGEALLRALLAFKRGEPRACAMDVPPTPEEEDRRRLSRERKTLIAERVEHINRIKGLLFSQGVSDFEPIERDRRKRLEELRTGDGRPIPIHLKSAIARELDRLELLIDQIKTVEAERDKLLAEQRPGASPSPGAMLLAFKGIGSEVASVLWSEALYRHFDNRRQVASYAGLAPTPWQSGSVSHEQGVSKAGNPRLRSTLIELAWLWLQNQPQSGLSLWFKRRIGDGRGKKTTIVALARKLLVALWKYIAFGVVIDGAVMKNA

SEQ ID NO: 336487 - protein, 400 aa, unidentified
MISVGIDVSKGKSTVCILKPYGEIVASPFEVMHTESELKNLIQMIQRLDGEIRIVMEATGIYHLPMLSALQDQNLFVAVINPFEMKEYASRGLRRVKTDKQDSITIANYGIDNWYRLENHQGSDDVYSELKLLGRQYCHYMELHVKALLELTHMLDYTMPGIKKEFHSWSESNGKDKLSDFVERYWHFDNITAMTKEDFIEDYISWAAEKKYHQNRSKAATLYDLASDGIPTLPANTPSTKMLVLEAVRVLREIDSTLLKIITRMKELAKTLPEYETVRAMGGVGDVLAPKLIAEIGDIRRFHSGKALIAFAGIDAPPYESGQFVGTNRKISKRGSKLLRKIGYETMRVLKTHKAPDDDAVYQFILKKEAEGKSKRQAKIAGLNKFLRIYYARVSEVYKA

SEQ ID NO: 336488 - protein, 388 aa, unidentified
MLLDHPSDGPTAIHTQFGAIFVSLELSRSNWLITSLSPGKGEKMSKHSVTAGNVAGLSALFAELKRKAEVRTGQGYPVITIQEAGLDGFWLHRVLQQQGIESHVVDPASIAMPRRRRRAKTDRLDGETLLRALLAYKRGEPRVCAMVVAPSPEEEDRRRLCRERRTLIEERVTHGNRIKGLLFAQGIFDFAPMRRDRRARLEALRTGDGRELPPHLKAQVGRELDRIELLLGQIKTVEAAQDALLAAARKPASEDAAPDPVTMLLALKAVGANFAAVLWSEAFYRQFANRRQVAAYAGLAATPWQSGGVRHEQGVSKAGNPRLRTTMIQFAWLWIRHQPQSALTRWFKERSPQGRKRAIVALARKLLVALWKYVTQGVVIEGAVMKPA

SEQ ID NO: 336489 - protein, 478 aa, unidentified
MRAGRRWRTRKEKKEWARRLQSNDPGLDVIHPQAAGIDVGNASHYVAVRPDRDPEPVRQFECFTADLHRLADWLKNCGVRTVAMQSTGVYWIPLYDILEERGFEVYLVNARHTKNLPGRKSDVQECQWLLKLHTYGLLNNSFQPASQIRVVRTYWRQRAEHVQATASCIQRMQKALTQMNVQLANVISDLSGLTGQLIVRAIVAGERDPQKLAKLRDPRIQASPEEVAKSLEGNWRPELLFLVKQELDTYDTYQKRIAECDEQLQQQLASFASVAPGVAAAPVTQPQGDEPLKKAKAKRKKPAKNAPRFNLEQELQRVAGVDLTRIDGIDVMVAQTIVAEVGLDMGRWKTEAHFVSWLGLCPDNRITGDKVVGRGTRHVVNRAATSLRMAANALLRSQTYLGAQYRRLRTKLGAPKAITAMAHRLARLVYRMLKYGQRYVDKGAEYYEQRYRNQQLQFLRKKATQLGFHLTEAQAQTA

SEQ ID NO: 336490 - protein, 383 aa, unidentified
MRIVCGLDVHKDSVFVCILNEKGEKFESKYGVLTPELEELHQLLLTHEVKEVTMESTSIYWHPIWRILGDIECLKLVNPYFIKQLPGRKSDVRDAAWIAECTMKDLIRGSFVPDATVQRMRQYNRRIFDLNKEKVYKLTKLDALLHRCNIRISNYVSSIDSKSYKEVVRLLSEGIVDAERLMEAIHGRTVNRVGKDVIKAALTGVVNEVDIDLIRQYREELQIDDKHLKECQNKLTEICRNEFPKEFENLQTIPGVKERSATSILSELGADMKMFLTASALVSWCGLKPRNEESAGKIKSRRITHGNKYIRKTMIECAWGASRTQNCFYSNFSYIQTKVRRKNAMKVKVAIARKILVAIWHVLGENVPYYDYKKPKAIADGNS

SEQ ID NO: 336491 - protein, 338 aa, unidentified
MYYTGIDLHKKTSFITTIDKDGKIVTRANLQNVEEDILVYFATLDKETKIVIESMASWYWLYDLLTEEGFEVVISNPVKTKAIASAKIKNDKIDSHMLAQLLRADLISTVHVSSLETRKLKELLRHRSRLVRDATRMKNRIHMLLMKNNFRSPFSDLFGVQGLRYLEEIDLPDYHRQQVETYLLLYQKLREQIEPLTKRVRALAKENYTAQLLMTIPGIGPITAMFIIAEVDDISRFRSYRNLASYAGLVPSLDASAGKEKRGRITKQGSRYLRTALVEAAQAAARMKNCRLNIFFRRRIVKAGYQKAIVATAHKILQYAFYVWKNQTPYKETYPVCA

SEQ ID NO: 336492 - protein, 314 aa, unidentified
MTDLTTSFSHFIGCDVGKREIVVHDSWDGKISTIANNPKALRAFAAGLDKNCLVICEATGGYEAALLDATLDAGIAAHRADARKVKAFIRSFGTRGKTDQIDAGALAQYGKERADRLALWQKPAQSRQSLQSLVLTRADLVKDRVAYRNRLAAPGAEASKTMLLEVIKCLDKQIAVIEAKARALVAAQPQLARDAACLRRIEGVGPIIATALLALMPELGTLNRRQAAALAGFAPHPNQSGSRDGYRKTRGGRPEVKATLFMGALSATKSKKTMGQFYQRLVAAGKLKKVALVAVMRKIIVIANARLRDAHITT

SEQ ID NO: 336493 - protein, 386 aa, unidentified
MIEAVIERCAGIDVGKKFLVVCVMTGPLDVEPKTEIRKFGTIVAELELLRDWLIGERCSHAVMESTGSYWKPVFNILEDNVEVVLANAYDVQNRRGHKTDPNDSRWLAHLLRHGMIRPSFIPERAVRELRDLTRRRRQLVGEKARERNRIQKILEDANIKLGDVLSDVLGLSGRLMIDALVEGVLQAEEIAQFAQRKAKQKIPELIAALQRNRLTDHHRFLLRHVLRHLDFLEKEVEALNVEIRSRLSAEKFRQPHTLLQSIPGIKEEASAAILAEVGPNMAQFPSGAHLASWAGLCPGNHESAGVRKTGRTNRGNNWLRSVLTQCAWAASNKHNSMLSAFYSRLSPRCGKKRSIVALGHRLLRIIYYVLLRSQPYQESHGRSIST

SEQ ID NO: 336494 - protein, 352 aa, unidentified
MANQAHSAVVYGIDLGKTWFHVAGCDATGRSLHKVKLSRSRVFPFFANTSVALIGMEACPGSQWLARRLQALGHTVKIMPAQFVKPYVKSNKNDAVDAEAIAEAVTRPSMRFVQVKQTEQVDLQALHRARDLIVSTRTRLICQMRAFCLEYGIAMRNGAGAFKLDVLKVLNDDTNELTRAMRHLLRELWNQLQELEARIQKFTRQIESIASRSQFARRLLTIPGIGPLGATALLAAVGDGKQFKSGRDMAAWLGLTPAQYSTGGKSTLLGVSKRGHAYVRRLLIHGARSCVIHLDRTRDRLGSWITDLQRRMHINKVVVALANKLARIAWVVLTRPGALYQRVDPAFSGGST

SEQ ID NO: 336495 - protein, 367 aa, unidentified
MMGWMAPLRHQCAKLVFSKNHQEREPSMSEITTVGLDLAKHVFQVHGIDAEGTTVLRRRLRRNQVLAFFSRLRRCVVGMEACATAHYWARELAALGHEVRLMPAQYVKAYVKRNKNDAADAEAICEAVGRPTMRFVSVKTAEQQASQLLHRGREQLVRQRTMLVNALRAHLAEFGIVAAQGLRNVSQLIAIVRDNGNKHLPDVARQVLKVLACQIEQIEAAITALERQLLAWHMSNPVSQRLASIPGIGPIIATAIATSVADPHAFRSGREFAAWLGLVPRQNSTGGKPRLGGITKRGNRYLRRLLINGASANLLRSKATKADPWVIGLRRRRPPLVVAVALANKTARIAWAVMLRQNEYQPRAVAA

SEQ ID NO: 336496 - protein, 359 aa, unidentified
MGRFTTQKNKITASKTADIQTAEAKAVFAGIDFHKRFSVITLGTKDGTVISQHKLLNVESDIEKFFLAHGPLICAIENCRGNEWFVELVKRCGSEVRIGNTRVIRLIADSAKKNDKIDSKFLMDLVARNYLPVCYQPTRNERILREALRWRTKLMRSRTQYKNVAHAILDKENKSAQLRSALGRNWLQEQSGLSPERHEQLQKCLEVVDYFDERTDDADRVLIQIAKEHPDVQRLMTIPGVGELSGLMLLAELGDITRFKSARHVAGYIGLVPRLYASSDTVRLGRITKQGPGLLRRILVQDAWMAVRVSKAFRKRYNSILKRRGKRAAIVAIARTIAEIAYHVLKDRTEFDEKKMTLG

SEQ ID NO: 336497 - protein, 372 aa, unidentified
MKEDSVIFIGLDTSKLKISVAIADGVRNGEVRFFGDISSEPSSVASMVNKLSKREAKLHFCYEAGPTGYGLYRQIVELGHDCVVVAPSLVPKRAGDRVKTNRRDAVSLARLHRAGELTAVWVPDEGHEAIRDLVRAREAASDALKQARQQLQSFLLRHGRIYAGREPWTRAHTRWLTCQAFDHPAHQILLAEYCQAVADAGVRLDRLTKLVVETAASWSMAPVVAAYQAMRGVAFMTAVTFVVEIGDVRRFDNPRQLMAYLGLVPSERSTGERVKRGGITKAGNTRARRVLIEGAWTYRFPARVSPKIQARLEGLPRTVREIAWKAQVRLCARYRKLMAAGKLKVVAVTAIAREMAAFLWAIGQEVAPTAKG

SEQ ID NO: 336498 - protein, 321 aa, unidentified
MPTFYLGIDVAKGKLDCALRLPNGKVRAKVVTNNSQGYADLVDWLSRKQALDVQVCMEATGVYWEAIAQFLVTQGLTVSVINPAQIKAYASSRLTRTKTDAVDARLIAEFCAERHPPPWQARTDAEVALRALVLRLDALQAMRTQESNRLDVARDTVRTNIQEHLDWLDQQIKTLIKTINAHIDANPDLKGKRELLESIPGLGERTIAILLAFYADPSRFTNSRQAAAFAGLDPRQHESGTSVKAKPRLSKVGHAFLRKALYMPAMVALYKTAWGKQFKARLALSGKPAKLIIGAMMRKLLQVAFGVLKSEKPFDPALHGA

SEQ ID NO: 336499 - protein, 330 aa, unidentified
MFQVHGIDRHEKVVWRRKLRRAEWLKVLVATAEPGCEIGMEACGGAHHWGRKLQGLGFKVKLMAPQFVKPYVKGNKNDANDAEAICEAMSRPGMHFVTVKSALQQDIQAVHRIRAGLVGQRTAKANQIRGLAAEYGLVAPKELGQLRIVLPCWLEDAQNGLSELFRQLLQGLWGDLKGLDERVSELDRLITLLSKSDPVAKRLQQLRGVGPVIATALVGAIGNGEQFARGRQMAAALGLTPRQHSSGGKERLLGISKRGDAYLRTLLIHGARSVIRTAKGKEDRLSRWVVSLAARSHPNVAAAALANKTARMAWAMIRNGTDYQPDLVTG

SEQ ID NO: 336500 - protein, 459 aa, unidentified
MVKSKCSVQGIGPSTKTTAQHCVRATYGSAIGVDVHAKQLVCCYQSSDGVDPLTHQPILKEQHAEFGTLRSELNEFAAWCLELKPEIILMESTGVLWRSPYEALEDVGFTTQELMLVNARDVKGIIGRKTDREDAVRLAQIARMGILKASFVPPRIFREMRLIARRYQTLKKTTANLTNVYQKLLNAAGLRASSVFSDVRGLAATAILESKLNDAPDFAETVIERSARLKAPPEIIIDALDFEISDTMRAQLLDEKLLIERTQTHADAAMNRLRQLQKPYAKQIKLLLSIPGIKEDSARLIFAELCSDLKQQFPNSEKFCSWLGICPGNNISANKSHSGRSPKGNKWLRRTITECSQGIGLSHLCLRSRFEAFKLRRGKKRAVVAIGHLLCRIIYSVLVNGRMFKSVNEGDNLKNVLVQRLKSNLKNLRRQTPLVMCGNEMIERDTGVIICEMPAVFDP

SEQ ID NO: 336501 - protein, 342 aa, unidentified
MKIHTIGIDLGKTSFHLVGLNERGEVVVRKRFSRAQLLRFTANRKVHLIGMEACGGSHFLGRALKQQGHEVRLIPAQYVKPYVKTNKSDYIDAEAIAEAVGRPTMRFVPIKSDDQLDLQSLHRVRERWVMRRTAVINQIRGLLLERGITLRKGRRSLEEALPGILEDADAKLSGAVRFLLAQLKSELEHLAQHLEEADALIEQTAQENEQCQRLDAIPGIGPVTATAVVAAIGNGTAFRKGRDFSAWMGIVPREHSTGGKQKLLGISKRGNRYLRRLFVQCARAVLQQKSKQSPGLKLWLEKLTARTHYNVASVALANKLARMAWAVLATGEAYRAPLVAAA

SEQ ID NO: 336502 - protein, 348 aa, unidentified
MAIISHTYDLIVGVDTHARNHVYALITNTGELLACDTFPATSPGHARALAWIRRRTPTHRTLLWVIEGIGTYGAGLARTAKAAGYDIAEAPRIDNRRTGKTDQLDAQQIARAVLPLDTTRLRRPRLDDGTRDALRTLIAARDQMTTERTANINALTALLRRADLGLDARHPLTRTQITTITAWRTRTEPTATSIARHEAIRLATRITTLTTDLAANTATMTTLVTASPAATLLNEPGIGVYTAAILYTTWSHPGRVHSEAAFANLCGTSPIPASSGNTTRHRLNRGGDRRANRALHIAILYKTAHDPQTRAYIQRRTTEGLTPRDIRRCLKRHLARRVYKALEHANPA

SEQ ID NO: 336503 - protein, 357 aa, unidentified
MSSDKYIGLDVHQSTISIAVLDSAGKLVMESIIETKAETILQFFDGLRGNLYVTFEEGTCAAWLYALLKPPRVTKVVVCDPRKNALLKSGNKSDRIDARKLAQLLRGGELSPVYHGETGGCVRTLKELSRSYLTITKDLTRVMNRLKALYRSRAIGCAGKEVYDPRYRAHWLQMLPEVGVHSRAVRLYHQLDLLQSLRQEARRDLLTQSRKHAATRVLRQIPFLGPVRVAMLIALVQTPHRFRTKRQLWAYSGLALETHGSGEYRFVNGQFQRSRKAVAVRGLNQNHNHELKHLFKSAATTASVRGPFRDFYDGLLAKGMKPSMARLTLARKIAAITLTLWKKGASFDPEALKRQAA

SEQ ID NO: 336504 - protein, 376 aa, unidentified
MENDSTLFVGLDVHKDSITVAYALGSGEVEVLGKIGSSQSDIDRLCKRLKSKAPHVRVVYEAGPCGYGLQRHLRAKGFGCMVCAPSLMPRKPGDRVKTDRRDAIKLTRLLRAGDLSAVHVPSVEDEAFRDLARAWSRCRSDLKRARQQLKAFLLSHGVRYTGTANWGPAHRRWLSALSLHNKWQDLAFNELRRTIEDRLAQCQRLEDALREAVQRWHFYPAVLAVQAMRGIAFTAAIGLVSELGDLTRFAHPRQLMAWLGVTPSEYSSGSKRRQGSITKTGNSYARKLLVESAWQYRHAAKVSRDIQRRQEGLPKAIIDRAWDAQLRLCRRFRKLLARGKERNVAAIAVARELAGFIWDIGRLGMAQASPTPESTA

SEQ ID NO: 336505 - protein, 312 aa, unidentified
MFVGIDVAQRELVVSVLPPGETWSVGNDDTGLKDLVARLAALTPTRVVLEATGGYEVLCAAALAAAALPVVVVNPRHVRDFAKATGQLAKTDRVDARLLALFAERIRPDVRPVPDPAARELEELLTRRRQLLEMRQAERNRLAQAIGRRQHHLRKSLKKHIAFLERELAIADSDLGTMVRASPAWRERDDLLQSAPGIGPVVARTLLAELPELGRLNRRAIAKLVGIAPMSRDSGRWRGQRSIQGGRATVRAAMYMATLVATRANPVIRAFYQRLLALGKPKKVALIACMRKLLTILNHMLRTGQPWSPSPT

SEQ ID NO: 336506 - protein, 345 aa, unidentified
MNITTVGIDLAKNVFSVHGVDVHGKVVLKKTVSRGKLLDCFAQLPPCVIGMEACTGAHHWARALRALGHDARIIAPRFVIPYRKSGKNDGNDAEAICEATSRPAMRFVPVKSSDQQAILCLHRIRQGLVAERTAQINQIRGLMAEFGLIMPKGRYSAQHHIPNLLEDAENGLPPLARRLLHDVWQRVRQLNDQVLAYDREIEALARQDTQAQTLMRIPGIGPLTATALLASLTDPKQFHNGRQLAAWLGLVPRQYSTGGKTRLGRITKQGDKYLRTLLIHGTRAVLATLREKQDRTSAWLRELVARRGYKRAAVALAAKNARIVWALLTQGEEYRLQPAGQAAAV

SEQ ID NO: 336507 - protein, 355 aa, unidentified
MEKIYIGVDFHARQQTICYLTTNTGEILFHQLQHQDKAAVRAFYAQFSGHVIVGLEASGYSPWFERLLEELDCEVWLGHATTIRQRARCRHKNDRRDAELILDLMLHDEFPRLYLPPLQSREVLRMLRYRQKLIKMRTIGKNSLQALALQAGLAKGPHLFTKAGLQELWQAPMSPAMQWQRKQWLQLLEPLNERLLETMLWLKQQSQTDERISRLRTHPGVGLLTALCLVHSLEPVSRFRNARKVTAYVGLDPLERSSAERQRFLGISKGGSRVLRFLLVEAAHTAIRKDADLRRFYQRLAERHGRPKAKVAVSRKLLIRSYIMLRDEIDYAEFQQRAVAARLARPAHGLQCPAP

SEQ ID NO: 336508 - protein, 331 aa, unidentified
METDQYIGVDLHQSSFQVSAMTPRGERVWEARFARTPDGIGAFVARCTPRSAVAVEATTPTWHFVDQITAHVATVCVVDTRKTKLKAGYAAKTDRLDARRLADALRRESVVSIYVPPPAIREQREWARHRLMLTQMRTRVLQRMRALLLRQGLGDPPTKRLRSTAGQAWLDHVVLPPQAHRALTTLRQIERDLCAQLAPIEADIAREALADPIVRPLQTVHGIGAVLGLMLRAEIGDIRRFPTPAHLASYAGVVPQVDSSASRTHYGRITKDGSPWLRWALVAVGVQTLQRQDPLGRWGRKLAVRKGAMKAHVALARDMCREIMEAWQRAA

SEQ ID NO: 336509 - protein, 343 aa, unidentified
MDATTVGVDLAKNVFEIALADERGHIVERQRLSRARFDRFFANRSTCRIVMEACGSAHHHARRLSSQGHSVVLLPAQYARAYVRRNKTDAADAAALIEASRCPDIRPVPIKSVDQQAIQQLHRLRSQWMAARTSRINFLRGCLREFGVGIPVGAKRAIQAVRDTLSSCNGAVPALLHSSLLELLAEIDALEQRCKQIDRELARLNENDPVVERLLQIPGVGPLTATALRASVVDVQRFPSARHFASWLGLTSREHSSGERRRLGRISKQGDPYLRTLLIHGARAVLLAARSAQRRGSSLDRLRTWAVDLQERRGHNKAAVALANKLARIVWATWRFERDFSSN

SEQ ID NO: 336510 - protein, 355 aa, unidentified
MDNRKYIGMDVHKEAIAIAVLNAAGKLVMESIIETKANTIVEFLKGLRGELHLTFEEGTWASWLYDLLQPHVKRVVVCNPRRNALLKEGSKSDRVDARKLAELLYTKMLRPVYHRDNGMRAVKELARSYVTISKDQARVMTRVKALYRSWGIACSGKQIYTVRHRASWLGKIKEPSVRRRAEFYYQQLDGLRSVRRQVRRELLLESGKHKASKLLRQIPSIGPIRAALLLALVQIPHRFRTKRQLWTYSGFGIETHDSAEYRYVAGQLERSKKPQQVRGLNRNYNHDLKNLFKSAATNAVAKSGPLQEFYLALVKRGIRPEMARLTVARKIAAITLAIWKKGVSFDAEHLKQQTA

SEQ ID NO: 336511 - protein, 508 aa, unidentified
MKTKPTRAKPPGPTSTAAKRKLRLEKVTKAGKGRVVDVTALDHMKQINFHAAGIDLGAAENFVCVPATSTALGESPVRAFGVFTEEMDALVEWLRVCQVTSVAMEATGIYWMVLYDKLEAAGMEVVLVEPGSVKSVDGRKSDVLDCQWLQKLHTYGLLSRSFRPDAPVRRLRTLTRHRAILVECGTDHLRRIEKALVQMNLQLNLVVSDINGETGLRILDAIVNGQRDPKELVKLRDPRCRKSTVAQMEAALTGHYTDDLMFLVEQNLAGWRFFQKQMQGCDREIEKALAHIPTAKVENIPPPPPKAVPAASAEEQAAHAKRKNKSAANRGNNALTLDALSLCQQLQRICGVNLMNVCGLNLLSVLMIIAEVGTDMSRWRSAKAFCSWLGLCPGTKISGGRILSRRSRRVVNRASTILRMAALVVGRTDSWLGRFYRRKKAHLGAPKAITATARKLACVIYHMLKYRDEFVPLDVMVYETKAAEHRLRRLRRDAQAMGLELVKKEHAA

SEQ ID NO: 336512 - protein, 399 aa, unidentified
MLAVGIDISKSKSVAAILNQDGSMHTSPFEFHHTQPELDAFIKYILNSKQSATILMENTGHYHYPVLKAFQEAGLPVCMVNAYQIKKFGDMDLRKAKTDKKDAVRIARYALEKSYSLVPYTSMEQKYEDLRFLARQYNQRMLTLKTNKVFLLNLLDETMPGITNILPLTTRTPETSLSVLFINRFKSYDRIKKMGKSRFLDAFEKIARKSRNRQTKTYGLAIYEAALRNITTRGENEYTLAAQDQCLELVCESQKAADSIILKMKTLAETLPEYAVLRSMAGVGNRLGPLIFAEIGDIRRFHSGKALNAYAGNDAPPYQSGTFESHNRHISKRGNAALRKYCFEVMQALKLTRPQNDPVYLFLLKKEQEGKPYNVAKMAGVNKFLRIYYARAMETLKQQ

SEQ ID NO: 336513 - protein, 360 aa, unidentified
MSTATAPVPETSTGPDVVIGVDTHKHTHMAVALSANGGWLGSLKLDAKRSGYQELMRWAAEFGSNPMFAVEGTGCYGAGLCRSLQTAALEVVEVNRPDRSTRRRLGKDDTIDAEAAARTFIAGKATVIPKAGDDLVEMIRMLKVVKDSATDNRTAALNQLHAIVVTAPAALRERLQRLKGKELVECCSGLRSGEISTPLAAAKMALRTLARRIQQLDQELKETVAQLDRLTMQHCPELRNTYGIGVDISATLVVAVGDNQERLKSEASFAALCGVNPLPASSGKVVRHRLNRSGNRQANCALHCIVICRLQRHQQTRDYVQRRTAEGRTMKEIIRCLKRFVAREVFGILRGGPAVRTAPA

SEQ ID NO: 336514 - protein, 469 aa, unidentified
MAIRIGIDIACRAHHRAACATADGALLWSNVRFQTRAEELENLWRRIPDEEADVTIVMEPTRNAWVPLAAWFRRHGAKVVLVPPEQSSDLRAYYNKHAKTDRLDAELLARLPSLHPEGIHHELGLGPAQPLRRTVKIRSSLVKRRSACMHRLDALLEILGPDWIAAVGSAMTITILHFLSRWPDPRQVIRLGRSRLTQWLHRQSRGQWGSEQADSIVKAAQATIRLWGHEGMDFEALAADIALEAELALELTVQINKLEERIAVYYKQADPQQILTTIPGVGQVLAAQIVGRLGDIDRFSTLSSVRSYSGLVPRCSSSGLVGATGGLSKKGDSCLREAICIAADLARRYDPSLAQRYHRLMMENGKHHTSAVCSVGAVLITRIVACMRRQEPYVIRDLDGQPISMQQGRSLVKQCYTIPEDVRKSRRTVNRHLTGQAQVDESKKRGGTTQPGVARRSKARTTPQPACSV

SEQ ID NO: 336515 - protein, 343 aa, unidentified
MKITRVGVDLAKNVFQLHGVDRSGKLVWKRKLSRKNWLKVLLKETDPSCEIGMEACTGAHHWARVLMSKGYQVKIIAPQFVKPFVKSNKNDANDAEAICKAMSRSHMRFVQAKTTEQQDIQALHRVLYVLKSHHTAKGNQIRGLLSEYGLVAPRQLHALRCAIPDWLEDAENGLSDAFRWLLKGLWDDLVQLDRRIAEVNEEIEHIARTNPVAQRLQQLRGVGPLVATAMIASVGSGKHISRGRQMAAALGLTPKQYSSGGKERLQSISKRGDVYLCCLMVHGARSVVSHAKNKEDRFSRWMTELAQRGHSNVAAAALANKTARMAWAMMVKETDYDPALASR

SEQ ID NO: 336516 - protein, 330 aa, unidentified
MKVAGIDVSSKTVTLVIGHDGRTTKPREFKNTPQGHATLSNRLRQAKVSRVCLEATGQYHLDLALALDEAGFKVMVINPKAAKRFAEAIQTRTKTDAVDAAVLAQLALRMPVTPWQHPDDLALAIRACARRIAALNKLRTQTKNQLHAAQLTTRVPDFLLVGLRQLIVFLEAQIKQLRRQALDLIATDETLQQSFERLISTTGIADASAIQLLGELLVLPEEMRAKQWVAMAGLDPRQHSSGSSVNKKPRLSKVGNRYLRMALYMPALSAVRHEPNVRAFYRHLIDSRGLKELQAVCAVMRKLLLAIHAMLSTNSPFDGSRFYSPTDTVA

SEQ ID NO: 336517 - protein, 354 aa, unidentified
MIIIGCDYHPGFQQIAFVDTETGDYGEQRLEHSEGAEKFYRDLAAQGEKVRVGMEASGHARWFERLLAKLTFELWIGDASEIRARRVRKQKTDRQDAQHILQLLMENRFPKIWVPSGENRDLRQLRWHRHRMVQARTRIMNHLQAVALNEGLRCKKRLWRDAGREQLESFRLSPWASRRRRDLLELLDRLTPTIAELTAAIEQEVEQCPDAQRLQTHPGVGALTALAFVLIIGRADRFQCGKQIASYLGLVPLEDSSGPRRRLGHITKQGNSLLRFLLVEAAPVTVRSDQEWRSKYFHLAMRRGRKIAKVAMARRLAVRLYWMWRKGWNYGQLKKFGSHAGEPGNRDGVKSNTE

SEQ ID NO: 336518 - protein, 423 aa, unidentified
MTRPARPLVDDPVQVIHPCCCGIDVHKKEIQACLVRSTTAGGVQQEHRTFSTMTDDLLVLVDWLVAVGCTHVAMESTGVYWKPVYNLLDGTVEVLIVNAQHIKAVPGRKTDVADAAWIAGLLRHGLLRPSFIPDRTQRELRDLTRYRKSLVEERTAEVNRLQKTLEGANIKLAGVATDILGLSGRAILDRLVAGQTDAALLAQCARGKMRRKIPELERALAGSFGAHHRFLVARQLAHIDYLDEALAEVSAEIAKRMAPHEDDVALLDTIPRIGRETAEALIAEIGVNMQQFPSAAHLASWAGMCPGNHESAGKRKSGKTRKGSRWLRALLVVAGQAAGRTTRTALGERFRALAARRGRKRAAVALGHSILTIAYHVLTRREPYDDALLRRARLPRPPSPDRLVLQLQNLGYTVSLQPTALGA

SEQ ID NO: 336519 - protein, 343 aa, unidentified
MQTITTIGLDIAKSVFQVHGVDAAGQVVIRRQLKRRHVLAFFQKLPPCLVGIEACASSHHWSRELQALGHTVRLMPPTYVKPYVKRQKNDMADAEAICEAVTRANMRFVPTKTPEQQSCLMLHRTRHLFIRQQTAVINSIRAHLAEFGIVAPVGRKGVTELLHVVADPSDKRLPEVARACLAALGTQLLSLKEQILEFDRMIIAWHRSNQTSKRLHCIPGVGPMLATALVASVADPKTFRSGRNFSAWIGLVPKQHSSGGKDRLGSISKQGDRYLRSLFVAGALAVIRYAKIHGTKHRPWLAALLARRPTKVAAIALANKIARMAWAMMAKGERYKQPAALAR

SEQ ID NO: 336520 - protein, 374 aa, unidentified
MYGFSKYVGLDTHKDTIAVAVSDACGGKPRYYGEIVNTPEAITKLIKKLSQDGEVLSFCYEAGPCGYGIYRQISSLGHDCSVVAPSLIPTRPGDRVKTDRRDSESLSRFHRAGELTPVWVPDQEQESIRDLTRAREDMKAMERQARQRLNAFLLRHGKIYESGKSKWTQAHFRWLERVKFEVPVQQIVFEEYVGAIKQAQQRVAGLVDEMDKAMKSWSLAPVVNALMALRGVKLITAMTIMAELGDITRFDSPPQLMAYLGLVPSEYSSGKSKRRGGITKTGNGHVRRVLTESAWCYRFQARKTAHLQRRAEKTSDEVQAIAWKAQKRLCGRYQHLLDRGKLKVQVCTAIARELVGFIWAIACEVMGRRLVTAR

SEQ ID NO: 336521 - protein, 389 aa, unidentified
MKIFVGIDIAKLNHFAAAISSDGEILLEPFKFTNDADGFQLLVSKLESFDKNSIIIGLESTAHYGDNLVRYLVAEFYQVCVLNPIKTCQMRKNNVRKTKTDKVDTFVIAKTLMMQDDLRFITFFDLDMMDLKALGRFRQKTIKQRTRLKIQLTTYVDQVFPEIQYFFKSGLHQHAVYALLKEAPSPKEIASMHMTHLANLLKVNSHGHFTKELAKELRVLAQKSVGANDSAISIQITQTIQQIELLDSQLEKIEAEMTDIMKFNDSVIMTIPGIGYINGGMILGEIGDIHRFSNPNKLLAFAGLDPSVYQSGNFQAKTTRMSKRGSRVLRYALVNAAWNVVRNNATFKAYYDAKRAEGRSHYNALGHCAGKLVRVIWKMLTGEVEFNLE

SEQ ID NO: 336522 - protein, 384 aa, unidentified
MIKHSILFIGLDTHKVSTEVAHVEDQRGAKPVHLGKINTTKAAITKLARQYQSKYPHATLHFVYEAGPCGYWIYRLLTSLGHCCYVVAPSLIPKKPGERVKTDKRDALKLAKLLKDEELAPIYVPEPEDEAIRDLSRSRETAMKDLKDAKYQLKALFLRNNITCKVNDNWSLQHLHWLTELILPHPSQQIVLQEMIQTITERIAREKRLANELFHQVKHWRFYPVVKALQAVRGVRLLIATGIIAELGDLRRFDHPRKLMSYLGLVSKEHSSGDKRRLGSITKCGNGRARRLLVQGAHTYKHKANISTELQKRQEGLPKEINDIAWQAQLRLCRRYNRLMSRGKHRNVVVIAIAREMAAYIWAIAREVIISPVNSRLRVSRVPA

SEQ ID NO: 336523 - protein, 401 aa, unidentified
MNAIGIDVSKGRSTVAIIRPFGEVVRKPFNVCHTSQDLDELAKLILSFEGESKVVLESTGKYSAPVVKKLCEAGIFLSVVNAKWIHDYAVDTIRRVKTDKVDSLKIAGFCLDKWTKLNRHIPAEQTRATLKTYNRQLHEYNKIKVMLKNNLISLTDQVFPAINTLFTSAARESDGHEKWVDFLARFWHCECVSKISLSEFADIYRKWCKKRGYNFSELKAEQIHALASNHFGILPKGNFTKTLIVQAIAQLNNICEVISALKVEMNNIAAMLPEYETVLAMHGVGKTLAPQLIAEIGDITRYPKRSSLTRFAGIEPPENQSGAYNQHSRRISKQGSPYLRKALFQVMRCVLQNKDADEPTFQFIDRKRAEGKPFKVYMIAGANKFLRIYYARVMECINTIN

SEQ ID NO: 336524 - protein, 304 aa, unidentified
MFGIGIDVSGENLDVAVHEQAFRQFKNNKRGWSSLIKWLQQWPAKQVVLEASGGYEQKALDALHGAGLPMVRINSGRGRSFASAIGKLAKTDRMDAIVLAHMADALKLTRYVPPADWQRRMGELCQRRRHLVQMRVSEHQRMRAFSEPCLISMLNQHLCEIQKSIRQLDATIAALLAEQQGWRDFAKLKGAGPVLMATLACELPELGKLSGKAISALVGVAPMNRESGTWKGRRCITGGRAIVREALYMAALTAKRYEPRLKEFFESLVNQGKPGKVALVAVMRKMLVILNARKRDAEAQMASA

SEQ ID NO: 336525 - protein, 343 aa, unidentified
MAYFAGLDVSVKETSVCIVDDAGKIVREARVASEPEALLQVLTNTIYRLRRVGLEAGPLSQWLYSVLAEAGLPVICVETRHMRAVLKAQINKTDRNDARGIAQMMRVGLYRPVHVKTLRSQKLRMLLTHRKLLQSKAIAIENDLRATLRNFGLKVGMIGTVKFETRIRELVESLPDLAVMVEPLLIVRRVVREQLGVLHRRLLAVVRDDDVCRRLMTTPGVGPVVALTYRVTVDVPARFRNSKAVGAVFGLTPAKYQSGENDRTGAISRCGDEMMRMMLYEAAQIMLVRSAKWSWLKAWAMKIARHRGMKKAIVALARRLAVIMHRIWVDGTEFRWTREVAAT

SEQ ID NO: 336526 - protein, 343 aa, unidentified
MDHFAGLDVSVKETSVCIVDDTGRIVREVKVASEPEALLQVLMNPSYHFKRIGLEAGPLSQWLFGALAEAGLAVICVETRHMRAVLKAQINKTDRNDARGVAQMMRVGLYRPVHVKTLRSQKLRMLLTHRKLLQSKAIAIDNDLRATLRNFGLKVGMVGRAKFEARIKELVEDLPDLVVLVEPLLIVRRVLREQVGILHGRLLAIVRDDDVCRRLMTVPGVGPVVALTYRATVDVPARFRNSKAVGAVFGLTPSKYQSGEIDRTGAISRCGDEMMRMMLYEAAQIVLVRSTKWSWLKAWAMKIARRRGMKKAIVALARRLAVIMHRIWVDGTEFRWTRDIEAA

SEQ ID NO: 336527 - protein, 337 aa, unidentified
MSYLGVDLHTNSFTVCYRSSKGKERIATFEVRRIGQFRKTLRKRDELTVEATGNTAWFVEQISDRVSRVVVVNPHQFKVIRKSVKKTDKHDAKTLAFFLSKDMLPEARMKSKENAQLHSLAGTRDKLVKQRTALINKIHNILNGHGMKYKKETLSTDKHLKIVLSFDWDVIVRVELEVLAEQIRSLTKSIKKLDEQMSEHGRNLKGHKNLASIKGIGERSATVLLSVIDDVNDFADEDKLAAYFGMVPRVSDSNETVRHGRITKNGSKIGRTTLVQCTLVAKRYSPYLRRYYERIKRHRGSGKAIIATARKLLGIIYQTLKNDWIFEDFPNFVIANT

SEQ ID NO: 336528 - protein, 373 aa, unidentified
MPDVSSNQPADVRLWVSLDVHKLSIVAATLPPTGGQPEVQRIETTRVAIRRFIERLGSPEGLAVCYEAGPGGFDLLRVLTELGVACDVIAPSLIPVRAGDRVKTDRRDAKKLVRLYRAGELVYVQPPTPETEGLRDLMRCRDDLRRARTAARHRVSKQLLRHGRIYRDGKSQWTKMHRGWVARQRLDDEFAQAALEQMLIHLDGLDRQLDALDRDLEQIARTGRWAETVQILTRFRGIATRTALGLIGEIGDFHRFGHPRELCAWLGIVPTEYSSGDQRHRGHITKTGNHHARRLLIEAAWSYQHRPRRPDRGPEPDARAWQAQIRLHRRYRHLTTERGKRSTVATVAVARELAGFLWAAATNQPFALEAAAA

SEQ ID NO: 336529 - protein, 337 aa, unidentified
MIVIGVDVHKQSLTAIAVDEAGRALAESTAPTACELLAWASSLPGERSWAVEDCRQLTRALERALLEAGESLVRVPPKLMAPQRRAGRARGKSDPIDALAVARAALREPRLDHPRPGEQRLRELKLLVDHRDDLIDERRRGQQRLRWHLHELELEPAVPLGALDRGVWLDRLGRRLAGLEQSAQVRIARELVGRCRGLTRTILALDRELQTAAAQTAPALLALPGCGAVSAAKLLGEIGPIERFETDAQLARHAGVAPLGASSGKHRRHRLDRGGNRQLNCALHRIAITQARVHAPARAYLERKQGEGKSRREALRCLKRQLARTVYTTLKSEALLT

SEQ ID NO: 336530 - protein, 307 aa, unidentified
MDHFAGLDVSVKETSVCILDDAGKIVKEVKVASEPQALLKVLGNPIYSFKRIGLEAGPLSQWLFSALAEAELPVICVETRHMQAVLKAQINKTDRNDARGIAQMMRVGMYRPVHVKTLRSQKLRMLLTHRKLLQSKAIAIENDLRGTLRNFGLKVGVVGTVRFEARIQELVETIPDLAVLVGPLLVVRRALREQIVVLHRRLLAIVRDDEVCRRLMTTPGVGPVVALTYRATVDVPARFRKSKSVGAVFGLTCSRYQSGEIDWSGRISRCGDEMMRVMLYEAAQSMLRSKNGPGSRPGLCRSPGAAE

SEQ ID NO: 336531 - protein, 345 aa, unidentified
MSSGAGVQTPASRARIHKEESMHHSSKVHSPIIQASQLSITDYAGVDVSKLTLDCFINNQYVRLPNDPKGFARLRALLPDNAHVVFEATASYHRKLMLDLHEHSIPLSVINPRRIREFARARGRLAKTDAIDARMLSLFGCAMAPEPASAPEPARCALAALNASRDQLVAIRTQLVNHIGHLDLPAALKPCKASLLAIERQIKNLDSAIAAFIKADKVLAGQYSLLTSHRGVGPVCASTLLASLPELGWISRQKIASLAGLAPFNRDSGSCRGLRRIQGGRSRVRRALYMAVLSAICSKADDPIKLFYQRLRLAGKPAKLALIAAARKLLVFLNSSLKNHLPNPA

SEQ ID NO: 336532 - protein, 395 aa, unidentified
MFIVGIDVAKRSHEVCMITSDGQTVQRPFSIRNNCTGYNLMLEKIRKHTNIKSQIVFAMESTAHYWLALFTRLRKDGYHVILLNPIQTSAMRDMFIRKIKTDAKDSFIIAELIRFGRYAESNVAQDRLLALKELCRNRFYLVDMAGDLKRKLIALIDRVFPEYEAQFDTIFCKSSVALLKKYPTPQKLSNAHLDKLTELLWNSSNGHFGEWKARELKELARNSFGVEDCDGAYSTLILLMLDQIQSLSGKADALEKEISRLFQSFDTTVTTIPGVGPIIGAVILSEVGDISRFSSADKLAAYIGVDPSVNQSGEFQAAHAHMSKRGSPYLRRCIWMASQVAVQRDPMFRAYYEKKAAEGLKYMTIIGHVTRKMTAVVFAILRDHKVYEPVLPTAA

SEQ ID NO: 336533 - protein, 400 aa, unidentified
MVVVAVDVGKNTVALSVTDDQRRRLLGPVDFAMTRAGLAATVTRIEAVLPSQARVRVGVEAAGHYHQPLLVPSSWPAGWELRELNPGHVSEQRRVQGRRRVKTDAVDLEAITELVLSGRGSPVTARAEVLGELGAWVTHRRRRVEARTATKNQLLGELDRAFPGLTLALPDVLGTRVGRLVAEHFADPVRLAGLGESRFVRFAAHRGLRVRGSMAARLVAAARDALPTRDAAVARTMLTEDLVLLSVLESQVADAEEHLAQVLPLTPFAVLTSVPGWGVVRAAGYGAAVGDPARWPGPRQVYRASGLSPAQYESAGKRRDGAISREGRVDLRRALIDLGVGLWLNEPSAKAHAAGLRARGKSGGIIGCAMANRANRIAYAMVRDQTAYDARYWATDAEEG

SEQ ID NO: 336534 - protein, 346 aa, unidentified
MEYIGIDVHKSESQICRLTEVGEVIEKRVATRADRFAVVLGSLPRARILIEASTESEWVARVLEELGHEVIVADPNFAPMYASRSRRVKTDRRDAQALMDACRMGAYRASHRTTERQRRVRTLLAVRDNLVRARVRQVQLIRALLRREGLRVRSGQITSFGKRVDELDVPRWLLDIIAPVRSVMAALNHEMLAVEQSIVDIVEEDPVVQRLCTAPGIGPVTAVAFVSTLDLVQRFNGAHKVQAYIGLVPSEFSSGERQQRGAITKTGNTRLRWLLVEAAWSVMRSRKASTEELRRWTLAIATRRGTRIAIVALGRKLAGILFAMWRDGTAFGDKATSQSRVPAQVA

SEQ ID NO: 336535 - protein, 347 aa, unidentified
MNQITRIGMDTSKYIFQVHGVDASEQPVLRKRLGRKQMLGFFAELPPTVIGMEACGSSHYWARELKQLGHEVKLIAPQHVKPYVTRNKNDGRDAEGLCEAMSRPTMRFVAVKTPEQQAALMLAGLREQMITRRTQISNAIRGYAAEFGITVAQGLNQIEPLLARLAQDESVPELARDLFALQGRDYAQLQMELKAIEARLMAWHRANADSRRLAKIPAIGPIGATTLVMKTTDPGAFASGRHFAAWIGLTPKDHSTAGKTRHGKITRAGDERLRSVLVAGATAVIQQAKQGRGHPSPWLIALLKRKPPKLAAAALANKTARIAWKLMVTGESYDGARMSKAPLIAAT

SEQ ID NO: 336536 - protein, 359 aa, unidentified
MTSIAPLAPPRKVIVGVDTHKHLHVAVAIDHNGARLAEHSASADTAGYAQLETWANSLGAVEVFGIEGTGSYGVGLASFLRRRGHRIIEVNRGDRRSRQQNGKSDTLDAEAAARSILSGSATSIPKNADGLSEMIRQVKVARDTARKARSSAIIALKAMIVNAPAELRESLEGLGDKALLERCAGFRIRTMDSTTASAKHTLRSLARRWLLLDQEIKEHDVALDQMTEQASPTLRDGFGIGPDTAAEILVVLGDNPDRIRSEAAFAKLCGTCPIPASSGMTNKHRLYRGGHRQANSALYRAVIVRMRFHQPTIDYVARRTQEGLTKKDIIRCLKRYLAREVYQRVMIDHRARLELAEAS

SEQ ID NO: 336537 - protein, 342 aa, unidentified
MQVTTIGLDIAKNVFQVHGIDAAEKVVVRKQLRRRQVLEFFKALPACLVGMEACATAHYWAPELTKLGHRVRLMPAKDVKAYVKRNKNDAADAEAICEAARRPTVRFVQIKSTEQQGRLMLHRARDLLMRQRTQVINAMRAHLAELGIVAAQGRDGIKELLKIIASEADARLPVDAHTSLVVLAAELQAMQTLIGSIEKRIMVQHRLSEASKRLKSIPGIGLIGATAIAATVPDPKVFGSGRDFAAWIGLVPREDSTGGKQKLGPISKRGDRYLRRILVVGACAVLRYARHKPEKYPWLTKLLERKPFKVVAVALANKMARIAWALLAKGDTYRVPALAAAA

SEQ ID NO: 336538 - protein, 344 aa, unidentified
METKKAKFIHFVGIDVSKGKIDVWLCINFGAGGQFWAQFEQNKKGFTGFKKWLHSHIGKDISNVFVCLENTGLYDDAILYFLAEHKVAACVENGATIKAAKRDQRQKNDKLDAREIAMYAIRYLDELEIWEKPREIIEQLKQLLSQRSSFIEHLKGLKQRQKEIDGFKWAGIQKVKSYTAGVKGLQKDIEEIEKAIWELIKNDEALLKMYMLIVSIPAVGKITAYHFICYTNEFKRVKSGKNLSAYCGVVPFKEDSGTSVRKPPRLPNRANMILKTLLHLCAMTAIKMKGKFAAYYQKKIAEGKHVLKALNSIKNKLVLRIAAVIRNETPYDEKYDYQSMHSVA

SEQ ID NO: 336539 - protein, 347 aa, unidentified
MQVTTVGIDLAKNVFQLHGCDVTGKAVLRKQLGRRRVIGFLANLPRCLVAMEACAGAHYWAREIEKLGHEVRLIGPQFVRPYVKANKNDASDAEAICEAASRPSMRFVAIKSAAQQDVQAVHRVRQQLVKTRTALGNQVRGLLAEYGIVIAQGVAHLRRALPLILEDCANGLSGVMRELLGEIGERLRFIEERLRRYDLWIQRLFRQDERCRRLAEVEGVGPLIATALVAAVGNASEFKSGRELAAYLGLVPGHRASGGRTVLLGISKRGDRYLRTLLVHGARSAMRTIERRRTTRGVWAGRLKLRRGSNVAAVALANKNARVLWALLTKGERYRPTPFSARVPQAG

SEQ ID NO: 336540 - protein, 354 aa, unidentified
MSNPNRWVGVDLHRRRSQIAALDEHGELTLSRRIVNDRDTFRELLGDPDGTHVALEATYGWEWLAELLQEAGYDVHLAHPLRTRAIAAARVKTDAVDAKTLAHLLRTGLLPEAYIAPPELRDLRELLRHRAVLTRMRTAVKNRVHALLARQGILPEHSDLFGNSGREFLAGLELPDGSRNRLDSLMSLIGDFDREITTTTREIDARAKADDRVDVLCQIRGVGRYTAMLVIAEIGEVKRFPTARHLCAWAGLAPSVRSSDGKARLGHITHQGSPVLRWALTEAAQKIPTGGGPLRATFERIAKRRGRNIAKVAIARQILTLCYYGLRDGEIRCLKGQQPDIDDHDHDNELAEVA

SEQ ID NO: 336541 - protein, 402 aa, unidentified
MNPVVGLDISKEESHGQAFLARGKPFRGTFYFEHTRDGLANLHQVLKDVETASKLRPLLILEATGHYQSPVVQFLEEHHYIYIIINPLISNRLRKSQLRKVKTDAADAYLLGELYYKEEFEPFKKRGVQLLNLRYLTRQYESLSKMCIQTKLQFQAVLDQVFPAYKGVFGAMYSRISLRFLSKFPTSYSVLQTDEITLKAKMKELLSSKRGRSEGWINQRVQRLLDAAKQNPFQQTMYASHLINLKVLITLILQYQEHLAELEQNIDALAEEIEEYELIQSIPGIGHKIAATILSEIGEVDRFDHPKKLVAFAGIDPSVFASGKFTATRNRITKRGSRQLRYALVMAVQCGLIRSRNMRLKAFYDRKRAEGKPHKVALIACANKLIHWLYAILKNKKEFRPI

SEQ ID NO: 336542 - protein, 343 aa, unidentified
MGEVITIGLDIAKSIFQVHGVDADGDVVITRKLTRGKVLAFFEKLAPCLVGIEACPSSHHWSRELSKLGHDVKLMPANYVKAYVKRNKNDANDAAGICEAVTRPSMRFVATKSEEQQAALMLHRSRQLLIRQRTMLSNAVRGHLAEFGIVAPVGRIGFARLVALIANPEETHVPLVARNCLSGLVNQHHLVQEEIALLDKHIHAWHRSSELSRRLEEIPGIGPIVATALVASIPDAKVFSSGRSMAAWIGLVPKQNSSGGKERLGGISKQGDRYLRWLLVVGGLAVIRYAKQHGFAKRPWLARLLENKHPKVAAVALANKIARMAWVIMAKGERYKEPTVLAG

SEQ ID NO: 336543 - protein, 359 aa, unidentified
MSKRSMLFVGLDLGDQTSEVILLDADAELIEESRLPTTAVSLQRKFSVLPPSRVAMEVGSQSRWVSHLLKQLGHEVLVANARKLRAIYDNPRKTDRADAETLARLARMDPHLLSPIYHRSPQAQADLAVLHSRDALVRSRTQLINHVRGRVKGSGTRLPSCSADSFSKKVNAAIPEALQPAVDPILDTIASLTRQIRSYDRQIEALCDTRYPEARSLRQIPGVGALTALAFVLTLEDPARFARSREVGPALGLVPRRDQSGDRDPQLSITKTGNAFLRRLLVGSAHYILGPFGPDCDLRRWGLQLAERGGKNARKRAVVAVARKLAVLLHRLWKTGEIYDPFHSSALRPNETEVIPVVR

SEQ ID NO: 336544 - protein, 330 aa, unidentified
MTNAKVRESTSPPLEFVGVDVAQQAFEWALHGVRGTHRAGNDAHGFETLREALQGCHLGLIVLEATGGLERALAGYLLRHGLPVAVVNPRAAREFARSMGHLAKTDAVDAVALAHLAQTLAAKADQAGVRLTLPSAEVELLQALVARRVQLLSMRTAEKNRLGGAVRVLHKSIEAVIKTLDKQIAKLDRDIDAHLERHFTAQRQRFDAIKGLGLTTCAVVLAFMPELGTISGARAAKLAGLAPLNNDSGKDRGKRHIWGGRSIVRSALHMATLSAVRFNPVLKAFYDRLLAAGKPKKVALTACSHKLLRILNAMARTGQPWNERLHAITP

SEQ ID NO: 336545 - protein, 439 aa, unidentified
MKKRRDRVCGADVHKDLIVATITGDEILPIRKNFGTTKSELIKFQNWLVANKCEQVAFEATGVYWMPIYDALNKTLDTIVANPLQIKTVPNDKSDSKDSNRIAILCLNGQIKRSRVFTDEDRDLRMITRARSGYVKTRTQFRNRIHKYLSSSGVKLSSTMDDIFCKSGRYILDGLAEKKPIEEILKGIPSGKIRKKQDLIRSALENGLNDTNRMLLIDALEILDNLESKMEKLSLKILDSVQQKSKDLAIVMSIPGIGFTSASVILSEVGDYHDFQTPKQLAKWCGLNPGENVSAGKKKKCGITKRGSKHIRVILVQAAQTISNMKKTALSRFFQRLIKRKERNVAIIAVARKLICLIYHLLINQELYQEDECRKKRSSQDKSCQAPSFKEEHLTDRVAAIVDAFYHLKESSRKNALMRELGAISMANPGQERPSGGGE

SEQ ID NO: 336546 - protein, 309 aa, unidentified
MDLFIGIDVSKDRLDVCVRPSGETFVVTRDDEGLERLVERLRALAPALVALEATGGYETVVASALATAHLPLAVINPRQIRDFARSTGKLAKTDRLDAAAIAHFAEAVRPPARPIADAEAQALGELTARRRQVIEMIVAEKNRRRLAGQPRVLKAIDRHVDLLQAELSELDRDIDGAIRKSPAWQADADLLASVPGVGKATLRTLIAELPELGRLDRRKIAALVGVAPINRDSGVWRGRKAIAGGRAPVRTALYMAALVASRANPVIAPYYQKLRASGKPAKQALTACIRKLLVILNAILRDRKPWLPA

SEQ ID NO: 336547 - protein, 385 aa, unidentified
MGTAVGKAAERSEAGFPTAAGDRSIVPRSRKTVTKHDRRRLSGTSPNSRQSRRSTSSSHPQDRDKSMEGSFTSFVGIDVSKASLDVYLLPQELQQRVANDKPGIQELLGTLPAAGCCLIVVEATGGYHRRLVADLANAGHQIAVVNPRQARDFAHGLGIVAKTDAIDARSLAHFAKHVRPRPVAPVSEKQAELQELVTRRRQLIDLRTAELNRKETASSKNVRKNVQQLVDLLRKQIEQIEKEILRLIEEDDDWTEKANLLSTTPGVGQISIVTLLGHVPELGQLNRQKISALIGVAPFNRDSGRFQGKRSIWGGRAAVRSVLYMAAITARTHNPVIREFAKRLEAAGKPFKVVITACMRKLLVILNAMLKNRTEWSPKNCLANA

SEQ ID NO: 336548 - protein, 474 aa, unidentified
MKEHKKTKAKTKSQATKVLREQEPNAAGIDLGAEEIWVAVPSERDQNPVRRFEAFTQDLNSIVQWLVGCGVRSVAMEATGLYWIPLYQLLEDAGLKVCLVNARHVKNVPGRKSDVRDCQWLQYLHSVGLLLGSFRPAQAICATRSIYRYRQNLISMATEHVQHMQGALDQMNIKLHYVIDDLTGFTGQAIIEAILKGHRDPVQLAKLRDKRIQASEEKIIKSLEGDWRKEHLFVLAKAWAQYQEVQKQIQDCDRELLQYTQELEACTTVLKPVKVMRLRAELVDSEPRAKLPTTKKARRKTSKNQPQGPWHQELERFFGVDLTLIPGISVLSGLTLMTELGNDLSAFKTPHHFASWLCLCPDNETSASKVLRRRTRRSQNRVRQALRMAASSLHHDKSYLGEKYRRLRARLSPPKAVTAMAHQLARIIWTLITRQVPFDLSLFAQQEKLNAQHRFKRLTASARQMGYQLTPLAA

SEQ ID NO: 336549 - protein, 321 aa, unidentified
MVYIGIDISKSSFVAAYPSANGYCTRNFPNTTAGVRKFIATLSVTEYHCVMEATGNYGFLLLYLLLQSGMSVSLVNPKQIRHFARMMMAVTKTDEKDACMIAMYGEKMNPPIYKMPSQAIILLKQKKTVIRQLRKQLIASKNLRESLIVLPYRDKACLKTLDRTIAFLTKQIEQLEAELTDIASSEFDKQLKALTSIKGIGVTLATALILATGGFTYFDNAKQLSRFIGICPTYQQSGTSVNIRGHINRNGDENLRTLLYIASWSALRYNTACRECYLRLKTNGKPSKVALIAVANKLVRQAFAIATTDSTYIDGFISTKK

SEQ ID NO: 336550 - protein, 364 aa, unidentified
MKKSSKTQRGGTVAESKPAQVVGLDLGDRYSHYCMLSSTGEAMEEGRIQTTASAMEKHFGSEPRMRIALEAGTHSPWVSRLLKSYGHQVIVANPRKIPTLTKSESKNDRNDAEQLARMAAFDPKLLHGIEHRSLERQQDLNLIHTRSVLVRARTMLINSARGLVKSAGQRLPACSSEAFPEKVPAALPPALKAACAPLLKQIAQINQTIGAMDKQIDKLNKKYPEITVLRTAPGVGPVVAACYVLTLDSPQAMETNRQAGAYLGLRPGQQQSGDSNPQCGITRTGNTYLRSLLVQSAQYILGRFGPNSELRRWGLKLAASGGKRGKKRAIVAVARKLAVILLSMWRNRKKFEPFPQSAAQLATV

SEQ ID NO: 336551 - protein, 331 aa, unidentified
MKKVTQTIGIDVSKLTLDVFIRTTNVHKQFSNDSKGFKQIISWLSKQKINLEETLFCFEHTGWYCLMLSYFLYENNHRYCCINAIEIKRSMGLKRGKSDKADAWEIANYAWLRRDELVPSTPPAKKLIELQRMMSLREQLVKQQTASKNLLKGMAEIVDDELQDVSMTILKETINHSEKQILATEKAMNELIKQDETMVTNYKLSKTVKGVGMVLAVQMLLHTHNYTRFESSRQFAAYCGLVPYPYQSGTSINGRNKIHPISDKKMKSLLSMSAISAIQHDKELKLYYQKRVEEGKPKMVVLNIIRNKIVSRVFATVNRGTPYVEMNKFLA

SEQ ID NO: 336552 - protein, 401 aa, unidentified
MSLYVKGFGVAAVQELIKAAKKNFADYIILKNLVMKQQTSATTETGIKGSNIIDFTGKTLYVGIDVHQKDYQAAKVLNGICLGNHRMESNKEKLIEHLQHPYPGATFKCVYESGAWGFTLQRTLQAAGMECIVVHAADAGTTDKERRRKTDKADALKLAHGYASGDLKGIHVPEEDRQKDRSLMRYRKQLTGDITRSKNRLKSLLKYQGIDLPPKYAGNNWSRNFLNWVEQQAEKDALLKNTLLLMLEQIRLLRQLLLETERKLRQMRKTKYADKAELACSVPGIGPTTAMLFLLETGDINRFKGFDSLNDFAGLCPDTDSSGDVHKDTGITTRRHKQLRSALIEAAWQAIKSDPALMDSYQALCKRMKGTQAIIRIARKLLRRLRTVLLNDIPYQKGMVA

SEQ ID NO: 336553 - protein, 346 aa, unidentified
MTIVETRAITGGVDTHADVHVAAALDPIGGLLGVEEFPATAAGYAGLLGWLGGFGTVALVGIEGTGSYGAGLARHITAAGVRVVEVDRSDRQDRRRQGKSDPLDAVSAARAAQSGRARGAPKGRDGAVEAIRALMVAKRSAAGERTRTINQARALILTGPDDLRARFAQHTAAALVAGIASLRARPGDAAGHATRVALRELGRRAVFLDGQLERLDELIVPLVTARAPGLLALYGIGPNTAALLLIAAGDHPERLRSEAAWAHLCAAAPIPASSGKVTRHRLNPGGDRQANHALWRIVFTRMGSDPATRAYAGRRTKEGKSKAEIIRCLKRYVARQVYPHLRPAAG

SEQ ID NO: 336554 - protein, 352 aa, unidentified
MTLYIGVDFHPHQQTVAWCDTQTGETDTCTLQHNLSEVLKFYQSVSPSIVGIEASSRATWFEQLLEETNHQLLIGNPALIRARARSRHKSDNRDAQLILDLLVKDEFPAIWRRSQASSQIIDVLHLRRQLVNQRTQTYNRLQALAHSGGLPKGKMKTLGFQSLLKEVVMNESGQMQREHLFSLLEQLTKQIRELQSWLNRKASSDKQVQLLMTQRGVGYLTALATVHTLGDVSRFEKVSKQVIAFAGLDSLEKSSAGKTRFGRISKAGSPLLRGLLGQSANIVIRYDTRLKSFYKGLAKRKPKAVAKTATARKLLVKLAIMLRDSITAEEFDRRGIAVGNARFLTGSDVTAG

SEQ ID NO: 336555 - protein, 348 aa, unidentified
MAYRIAGIDVHKKILAVVVCDIDVEGEYTFEPRKFSSSPEQLRYLATWLLEQEVEEVVMESTAQYWKPVWEALERYWKPIFERREGAKRKSGTLHLAQALSNRGRQGRKRDFPDAERLVKRLVAGELTLSFVPDTEQRLWRTVTRKKNQVRRDRIRLQNQLESFLEEAHIKLSSLVSDLFGFSSQRILGAIAQGETDPAQLAALADERLRATSEQLCDALGACTELNPVYRRLISMALEELRLIDEQISRLDRELAGLLKAHQGAVQRLAEVPGLGVDSAQQIIAEVGPIAAAFPSAKCLSSWVGVCPGSDETAGVNYCHRSPQGNRHMRRLLHQVANAGARTKGSIF

SEQ ID NO: 336556 - protein, 404 aa, unidentified
MNDSMIGYAGVDWAMDGHAVCVVNGHGTAVIEFDVEHSAEGLSEMCRRIAGTGARRVAIERPDGPVVDALLGAGLEVVVVSSRSVKALRERYGTSGNKSDRSDAFVLADCLRTDGHRWRSLEPDSPATVTLRGHVRARKDLVETRVAVANQLRAHLRIVFPGAVGLFSAIDRPIALRFLERFPSATSAGWLSEKRLATWLRANSYSGSKDPAELYTRLSAAPAGVIGVDGDARGAITLAYVNVLKTLRTQIDELNTRLDELLDAHPDAPIFRSLPRCATVRAATLLAEIGDCRARFPDPESLCCLAGVAPSTRASGRHRVVTFRWSADKKLRDAICDFAGDSWRGNEWAAHRYHELRASGKTHPHAERILARSWTHIIWRCWQDNTTYDPTRHGAHQRLTTQTA

SEQ ID NO: 336557 - protein, 336 aa, unidentified
MNGSTGRWVGIDVAKSKLDVALLDERGKVKNHVFANDAKGHALLIAWLLDRAGAAIQVHVCMEATGPYGEASATALADAGFVVSVVNPARVKGFAQSELVRNKTDRADAALLARFGQTMQPEPWVAPPPEVRELRALVDRLHSLKEMHQQEANRLESALNQPGTRGSIESHLQWLQTSIKDLERQIDDHIDGHPRLRGDCALITSIPGVGKTTAAKLLAYLGDVRRFKNGKALAAFIGVTPRLTLSGSSVRGRSMISRNGHAQVRHSLYMPALVALRHNPLVSVFGIRMRAAGLAPKAVIAACMHKLVLLVYGILKSRQPFNPNLGAIRLDFQDGI

SEQ ID NO: 336558 - protein, 351 aa, unidentified
MAMLADTVELVIGVDTHKDTHTAAVVAATTGAVIAQATVAATPAGYRQLLALADQQPGQRVWAIEGTGGYGAGLTRFLQAHAEQVVELDRPKRAARRHGAKSDPLDATRAAREALGRDQLAQPRAAGHRAALQARLTTRRSAVQATTDAQRQLHALVVAAPDPLRGRLRGLTTHQLVTACGRLRQRAAWDTETAATVASLRALARRVHVLDAEIAEHTRAITTLVRAWRPELLTPCGVGPIVAAMVLCAWSHPGRCRTDAAFAMLGGAAPIPASSGQTVRVRLNRSGDRHLNQALHLIVLTRLRYDPATRAYAQRRRAEGKTNREIRRCLVRYVARQLYRLLEANPPFDPT

SEQ ID NO: 336559 - protein, 362 aa, unidentified
MNYVGVDIHKKYSVLCAVDERGRKLREARVEGNAPFGFAQFFSGLGGPSKAVVEACWNWGLIHDELEELEGIEEVVLAHPYKTRLIADAQIKTDRLDAYALSTLLRGNLVARAHVPRRETRMRKNLLRQRLYWARLRTMLRNRIHALLDRQRDLELPQCSDIFGVRGLSFLRRLELPETDAALLREQLALHDLIAQQMKAQEKRIGLEFGSEAMHRQLLSVPGIGPTLAAVIACEVDSIERFSSAEKLCAYAGVVPTTHSSGGKTRHGQLLPFCNKWLRWALIEASWVAIGCSPYFGALYKQHRARGKKANNAVLIVARRMCRIIWQLLHEKRDFEKRPLRPNFNFPGCSVVRLTAATAARP

SEQ ID NO: 336560 - protein, 429 aa, unidentified
MICAAVERCAGIDVGKTFLAVCRMCGPLDGEARVEKQRFGTIRSELEKLRDWLKEGGITHVVMESTGSYWKPVFNVLEGSVKVYLANPQEVKTRKGHKTDDKDGWWLAHLLRHAMIHPSFIPPRPIRELRDLTRRRKRLLSHATAEKNRVQKILEDANVKLGNVLSDVFGMSGQLMLEALLKGDTAPGQIALLAQGSAKKKIPEILAALEGHQMSDHHRRMIRYSLEHLKFLEEQLQQMDRDIAAQIRAAGLEEQRRLLQTVPGIQDRSAANVLAETGADMQQFPTPKHLSSWAGLCPGNNRSAGKNKSSRTTGGNPWLRGTLTESAWAAAATKNCFLKEKFWRLTSKSGGKKPPALIAVAHNILNLVYQVLSTGQPYQERGAPPLQENQRQRMIRHHFHRLGKLGIAIPRYVADSEEPKPKTCKPRTQ

SEQ ID NO: 336561 - protein, 413 aa, unidentified
MDVLHPRCCGLDVHKNSISACILVQEAGRVQKHQRRFGAMTQDLQELANWLRQFEVTQVAMESSGVYWKPVWNILEGQFTVVLVNAQHIKNVPGRKTDQKDAEWIAQLLQHGLLRPSYVPCEVIRDLRDLTRMRTSLSQEASRISSRVQKVLEDANVKLASVATNTLGKSGRAMLEEIIAGQNDPEYLASLALGHLRAKAPQLRLALDGKIRPHHRFLLRRLLDQLRFVEHEIVLLDERLEEIGRERPELSQAVARWDTIPGIERVAGWTLLAEVGNNMAQFPTAEQLASWAALCPGNHESAGKRLGGTTRKGSPWLRRMACQCAWAAARTKNTYLSAQFRRVAARRGSKRAIIAVAHSIVIIGYYLQKNQRNYEDLGGDYFDRIDSDGLKRYFIRRLEKLGHKVTLVPIKAA

SEQ ID NO: 336562 - protein, 386 aa, unidentified
MVGQAVVKIAVDPHKRINAVVAVDATGKVLARGTFAQSTTGFADLMGFARRWPRREWAIEGATGVGKNLAQRLVVKGETVFDVPSKKSSLVRAFSATSGRKSDDVDAYSVALASLHSDLLQVRVDERAETLRLLSNRRDELVGMRTQAVCRLHRELQILIPGGASTGLTAVKAKTLLGSVRPRDEVGKVRKALALDQLADLVAIDKRLKDIGTQIKTVVAETRTSVTDVRGVGPVVAAILIGEVRDVSRFPTKHHFASYNGTAPTTWGSAGDARPCVNLHGNRRLNHAIHIAAIVQLRFDCDGRRYYLRKIADDKTPKEARRCLKRRISDAIYHQLLVDAQAGERGPGGQMGATTKISAADPAPTVDSSIKPQPGPHQEIAAPRAS

SEQ ID NO: 336563 - protein, 324 aa, unidentified
MLPTLGIDISKDSFHLELSINDKLRHRKFANRKEGFGELCVWLAKHKATQVHACLEATGPYSEALALYLHQQGHTVSIVNPVQIKAFGQSELLRNKDDRPDAGLIRRFCEKQRPAPWTPPPMHLRELQALTRHLENLIETRQQQVNRLETTNTKQVTKSLRKLVTHLDAEIERTEQQIDDLVDRHPDLKQQSELLESIPGVGKRTAAKLLAEIPNITQYKSARQVAAYAGLTPRNNRSGTIRGKTRLSKTGNARVRKALFFPAIVAKRHNPIVRAFCQRLSSNGKNKMQVIGAAMRKLIHIVFGVLKSGKYFDPSHELLLNSVS

SEQ ID NO: 336564 - protein, 355 aa, unidentified
MSAKTRQDFSAVAVIGMDIGKDVFHLVGFSSDGSLVLRQKIKRLALVATFQTLPPCIVGMEACLSAHFVSRTLRRMGFEPRIIPAIYVKPFNKGQKNDYNDAEAIAEAALRPNLRTVSEKSQDQLDLQALHRVRSRLVSRRTATINQIRAFLIEQGITIRKGLRAVRNSLLSVLDERQDEISPRMRHIILDLHDDWMRLDVRIEAVSDEIEGIGQSEAHCRDLRTIPGVGPIISTALVAAVGKGEAFESGRDMAAWVGLVPRQYSTGGRTTLGRISKPGSRYLRTLLIQAAKIILMRPHNWPGLSFGAWLAEADLRMHRNKLAVALANKLTRIAWAVLRHGRGFDARMDTVAEAL

SEQ ID NO: 336565 - protein, 350 aa, unidentified
MTIVGGLDVHRQQITFDYVDNDGLVRWGQIRPATRNTLRAWLAGHCPEGDGEFALEGCTGWRYVTEELAGAGVDVHLGDPAEIAVARGRKKRAKTDRADARLLRTLVLEGRFPESWIPPAHVLEIRTLGRLYCTLMDERRAWQQRVHAQLFHQGCPPIRALLSEAGRAALASVEVSAAGRQYVDTALRRIDELTAEIDPLRTQLVGFARRQRGCQALQRHYGIGGLCAAIMWAEIGDARRFSSSDQLVRFAGLDVTVYSSDGKRSPGHLSRQGSPELRWAAFEAAKSAARRASPDHAYYHKLAAKHDGHNGKNPTLAVERKILRRCYHTLRELGDAALALPDTPPQEVAA

SEQ ID NO: 336566 - protein, 423 aa, unidentified
MFKIILNNCCGLDVHKTRIYACIGITDTHSRTEYYEANFSSFPKDLRKLSEWLHKYNCVDVCMESSGKYWIPVFNVLEETCKVTLAHPKYTKPQKGNKTDRKDARWICDLFMCGMIKPSFIPPPAIRHLRDLVRYRVKLTNTLTGEKNRAQNCLTVSNLKLDDVFSDVFGKSARSITEYILAHPGEKFDVAPFVDKRCKTPLDVIQDAVDGAVSPEQAVKLRECLDHIDQLIAHRERIEKEILSIAEPFSPQLTLIRTVPGLNRDPMTAIVILSEIGSDMSVFPSAKNLVSWAGCCPRNDRSAKHVKSTRISQAGSCLKPLLVQVANALINSKDHPEFVERYRRIKSHRGHKKAIIAICKMLLTAIWNILSTGEVYNPSGYLIQTPRPINDTKVLTQKQALELLRLRGYVIKDDPLEPKPLPA

SEQ ID NO: 336567 - protein, 334 aa, unidentified
MDIRLYVGADIAADSIQIDWLNQSNQQHQQMTLEQHKRDYARLVKLLRRQVAAEQIHVVMEATGNYWMAFAEYLHQAGLVVSVLNPSQAKHFAQARLQRTKTDRVDAYLLREYGRVMEPAAWVPPPPICQQLQQYLNRRDDLILMHNAERNRLHALKHHPHALPDLLKPLQTHIANLKQQIKTLEQLIRRLLLSQHDWAQAVRRLRTVKGLGYLTIARILTSTHAFARCATPEEAASFAGLAPHVRQSGKWKGKSVVGGGGHAALRQALYMAALSASRFNPRLHTFYTQLRQRGKLEKVALCAVARKLLHLAWALVIKQRDFDPNWHSQAQPAA

SEQ ID NO: 336568 - protein, 344 aa, unidentified
MTYYAGLDVSLRTVNICVIDDQGELVAETKLASDVQDMVAYLDDLDLVVETVALEAGTLTQYLTYGLQSAGFEVICMEARQVKGALSAMRNKTDKHDARGIAQILRSGWYSRVHVKSMQSHHIRMLLSSRKAVLSKCVDLENEVRGLFKIFGIKLPPKLGHGAFDNAVRDIIEVDETLSHALLPLLDARLVLYQTFRVLDNRTRHLANDDPVCVRLMSVPGVGFITALTFKAGVDDPTRFKRSRTVGAHFGLTPRRFQSGEMDIEGHISKCGDADVRSTLYTAANALLTRSSRWSPLKAWGMKLAKTRGHRKAVIAVARKLAVILHRVWIDDTQFRWGTEGVRS

SEQ ID NO: 336569 - protein, 391 aa, unidentified
MIYVGIDVAKDKHDCFITNSVGEVLFKSFTIPNNREGFETLFQKIQSVSDDLTKVKVGLEATGHYSYNLLRFLLDKGLPTYVINPLHTNLYRKSLSLRKTKTDKVDAHTIASMIMSDVNSKSYSDTSYHNEELKSLTRYRFDKVKERAKLKSSVSRLVCILFPELEKLVPTLHMSSVYSLLSEFPSAHDVASAHLTRLIHLLSESSKGRYGRDTAICFRDAARSSIGSHMPAKSLELKHTIKLILELTSEIDEIEAEIKTIMDEINSPILTIPGIGYKMGAMIIAEIGDFSRFDSPDKILAYAGMSPSIYQSGQLDNCYAHMEKRGSRHLRYALYNATKYVCHWDESFGTYLAKKRAEGKHYNVALSHATKKLVRTIYAMEKSGQAYINAA

SEQ ID NO: 336570 - protein, 439 aa, unidentified
MPDDQSLSVLLLQNQEVILLSFKIFRKNCCGLDVHKTWIYACIGITDTNGRTDYKQTRFSSFSKGLKELSDWLAKYHCTEVCMESTGKYWIPVFNVLEKADVSVILSHPKYTKPQKGNKTDRKDAKWICDLFMCDMVKPSFIPPADIRHLRDLVRYRFKLICMITGEKNRAQNCLTVSNLKLDDVFSDVFGKSSRSITEYILEHPGDLFDVTPFVDRRCKTPIEEIQAAVDGAVSPEQAVKLRQCLNHIDELEKHLEQIDQEILRLSDKYQAALDLIRTVPGFDKNPMTAIQVLSEIGGDMSVFPSAKHLVSWAGCCPRNDQSNKKIKSTRISRAGSYFKPVLVQVANGLLRSKKHPEITDRYKRIKARRGHKKAIIAICRMLLTAIWHILSDLKPYTAEGFRESCPVNESKVLTSSQALNLLKQRGYIIKNDLTPAIN

SEQ ID NO: 336571 - protein, 478 aa, unidentified
MIKSVGIDLAGVGEHKVRCLDEEAQVCDGFGFETTLEGLAKLEEHVFRDGSNPVIIFEPTGLAWLVIAVYIRARHPDCRLVRTQARNVVALRKYLRRSSKSDRIDALTLAKMPFVDIERLNDVYLPPAKINAILRLARQRQRLESDIAGRKKRILSIVDGYLPGVRQPFSNLWSPQGREFLRTQLNPLAVVRAGEKALNRFLTRARVRGKKEANESHWVYRACQNIATIYEMSRSSGAVDDDFFADLQDEIARELRLMEVEEAESDTIAQRIEILYRELHPSDNLRTIPGVGELTAPVFLAVVGDPARFQSQSAFANYNGVVPDSRQSSNTEAKGLRMTKAGPSIMRWALYQASQIGRRYDPQLASIYYREMVHNGKNHKQAMGAVMSHIGARILAVLQENKPYELRDIQGKPITWEEARKQILTNYQVPEEIKQARRRRRTVGNSAKSQRKRREMVAHRAHEATGAPQPVVTTASPG

SEQ ID NO: 336572 - protein, 349 aa, unidentified
MKILAIDLGKTKSVACVYDVDSGSATFRKIPTAADAIRGLLTEHRPDRVVIEVCPAAGWIGDLVSCGCTELQLANTAAPAWRWSNTKRKTDRDDALRLAQLSALNQLPQVPATPRPTRQWRALIRYRHHLVCRRTQLRNRIHALFDREGLVLPEGKICWTQNGTAALRKYACDVKEVDDDDLWRGELDCELDALQSVDELITRVESKLDVLEQKQAKCRLLRTIPGVGPRLAEIVVAVLGDPHRFQKSKHVGSYVGLAPRQYQSGDSDRKGHISRQGNGLLRAMLVEVSWVSLQYNDWARSVYERVRRGSPARKKIAIVAVARRLLVRCWAMLRDGTCWKQPTLAASRG

SEQ ID NO: 336573 - protein, 402 aa, unidentified
MNAVGIDVSKGKSMVAIMRPFGEIVSAPFEIKHTASGINSLVELINSVEGESRIVMEHTGRYYEVLAHQLSEANLFVSAINPKLIKDFDNDSLRKVKSDKADSVKIARYALDKWQNLKQYNVMDELRNQLKTMNRQFGFYMKHKTAMKNNLIGILDQTYPGVNTYFDSPARSDGSQKWVDFASTYWHVDCVRKMSLNSFIDHYQNWCKRKKYNFSQSKAEEIYGKAKELVPVLPKDDITKLIIKQAVNQLNSASATVESLRTLMNETASQLPEYPVVMAMKGVGASLGPQLMAEIGDVSRFTHKGAITAFAGVDPGVNESGSYEQKSVPTSKRGSSDLRKTLFQVMDVLIKTHPQDDPVYQFLDKKRAQGKPYYVYMTAGANKFLRIYYGRVKEYLSSLPES

SEQ ID NO: 336574 - protein, 362 aa, unidentified
MRIIGCDLHARQQTLAMLDTATGEVVHKTLPHEGESVREFYSTLPSPVRVGIEATGSMKWFLNLMEELGIDCQVGHPATIRAAEPRRQKHDQRDAELLLKLLVENRFPSIWQPSKELLDLRGLLLHRHQWVRLRTRIQNALQAIALANGLRRGSSLWSQSGQRAIASLPLATHTAQRRSELQAMYARFEAEIEQLNQRVLEQAGQRPTAELLMTHPGVGPITALATDVFLGDPKRFSDGKALASYIGIIPREHSSGGRQRLGGLSKQGNPLLRFLWCEAAVHAVRRDPELRRFYRRKLVQKGLGKARVAAARKLGIRLWIMLRDQIDYQEFCRRGQMQQRSGDACAGMPGRRYGAKSHRLID

SEQ ID NO: 336575 - protein, 421 aa, unidentified
MPYRIAAIDIHKKVLMVVIATVADQVNDPAGEAIEFECRRFGTGASERKHLASWLLEHGVMEVVMESTAQYWKPVWMDLEPHIAKLHLAQAHSNRAPKGRKNDFKDAKRLARRLLADELILSFVPDPEQRIWRTMTRGKHQLVRERVRLQSQMEALLEEMRIKLSSVISDLLGVSGRRILTALSKGETDPVKLAALGDERLKCSKQALADALTGSPEPTHLELLKLYLERLALLDQQISRLDQMIATALKPHEDAVIRVAQIPGFGADSSAQIIAEMGADAAVFDSAGEFSSWAGTCPGSEESAEQNHSSRSPKGNRFVRRILTQAAQAAVKKKGCHFQNVFHRLIPRLGYNGAVWAVAHRLGRVVWIILHEGVSYIEQGAESNPKAKKRRAQKLARALRNLGYQVTLTPINPEPAVEAGR

SEQ ID NO: 336576 - protein, 392 aa, unidentified
MIYAGVDIAKMDHVIGAVDETGAEAAKPMKFKNTEAGFEKCIAWLESVADSEDEVFVGMEATGHYWRACFAYLMAAGYRVCVVNPMQVHAMRKLKSLSGVKNDRIDSWLIAETLRQGDYDETRLATDEVQALKQLTRYHQGLKQELATVKTQAICVLDAYFPEYAGLFSDMFGAASLKMLAECPTPSEVARKRVSSIAKLLSEGSRGRLGAEKAAQVKAAAKSSVGIRLGEEAASFQIKTMVSQVEFLNATIAKVEKEVASLLEKVEPNITTIPGVSTTTGAQIVAEIGDVRRFKNAASIVKYAGLNSGVDESGKFSAEGVPITKHGSPYLRRSLWLAANRARQCDPRLKAYYEKLRSKDKPHRVAVTAVARKLCHIVYAVMRDGEPYDPAK

SEQ ID NO: 336577 - protein, 345 aa, unidentified
MNKLSRVGIDLAKSVYQLHGVDRSEQTIWRRRLTRGKWLKVLLDTIEPGCEIGMEACAGAHHWARQLQAKGFTVKLIAPQFVKPYVKSNKNDANDAEAICEAMSRPHMRFVAVKTVEQQDIQAVHRIRSGLLSQRTAKANQIRGLVAEYGLVAPQQLASLRAAIPSWLEDAENGLSARFRRLLNDLWDDLKYLDQRITALDQEITTLAQQDPVAQRLQQLRGVGPLIATALVAAVGNAEQFSNGRQMAASLGLTPGQHSSGGKERLLGITKRGDVYLRTLLIHGARSVIYAARHKDDRLSQWVTGLAKRRHPNVAATALANKTARIAWAMLRRGTDYQPDMMMPA

SEQ ID NO: 336578 - protein, 317 aa, unidentified
MTYTNRFIGIDISKSSFDICVLPDTSLASFSNDASGIAQFLAFVSRLDNVARLVLEPTGGYERSVVDALLAAQLPVARINAKQIRQFARACGQLSKTDRIDAFVLADYARRMETKVLTQASAAQTTLVDLVSRYRQLSHMIVQEKNRREKLRARNENRAKAWIEETLDFLMRQRQSVVDAMEACLRSDKDLADKAQVLTSLKGIGRKTACFLIAWLPELGLLDKGQIAKLVGVAPVNRDSGLMRGKRMIAGGRKPARDALYVAALPAIRFDPAMRAVFDRLKAKGKPGKVALVAVMRRMIIILNARMRDYRATVLDP

SEQ ID NO: 336579 - protein, 433 aa, unidentified
MQDVEDEPLFCERVAGLDIAKAEVEVTIRVPSDTTAGRRQQETRTFGATRRELESLGDWLACWGVTKAGMEATGDYWKPVFFVLESRGFDCHLYNAAQVKALPGRPKTDRADSVWLARITERGSVCSSFVPPEPIRRLRTCTRYRRHLTQARTAEKQRVEKLLEDGHLKLSSVISDIHGVSGRDMLNTIAAGQRDPKALAQLARGTMRGKIKRLEEALDCAFFTGEHAAVLAMMLTTIDHYTTQIDNLTARIEELAEPYLHQIAQLDEIDGIGQVCAQDIIAETGTDMTVFPTAAHLVSWAKWSPQVRQSAGKRKGSNATGRGNPYLGAALGEVSISAGRTQSFLGARYRRLARRMPKKKALVATGNSALTIIHALLSDPAARYTDLGPDYYEQRMHTRRQARNHVRSLERLGYKVTIQAINPDTGELLAAAG

SEQ ID NO: 336580 - protein, 404 aa, unidentified
MIFVGDDWSEDHHDVFLMDEAGKRLGSRRLPEGLVGVRQLHELVATYAEEPEQVVVGIETDRGLWVGALTGAGYQVYAVNPLAVARYRDRHHVSGAKSDASDAKLLADLVRTDRHNHRVVAGDSADAEAIKVLARAHQSLIWSRTRHTNALRNALREYYPAALVAFEDLSHGDALAVLDRASTPEQGAHLPLTAIQAALKRGGRQRNIAARAREIRAALRSEQLAAPAPVAAAFGATTRAAVGIITALNRQIGELETTLAAHFETHPDADIYLSLPGLGVILGARVLGEFGDDPNRYTTAKSRKNYAGTSPLTIASGKKRAVLARHVRNRRLYDAIDQWAFCALANSPGARAFYDEHRAAKQTHHQALRALGNRLVGILHGCLRHRTHYDQHKAWAHRQTTAAA

SEQ ID NO: 336581 - protein, 411 aa, unidentified
MDIVHERAAGMDISKRDAKVAVRVPGKRAGTFTTSVTTWGATVGQILELIDFLTAQHVTTVVMEATSDYWKPFYFLMEDSLPVMLVNARQARNIPGRKTDVSDAAWLAQLAAHGLLRASFVPPEPVRQLRDLTRARAIAVRDRTRQVQRLEKFLESTGIKLSSVASELMGASSRAMLDALVAGERDPVVLAGMAKGVLRKKTPELEAALHGRFTEHHAFLVGEYLTQIDTATGMIDRLTARIEDKISPFRAARDALTTIPGISVTVADVIIAETDGDMSVFDTPGRLASWAGVCPGQNESAGRVKSSHTRPGDKYLKAALGVAALSVARSKGTYLAARYRRIAARRGPIKAVVAIEHTILIAVWHMLTNGETYLDPGADYYTRLDPQRAKNKAIRQLQNLGYEVVVTPAAA

SEQ ID NO: 336582 - protein, 375 aa, unidentified
MGELITCHVGLDTGKAKSVGWAIFRDGSEDFEFEMATERHAVRRLVRRLSRKAGGPVSFCYEAGPCGYELQRWIRAEGASCVVVAPALLPGKAGERVKTNRRDAQKLAKAHRGDMLTEVHPPTPEEESARDLVRGREDLVGDIRRCRQRIKSLLLRRGLSLPGSKGTWTLAYRRWLKSLAWEHEADRVVFSDYLLALEQGEERLKQLGTKLKELSQQDPWVERVGWLRCLRGVDTLTAMTLLTELHGWERFRTPRELMSYLGLVPSENSTGLGVRRGRIGGGNRFARRVLVEAAHHYAHRPGIGVSLKKRREGQPGWVLAMADRAQLRLHRRFWRLMANGKNRNKVVTAVARELGGFIWAILQGPATTASTGKAA

SEQ ID NO: 336583 - protein, 328 aa, unidentified
MCKATFYVGVDVGKDQLCVAVDGHKPRSFQHAPGGIKALYNWAGKLAGEAPLHFCMESTGVYSRSLAVRIGAFAGVEVSIVNPARIAAYARAQLRRTKTDGVDAAVILSFAQSQKPTPWKAEPEALRTLYHLVVQADALRATLRRCTNRGHAHKYIPDLPQTVSRTQKALRRCLEAQIAKIENAIESLCAQEPYIREAMGIMTSTVGIAAHSATRLLAYGGERLTALSAKALTAHAGLAPHHYQSGTSLNGKSRIAKQGDKRLRCALYMPTLVAIVYNPVIKHHYQKLLIKGKPKMLAVVACMRKLLLMIRSMLKNKKTFNPKLIPLT

SEQ ID NO: 336584 - protein, 416 aa, unidentified
MDRVVIGMDPHKASVTIEARDDREVLRARGRFATDGDSYRQMLRVARQWPARVWAVEGANGIGRPVAQRLLADGERVLDVPAKLAARVRVFDTGQGRKTDATDAHAIVLVALRNKGLRELTVDPALEVLRLLCDRRDELSRARVQALGRLHRLFLQLLPGGAPTKKSTARYSALLAGVRPVDPVALTRRRMAAAEVADLQRLDAELKDLTGELKAHVLAAGSHLMDIHGVGPAGAARILADVGDVHRFAGRARFASWTGTAPIDASSGEHVRHRLSRAGNRRLNHVLHIAAVVQLRNDTPGRAYFRRKRAAGKTGLEAIRCLKRRLSDAVYRQLAADARTHEPDAGPGGHCGASLQSSAADLTPRVGTSDQPQPGPAPTTLPAPGTAEKNTGPGAAAARADAPEASTCSAPPDERR

SEQ ID NO: 336585 - protein, 343 aa, unidentified
MQTITTIGLDIAKSVFQVHGVDAGGQVIVRRQLKRRYVLTFFQKLSPCLIGIEACASSHHWSRELQALGHTVRLIPPAYVKPYVKRQKNDATDAEAICEAVTRANMRFVPTKTPEQQSGLVLHRARHLFIRQQTAVINAIRAHLAEFGIVAPVGRHGVEELLTVVADPNDERVPEIARACLLALGAQLRRIKEQILEFDRLIRAWHRSNEMSMRLEEAPGIGPVLATALVATVGDPKSFRSGRNFSAWIGIVPKQHSSGGKNRLGNISKQGDRYLRGLFVAGALSVIRYAKIHGTKHRPWLTALLARRPTKVAAIALANKIARMVWAMMARGERYKEPVALAR

SEQ ID NO: 336586 - protein, 523 aa, unidentified
MARAPKSKKHSSPAPQTIHKARGVISPRVQRVGPEHFGIVCVDCAKARSKWMLTDFYGRILVPPTEVEHTQACFASMIERLRTALEQAGIRDQIVVIERTGRYHRPVQRAFAKAGFEVRIIHPLTTKQHRQPANPGNKTDDTDLAAMQRGAVNGFGLLEPPADPLSIRLQLLARHRRDLVEKSVALRSQIHEHLYAIMPGYSKYFEDIYDARIPLWIARQFGSATAILQAGLPGLIVQLRRAEIRVHLPTLEKILAWARTAPAAEDESHLHLKILTELDDDRLSKVRGVRAIEAELAGLLVQTPYVLLMGIPGINVVSAAEFAGEMGPIERYATARAITGRAGLFPSRYQSDHVDYPDGQLVRCANRNLRRAIMMIADNLVKCNDHFRVLATGWRLHGRDARAVRVQVAGRFSRIAYQMVAGRKAYRHPCCQQRDYILNKLLIFHTDNEIGYDQLMRNLDAAVAQLPRSEYREEAVPLADELDRVLKKRGKGPRPLSEILPVVLAKLGVKPVRLPKSGEAILT

SEQ ID NO: 336587 - protein, 360 aa, unidentified
MAKAKLVHLSPVVGGVDTHKDLHVAAVVDQNNRVLGSEFFATTRQGYRQMLVWMASFGTVKRIGIECTGSYGAGLLRYLQSTGVEVLEVTAPDKMERRKRGKSDTIDAECAAHAAFSRIRTVTPKTRSGMIEALRVLKVCRKTAVAARRIALQMIQMNIVSAPDELRDQIRHLTRMQLIRTLASWRPDVTAYRNVQDAYRIALKSLARRYLELHDEIADLDIMITSIVDELAPELIKCKAVGYECASQLLITAGDNPQRLNSESGFAALCGVSPVPVSSGKTNRHRLNRGGDRAANSALHIIAIGRLRTDTRTQEYVAKRVAEGHSKMEALRCLKRYISREVYTLLRNQNRLINSTQITT

SEQ ID NO: 336588 - protein, 349 aa, unidentified
MRFYNQQHRFYCGVDLHARTMSLCILDAQGTIIRQQTIAANPDAFLLAVAPFRDGLAVACECMFAWYWLADLCEQEKIPFVLGHALYMKAIHGGKAKTDKIDAHKIAVLLRGGMLPQAYVYPKGMRETRDLLRRRTFLVRRRAEALVHLSNTNSQYNQPPFAKKLAYAANRAELDIAQRFSDPSVRKNVAVDLALIDAYDTQIADLELYLSRTAKVDDPQAFHRLRSVPGIGKVLALVLLYEIHDIRRFPEVGQFLSYARLVRCTHESAGKKQGTGGNKIGNAHLKWAFSEAACLFLRESEQAKKWLARREKKHGKARALGALAARLGRTVYHLLRKREVFDRQRFFAS

SEQ ID NO: 336589 - protein, 391 aa, unidentified
MIYVGIDVAKDKHDCFIIDSEGTVVYDVFTIRNNADGFGDLFFKIKSASNDLSKVKVGLEATGHYNCNLIGFLKNKGLTTIVINPLYTSLSRKRTSLRKTKTDKVDARTIASMIMSDVSLKPYSDKLYYNEDLKSLTRYRFDKVSERSRLKQSVSRLVNILFPELEGLVSTLHGKAVYAVLFEFPGANQIASANLKHLTNLLSTESKGRFQRATADEIREAARRSISSYFPAKSLELKHTIKLIRELSTQIDEIELQIKAILDKINSPILSVPGIGPNLGAMIIAEIGDFSRFDSPDKILAFAGCSPSTYQSGQLYSSHAKMEKRGSRYLRYALLNAAKKVCRWEPTFSAYLCKKMSEGKHYNVAVSHAAKKLIRLLYHLETTGDTYRPST

SEQ ID NO: 336590 - protein, 375 aa, unidentified
MTKHSEVFVAFDTSKLRNAVAIAEAGRAGEVRFLGEIENTAEATTKLVRKLEAKYERITFCYEAGPTGYELQRHIHGLGHECMVAAPSLIPKKPGDRVKTNRRDAVSLVKLLRAGELTAVWVPDRRHEAMRDLTRAREAAVIDLRAKRQRVSALLLRQGRCYPANKKTWTKVHMNWLASQRFEQPERGIVFAEMMFAIRQAQERVERLEQAIRTAVPEWSLAEMVTAFMAFRGIDLVSATCLLAELGDLTRFPTAPEVMGYVGLGCSEGSTGDRIKRGGITKSGNRRARRTLVECAWSYQHPPRVGIAKQAKVAAAPAKVREIAWKAQCRLNRRYRGLLRRGKLKTVAITAVARELAGFLWAAARELSSPQRVAK

SEQ ID NO: 336591 - protein, 355 aa, unidentified
MTSTKYIGMDVHKESISIAVMNAVGKIVMECVIETKGSMILQFIDGLRGDLHVTFEEGTWAAWLYDLLKPHVTKLVVCDPRKNKSMREGNQSDKIDARRLAELLRLDHLTPVYHGEHGLRTLKELGRSYLTITQDLTRVMTRVKAIYRGWAIPCTGKQVYASRHRGAWLGKISEPGVRRRAEFYYQQLDALRCLRQEVRRDLLVESKKQQAWKRLCGIPSIGPVRAAVLLGILQTPHRFRTKRQLWTYGGVGIETSSSADHHVVQGQLERKKKQVEIRGLNRNYNHDLKNLFKGAAIVAATKPGPFAEFYAALLAKGMRPEMARLTLARKIATIVLIVWKRGVCFDAQHLKPQTA

SEQ ID NO: 336592 - protein, 276 aa, unidentified
MRSIGMDVHRSFAQVAVLDRGKVTEEFRVELDYDAVVAFGQKLRKDDEVILEATGNTSAIVRLLTPFVAKVVIANPLQVKAIAHARVKTDKVDARILAQLHAAGFLPEVWAADDDTLNLRRLVSERAALVRSVRRVKSRVQAVLHANLVPKYSGHLFGKDGRDWLSTAPLPKAERDLLARHLDELDWLKGKLEKLDGSMARIALDDSRTRKLMTIAGINSVVATAVIAAIGDISRFPTPDRLASYFGLTPRVRQSGDRGAIHAASRNRETRLPERC

SEQ ID NO: 336593 - protein, 412 aa, unidentified
MKIVHEICCGIDVHAKMLVACLILADGKKEIHSFSTMTADLLRLRDWLVAAGCTHVAIESTGVYWKPVFNILEDALTVILINPDHARALRGRKTDVKDAEWLGDLLRHGLLRASFIPPLEIRELRELTRYRQSLVHEQSAVANRIQKVIESANIKLGQVASDALGASGRAILWELTRGETDPVKLASLAKGKLKEKRSELERSLQGRLTPNQRFVLRESLSHWEELERAEGRVTKEIDQYLNDRPKLAQARDNLDSIPGLATRAAENIVAEIGVEMEGNFPSDAHLASWAGMCPGNKSTGGKRLSGRTRKGNTYLRSALVQAAWGATMKKNCYLSSQYTRLAKRLGRKKALVAVGHSLLIIIYHVLQSGQSYTELGGDYFDRNHVEHQRDYFIRRLQMLGLKVTIEESSAAA

SEQ ID NO: 336594 - protein, 369 aa, unidentified
MADRITYVGLDVHKESIVVAVASGGLRGEVREYGRIANTATALDRLLRKLGGDGMKLRFCYEAGPCGYGIHRRLTACGHECVVVAPSLIPRRAGDRVKTDRRDAASLAKLHRAGELTAVWVPDVGHEAMRDLVRARLDAVHSLRRARQQLCGFLLRQGCHYGRPAWTKLHRRWLAGLKFDQPVHHLVLEDYIAAVEAAEARRDRLTAQIAAMLPGWTLAPVVAALQTMRGMALVNAATLIAELGDLSRFANPRQLMAYLGLVPSEHSSGASVRRGGITKAGNGAARRLLIEAAWCYRFPARLSRELLLRQENQPKPIRDIAWKGQVRLCARYRRLARTGKPANIVTTAIARELSGFVWAVARQVMAAAG

SEQ ID NO: 336595 - protein, 378 aa, unidentified
MREEPVVNEANCCVGMDVHRDSIFVAVLHQDGRTEEWRSDHTVKAVDALIRKLKTMDRVLACYEAGPCGYDLQRKFEAKSLRCQVIAPSLIPVKAGERIKTDRRDARKLASNLRAGLLTEVIPPTEDEEVVRDLVRAREDAKDDHTRARHRLQKFLLRRGLVYREGKAWTQKHDAWLRRLRFERPAERSTFEHYLLVVEQAVERVKALDDEIEALSKQEPYAAPVGYLRCFRGIDTLTAMSIVAELHGFQRFTHPRQLMAYLGLVPAEHSSSEKPNRFGITKTGNSHVRRLLVEAAWHTRQPARNSTALRGRRKGQPAWVVSIAEKAQSRLHRKYWKLAGRKMNANKVVCAVAREFVGFIWAVLYEASFEVHESNAVA

SEQ ID NO: 336596 - protein, 403 aa, unidentified
MPIIRSNAIRIKRFRELKADLRTNRNRLLVGIDIAKAQHVAQVRLAHITVLDKQLGIPNTSAGFEHFWAHLQVRQRQTGTWEIVCAVEPTGTYHQALATFLEGHGVDVVFVCNSVAALNRRTLDRTWGKSDPKDAHNLCDLLERGLVLFYSLPNERVAALRRLVRLLRHARVELAACKARFRNTLLPAWGPAGEPLPPALVASLSAPLQVLLPAAQRRTLPEGGATVPAALAFECTDLAARLVSVRTRIARIAAELVGVASPLPAYRLLLSIPGIGPTLAAILLAELGDIAWYSKFSQLRKLAGLDIIWVALGQFHGTARISRCGRPLLRWALYQAALGACRNPGWRARREVLRAKRQGDPHGFFKANVELAAKLLRLVWGVWRSGRPYDPREAGREPGQTRP

SEQ ID NO: 336597 - protein, 455 aa, unidentified
MKSKRPRRSLLKRLNPDAAGIDCGSTMHYVAVRPDRDAQPVRSFRTYTADLNRLADWLVGCGVKTVAMEATGVYWIPVFEILEARGLEVLLVNAYHVRNVPGRKSDVVDAEWLRQLHSFGLMRGSFRPSAEIARLRTYMRHRQLLIEAVSVTINRIQKALIQMNLHLHVVLSDVMGSTGAKIVRAIVAGETEAARLAQHRDPHCRASEEEIAEALTGHYTPEHVFELRQHLEAFDFHQRQIQGCDFEVESYLKELGKKSGAPPSPRAKGRRRGRGRHEPAFEVRPLLQQLTHADLSQIDGIGPYNALRLVAEIGTDMSRWRTEKHFTSWLTLAPNNKISGGRLLSSHTRTSTNRAAAILRGAAVSLARGQTALGAFYRRLAYRVGKAVAVTATARKLAVLVYRTLKGEIQYQDPGATTYDRIRRETELKNIRKRASSLGFGLINTVTGEILEGVS

SEQ ID NO: 336598 - protein, 337 aa, unidentified
MSIIRIGLDTAKHVFQLHGVDEKEQPVLRRRLSRKEVEPFFAKLPPTRIGLEACGAAHYWARVLRGLGHEAVLLPPQYIKPYVKRGKNDALDAEAICEAMSRPGMRFVPVKSAEQQAALMLLRTRELLVKQRTMLINAMRGHAAEFGVVAAKGLGKVSELLQRAHAEGAGVPTLALEMLSVLASQLDALELRLKTIEAKLMAWHKADPVSQCLATQPGIGPIGAVSFALKVTDPKAFRSGRHFAAWLGLTPKENATGGRSRPGRISRQGDESLRRLLVLGATAVIQFAKPGRASPWLIQLLARRPRKLAAVALANKMARVLWAMMVSGELYRRPQPA

SEQ ID NO: 336599 - protein, 415 aa, unidentified
MSRFERRRRAQTARAVVGVDAGKYKHVLVVRPHDGPDSKPFTFDVSREGFDAAVQFIWAAAPDATPETTIVGIEFAGTYGFTFAHDLARQGFEVVTVLPAHSKRWKEVVHNQRLKTDAKDAMVITDLVAQGNFIAFAFLDPAYADLRSLVSARERLSVERRALIARIKSVLEGVWPEFERRFKNFGKRTPIALLEAYPSPKAFLNAPKRSVLRLLRQESRGHLGEKTYEELEVVAERSVALPFSEGAAKSEIPLLIERLRLCEEQIRTVERWMVETLGRIEASRSVLSVPGVAPVTAAVFLGSIGDPKAYETKEQVLKVAGLSLIESSSGTRAGEVHISKRGRPLLRRHAYMLALRLVQEGGIFRKEYEAYLERHGPKKKIPALVAISRRALALIYSVARDGRLWTPEPPSRRKT

SEQ ID NO: 336600 - protein, 354 aa, unidentified
MMIIGCDYHPGFQQIAFVDTETGELQERRLEHREEAEKFYRDLAAQGIKVRVGMEASGHARWFERLLSELQCELWIGDATEIARKRERKQKTDRQDAQHILRLMLKDDFPQIWVPSGENRDLRQLLWHRHRMVQARTRIMNQLQAVALNEGVRCKKRLWREKGREQLESFWLAPWASRRRHDLLELLDRLNPTIDALSQAIEHEVEKCPEAQRLRTHPGVGPLTALAFVLIIGRADRFQCGKQIACYLGLVPLEDSSGQRRRLGHITKQGNSLLRFLLVEAAQVTVRSLPEWRSKYVHLTMRRGRKIAKVAMARKLAVRLYWMLRKGWDYGQLTKFGSHAGKPGSGDGVMSNTE

SEQ ID NO: 336601 - protein, 387 aa, unidentified
MYFVGIDISKFKHDCAVIDELGDVVTPSWSFSNDCGGFSLLKELLANLDSDIKIGFESTGHYGQNLKLFLESNSFTFMEFNPLLISRFVHSKSLRKTKTDSIDALIIAQYLMTVEYKPYPASFYHMDKLKSLTRFRDSLIRQRSRQLVELTNVLDKIFPEFKSFFKGRFSVTAMYILANYSTPEKISNMNSRSYDALRRLSRGKFTMSSFVQLKMLARDSVGHCNDYLLHEMEVLLDIYNQMDSRIQELDEQITACIKGIDPPILSIPGIGALSAAVILSEYGDMNTFDSPAKLLSFAGLEPGYYQSGQSEHTGRMVKHGSSHLRCALMNCCLPLVKNEPVFAEYYAKKRTEGKPHRVAITHVAKKLLRVIYTLQTKGIPYNADLIR

SEQ ID NO: 336602 - protein, 446 aa, unidentified
MVKINYMSTLFVGIDVSSKTNSVYAMDFEENKYLSTSFGNNQPGADELVNRIAACMQKHKNLDTLLIVLESTSVYSVHISNFLASSEVLMPYKPYVFCVNPKTTANYRKSYIGMEKTDPTDAYLIADFGRVGRTKKLEPWRGGQFIALKRLTRHRMHLSECITREKTYMVSNLYLKFSELQLLEGDDKPFGNLYGATSSAVLTEFLSPQEIIDMPEEDLLAFLAQKSRNRISDLSKTSELLRKAARDSYRLDKCMYEPLNISLASSFNCIQAYQKEIRLIEQAIDKCIKGMNTNALIILQSIPGIGPVWASGILSEIGDITAFHSSDALAKYAGLYWPKGDSGDFISEDNQMSKAGNPYLRYYLGEAANSVRKHIPEYADFYARKYAEVSKHQHKRALALTSRKFVRLVFWIAGQKPTVHRRKSWTPNIILNRTDIRFFEIHTEVY

SEQ ID NO: 336603 - protein, 429 aa, unidentified
MNDKEIIRHQQFCQLKEVIRGSDQHLIIGIDVAKEKHHAFMGTATGKSLLRRFIFQNNLEGFGKLMTHVEAVKVQNGLPLSVFGMEPTGNYHKALGSYLINGGHQVVLVAGQAVKNNRILLDGRWDKHDTKCAANVADLISQGKCLFYDSPPEAIVELRSLLSLRKRLKKEEHSLRMRIRNSLLAKYFPEMDRYFGQCLSENLSIVYWCLDPKKIAQMDFGRFFQLVTTRERGLAQQRRLKAIWEVAAASIGVVVDRSSQFEAQVLVEKILQVQKEIKDTQQLIETISQQFMEYQLLLTIPGFGPYVASLVLAVIGDAWRFGSAKQVLKMAGFDLSAKRSGKKSKEAVPVISKKGNAALRYGVYQAAFIASTRNIDFVEYYTNTLRGRERERGIKTKMRVKLAAKMLVMAWTLMKKKEEFNPDYLKNNL

SEQ ID NO: 336604 - protein, 396 aa, unidentified
MPEIWAGVDIGKEHHHCVVVDERGERLLSRRVFNDEPALLELIADVLALCEDVVWAVDTNHGGAALLTGLLLSHDQPMVYITGLAVHQASAAYRGQGKTDEKDAFVIADQARMRQDLGLLRPGDEIAVDLRTLTARRLDLVNDRTRQTNRLRAQLLEFFPALERALNLSKKGPVMLLTGYQTPAVIRRSGARRIGTWLKNRKVKNAAALAESAVEAARSQHTALPGETLAAAMVARIAKGVQALDQEIAELDALIEARFNDHQHATVIRSLPGMGTLLGAEFVAATGGDLEAFGTADRLASFAGLSPVPRDSGRVSGNMRRPRRYHRGLLRAFYLSAMASLRTCAASQAYYGRKRNEGKGHKQALLALARRRANVLWAMLRDGECYEALPTVTAAT

SEQ ID NO: 336605 - protein, 343 aa, unidentified
MTKNQLQSDTSTLIGVGIDVSKDNLMFCKKYAHGERIIFNVPNKKMEIRNVVKEIKKEKYEGRIVMESTGRYHLLSALELNRFNLDARVINPLLASKYFKSSIRKVKTDKKDAEVLADMAEKEEKLPHSFNNDKNTLKLKKKVSLVASLDKELQKMTASMNEFKRTSDDLGLKLSVVEKQIFKTIKTLKENKKKLEKEIELLMKKSEHKQEVIDRYASIPGVSYYIATLAALSFKEGEYDQNAKQWIAFAGMDISIRESGNWRGKGKMTKRGNGYLRKKLFQAAWGSTMHNNQFKAYYEHLRANNKSYVEALTIIARKLVIIMFALSKNECFYDSSKKLFSVN

SEQ ID NO: 336606 - protein, 408 aa, unidentified
MLFIGDDWAEAHHDIEIEDDSGGLRVRRRLPEGLAGISILQTLVAEHLDPTGDAGQVLVGIETERGPWVQALLAAGYRVYAVNPLQVARYRERHSTSGAKSDAADAHLLAEIVRLDRAHHRQIAGDSELAEHLKVAARAHQTMIWSRVRQVNALRSLLREFYPAALVAFGTDLADRDALAVLAAAPSPEQGRRLSQARIESLLRKAGRQRNLAATAAKIKTALGSEQLTARPGVVPAYAASVSALVAVLTVMAAQTEVLAGQVEQGFGQHPDVEIYLSQPGLGAILGARVLAEFGDDPDRYADAKARKNYSGMSPITKASGTKRVVLARYARNRRLGDALFLQAYSALRSSPGARAYYDQQRARGATHYQALRTLANRLVGILHGCLASNTRYDEHRAWHHNEQANAA

SEQ ID NO: 336607 - protein, 411 aa, unidentified
MEVIHSHCCGLDVHKDQIVACLLTPRSGAKPQEEIRRFGTMVADLEDLSDWLAAKGCLVVALESTGSFWKPIWNHLEGKVRLILVNPQHMKAIPGRKTDQKDCAWIAQLLRHGLLKASFVPDRRQRELRELTRYRTTLIEERSAEVNRVQKLLEGANIKLGSVVSSIMGKSARAILTELSHGNRDVAALAALSVGRLRRKAADLAKALRGELSAVQMFLLTQQLGHIDQLDEQITALDTQIAQVLAPFADALALLQTIPGIGQRVAEVIVAELGVDMSQFPTAAHAVAWAGMAPGNHESAGKRLSHAKRKGNRAMGRALVQAAWATRRTKTFLGAQFQRLARTRGAKRAAVAVGHRLLIVAYHVLQEGTAYQELGYRYLEERNAESRQRWLVRQLEAYGLAVELRSKAEVA

SEQ ID NO: 336608 - protein, 400 aa, unidentified
MLSIGIDVSKGKSTVCGMKPGGEIVYAPFEVQHTREGMSELVSLLRSSGEEVRAVLESTGSYHCPVVTALLENGIFVSVVNSLRMKRFCSQSIRKVKTDRIDAMQIALYGLAYWQELQPTKLPEDTYRELQLLARQYYQMTSLLIKAKVDFNAICDQVLPGMQELMNDHAGRHKLSDFVLRYHHTTHILEMGETRFRKDYCKWAEKKGYRNCERMAALIFATAQNGIPVLPNAPSTQIVITEAIRVLHTVEASRDAILTQMQALAKTLPEYSLVREMPCIGDTLAPRLIAEIGDVRRFHSKRALIAYAGIDAPPYQSGKFCANNRHISKRGNRYLRKTGYEVMQSYVMHKPANDPIFTFIEKKRGEGKSGKLAMVAGLNKFLRVYYGKVTELYRSLPAIE

SEQ ID NO: 336609 - protein, 409 aa, unidentified
MDVIVERPGALDVHKEQVTACVRASDEGGRRVAHVEQFKTTVRGLLVLRDWLKAHGVTQVTMEATGVYWKPVFHVLEDDFELVLVNARHVKQVPGRKTDVCDAAWLCQLAEAGLLRASFVPPKPIRALRLLTRYRKAQIGERQREANRLHKALEDTGIKLDCVASDILGVSGRAMLEALTCGTTDPSVLADLARGRLRAKIPALREALEGRFEPVHALLIGAILAHLDFLDEQIERLSDAIEVQLAPFGPAVELVCTIPGVAQRSAENMLAEIGLDMSVFPSAAHLASWAGQCPGNHESAGKRRSGHTRKGSKWLNEALKNAAMAAVRTNDSYLQALYLRLRPRVGHARAIGAVKHSIICACWHMLSTGEVYRDLGGDYFRRRDPERQTRRLIAQLERLGHAVTLQEVA

SEQ ID NO: 336610 - protein, 518 aa, unidentified
MRERTLGIDLGVKSPNVAVVWEEQGHRLIEVLRFELSLPEIKRVEEVALCGMAEGTKLHVVMEKTYPSCKYVSEYFLKQGHKVSFGKPDQVKEGRKFLWRRVKTDERDALVMARLPILDPRQLTRAHVDRGLVQELKCLVSQRLSLVKQQTNLKVLLERTVNAFWPGLTKVLGSLDTGHARALIRELQPERALKLGKGGLEAFIRENGRTGAARAKKLAGQLVGVAQRAGELQSILEDDNWVRLQISHAVELLEQIEGFEQTLASKDKQIDKAYEKADPNQYFKSIPGVGDRTAPTYCSYFGEPERFPTTRKAQGFVGFYPATDSSGQTERKGTALSKEGPSLLRRDLYLSSDQFRRQDPQGAKLYYDQMANKGKHHTSALCVVANRILIPRLMAVAREQRPYEFRDLQGNPITQKQAREIAAQFRVPEEVRVRLRSLKKKRNRENVSSPVTSELEAPRSENASRHEDPTKERVSLTKAQLAMLVYRQMDKLLNSGENLEEIRLQLLMEANKFFEKRA

SEQ ID NO: 336611 - protein, 368 aa, unidentified
MSKSSKLFVGMDVHKDSIDVATGDDSASEGRHYGTIGGEMAAVSRLARKLESTGKTLVFVYEAGPCGFGIYRLLKAKGHECWVVSPGMTPRSNADRVKTDRRDCLKLARLARAGELTPIHVPDAADEAMRDLVRAREDAVIMQRQARQRLGALLLRNDIRYNGKTLWSARHRRFIAEIRLPHATQHIAFEEYAQAVDEAGKRIERLEAAIGDALTDWRWRPVVEALQALRGIRAIHAVRLVAELGDLTRFTGARHLMGFLGLVPSENSTGNRRRQGAITKTGNSSARRALVEAAWAYRYAARVSVGIARRQSGLSKSITDLAWKAQLRLCSRYRRLSARGLNRNKIIVAVARELAGFVWALGQQVKPL

SEQ ID NO: 336612 - protein, 401 aa, unidentified
MKRLSGGIDVGSESHHIIILDEEDNVLYNKKVSHKLNEFTENINLFKQIEKKEGGKISFALEGKNGYSNPLDRILLDQGFTLYNVDNLKLKRFREAFAGEWRDDQRDSLMLSKMLKLKEHINSKREKVFIKIEKPSPLTESLKLLSRHQQTLIDEKARLINRLGKKLLEVCPQILRLAKLKNKKIITILVKYPDFSKYKRITLCSLLKIKGIGKKGAFFLLKRLNNIEYMPGLTDIYKTLIFSYAKRILELQREIKDIDKSLDEIGEKNKAVKHLKTIPGVATKLASRLIGEIGDINRFPSEKQLAIYCGIACVDNNSGKVTKAKAVYKANKICKQTLINMAGCSIRFSPQCKAYYLKKRTEGKSHNHALRCLARQMIKVIHRMLTEDRDYIVRKELKKAA

SEQ ID NO: 336613 - protein, 320 aa, unidentified
MSRKRAKLFIGIDVSKQLLEVAAHQHDYQFRCANKASAFGELIAELITLRPALIVLEATGGLERTVAAALRSASLPVAIVNPRQVRDFARALGQLAKTDRLDARVLAAFAAAIKPPPRPLKASDELELDALTGRREQLTGMLADEKNRRASAASDSVRDEIQEHIDWLTDRIAELDQQLKKLLQGSARWQIKDQILQSTPGIGPVVSYSLLAQLPELGNLNRQQISKLVGVAPLNRDSGQQRGSRHIYGGRAQVRRVLYMAALTASRCNPVIKLFYERLRSRQKPFKVAITACMRKLLTIINFMVRDGSQWKSAPSNISA

SEQ ID NO: 336614 - protein, 411 aa, unidentified
MELLVARCAGLDVAKDEVVACVRVPDGQGGRDQEVRTFQAFTSGLEALAGWLAAEGVTRVVMEATGQYWKPVWYVLEEAGFELLLVNARHVKILPGRKTDVADAAWLAELLEHGLLRGSFVPPAPIRELRDLTRYRKRLIQAHASEGQRIQKTLEDAGIKLDSVAAEVLGVSGRAMLAALVAGERDPQVLAELAKGRLRAKLPQLRQALRGRFRGHHALLVRLALEHLEQLEASIAELDAHIDRMLAPFAVARDRLDTITGVGKRAAECMIAEIGVDMSVFPSAAHLASWAGRCPGNNRTGGKRRSGKPTKGNRWLGEVLIECAWAAARSRDTYLSAQYWRLARRIGKKKAAVAVGHSILVIAWHLLTYDCDYQDLGGDYFVRRDTDRQRQRAVAQLQALGYRVVLEPAAA

SEQ ID NO: 336615 - protein, 310 aa, unidentified
MTKNYVGIDVCEKKLDIFIHPSKEYVQFNNTQQGIMQLYEYLKAFDIELIVLEATGKLEALCADILMDLGYKVSVVNPARVCYYRKSLGYKAKTDLIDAEVIARFAEALRPDASNPSSATERRLRELSARRKQLVILRDSERNRLRRVRDEYAKEDLQINIAFLNERLHKIETIMVELIKQNKAKKEVFDILQSIPGIGEIMALTLMSYLPELGQLNQKQIASLAGVFPLNMESGSSKGHRKMCWSGRPKIRSTLYLATLVGIRHNSFIRSKFNDLVAKGKAKKVAMGACMRKLIIIANSMIKEKRCWHD

SEQ ID NO: 336616 - protein, 322 aa, unidentified
MAMLSFCGIDVSKDRLDVMMLPQQQCWWVHNDPRGWTELVERLRSFSISAIGLEASGGYERGVMRALLAAGMSVRQINPFKLRQFAKASGVLAKNDRLDARMIASFVAIMPTRPAQRRAPAIERLSEMEAIRRQLSNQKVAAENASRLLEDAMLQRLCHRRIARLAADIDLLDKHLLEVVAGDPALANRYRLLISMPGVGPTLACTLLALLPELGRLSRKQIAALVGVAPYDFDSGKLKGMRCIWGGRAPVRQVLFMAAMNASNWNPVLKAFHNRLKAAGKLPKVVIVAVMRKMITMLNAMVRDDVVWADLLRGRHTVPTAR

SEQ ID NO: 336617 - protein, 456 aa, unidentified
MPVINPHAAGIDVGATSHWVCVPEDAVAAGESPIREFGASTPDLDKLVEWLLQCGVKTVVMESTSVYWIPLFQKLEAAGLEVLLVNARHVRHVPGRKSDCKDCQWLQRLHSYGLLSGSFRPTDDICRLRTLMRHRDNLTKACGQQVQHMQKALNCMNIHLHHAVSDLHGETGLRILDAILAGQRDPKELVKLRDPQITRSTVQGMEAALTGDWREEELFVLRQSLENYRHLLKQMESCEAEVEKALAKVIVPPATVEESERPKNPPATKRDKPKRKKFRILKAGTGLKRDLRAELTRICGVDLTQVAGLNMLSVLIILSEIGVDMSRWRSAQAFCSWLGLCPGNKISGGKILSSRTVPVINRVSILLRNVAPSVGRTDTWLGIFHRRMRARLGPAGANTATARKLACIIYHLLKFKEDYIDVDCLIYSEKMRTQRIAKLCKQAEELGFEVIKKVAA

SEQ ID NO: 336618 - protein, 500 aa, unidentified
MKLPLSLNLGSQFHLFFGNLLKYLHQNTKIYKKALRILHSLKPKYAKETNMKKYERTHIPVKKNRVFNGLTVNNPNSAGVDIGSRHHWVAVAPHLTPNNIRKYSTFTSDLNEICKWLKECKVETVCMESTGVYWIPLFDLLEKSCFEVFLCNATQAKNLPGRQKTDNLDCAWIQKLHSYGLLTNSFIPDLTIRNFRSFMRHRENLTRDQSRYKLRMQKLLTQMNILLPKVLANIVGKTGMLIIKSIISGNTEPEQLLKLKHYGVKASDKTFLKALQGNYDKSLIKLLDFELKQFESTKALISNLDDEIKLILDEMLASDSKKKPVKTKLSDKEMLIAYTGVDLTEIPGVDILSARKLICETGTDMSKWKDSAHFASWLRLSPHSKISGGKLQSSSTLKHKPRAAIIFRQCADTLKRNKSYLGDFLRRKKAQKSYGKALTATARKIAVIYYNMLKYKTPYVELGESFYSLSYKTRSIKRLDNYAKALGFQIVKNDENIAVK

SEQ ID NO: 336619 - protein, 319 aa, unidentified
MSEVVLGIDVSKKTLDAALVFDNRTLCKQFKNSLTGFDLLAVWLASFQIKQVHACLEATGVYGEAVALFLHERGDRVSVVNPLRIKGYANANMQRNKTDRLDARLIASFCQTQKPDAWQPPSEEVKQLQSLVRRVEVLAEMLQAEENRLANAASEIKPSIERIIGLLTEEIKELERQIKRHVDQHPNLKEQNQLLQTIPGIGRRTANLLLSEIEFERYSSARSLAAQAGVTPRKRQSGTSLKQTNLSKLGNARIRRALYFPAIVAKQHNKIIKEFAERLKKNGKTPMQIVCAAMRKLLHIAFGVLKHRRAFDASLAFSA

SEQ ID NO: 336620 - protein, 387 aa, unidentified
MPQPNDQSRSLAALDQDSTLIAVIEISQSSWLVAGMVPGINRQPLKKLAADEVALLQLLYRWREEASKAGRTIDRVAVAYEAGRDGFWLARWLRGRGIEAHVIHPTSVAVSREHRRAKTDRLDTELLKRAFLGWLRGEQRHCSMAMIPTPEEEDAKRPNRERENLVSDRTRIVNRMKSSLARLGIRGFKPTLRKAPERLARLLTPEGALLPPNTLAELQRDMARLRFIMDQIREIEAARLVRLEHNPEQGSHAMVRLLAQVIGIGIETADMLVHEVFVRNLRDRKAVARYGGLTGSPDESGAKRREKGLARAGNARVRRGMIQLAWRFLMFQKESALAQWYRARTADARGATRKTMIVALARKLLVALWQLVTTGEVPEGVVMRRAA

SEQ ID NO: 336621 - protein, 315 aa, unidentified
MTEPQSIKVSVGIDVSKSRLDIAIHETAESWSCSNDASGGAALVAKLRQLKATRIVLEATGGFETLVTAVLSAAGLPVIVVNPRQVRDFAKATGQLAKTDRLDARVLAHFAAVIEPPLRPPQSDQAQHLEALLARRRQIVEMLVAEKNRLANNRDHAVVKDLKTHIAWLERRLKASDDELQRVLKATPAWRERDDLLRSTPGVGPVLSLTLLAQLPELGQLNRRQIAKLVGVAPFNWDSGKWRGSRHIWGGRAAVRAPLFMATLCAIRINPTIKSFYQRLIKAGKAPKVAITACMRKLLTILNLMSKTQTPWRIA

SEQ ID NO: 336622 - protein, 402 aa, unidentified
MLFAGVDWAAKRHELAVVDAGGRVMTRFGFAHSEEGVLGMLGRLAALAAPPEICVAIERPNGLLVERLLAAGHVVYPVHPNAFAAARPRWGASRAKSDPGDAYCLADYLRTDGHRLRPLRPADPHLVELRALCRLRDAQQKARVAASNQLGSLLELHWPGARHLFYRLHSPVALAFLERYPTPESAAHLGEGRMAAFLKGKRYGQRSASELLARLREAPRPASPLDPEVLRILVEAQVRVLRTVVATLADLEAAIGERLAGCEKAALLASLPRVGQVNLAQIVAEVGPILERAESVELVSAEVGASPVTRASGSHRSVSFRHACNTKARKALISFADNSRRDSPWAATVYRHARERGCQHAHAIRILARAWLRVIWACWHSERPYDPARHGAPCPPSLLPGG

SEQ ID NO: 336623 - protein, 334 aa, unidentified
MKDKYILGIDISKATFHYCLQLQRRNSLRKIEAGSWSNHPADIPRFVGHLKVLIGTATLHAGMEATGRYGNNLFLALHEAGARVSVINPAQVKFFARSLNRRGKNDIMDASLVALYVMERNPHAVLPLDAATATLKEMVGEIDSLVCESVRISNRIAEVANTCKEVTASLRRRKNLVDAEIARLEKAILELIKSHPRMEEQHRLLCSIKGVAARTAARILAHLGGKVFTTARQLAAYAGVTPCENTSGTSLNGKTRMSKQGNSKLRRALYIPALVFWKHCPQVRQWADAIALRTHSKKAALGAVMRKLTHVIFGVLKHNTPFNPARVSSLPCET

SEQ ID NO: 336624 - protein, 336 aa, unidentified
MIVGCDFHPSFQQVAVLDTESGELQERKLLHATGEAEQFYRRLALPVRVGMEAVGNSQWFIQLLERLGHEVWIGDAAQIRASYVRRQKTDRRDAGHILKLLVEGGFPRIWVPDSRVRDLRQLLIHRHKLVQIRSRVKNELQHLMMNRGVQKKYKLWSVPGRIELEQLSLPPWAGRWREDLLGLLKMLNQQIECMDQAVTNAAQEDSRTRLLMTQPGVGPVTALAFFLTIGDVGRFPHSKQVASYLGLIPRETSSRGKQRMGAISKQGNRMLRVLLVEAANSAVRFDPQFRKEYLHRCHQKHRALAKVAAARKLAVRLYWMLRTQTPYPQVVTSRAA

SEQ ID NO: 336625 - protein, 321 aa, unidentified
MPDRELSKSDCQLRFITVATERDTCPMMILGVDPHKSTHTATAVDPSTNRAVASIRIAATLADYRQLMKWARQFENRRWAIENAEGLGRHLSAWLLARGEQVVDVPSTATARIRQLSRGGGRKTDQIDAAAAASVAALQGDERPLHPEGVPDALALLDESRTNLTQSRVRLVNQLHALLRDLIAGGAPTDLTAATAAALLRGVRPIGAAEKVRKQIASGLVGQIRAVDALLKANQQQIKELVSASGSTLTDTVGIAAITAGRLIGRTGMASRFPTAAAFANYAGTAPIEVASAERSRHRLSRGGDRQLNAALHTEIGRAHV

SEQ ID NO: 336626 - protein, 403 aa, unidentified
MNNVAGIDVSKGKSMVSVLRPFGEVVAKPFSIGHTGSELKELADYLKSLDGETRVVMEHTGRYYEPVARFLHDEGVFVSAVNPKLIKDYGNNTLRKVKTDKADSRKIARYGIDNWAELRQHTPMDTIRMQLKTLNRQQSLYAKTKTMMKNNLIALLDQTYPGVNALFDSPVREDGSQKWVDFATAFWHVDCVRNMSLTAFAERYRKWCKRHGYNFSQSKAVEVHTGAQDLIAMLPKDALTKTMVRQAIDALNAVSASLERLKAEMQALAAQLPEYPVVMAMHGVGDSLGPQLMAELGDVARFTHRNAITAFAGVDPGADQSGTHEAKSTRVSKSGPPELRRALFLVMDCLLKTQPQDDPVYRFMDKKRAEGKPYLVYMTAGANKFLRIYYGRVKEYLASLEGN

SEQ ID NO: 336627 - protein, 340 aa, unidentified
MGIVILGIDVSKRDFHCALVDGATVRHQSFPNSAKGFTQLHRWLENRHVERVHGCLEATGGWSEALALDLHEHGHVVSLVNPLRIKAYGESELSRTKTDKADAALIARFCQAMHPEPWQPPSAEYRRLQQLARRRVALDEMRTQETNRLQGPTIDHDVVASIEATLHFLNQQIDRIDAQMRELIDNDPTLRGQRDLLQTIPGVGERLATTLLGEIPNITEFRNGKAIAAFVGLCPREFRSGTSVSSAWLSRRGNAHVRRALFMPAIVAMKHNPVLSAFARRLHEAGKRGKRVIAAVMRRLLVLAYGVLKSNRPFDPEFGCGRRHGQTNHALAPHRNAALA

SEQ ID NO: 336628 - protein, 344 aa, unidentified
MLDTETGEIVNRTLMHEGNQVREFYVQLPHPVLVGIEAIGCMHWFLNLLEELGIECQVGDATKIRAAEPRKQKHDRRDAELILKLLVENRFPAIWMPSKEQLDLRALLLHRHQWVRLRTRIQNALQAIALANGLRRGPGLWSYDGQAKIAFLPLPPHASYRRSALQTAYRKMEEEIENLTKQVAEQAEQRGGARLLMTHPGVGPITALATDVFLGDPQRFADGKALGSYVGMIPREYSSGERQRFGAITKQGSPLLRFLWCEAAAHAARRDPDLQRFYRRKLVQKGLGKARVAVARKLGIRLWIMLRDQIDYQEFCRCGQKQSSAACAGMPGTRFGANRHRAVG

SEQ ID NO: 336629 - protein, 347 aa, unidentified
MRFYTQQHQFYCGIDLHARTMYLCIVNREGEILVHRNMPAGPEPFLKAVAPYRADLVVCVECIFTWYWLADLCAREGIPFVLGHALYMKAIHGGKAKNDKIDSQKIAALLRGGMLPQADVYPAAMRATRDLLRRRMHLAHKRAELLAHVHNTNSQYNLPAIGKKIAYKANRDGVAERFADPAVQKSIDVDLALITYYDELLRDVELTLVNTAKHHDANTLYLLQTVPGIGKILSLVWLYEIHDIDRFPRVQDFVSYCRLVTCAKESAGKRLGTSGTKIGNAHLKWAFSEAAVLFLRDHPPAQKYLARLEKKHDKGKALTVLAHKLARAVYYMLKRHVVFDRAQFFQR

SEQ ID NO: 336630 - protein, 318 aa, unidentified
MNTNTLQNINVGVDTGKSQLDIYIRPLDIYFTVPNTDKGISDAIKIIKKHKPQHVVIEATGRLEMPFILACDKAKLPYVVANPLRIKRFAEAIGQRAKNDRLDAELIAHYAERVQPELTKLKSENIRLMSDLVTRRNQLLTIQTMERNRLQILTKNISSTITPILTALKNQIEKVEAKIEKLIESCPEYQAKNTILQSMPDVGKILAASLISNVPELGFITNKQASSLIGVAPITRESGRFKGKRMIKGGRPQVRTVMYMAMMSAIQCNPVFKATYERLLAAGKPKKVAIVACMRKMVVTLNSMLRDGAMWDKDSVKN

SEQ ID NO: 336631 - protein, 341 aa, unidentified
MEHTTIAVDLAKSVFQVAVSHRAGSVDDERRLPRDRFLAFFAQQPPATIVLEACGSAHYWARQLQPLGHAVHLLPPHDVRPYVRRNKTDRTDAKGLLEAHRNEEIHAVPVKTLEHQALASLHRLRSTWLATRTARLNTIRGLLREFGIFIPVGSQHVVPRVHALVEEPAVPRLLHTTLVAACDEIEVLEANMRAVERQLAALVADMPDAQLLQTVPGVGLITATALVALVTDIRRFPSGRHFASFLGLTPREDSSALRRRLGAITKQGDVYVRMLLTHGARSVVWHAKATAHPTPLQQWAVETERRRGRNVAAVAVANKLARIVWAVWVHQRPFAAEHRAG

SEQ ID NO: 336632 - protein, 411 aa, unidentified
MENIFVRCAGLDVHKESVEACVRRIEPNGCVHSETRHWGTMTRDLLEMADWLAAKGVTNVAMESTGVFWKPIFNILEIRFTVLLVNARHLKQVPGRKSDIRDCQWIAQLLQCGLLKGSFIPPRAQRELRDLTRHRTQLVEEKTRTINRIQKVLEDANIKLASVASDVMGVSGRAMIQRLIEGETNPFKLADLAQRQLRGKIPELQKALEGKLTDHHRFLLKLLWKELSQQEERIVDLDSKIEEHTRPFAAEIEHLDTIPGVDHRVAEVLLAEVGPDMKPFPSDEHLSSWAGMCPGNEESAGKRRRRRITPGNRWLKQTLAQAAWAASHAKNTYLAAQYRRLASHRGKKRALIAVGHSILVIFYHMIRSGASYADLGADFFDRLEPERLTHYYVKRLERLGYTVTLESSAAA

SEQ ID NO: 336633 - protein, 474 aa, unidentified
MSTQRFTKSKGSRVRVADSDLRITNPHAAGIDVHARAHWVCVPAASMPYRAQDQPANLPANVRVFGTCTPDLEQLADWLFACGVTTIAMEATGVYWIALFELLERRGFKVILVDPRQTRQVAGRPQSDLLSCQWIQRLHSYGLLSASFRPDDQTCVLRGYLRQRQLLIADAGRSTQHMQKALEQMNVKLAETLSDITGVTGMLILKAIVRGTRDPQELAKYRNEHCKCTPAEMARALQGNWREEHLFALRQALKTYQHLRRQLAECDACIRTCLKSLPDNSGGEVLPKKTPRRSTKATEPTFDARRLLFRWSGRDLTVIEGIDQSTALSVLAEIGIDMSKWLTERHFVSWLGLCPQHRGSAGRIKNRRLRGGANRAARAFRLAAQGCHHANNALGAFYRRVQARAGSGKAVIATARKIACRVYRLLKFGEPYVRQDMAAYEAQFHLKRMKGLARKARALGYQLVPVTEAETQPT

SEQ ID NO: 336634 - protein, 470 aa, unidentified
MEDPTTDDHVEAGGLKPRALNGRGHELGSPTAGEQLGPPPGYAEDAGGEIKRRDDRAPREEGKRQVALTAAEVQYPRAGDDPSCAQHRLVIVDGIDQPMPDVSSIAPTDVRLWVALDVHKLSIVAATLPAAGGKPEVCRIETTDKAIRRLIERLGGPDGLAVCYEAGPGGFALWRLLTKLGVACDIVAPSLVPVRAGDHVKTDRRDAKKLVTLHRGGLLHYVAPPTPETEGLRDLLRCRDDVRCARTAARHRVSKQLLRHGRIYREGLKAWTVKHRAWVARQRLDDELAQLALEHMLIRLDGTDRQLATLDAQLEQIATRERWAWQVDRLRAFRGIQTLTALGLIAEIGDFARFSHPRELASWLGITPSEYSSGDQQHRGHITKAGNRHARRLLIEGAWHYRHAPRRPTKGPEPSARAWRAQVRLHHRYRHLTEHGKRSTVVTVAIARELVAFLWADLTNQPCREEVLAA

SEQ ID NO: 336635 - protein, 468 aa, unidentified
MLRQAIGIDPDSKGFVCAQVKPSSEKVQSREFTATEADLVRFVNWVKRQAEPIVAIEGLNGLSRPIEKALREEGIVFYSLRPVDANAFRKAVLGQNKDNRLDAESVARCAMAMECQGKLERWRRLWFPDAELQLLTRSYERKSQAKTAEVNRLWKLLRQASTELYLALGGRHPDLELKANTLQEQGILTLLAEKPQIGEWKSLSEEELYELMGGGAVGRRLLIGELRKLTLKPVSSPLAVLIRTTARQIQQYKRDMAEIEKALEKLSKDNAAVQLLKEIRGIGTITACTIIAEIIDIRRFSCEDSLACYGGLGMRKYATGDSAKMIPNLHFNHRLKDALLTAAHNYVLFNPDSHLAGYHRNLLKKGMSGMEANKRVGRALVRVIFRTLCSLLVDSEEQGPAEADPEAGEGGMASGSLRSDRSHASNMPPSSRSETATKATVKRVGARGRAGGAQHAGGKRRVKSTKNA

SEQ ID NO: 336636 - protein, 320 aa, unidentified
MEKEKVYVGIDVAKSSVDIAVHATEQRWSFPNDDYGISKTVSLLRKLAPALVVMEASGGIELTLTAALASAGLPLAVVNPRQVRDFAKATGKLAKTDTLDARVMAHFAATVRPVPRPLPNAQAEKFSSILARRRQVIEMLTAEKNRFGTASKAVRQGIEAHIKWLEQELSNIDDELRQSIQRSPVWREKDNLLRSVPGVGPVLSTTLLAELPELGTLNRRQIAALVGVAPLNRDSGTMRGKRTVWGGRAPVRATLYMATLVATRYNPVIRGFYQHLCIAGKAKKVAITACMRKLLVILNAMLKHRAPWCYVNAQIFGPCH

SEQ ID NO: 336637 - protein, 343 aa, unidentified
MGEVSTIGLDIAKSVFQVHGVDGTGAVVMRKRVGRAKVLEFFGGLSPCLVGIEACPSAHYWSRELQALGHTVKLMPPSYVKAYLKRSKNDANDAAAICEAVTRPSMRFVPIKTQQQQTGLMLHRTRQLLVRQRTMLSNAIRGHMAELGIISAKGRNGTAELLQIIADVADDRIPPVARFCLDLLARQYLTLIAEVSSIDKRIHAWHRSCEQSRRLEEIPGIGPIVATALVAEIGDWGAFRSGRSLAAWIGLVPKQHSTGGKERLGSITKQGNRYLRWLLVACAMAVIRYARQHGTKRPWLIRIMDRRPAKVAAVALANKIARMAWAIMVRGERYREPKLLLAA

SEQ ID NO: 336638 - protein, 355 aa, unidentified
MNDAKYIGLDVHQATISVAVRDSDGKLVMEAILETKAETILQFVRGLRGSLHVTFEEGTCAAWLYALLKPHVTQVLVCDPRKNALLKVGNKNDRIDSRKLAELLRANLLSSVFHEDTGLRAVKELARSYLTMTKDLTRVMVRLKALYRSWAIPCATKQVYAPRHRAEWLAKIREASVHRRAELYYQQLDALRSLQQQVKKELLIEGRKHSATKLLRQIPSIGPIRAVLLLALIQTPHRFRTKRQLWSYCGLALETRTSAEYRVVHGQLQRSKKPVAIRGLNKNHNHDLKNLFKGAALRAAAVEKPFQEFYAALVAKGIKPEMARLTLARKIAAITLIVWKKGARFDAEQLKQQAA

SEQ ID NO: 336639 - protein, 404 aa, unidentified
MKTETKTVIGIDVSAHTSEVAVMNDRQLVDRFKMTNNAIGFQQLISTIQKSAQLPVIIFESTGVYSRRLKALLDDHGYRYTQLNPLLAKMQLDRLHPNKTDASDARRLAETEFQLNRPQTEVQAPVYTQLKDLNRFYQQLTGDNVQAKNRLHRVLQLTFPELERLTLSHTEPLYYHLVKRFPHPQSIRCHSFAEVTEQILQSTLKHIGRPRAQRLAKQLISWAACSYPAVTADSPVIEQTVYWANQILELSVQRKAVIKEMEQQAETLPEYPIYLSIPGFASTTAVAVIAELGDLRRFDSPNQINAYIGIDLRHYESGRYTAADTISKRGDALARKILYRSIGNMASAARYHPNHINDYYQRKKQSPGAITKKIAIAAVHRLIRTLYFLVTHNQTYDYGLATRS

SEQ ID NO: 336640 - protein, 319 aa, unidentified
MAQNEVVVVGIDVAKDKVDACIRALKLRQTWLSTAQGHRKLVAWLRKHQVNKAVMEASGGYERDWARVLREAGIGVRIVDPKRVRSFALSAGRFAKNDAIDAEMIAWFAETFSEAPSQPHDAASEELQALVKARLDLIDFRMRLVSQSEHAAPGLVQKAHAHILKSLASEIAKLEAAISAKIKSTPDFAERAEIIESVPGFAQTSSANLVAGMPELGQVSDEIAAALIGVAPYDDDSGKRRGERHIKGGRRWVRNAIYMPCVGAATQNNPVLKAYYQRLLAKGKEPKVAIIACMRKLIVILNTMIARRQKWDPSRYVLS

SEQ ID NO: 336641 - protein, 374 aa, unidentified
MTQTTQAIDDRNVDQPVLYMAFELAVMKWKLGFAGGGKKRVRTIDGRDLMQVHWEIAEAKRKLGLPEDAQVVSCYEAGGDGFWLDRWLLEQGFHNHVVDPGSIEHSGRKRRAKTDRLDVRMLLRKLIQYHLGDHELWSVCRVPSVEAEDARRVHRERERLKKERVAHINRIRQLLLGQGIVLERFRNVDKQLDDMTLPRHLEAELRRELVRLDLVGQQLKEHDAEHARQLAEEDSSPAVAKMKRLLSLKAIGDVGARVLVMELFGWRTFDNRRQLAGCVGLTGTPHNSGNSEREQGISKAGRPQLRGLLVELSWLWLRYQPQSRLSLWYQERFGTGQRSRKVGIVALARKLLIALWRFVEHGKVPEGALLKPVS

SEQ ID NO: 336642 - protein, 343 aa, unidentified
MQAVTTIGLDIAKSIFQVHGVDAEGNVIIRRQLKRRYVLAFFQKLPPCLVGIEACASSHHWSRELQALGHRVRLMPPAYVKPYVKRQKNDATDAEAICEAVSRPNMRFVATKTTEQQGCLMLHRTRHLFIRQQTAVINAIRAHLAEFGIVAPVGRNGVDQLLGVVADANDKRLPAVARACVAALGAQLQMLKAQILQFDRLIRAWHRSSEASKRLDEIPGVGPALATALVASVADPKAFRSGRDFSAWIGLVPKQNSSGGKERLGSISKRGDRYLRSLFTAGALAVIRYAKIHGTKHRPWLTALLARRPTKVAAIALANKIARMAWAMMARGERYKEPAALAA

SEQ ID NO: 336643 - protein, 351 aa, unidentified
MKSKNTAVPKLFIGIDIHKATWNIRIATDLFQGKRFTSPSDPLLLRDFVNKHYPDHQVYCAYEAGCCGYSAHRVFQSFGWNSLVFNPSDISRTGKTQFQKTDQIDADLICRELKDNRLHGITVPDMERDHLRCLFRRRNDLVKDLRQIKSKIKAQLLYLGIKLPPEFDNANWTKAFRRWIDELTFENETVKTAMKSRKAQFEFLESSMREVSNELRKYCRRHYKKDYMLLRSIPGIGGIVACAILSELGDLRRFGNFRQLAAYVGLMPSIYQSGDTMRSQGITPRGNGIIRSYFVEASWQALRFDPIMQTYYRTHAGKNSKAILVKIARKLLSRTLAVIKTETPYQIGVVS

SEQ ID NO: 336644 - protein, 405 aa, unidentified
MKQPATLHYAGVDWATRTHAVCVVDPTGASRARLQVPNTGKSYAGLCQRLVRLGVAGVAIERPDGPLVEAMLEAGLRVVVVTPRQVKALRSRYRASGAKSDAADAYVLADVLRTDGHRLAPLTPDSDPTKVLRALTRTRKDLQEARVALVNQLTSQLERCFPGAIGLFAELHIPTAVAFLGRYPTSHAAATLTQARLAAFLRRLYHPGRTPVQVLLSRIQTAPRAGISPAEATGRAVCVDALLEAIQACVRQERELEAEVIERLELHADQHIFTSLPRAGRGVRAAALLAELGDVRARFPDNDCLAALGGAAPVPITSGSRRAVKFRWACDKKLRAALIDFADDSRHASPWAAKVYAQAPARTGRHPHAVRILARAWIRVIWRIWQDGVAYDPTKHRGAVRLQAA

SEQ ID NO: 336645 - protein, 387 aa, unidentified
MQKVTTAKANQQQTQVLPRSTRSQIRERAAKERLTVGLDLGDRNSAYCILSEAGEILLQSTLPTTTAGLGQVWEGMPCCRIALEVGTHSPWVSRYLTGLGHEVIVANAREVAYITRSSRKNDRLDAEKLARLARVDVKLLAPIRHRSEAAQADRAILRARDLAVRQRVRMIGAVRGMAKSLGERLKGCATEAAGVELVAGSKAEIRRFAEPLLEVVEKLNTTIAEYDREIGEMEKRYPEVKLLKQVYGVGPVIGLALILTVEDPHRFRHSRDIGPYLGLRPKKRDSGQSQPELGISKEGDKMLRWLLVQAAHTILRRGAADSDLRRWGLGLLAQAETEKKKRGGRKSVKKKIVVAVARKLAVLLHHLWVTGEVYQPLRNAQREAAAA

SEQ ID NO: 336646 - protein, 433 aa, unidentified
MSKFFNSPVVGIDVSADFSYAAILAPNGDVYKKSFKIKHDAKGFDHLVNEIKKVEKEFNMKTGIFMESTGVYHLSLFHYLKNNFDNTFVINPLVTKCNKNVAIRKVKNDKKDALSIANIGKFQNIKLSQPNDLDNFLLKNLIREYYKLRDSCSTYKKKLSADLRVIFPNYNTVFSDSTSNTSLELLSNYPTPKSVMDAPKQDVMTILLEKSKKSVTWSEKIYSKLITIAEEAKIIGVPLSGLAIKISSSLAVIKAFKSQIDNLLNEINTLIESSEFPESIKENIKLINSIPGIGHLTAITLIAEIGDINGFIKPKHLVAFFGIDSSVNQSGKFQGTQCKISKRGTRIGRRALYAVALASIRRSRTGIPINKVLLEYYQVNLKGKKAKVALVAIMHKILNYIFAVLRNQSPFEQRDPKLHKQIFLENKCLNTAA

SEQ ID NO: 336647 - protein, 423 aa, unidentified
MMKLKYSICCGLDVHKNVIVATIVTTNKDGISEYLQKSFSTINSDIQRFHNWLIENNCYHVCMESTGKYWIPIFNYLENDIDICLTHPKYVKAIKGKKTDKKDSKWIADLYKFDLVRCSFIPPKDFRQLRELARYRFKLVCMKSSEKNRIQNCMTISNVGIASVLSDPFGKTATEIMSYLLEHTADSMDEKAVRKLIKKGAKSKSDEIIEAIKGYTIETDQAKKLELARGHLEYLDDMITQTEVELYVRIKPYYEFVEFVSTMPGMTELSSTIVLAETGVDMDIFDDAKHLCSWCGLSPANNESAGKKKSVRIAKAGDYLKPMMVQCALAAIKSKKQPYFAIKYGRIKKRRGHKKAIIAIARMMMVCIYHMVSEKKPFTPTDYEELMNPQNHVERVVLNENNVFAYLESLGYDSSKLVKRNDN

SEQ ID NO: 336648 - protein, 357 aa, unidentified
MTKRLWAGLDVGVESTRICVIDDAGEVLHEACCPTQLKNVRGELSCLKRRRHAKVGLEAGTGTSIARGLRSLGYSVDLYETRKLSKFLRVRRNKTDAGDARGIAEAGRIGASLVSKVHLKSLECQALQSRLTIRRHLIRERVAAVTLLGRQIELFGGRMGRCRSASELHTKAEAEIKKLFGTSSSALRSDLYLLLDHCEQLIAIQHETDRLLKRLALTDELSRRLMQIPGVGPICALTFYATIGEPHRFLRSSDIGPYLGLTPKLYQSGLALKSGRVSRMGNAALRGLLGHASLLYMKFGNPESELRHWASRIEQRRGRGKARVALARKLAVIMLTMWKTGENYKEITRDSAPAHAE

SEQ ID NO: 336649 - protein, 349 aa, unidentified
MRFYTNQHRHYCGIDLHTKTMYVCILDRDGQVLVHKNLPSNPEAFLEVIAPYRDDLVVAVECIFTWYWLADLCAAEGIAFVLGHALYMKAIHGGKAKNDKIDAHKIAMLLRSGMLPQAYVYPAGMRATRDLLRRRLHLVRKRGQLLAHIQMTNQQYNLPAFAKRIAYPSNREGVADHFEDRVVRKSVAVDLALLDRYDTLLTDLESYLVRQAKQHDPQAFALLRSIPGVGKVLALTILYEIHDVKRLDRVQQFASYARLVKCAKESAGKKHGTSGAKMGNVHLKWAFSEAAVLFVRHNEPGKKLLAKLEKRVGKGKALSILAHKLGRAAYYILLRGKAFEIDRFVATAN

SEQ ID NO: 336650 - protein, 397 aa, unidentified
MYIVGIDIAKRKHEAAVIDGEGTVIIKPFSFTNNCSGYNRLLAMLAKAKLPLDEVSFAMEATGHYWLALFTRLQKEGFRVQVINPVQTNSIRSFYIRQAKTDPRDALLIAEVIRFGHFSESTLHPENIYELRELCRGRHAIVAMQADVKRKVVALLDQVFPEYETAFTNLFGDTSMAILQTCPTPKELSEMRLEELCHLIEVSSHKRFRMAKAQELQALARNSFGFAMAGDVFSTMIRLYAKHLVFLKQQVQEMDRKIAEIMETLDTPITTITGIGPTLGAYILSEIGDISRFSSAAKLAAYAGIDPTMRQSGEYNGVRNRMSKRGSPYLRHAIWLAASSAVLHDPALKLYFQKKRDEGKPYMASVGHACRKMVSIIYAVMRDNKAYTPYIPNEISA

SEQ ID NO: 336651 - protein, 365 aa, unidentified
MNECTHIGLDVHKDTIAVAVLRPHTTEVDERVIPNTPEAIMRLLSRHDPASTLLAYEAGPTGYDTHRLVDSLGFHCDVIAPSLIPRRSGARVKTDRLDARNLARLHRAGELTSVRVPSTAEEAVRDLIRMREEVKCDRRIARQRIRSFLLRYGKRYPGTRDAWSQRFETWARSLYFDEPHAQEAFENLMSAYFVRDAQLAEMGRRIEQIAATEPFAADVARLSALRGISTLSAMTIICETCDFSRFGDAGAYMGFTGLTPSEHSSGASRHQGSISKTGNRHIRRVLVESAWAYRHAPAVRGKLRERLEGQPPEVAAYSWAAQVRLNGTYRRIAARKGAHTAVVATARELSGFVWGLMTGNLGPAR

SEQ ID NO: 336652 - protein, 345 aa, unidentified
MHFIGVDHHKQTSTMTVLDSQGREVRTARLLNLRADIGAFIREVAPEGFLAVVEAGRASYGMADLLRELGGHVKMANPLQVKAIAHARIKTDKRDSRTLAQLLRADLIPEVYQREAWNREAQRVLRLRAFWISLRVQVRNKIRALLAQQPEEIRIAIEQRSGQLFGPKGQEFLGDLRLGDRDGEILRALLRGYQAFQAFQAESDQMVADLYRELPAAQLIDTAPGFATTFSVLVAVEIAEIRRFPRADALHSYAGLVPSTYSSGARTYHGRIVKGNVWLRWALIEAVYPAIRKDAGLSILYHRLARTKGPNVAKVATARRLLTILYRMLTENRPYVPYRTNPTAA

SEQ ID NO: 336653 - protein, 350 aa, unidentified
MIIGVDYHPSFQTVAFLMEETGECGEQELNHSDGQAEKFYRDLKQRGISVRVGMEATGYSRWFERLLAELGFELWIGDPAEIKAKRVKKQKFDREDARLLLRLLRENNFPQIWVPDPENRDLRQLLWHRHRLVQMRTRIMNQLHALAMNEGYRWKKKLFSEQGRMQLEKLTLAPWASRRRQELLELLDRMNPTIAELTAAVEQEARKRPEAVRLMTHPGVGPLTALAYVLIIGTPTRFERGKQIGTYVGMIPCEESSARKQRLGHISKQGSSLLRFLLVEAAQAAVRKDPDWRRRYIHLAMRRHKSIAKVAMGRRLAVRLYWMWRNGCEYSQSLEFGSYAGQLEIGNGVK

SEQ ID NO: 336654 - protein, 383 aa, unidentified
MRIVCGLDVHKDSVFVCILNEKGEKFEAKYGVLTPELEELHQLLLTHEVKEVTMESTSIYWYPIWRILSDIECLKLVNPYFIKQLPGRKSDVRDAAWIAECTMKDLIRGSFVPDEIVQRMRQYNRRIFDLNKEKVYKLTKLDALLQRCNIRISNYVSSTDSKSYKDVVKLLSEGIVNAEKLTEAIHGRTVNRVGKEVITAALTGVVNEVDIDLIRQYREEILMDDKHLKECQEKLTEICRKEFPREFENLQTIPGVKERSATSILSELGADMKMFITAAALVSWCGLKPRNEESAGKIKSRRITHGNKYIRKTMIECAWGASRTQNCFYSNFSYTQTVVRRKNAMKVKVTIARKMLVVIWHVLSDGVPYNDYKKPEAIAEGNS

SEQ ID NO: 336655 - protein, 393 aa, unidentified
MICVGIDVAKDKHDCVILNSEGKVLAGVFTIPNNADGFDTLLQKIHGCTSPDDKIKVGLEATGHYSYNILGFLLNQGLPTYVINPLHTNLFRKSMSLRKTKTDRVDAKTIAAMLMSNVDLKSYTDTAYHNEELKSLTRYRFDKVRERAQLKQSVSRLVTILFPELEKLVPTLHMSSVYALLIEFPGAKQIAEAHLTHLKSLLKDASKGRYGRDMATEIRDAAKRSIGSVMPAKSLELRHTIRLIRELDSEIKDIEAAIEAIMEELQSPITTIPGMGFRMAAMILAEIGDFSFFDSPDKILAYAGMSPSTYQSGHLSLAGTYSHMEKRGSRYLRYALYNATKYVCHWDPGFAAYLAKKRAEGKHYNVALSHAAKKLVRLIYALEKSRQPYKRIA

SEQ ID NO: 336656 - protein, 412 aa, unidentified
MQETQCWFAGVDWASEKHDVWLTDASGKRVGVRVFAHGGEGLAQMCDWLIATSGARPADIHVAIEVPHGPVVETLLERGFITYSINPKQLDRFRDRFTLAGAKDDSRDAETMASSLRTDRRAFRKLTLAEPLLIELREWSRMTDDLTTEKNRNANRLREQLWRYFPAMLELEQDVAADWFLDLWELVPTPDKAARIRETTIAKFLKSRRIRRLDGAGVLAILRKPPVTVARGTVEAASAHIRALIERLRVVNRQLKDAHRQLDRLCGLLAEPTESEPGQTKEQRDAAILASLPGNGRIVLATLLAEAWEALQRRDYHALRALCGAAPVTKRSGKSRIVVRRLACHPRLRNALYHWARVAAQHDEKSKAKYASLRARGHSHARALRSVGDRLLNVACAMLESRTLFNPALASK

SEQ ID NO: 336657 - protein, 471 aa, unidentified
MAKAARKPASRPSRLTSARPRFSKRYPRLEDLPVVHRHAAGIDLGGDVSHFVALEVGDEVEVREFGGMTPDLHSLVAYLTTHGVTTVAMEATGVYWMPVYDLLEAAGFEVYLVNPSHVKNVPGRRKDDKLDCRWLQKLHKYGLLSASFRPGEEIRPLRSFYRQRTRLVQLCADETRRMQKALDVMNVRIHKTISDLCGVTGLRIVRAIVAGERDPAVLAAMREPTCQCREEELRQALTGHYQADQVFALRQALARYDFFVAQLAAVDQEIEAYLTALIPLPEAEITAKVTAATQPRPKGTHVPAYNVAAYVELFTGHDATVLPGIGPQIALGLLAELGRDMTKWKTQRHFGSYLALAPQPKISGGKVLATRTRHGSHPAAVLFRQAAAAVIRSDSALGAFYRRLAVRIGTAKALTATAYKIARMYYHLMREGRAYVELGEHVYAERYRRQQIAALEKRAKRLGFQVTPVAA

SEQ ID NO: 336658 - protein, 358 aa, unidentified
MNRNTGMNAGQIIGTMNGQQVVGLDIAKLVFQLHTVDMGTGEIINVQIKRAKVLEYFVNKPKCLIAMEACGGAHYWARELLALGHRVRLLHAKVVRPFVSGNKTDATDARGIWLAVQQPGVKFVGIKSVTQQATLTLHRQRELLIKMRNMQTNALRGLLYEFGAIFAKGKKALFSEIESRLEGLAETLPQMVADSLREQVVRIKAIMADMQAIERRLAQQLRTDEQMKRIAQIPGVGVLTATAAIATMGQASAFRSGREFCAWLGLVPKQTGTGGKVRLGGISKRGDSYVRTLLIHGARSVLRHAKEPGPWLEQLKGRRPANVVIVAQAAKMARTIWAVTVKEQEFQRGFKSVRPHAA

SEQ ID NO: 336659 - protein, 383 aa, unidentified
MTETTRNPECNPSAAALYLAFELGSTKWMLAFTARTATSRSRVRQIAAGDLAALEREILTAKARCGLVLTAPVQSCYEAGRDGFWLHRWLLAQGIVNLVVDSSSIEVNRRARRAKTDRLDAGKLLQLLLRWDGGEPRVWSVVHVPTPEAEAGRQLTREIATVRGDRTAVRNRLLGLLATQGIRCELTRQFLERLADFHSGDGRPLAATWRDRLAREWEQLQAIETRLATLCRARDEAIAAGADRVAQVAQHLCQLRGVGETSAAIYSAELFGTRTFANGRQLGALTGLVPVPYRSDQRVQDQGISKAGRAELRRVSVQLAWCWLRWQPDSALAVWFTRRFAGAGGRSRRIGIVALARKLVIALWRFVAHGVVPDGAQLKPTQI

SEQ ID NO: 336660 - protein, 342 aa, unidentified
MITIGIDPHKSSLTAVVVDPAGQQLASRRLPMTVDAAERLLEWATPWPKRRFAVEGAAGLGRGIAQLLAAAGEDVVDVPATLSVRARLLDSGGGRKTDVSDAASVAAVASGRAGRLRQVVAEDHTVVLRLLCERREDLAATRVQIANRLHSVLRDLVAGGAPRNISAPRAAALLASARPITVADQCRRDIASDLLTDLRRVDELLKVNQRQARAAIRGVGSSLTSIHGVGVVIAVKILGHVADIRRFPTADHFASYTGAAPLEASSGDRRRHRLNTGGNRQLNSALHTIAVCQARDPGPGRAYYQRKLDEGKTPAEARRALKRRLATVIFRTLARDRKLSAA

SEQ ID NO: 336661 - protein, 416 aa, unidentified
MKYYTSTTEYNCGIDLHARQMYVCVMDRQGKKLVHTNVLNNDFEYFLKLVAPYRHDLTVCCECMFGWYWLADACQAAGLTFVLAHALYVKAIHGGKNKNDRIDSEKLTHLLRSNLLPTGYVYPAQQRPLRALLRQRLFYVWRRSELMARIYSHQLAHNRTPAKHTQRVRDTWEAALLKAEDHPLRQLALQNDVAMVRHFDQQIFQLEEELQRQTKKVASREYALLQTVPGIGETLGLTILYEIGDIHRFPTVKDFLSYCRLVKGTVASAGKIKGLRGAKLGNPYLRWAFGEAAVIAKRDHYLIGPLSQRLEAQMNGNKFKSNTVVAIKLARAVYFMLKNKTVFDPERLVASMRKCFSPGRGQPGRLTGGAKKVRPRRAADPASCAASTPVCVGPASTPADSIGIRGQRLTSTAQKR

SEQ ID NO: 336662 - protein, 346 aa, unidentified
MEPMYYIGLDVHKQKISYCVKDSSGKLYREGWLPATRYDLDCWMKNLPEPWSAALEATMFSGWIYDHLKPHAAELKVAHPLMLRAIAAAKRKNDRIDANKICDCLRCDFLPECYMAPTSIRERRRTLCYRSLLVRQMVQTKIKISTLLMEAGVSYNKSKLHKAGYFRELLASNPDIYESLRSLLRQCREMVVRLSKMETALIHSLQEDQLLVERVERLMSIPGIGPITALTWALEIGEVQRFSSIKKAISYCGLCGDEQRSANSMQRTPISKQRNKHLQTTLIEAAKMAPRYSPTLALLYDREKQKGNANRATVAVARKLVAYLMAVDRGKTHFLVIDQETCTAAA

SEQ ID NO: 336663 - protein, 421 aa, unidentified
MEATQDEQEIIARVAALDIGKAELVCCVRVPDPKGGSRRVQEVTTYSTMTRSLQTMADRLLDLGVTRVVMEATSSYWKPAFYLLEAHGFQTWLVNAKDVKHLPGRPKTDRLDAVWLCKVAERQMLRPSFVPPVPIRRLRDLTRYRIALVSDQGREKNRVEKLLEDAQIKLSVVASDIFGVSGRDMMAALIRGERNPQVLAQMARSRMRTKIPQLEEAFVGYFTEHHRFLLAKMLARIDALDGDIADVEAEIETQIAPFAPAVARLDEIPGVGATAAAVIIAEVGVDMTRFPTPAHLSSWARFAPGVKESAGRKKGTGSTGHGDRYLARVLGEAAVGASRTDTFLGERYRRIARRRGKKKAVVAVGRSILVIVWYLLQNDTAQFHDLGPGYYDSRTNPERTKRNHIRELEALGYRVILQPAA

SEQ ID NO: 336664 - protein, 343 aa, unidentified
MKRITIGFDLAKHVFQVHGIDESGAVIIRRRLRRSEVSGFFRGLEPCLVGMEACATSHFWARELLALGHEVRLMPPSYVKPYVKRSKNDAADAQAICEAVTRPTMRFVPVKSATQQSVLMLHRVRDLLIRQRTMLVNALRAQLSELGIIAAQGMANIKVLTAIVRDEGDGRVPPLARMCLTAIIEQLGDLEARIGVIERAIHSWHRTNETSRRLETIPGIGPITASAIAATVTDPTLFSCGRQLAAWFGLVPRQNSSGGKERLGHISKQGDPYIRRLLIVGAHGVLRYARGKGRTPTPWLDGLLARRPYKVAAVALANKMARIAWAVLATGETYRRPQLAQPA

SEQ ID NO: 336665 - protein, 349 aa, unidentified
MIVIGVDTHKRSHTLVAVDAATGGVLGERTVVASDDGALVALRLVAGLGDERVWAIEDCRHVSGRFERSLVAAGERVIRIPPALTANARRSAREPGKSDRIDALAVAHTALREGVERFPAAFLDEQAMEIRLLSDYRDQLVVERTRAVNTLRWHLLAIDPALEASLRPSGLVGPRIRARVARRLARLGDGAQVRVAKGLLRRINEITRQELELRAELNTLIETHSPQLLSEHGCGPITAAILVGHTAGAERFPTEASFARHTGTAPIPASSGNTIRHRLHRGGDRQLNRALHTIALSRLRTDPQTRAYFDRKIAEGKTKLEALRCLKRHLARHFWKLLYKPANSEPALT

SEQ ID NO: 336666 - protein, 343 aa, unidentified
MEGSQGLVVGVDTHKDTHSAALVDELGGLVASTDVAATQRGYVQLLEWARCHSPHPTWVVEGTGSYGAGLTSFLAGCGEVVYEGDRPQRRKRGAGGKSDQLDAIKVAREALAREHHAVPRQRGNREAIRVLLSTREGAVSAYRQALNQLYALVVTAPEPIHERLIRLKGDQLVNACVRLRSTTGDIETSVTKRVLQQVAKRIQTLQAEAASHEALLEKLVVETVPALLAEPGVGAITAAQLLVSWSHAGRIRNENAFAAMAGVAPVPASSGRVVRHRLNRQGDRRLNRALHVVAVGRSRFHGPTRDYIARRTVEGKSSREIRRCLKRYLARRFFRLLQGLDNP

SEQ ID NO: 336667 - protein, 397 aa, unidentified
MYIVGIDIAKRKHEAAVIDGDGTVIIKPFSFTNNCSGYNRLLAMLAKAKLPLDEVSFAMEATGHYWLALFTRLQKEGFRVQVINPVQTNSIRNFYIRQAKTDPRDALLIAEVIRFGHFSESTLHPENIYELRELCRGRHAIVSMQADVKRKVVALLDQVFPEYETAFTNMFSDTSMAILQTCPTPKELSEMPLEELCHLIEVSSHKRFRMAKAQELQELARNSFGFAMAGDVFSTMIRLYAKHLDFLKQQVREMDRKIAEIMETLDTPITTITGIGPTLGAYILSEIGDISRFSSAAKLAAYAGIDPTMRQSGEYNGVRNRMSKRGSPYLRHAIWLAASSAVLHDPALKLYFQKKRDEGKPYMASVGHACRKMVSIIYAVMRDNKAYTPYIPNEISA

SEQ ID NO: 336668 - protein, 407 aa, unidentified
MNEKKNYVLAIDVAKGKSMFFILSIHGEVILDAIEYEHTFSHFKMINQIIGKEEIKDDLVVFMESTSTYHYPVMRYFIEQDYDVIVVNPNLVKKSSTTFRRTKTDRLDAIKIAETYFKEDIKSNAIKTGRLYDDLQAAHRQLISLEKALTAIKNRYTRLLDICVPEHELFYSDKSDKYSLKYITLFEHFPHSEFIQKKRVDHIASILNLTFNRSFKTRLTKEATQLKNISKDAYPGVSISSNEVDNLKQTIIILKEFMGHYELAKERLIHLGKQTKEYTYISSIPGIGDQTASQLIAEIGDFSRFRSYKQINAYCGIEPSVYQSGKTFYNGKISKSGNPFARKVLYSVIMNIIQSSRSNYPEHPINIYYTLKKEKENKSTKESVIASSTKLIRILFSLCKYKRTFTK

SEQ ID NO: 336669 - protein, 374 aa, unidentified
MFYSGIDLHKDNCFITTVDDSGAIVKQERLHNIPDIILTYFDSLQGPHKAVVECTAGWYWLSDLLEPHGVELILAHAKYLKAISYAKVKTDKVDSQTLASLLRLDSIPQAHKIQRDLRDLRDVMRSRLRLVQKRTSCYVSIHNLGRKLNCGDQIVIEQRSVPEILPEAYRLHLQHLYEQVDLLDTQILGLEHFLQPVLIPNDDIQRLVWIPGIGKTTAFTIYLEADGIERFLSDKHFVSYCRLVPGAKNSNKTIRHKSGCKDGNKYLKIAFTDMAVRAIQYYPEYRQIYQKIRRRANEPIARTVVAKELARIVYHILKNKTEYRGLKGQPISHQKATQYPRLKHRSQPKADQPLAEVATPGKPVRLTDAQASSA

SEQ ID NO: 336670 - protein, 346 aa, unidentified
MDQIIRIGMDTSKHFFQLHGVDSAERPVLRRKLRRSEMLAFFAKLPPTVIGMEACAAGHYWARELRRLGHEVKLIAPQHVKAYIKRNKNDGRDAEGLCEAMSRPTMQFVPVKTDEQQAALMLMGVRQQLMTRRTQLSNAIRGYAAEFGLITAKGLDKVEPLLARIAQDESLPALAREMFTLQGRDYARLLVELKAVEARLMAWHRANADSRRLAKIPGIGPIGATALVMKAPDPGLFPSGRHFAAWIGLTPKDHSTAGKTRIGKITRAGDEMLRSVLVSGATAVIRQAKCGRGHPSPWLLALLARKPPKLAAVALANKTARIAWKLLTTGESYDGARMPVASALAA

SEQ ID NO: 336671 - protein, 477 aa, unidentified
MGCFTFEVTAYLYVKIVFSSTNKCASEHVTLSLFKHSRLMLDNQSMLPIPVIQRTYRFRKGFSMALKIVYQICCGIDVHKTFVVACIASTNPSGITVYKSHRFSTYTQGLRELLQWLKYNNCQDVCMESTGKYWIPVFNILENSCNIVLAHPKYVKAIRGKKTDKKDAKWIADLFKHDLVASSFMPPADIRQLRDLMRYRFKLTCFMASEKNRLQNCLTVSNIQLGNVVSDTFGKSSQKILDKILENPLDTSFDIKPLIHSSMEKKLSELELAVDGYITPEQAGKLKIIKRHFEDLESRKAELEKLILALASPYQQELDLILTAPSFKNIFSAITVIAEIGVNMEAFPSAKHLCSWAGLTPTNNESAGKKKSVRVSKAGCYIKPLLVQCATAVVKSEKHPEIRNRYLRIKKRRGHKKAIIAIARMLLTALYNMLKKKEPYNAELYKKSDVFPVEREITVEQAILLAQHQGYKIKSAT

SEQ ID NO: 336672 - protein, 334 aa, unidentified
MQNVTLIGIDLGKHSFHVHCQDRQGNALLRKKFSRTQLINFLGSCKAATVVMESCGGAHFMARRIADLGHEAKLISPQFVRPFVKSNKNDFVDAEAICEAASRPSMRFVPPRTEDQQAMAALHRVRDSLIRQRVKTTNQMHAFLLEFGVSLPRGIAVIRRLADVLEENDFPPYLARVLSRLHSHYVYLSGEIEEVDKELKTHLAEDETAQRLLTIPGVGPVTASLLAMRLGDGKNYASSRDFAASTGRVPRQYSTGGKTTLMGISKRGDKNLRRLLVQCARVFMQRLEHNPGRLAEWVNRQLARHHSNVVACALANKLARIAWAVTAHQTVFIK

SEQ ID NO: 336673 - protein, 339 aa, unidentified
MNTLFVGVDMSKDSFAAAASRCQTTHDFGSFANQASGFTALAQAVATEQERQEVEQVHLIVEATGGYELRLLSFAHEQGWLFSLPNPKQVRDWAKGEGGRNKNDRIDARNLTQFGVQKRPQPQQPVPEVISQLDSLLRRQEDVQKMMREERNRQHALAYHPQAAAAAVASTVRVLAALEAEMQELAEAIQALLNANPPLRTQARRLRTVPGIGAKNNLPILVLLYRWQARTNGQGTAKGLTAFVGLDVPEYSSGISVYKRPTISKMGSPEMRSRLYLGALGGVRGKNSPLRFFYQRLVGRGKAKKLALVAASRKILVWAWAVFSHEVDFDPSRFAANSA

SEQ ID NO: 336674 - protein, 351 aa, unidentified
MKIIRVGLDLAKQSIQVHGVDRDDRVVLKRSIKRDAVLKLFATLPPCVIGMEACSGAHEWARQLSRLGHQPKLMAAKHVKPYTQGQKNDANDAAAICEAVSRPTMRFVAVKSVEQHDLQALHRIRSQCVEQRTAKVNLIRGLLAEYGIVVAQQISQLRNALGVLLEDAENGLTGDFRELLVGLQQDLYFLDDRITELTARIERHVKVHDTTRRLLAIPGIGPISASALFAAVGDGRAFANGRHLAAFLGLTPKQYSTGGKNTLLGIHKQGDSYLRGLLVHGARAVQRMAVKKTDPRSTWLNALGKRRHKNIATVAQANKTARIAWAVLQGATYRPEPARRLTPDAHIELAA

SEQ ID NO: 336675 - protein, 358 aa, unidentified
MQYIAFDAHKKYTWARVEDAAGQQLAEARIPHEKGAFLEFLSNWDVGTPVAVEAVGNWYWIADEIEAARMVPQLVHAKRAKEMMGRINKTDKLDAQGLNCLQRTGTLPTVWIPPGEVRDTRELPRTRMVLVKQRTALKNRIHATLAKYGIVIAEVKDLFGIRGRVLLSQRLGELPTNTRYVTEGLLEQVNCLNGRIDAIEERIEAMLAGTEEVELVQTMPGVALVLSVVIANEVGDVNRFPSADHLASYAERVPRVHSSGGRTRYGKTRPDVNRYLKWAYTEAANAVVRHLRKYSQHHVGRLYMRVKHRRGHPTAIGAVGRHLAEATYWILRNREPYQDPGLRSMVVKRGIVSAKLKP

SEQ ID NO: 336676 - protein, 344 aa, unidentified
MVTIGIDAHKRTHTVVVVDEQGRKLAQKTTGTTSSHHLQLIAWAATHGDARLWAIEDCRHLSRRLERDLLGAGEGIVRVPPKLMAKARDAARTFGKSDPIDALAVARAALREPDLPSARLDGPERELRLLVDHREDLVGERTRMLNRLRWHLHELDPGSEPRARSLKHLRNLDSLAAGLEDGEGLVARLARELVRRCRELTVEIKQLEREIAALVEVLAPSLLAIRGCGALSAAKIIGETAGVERFRSRDAYARYNGTAPLPVWSSNHVRHRLSRSGNRQLNAALHRIALTQAQWHPDAKALLARRKAQGDGSLEALRVLKRRLSDVVYRALKADAAIELSLAA

SEQ ID NO: 336677 - protein, 388 aa, unidentified
MTQASCPLSPPVTLDYENTLVLAIELSKTKWVLSAQVPGLLRVKAKQTIEPKAEALLAAIDGYRNRSRAAGRTVERVVAIYEASWSGFWLARWLGRHGVETHIVQPSSVPVDRRARRAKSDGIDAELLLRTLLAWLRGEPRVCSMVPIPDEADEDERRRVREREDLVADRISLVNRIGAVLATLGVDDYNPLRRDRRVRLETLRTALGGPLPPHARARILRLLDRLDLVCAQIAELEQERDAALEKEAPDKAEKMIRQLVGLRGIGVQSATVLVREGFVREFANGKALGSYAGLSPTPFSSGGTEREQGIDKAGNRRLRTVMIELAWLWQRYQPGSAQVSWFRERVGGTGRRMRKVMVVAMARRLLIALWQFATQGVVPEGAIVNPAG

SEQ ID NO: 336678 - protein, 391 aa, unidentified
MTSVGIDIAKDLHWASAIDAAGEALLDRKVANTPQDLLRLADELRALPAPVKVGIDVLGGIATLTQAVLLEAGFALVHVSGLAVNRARQGTVGGETKSDPRDARVIADQVRTRRDLRPVVAVSELDIELRLLVSRRRDLSEEQTRRLNRMHDLLAAIFPELERSVDLTTKAALALLSTFVTPKELREATDEALKAPLGARASRGYAAELLAAARGCAQRQPMSLPGEALTARIVKDLAREALRTHEQLAVLDAEIEARLARHPDAALIRSLPGMGALLTAEFIAQVGSIERFKSAHALAAAAGLAPVLRQSGKVRFLRRPSGGNKGLKRVFYQSAFASLRCPQSKAFYARKRQEGKHHHQAVIALARRRVNVLWAMLEQRRPFSPHPSTRS

SEQ ID NO: 336679 - protein, 341 aa, unidentified
MDQYVGLDVSLKETSISVRQERKRIWRGKCASNPVAVANAIRTHAPDAALVVFETGSLATWFHRELTAAGLPAVCIDARHAKSALDTAPNKTDTNDADGLALLAEAGFFKAVRVKSAASMRIRTLVGARAQLTEISTTLTNQIRGVMKTFGLVIPAGGGKLFDANVGRLLEDEVELAAIVLPVLAAWRAVRAQLAQLDRQLVATARMSPVCQLLMTAPGIGAVTALSYLTAIEQPANFTNSRAVGAFIGLTTRRYQSGEIDYDGHISKRGDGRLRALLFEAAVQVLTRVKAESGLQRWGVKLREKVGFKRAAVAVARKLAVVLHAMWRDGRGFDAALGVSI

SEQ ID NO: 336680 - protein, 336 aa, unidentified
MNIKRIGLDLAKQVFQLHAVDHQERVVLRKTLHRARMLTFFTRLEPCLIGIEACGSSHYWARELTRLGHTVRIIPPQFVKPYLKGNKNDANDAEAICEAVSRPGMRYVAIKSEAQQSMQAEHRVRARLIHDRTALSNEIRGMLGEFGFGLPAGLSALRKALPEILSQQEKWDNRFIRLLSELTEELQALDERLNRYDRRLKQLAQEDERIRRLQEISGIGPVTASALVAAVGDAKQFKSGREMAAWLGLVPRQHSSGGKTKMGHISKRGDSYLRTLLIHGARAVLNACDRKEDRRSRWLQSVAERRNRNIATVAMANKNARIAWSVLSRGEEYRVM

SEQ ID NO: 336681 - protein, 343 aa, unidentified
MEIHAIGIDLGKTLFHMVGVDSCGNVVVRKRCSRSQLLAYTANVRVQRIGMEACSGSHFLGRALREQGHDVRLMPAQYVKPYVKTNKSDYIDAEAIAEAVQRPTMRFVPIKTEEQLDLQTVHRVRERWVMRRTAVVNQIRGLLLERGLTLPKGRSHVDRALPDILADATLRLSDSFRVLLAQLGLEMDQLTARIEQMDAVIHRTATENEACQRLTTIPGVGPVTATALVAAIGNGSGFRRGRDLAAWVGMVPREYSTGGKQKLLGISKRGNVYLRRLFVQGARTVMQYRSKQAPGLRCWLDQLMARAHQNVAIVALANKLVRMAWAVLCKNETYRPPALVAAT

SEQ ID NO: 336682 - protein, 336 aa, unidentified
MKKFDYYVGIDVSKLTLDVTILYEESVNITKTIYYKIENHEKSIAQFVKKRLGSYQSDQILFCFENTGIYSFPLSSYLNDHKLPYWQVPAIEIKRSKGICRGKDDKIDSKDIAFYAYSHLHKFRPSHMPAKSIQQLRLLFTEREKVLKSLSSFEKTSENEHFVSKDVFASVASLNKKTVSLLKKTLKQIEEKMLAIIDSEEKLSQQYKLIVSIPGIGMQTAIYLIMATKGFDDFDNWRQLACYAGVAPFPYQSGTSIRGRNKVHPLADKKLKSLLNMCAIVAIRHDKELKTYYTRKVEEGKAKMLVINNVRGKLIARAFAVINRNSPFINTFKFAS

SEQ ID NO: 336683 - protein, 388 aa, unidentified
MYLVGIDISKYKHNCFVATDSGVPLKEFVFENNSEGFKLFHKALSELKQDQEIRIGLESTGHYGTNLKQFIVASGYTYLEFNPYLTHQFSKAMSLRRTKTDKVDAKTISNMLGSVDYKTLHTQFYHINELKQLVRDRDDILTNRSKTLVKLTNLLDIIFPEFKPFFNNKLGATAFFILKKYKSPVRISKLTMKDFDELKSKSKGKLTYPKFSRLKSLAKDTVGVQSDIYNKRTQALIKDYEYFDQSLDEIDQEIIHLFKETKTMLTTIPGLGIIQAATIYAEIGDIHLFSNPQKLIAYVGFDVSINQSGISEHRGKIVKRGSPLLRKAIWTYALPSLRFIPALNDYYHKKKAEGKHHKVALTHVCRKLIRMIYHIEYNHIVFDDREIK

SEQ ID NO: 336684 - protein, 338 aa, unidentified
MSAIKTIGIDLGKSTFHLVGHDHSGQELYRHKFSRAKLMQFISVHEPVTIAMEACCGANWLARRCQEFGHEVKLIPPQYVKPYVKSHKNDFIDADAIAEAATRPKMRFVTPKSEQAQLGSVTRRIRTGYIRERTAVMNRISSILVEFGFSFPRGHANMKRLFQWLADTGQSVPPLLVFELREQLDHYNLLNEKIKEQDKKIEMLNDDNELFTLLQSIPGIGPMTAACCLSAVSNPKDFSNGRNFAAWIGLVPFQYSTGGKSRLLGISKRGNKELRELFVHAARSVLWRDATAEKYFGTWLLDLKRRKPFNAALVALANKLARIAWSVMATHKTFEIRT

SEQ ID NO: 336685 - protein, 400 aa, unidentified
MISVGIDVSKEKSTICILKPYGEIVSRPFEVCHTEKELSELTSMLLRLNDDVRVVMEATGIYHLPVLCYLKEKGLFVAVVNPFEMKEYRCQGLRRVKTDKQDAVTISNYGIDHWYRLREYEAEESIYAELKLLGRQYRHYMRMRVESVLELTHLLDYTMPGIKTLLKGWNETNGKDKLGDFAEEYWHYDNITKKSEEQFIESYLKWAKEKGYHQSQDKAVKIYALAKEGIPTVSSDTPSTKMLVQEAVRVLREVDNTLMTILTQMQALAKSLPEYPVVRAMGGVGNVLAPKLIAEIGDVRRFHSGKALIAHAGIDAPPYQSGQFIGTERKISKRGSSSLRKIGYEVMRCLKTHKEPEDAAVYRFILKKEKEGKSKRAAKIAGLNKFLRIYYARVMEVYQK

SEQ ID NO: 336686 - protein, 417 aa, unidentified
MKCFVGLDVSSTKLDVCIMLSDTSTPVTASLSNDLSGATEIKNHILDLNHTYHFERIVIGMEATSLYSFHPAMFFHEDSQLKELHIEIMVEQPNKIKKYRDAFEENKNDTIDAFYIADYFRIERFSPSFLKEEKYMALQHLTRTRLQIIEQLTRTKQHFIENIYYKCNTLAYQFKKEELSTNLWSSTMMTLMTDEMTLDELANMPLQELDDWLQKLGKGHFKDSEKLAQTIQAAIRGSYRLSKLQQDSVNVILGLLAREIRNLEKMIKEIDKAIEDMVETIPEYQCLTSIPGVGKVYAAGIIAEIGQIERFKDHPQVAKFAGLNWREKQSGNSNSQHTSLVNRGNRYLRYYLVEAANSVRRYDDEYKDFYKKKYHEVPKHQHKRAIVLTARKFVRLVDVLLRNHQLYTPPRRLMEDN

SEQ ID NO: 336687 - protein, 372 aa, unidentified
MNSEKYIGLDVHQATICVAVMDPKGKVVMESILETKATTILEFLAGLRGTLSVTFEEGTWAAWLYDLLKPHVANLVVCNPRKNALLKHGNKSDKIDARKLADLLRLNDLEPVYHGETGVRMLRELARSYLTIVKDVSRVMSRLKAIYRSWAIPCAGRDVYYTRHRGEWLGKIPEAGSRRRAEQLYQQLDMLQPLRQQARQLYQQLDMLQPLRQQARRELLAESRKHTITAKLRQIPSLGPIRSALAVALIQTPHRFRTKRQLWTYSGLGLETRDSGEYHYVQGQVRRRKKQVFIRGLNKDHNHDLKGLFKAAATRASVRPGPFQDFYQRSLAKGIQPTMARLTLARKIAAITLTLWKKGENFDAEKLKAQAA

SEQ ID NO: 336688 - protein, 357 aa, unidentified
MENDTIYVALDDSKRKLVVAILRFGAAEPEEQEIPKDAQHIQRLFRRLRREGPVQACYEAGVSGYDLYRQITACEVTCQVIAPALTPRRPGQRVKTDRRDARKLVRLFRVGELTPIHVPNEAEEAARDLVRCREAVRRDVVRWRHRLLKLLDRHGRLWGAEKNWTQRHWSWIRAQHFALAALQRAFEATVFALEQALARQAALDQEIAALAGTAPYREAVGWLRCFRGIGTLSAMVLLAEIMAYLGLVPSEYSSGETQRRGGLTKAGNPHARRVLVEAAWHYRHRPTIGRALASRSQAQPEEVVGHAWRAQQRLHWRYRHLVGHGKRPPVAIAAIARELVGFLWAAMTRRETRRQVA

SEQ ID NO: 336689 - protein, 321 aa, unidentified
MNLKEKHYVGVDCHKDTIACYINGRFKEFKTDFKGFTKALEWVKKIEPNCAWAIEGAYSYGLTLSKFLLSSGCEVYEFNALVTAKARKALSISGEKNDMGDAKVISIFAKQVKMQEVSLKTIELKRLITTRRLLVKQRTEIILSIKNHCMKEGIILPFNSLTTKKAISWLLNCDDFNLNIMANNLKVQYESIKKLEEQIQKATPEKVNKLREITGIETLTASIFYTETKGKKMSKAEFASYCGVAPVECSSGLSTRFRNNKRGNRTLNSLLYSISIFQSRFDEEGSKYFQKKLAEGKSKRLARKCLARQVSNLIWKILFTA

SEQ ID NO: 336690 - protein, 321 aa, unidentified
MNKNTEFFGIDISKDVFDVFSLEMGHNQFSNNEKGFKQFIKKLSKGSLVVMEATGYYHYCLAQYLYEQGYAVSVVNPLSVKRFIQMKLSKVKTDKSDAKSICEYARNNEVPLYTAKDKSQAECLQLLRLMDTYVKHRTAMKNKLDGEKVLGIPSKAVYRSLSRTVKQLNKELALLEVRLIALVKEEQQEQLRLLKTIPGIGEKAAILLVVFTDGFSKFENSKQLCCYAGITPTIRQSGSSVRGRSRISKIGNKKLRNQLFLSSFTACQYNKACKELYERIVNQGKSKKLALLAVCNKLLKQAFAIAKSGLPYNENFVSKLV

SEQ ID NO: 336691 - protein, 453 aa, unidentified
MKKESAKKGVIKMGTGLPVFNHHAAGIDIGDTLHYVAISDGAGGHEVKTTSAFTCDLEEIVDYLKSNGITTAAMESTGVYWLPLYLMLEDAGIEPYLVNAKHVKNVTGRKKDDTDSIWIQKLHTCGLLQKSFQPDSEIRLLRSYTRQRKNLILLSSDSVRRMQKALELMNIKIHTVISDILGKTGMSMVKAIIEGERDPQILSTLCDPRIRASQEEIIKSLQGIWREEHLFMLEQALENYEFHQKQIKRCEEKIKQQLLKQVAIIKEGDITGLEETLKKKSKAKAKKNQFDFAIGPYLKIIAGVDLCKIPGISEITALEFIAETGVDMRKWFGGKQFDAWLNLVPNTKITGGSIVSSKMMKKKNRAGQSLRQAASCLSTNKTPLGSYYRRMRAKLGGKGAALAVAHKLARIIFTMLLNKIEYNPGILTDNEEKIKLEKIKKLETQLARLKRAA

SEQ ID NO: 336692 - protein, 426 aa, unidentified
MRVLYDRVAAIDVHKDMVKVAIRVPGAKRGTRKTDVLEFRTFYGVLQAMARELRGRGVTHVVMEASGVYTDPVYYALRELDFTEVMVINPAHAKALKGHKTDARDAIRLLDLYECGLLSGSYIPDPDLREVRDLARYRMKTVQARTSEIQRLQKTLETAGIKLSSVVSDVTGGSATAMIEALISGERRGAVMADLAQTRLRAAGKMADLSMALTGRFTDHHALMCRLHRDRITMFDDAVQDLDAKIAPLVARYAREAELLKTLPGFGDVIVAGWLGAIGPAPHQHFATASRLASWATLCPGNYMSARKSKGGRTGDGGAYIKPLLIQAAWAAVRVPGRLQARFGRLVRKFGGPRNKGAQKRAITAIAHTLLKIAYGVLKTGKPYADLGADFYTRRESPDARQDYLMRQLRKLNPGCVITITPAEAA

SEQ ID NO: 336693 - protein, 343 aa, unidentified
MSEISMIGLDLAKNVFQVHGVDASGSVVLRRQLRRGAVEKFFAQLPPCTVGIEACGSAHHWARVIGRYGHEVRLMPPSYVKPYVKRNKNDGRDAEAIYEAVGRPTMRFVPVKSVEQQATLAVHSTRALLVRQRTMVANSLRAALSEIGIVAAQGLEGLRALMARLEAPNEEVPEIMRGALLLLAKHWQALDADERTLERQIAKADRADREARRLMEVPCVGPIIASTVLAKVPDAKVFRSGRDFAAWIGLTGRDHGTGGKHRPGRISKQGDRMLRALLISGASAYLRHQRTRGVSDPWLRDLLARRPYKVVMVALAAKTARILWAMLAKGEPYRDRASASAAA

SEQ ID NO: 336694 - protein, 350 aa, unidentified
MNYVGIDWAYGRAAWCAMAESGEVRGEGVIPADEDGLARLALECGREVKGCVEMMSGAIWVKDQLELAGWEVEIAHARKVRDVAPLACKTDKVDARVLAELCRRELVPALWIPSLEERALRERLKRRLHLVRLRTSAKNRVFGLLTQWGLRIPCDRLRATDAMELLETRGVPAVWRRSVAEALAVIELLDERIAPLDRELGPLARADRRASLLSTIPGIGPVLGLTIAAEIGDVARFSSARKLIGYSGLAPRVKQSGQRSRSGELSKAGSRTLRFAAVEAAQGAWRETNPWHLLYADVKARTGKANPAKSAVARKVLIACWHVLSREQPFKPSHPRNDPVPASSSSFLAA

SEQ ID NO: 336695 - protein, 338 aa, unidentified
MANFLSPSSSPLRYQGFDISKATFDVARWGDQDFPRMTLSQFPRSPEGVRAWLATVTAEELERTGVVMESTGGYCKELALWLQESQPDLHVAIANPFIVKSFGRSLALRNKTDRLDARLLARFGQERQPMAWTPLPAAQEQLRTLIRTRAYLIHMLMGLRNRMEEHKCPSPVAEQSQKSLAEVLAIQIQTLNNGIDALTREDEVLSHRMELLTSIPGIGPISAATTLGEAGDLRRFNRRGQLVAFLGVSPRVYTSGSSVHGRTHMCRMGGSHARAVLYMAAVAASRTQSPIGDFYRHLVENGKHKKAALGAVMRKLVVVMRAVLIQDRPYEAKGRPIA

SEQ ID NO: 336696 - protein, 367 aa, unidentified
MKKVSTVATKPSRNICQQRLTIGLDLGDRNSWYCVLDEAGRIQVEQRVGTNAKALGEVFGAMPRSRIALETGTHSPWISRLLSGLGHEVIVAHARKVRLIGESRKKDDRLDAQTLARLARIDPQLLSPVKHRSAKAQADLTVIRARAGLVRARTSLVNTARSLAKSYGERLRGCNVRNMNPEKAESLSPELKRALEPLLAEIESLSGRIAEYNDRIEALAVQSYPQVALLKQIKGVGTLIALTFLLTLEDPHRFRKSRDVGCYLGLQPGRRNSGQSEPQMHISKEGDPYLRTLLVQGAQHILGPFGIDCDLRRWGLKLAERGGKSGKKRAIIATARKLAVLLHHLWVSGEVYEPLHNSSRVNVAAAA

SEQ ID NO: 336697 - protein, 389 aa, unidentified
MEALLFCCCGVDVHEQMLEACILKGQDREPEVIRRQFSTMPNSLIEFTQWLFEHQCFHIAMESTGIYWRPVFEAIETFSHYYESIIVTNASHMKSLPGRKSDIRDAEWIATLLRHGLLTASFIPPKEIRTLREASRLYKKFVGEKCRYVNRLEKLLQTHGCKLSSVLSDILCVSGRNILKLLAVRGSLTVQDVAACLKGKTKYPAEKIHGALPATFGELERSLLSLLLHKIDSALQDINGILELMSRIAKPFSVQLAQINSVIGIDTTAALLILGEIGASPHLNFSTPNRLCSWAGLVPRNDESAGVVKSRKILPGNPYIKSILCQVSWAAVSNRKNPFGQWFWSHQSKLGKKKAIVAVSRKILTTIYCLLRDGSFYDPEWNLRPNISA

SEQ ID NO: 336698 - protein, 367 aa, unidentified
MKKVSTAATKQSRNISQQQLTIGLDLGDRNSWYCVLDETGQLKLEQRVRTTARALQEVFGAMPHSRVALETGTHSPWISRLLSELGHEVIVANARKVRLIGESRKKDDRLDAQTLARLARIDPKLLCPVKHRSAQAQADLTVIRARAGLVRARTALVNTARSLAKSYGERLRGCNVRNMNPEKAEALSPELQCALEPLLSTIEEVSERIAEYNDRIEALAQGSYPQVALLKQIKGVGTLIALTFLLTLEDPHRFGKSRDVGCYLGLQPGRRNSGQSEPQMHISKEGDPYLRTLLVQGAQHILGPFGVDCDLRRWGLKLAERGGRNAKKRAIVATARKLAVLLHHLWVSGEVYEPLHNSQRQPLAIAA

SEQ ID NO: 336699 - protein, 360 aa, unidentified
MASATLPRIRQPVPFDHVVGIDTHRDFHVAVVLAPNGGKLGELTFPTSSKGYEQLLSWSEQFGVRPVFAMEGTSSYGAGLCRVLLDAAYDVIEVNRPDRTARRRHGKDDPVDAEAAARAFLAGTATIIPKRGGDQVEMIRLLKVAKDSAIDGRTRALNQVRSLLVTAPVALRERLKGLSRSELIATCASFRPGVLDGPMAAAKRALRSLARRIQALDAELESLMSDLDALTQAACPGLRQSYGIGIDGASVLLAAAGDNPERIRSEAAFAAICGASPLEASSGNRRHHRLNRGGNRQANATLHRIAVVRLRWHEQTKAYAERRKAEGLSNKDILRCLKRFIAREVFHLLMGKPPRRTAAS

SEQ ID NO: 336700 - protein, 309 aa, unidentified
MKEQLVYLGVDIAKSYLDAAVGNEKRRFSNDAIGHRELIKWVKQLKAPVQVICESSGGYERALVQGLARARVKISLVQANRVRQFARAAGILAKTDRIDAELLCEFGKVMRPQTVTAAKLEQEHLRELESQRRHLTHLLVMELNRGARVSDASVQRLNRSLINQIKKQIEQLDLLIKGHIDQSHQLSAKAAKLTSISGVGARTAALLLAQLPELGELNRREIAALVGVAPFNRDSGRMRGKRAIYGGRKPVRHGLYMAALVAAHHNPILRNFYLRLRAAGKPAKLALTATMRKLLIVLNSALKTDLRYA

SEQ ID NO: 336701 - protein, 337 aa, unidentified
MKYSGIDLHSNNSVVVVSDEVDRVLVRRRVPNNAAAILALLAGHREQLVGVVVESTYNWYWLVDALQAAGYRVHLANTAAIKRYEGLKHSDDEDDAAYLAHLLRLEILPSGYICPPAARAVRDLARKRMQLVRSRTAQVLSVENMLSRQTGAGMRSRAVQRLTAQAVESFGFHQDVGRAMCANVAVIKTLNREIDKLEQRLHQCVRLRPEFHLLTSVPGVGQTLATLIMLEVGTIERFAGVGNFASYARCVDSARISNGKKKGQGNVKNGNAYLAWAFVEAANFAHRYCAEARRFYQRKKARTNGVVATKALAHKLARACYHMLKENKPFDVKRCFA

SEQ ID NO: 336702 - protein, 460 aa, unidentified
MGNARKGKIPAQLVEDEDYQLRHERVAGIDIAKAKADVCTRLPPSGEGGRRGSRVEEVPARARDVMALAGRLLADGVELVVMESTSDYWRMWFYLLQAAGLRVQLVNSRHARQLAGRPKTDRLDAQWIARLAEMGLLRPSFVPPPEIRALRDLTRTRLQLVRDRTREWQRLEKLLEGALVKLSSVVHSLARTKTARVIVEAIADGESDPETLAGLAAGRVKGGRSAIAAALEGMQVRDHHRMLIRVHLDHITLLDRSVAAVEDEIEAALDAIPAAWGTDATGETGPDAGRGPDPAALPAAERLAEIPGVSPALARAIIAETGLDMSIFPAAAHLASWAGLAPVASQSGPRTRKPGKGHGDAYLKGYCTQAATGAAGTGTFLGERIGRLSRRLGGNRARCAVARSILVIIWHLLSDPGARFADLGPGWHDTKTDRDRKIRAHVRQLQALGLTVELSETAAA

SEQ ID NO: 336703 - protein, 398 aa, unidentified
MTESSDYESVQVFIGVDVGKDTHHAVAINRSGKRLFDKALPNDENKLRSLISDLKQHGQILLVVDQPATIGALPVAVARSEGVLVGYLPGLAMRRIADLHAGEAKTDARDAAIIAEAARTLPHALRTLKLADEQIAELSMLCGFDDDLAAQTTQASNRIRGLLTQIHPALERVLGPRLEHPAVLDLLQRYPSPEKLASLGEKKLAAQLCKLAPRLGKRLAADIAQALAEQTVVVPGTNAAAVVLPRLTLQLITLRKQRDEVALEVEQRVFAHPLYPVLTSMPGVGVRTAARLLTEVACRAFASAAHLAAYAGLAPVTRRSGSSIRGEHPSRRGNKALKRALFLSAFAALRDPLSRAYYTRKMSQGKRHNQALIALARRRCDVLFAMMRDGTFYTPQGS

SEQ ID NO: 336704 - protein, 318 aa, unidentified
MLIRYIDIAKRNFVIAVSSLSKTKTETNNPKGIAHTIEYLKKHKVALVVTESTGGLEIPAAKAIRRAGIAVIIANPRQTHQFAQSQPLTKTDAKDAKMPAFFAQMTAQKEDSQTMPYQPPTEAEEVLEALVNRRNQPADMRTAEKNRLHQVHETQVGSVKQLIAHFDRLIDELDKQIDDHTHTHFDGKAQVAEQIKGIGSITTATLMVMLPELGRLSHKRIAGLAGIAPHPRESGETKFKSRCFGGRSAVRKALYMATVAATRFEPLIRDFYQRLLSEGKPYKVAVTACMRKLLETFAKFLSLPTAETQTQVFVYFRS

SEQ ID NO: 336705 - protein, 343 aa, unidentified
MRVMIGIDPHKATHTAVAIDNDEAVLDEVKVRASKVQVQRLTAWAERFEERRWAVESAGGLGYLVAQQLVAAGESVVDVPAVLASRVRVLGSGRSQKNDPNDARAVAVAALRSDRMRRVVPDDHRRVLRLLVKRHRDQAQLRATHCARLHALVLELRPGGISRQISVSKANQLLAGVVAVDEVTRHRVLIATELVDDIARLDETLKASKARIATAVAASGTSLCDIVGIGPICAATLVAYTGPVARFPTSASFAAYNGTAPVEVSSGGRTRHRLNQRGNRTLNHAIHIAAVVQARCPGEGRVYFARKIAEGKTHKEAIRALKRRISDRIYRHLNTDATTAPAS

SEQ ID NO: 336706 - protein, 410 aa, unidentified
MIFVGDDWAEAHHDVYVCDEAGTKLAARRVPEGIGGIAVLHELVAGHAEDPGEVVIGIETDRGLWVQALVETGYVVYAINPRAASRYRDRHTLSGAKSDPGDAKMLAELVRTDRHNHRQVAGDTALAEGVKVLARAHQTLIWERTRATNRLRSSLREYFPAALETFDELAHRDTLAVLAKAATPTEAAKLTPGKIRTVLRNAGRRRNIETRADAIAAGLRTEALRAPGPVETAHGATTRATVAIVVELNAQIEKLAGELADHFEQHPDSDIYLSLPGIGVVLGARMLGEFGDDPNRYANAKSRKNYAGTSPITRASGTRSVVLARFVRNSRLADALDQGAFCSLSWSPGARLFYDQRRANGDSHHMALRALANRWVGIMHGCVQNRCHYDEHTAWAHRSDVDTKRIEQAA

SEQ ID NO: 336707 - protein, 420 aa, unidentified
MNKELRAWIGIDWADAKHDVSLYEVATGRQERLEVKQSPEALAEWIGRLRTRYGNAGQVAVVLEQGRGALLNVLMGCDFLVLYVINPKSLSCYREAFYGSGAKSDPMDAELMREMVRQNPERFRAWHPDDVLTRSLRLMTEGRRDLVNQATAVTNQLTALLKGYYPQALRWIGALDTHWACEFLDQWPTLQALQSSSRRQILRFYEKHPRPFLDLEQQVQQFHQALPLTGDEAVLEYSTLMVQALIPQLRALLDSIDEFDRKIADVFRKHPDRPIFESFPGAGAALAPRLMAAFGADRDRYAAASQMQQFSGIAPVTEKSGKQHWVHWRMACPKFIRQTFHEFADHSRRWSAWAKAYYQLQMERGKKHNAAIRALAYKWIRILFRCWKQRVPYNEQVYLASLLKHQSALLLKTAPSVEKL

SEQ ID NO: 336708 - protein, 354 aa, unidentified
MSQHHDVTAGIDIGDRYSHLCLLDTESGEVIEEGRIPTNTKAFERRFSDAEPMRIAIETGTHSPWISRMLEECGHEILVANARKVRLIYGEGHKNDKIDAEKLARLARVDPKLLAPVKHRGEISQAHLALIRSREALVGARTKLVNHVRGAVKSFGARLPKCTAESFHNRVAEHLPQELVPALGPILKIIASLTERIRDYDRKLEGVAEEIYPETKLLRQVHGVGVLTALTFVLTLEDPSRFAKSREIGAYLGLVPTSDQSGGSNPEKHISKHGNKLMRKLLVGSAHYILGPFGEDSDLRRHGEKIAGRGGKNAKKRAVVAVARKLSVLLHRLWVTAEVYDPLYNASRPRGQAA

SEQ ID NO: 336709 - protein, 427 aa, unidentified
MIEINTCSDFAALIGLDWGWDSHAIALAPADGPTQTSTLKHSAESLHQWLDQLEKTFEGRAVAVAVEASKGAVVAALLERPWITIYPIHPATSTRQRSAFRPSGAKDDTPDALVLLFILQHHRNRLRPLQPDDEATRTLANLVEARRKAVDRRSLLANQLKSTLKNYFPQALDLVGEDLAIPMALDFLDKWPRLTDVQASKDITLRSFYYRHNIRRAELIQSRIDFRRSARLLTRDSAIIEVNVRIVRMLVAELRVLAEHIIEFERAIEEAFAEHPEKSFFRELPGAGPVMAPRLLAAFGTARDLFPDAASMQRYFGVAPVTEKSGGRRWIHWRWNAPKFLRQTFVEWAGQTVVFCPWAKAYYEQQRNKRTGHHAILRALAFKWLRILWRCWQTHQDYDQEKYLQQLEKRRSPIAARARQLNLQMAA

SEQ ID NO: 336710 - protein, 376 aa, unidentified
MTQTDVQYPTIHLAIELSRSAWLVAARLPGVEKPSLHRIEGGDTAALLALAAALRARAAARLGTPVRVACCFEAGRDGFWLHRLLTAEGVAAYVLEPTSILVNRRARRAKTDRLDALGMLRVLAAYLGGDRQACSMVRVPTPEEEDAKRPHREREELVRERVRLENRIAGLLATQGVRERPSLRSWERDLAALRTGDGRPLPPHLRAELDRLRRRLVLTLGLIRELEAERDAALAAGPRDAAGRKIAALCRLRGVGANFAAVLTREVFYRAFDNRRQLAGYVGLAPVPHQSGEADRDRRISRAGNARARTTLIQLAWLWLRYQPDSAPARWFRDRVGALRGRTRRIAIVAMARKLLVALWRYVETGLVPEGVEVAA

SEQ ID NO: 336711 - protein, 345 aa, unidentified
MQVITIGIDLAKNVFQVHGVDANDKVVFNKPLRRSQVLPFFAKLAPCLIGMEACASAHYWARELKKLGHDVRLMPAKDVKAYVKRSKNDSVDAAACCEAVRRPTVRTVPVKTPEQQAQLMQHRVRDLLVRQRTQAINALRSHLAELGIVAAQGYDGLKMLLAIIADGSDARVPEHARASLTALVMQISSCQAEIGAIEQRLLAQHRKSEDSKRLESIPGIGVLGASAIVATVPDASIFKKGRDFAAWIGIVSREDSTGGKQRLGPISKQGDRYLRRILVVGAFAVIKQARAHPEKYPWLTQLLARKPAKVVAVAVANKMARIAWAVLIKKEIYRVRPIAETSVAG

SEQ ID NO: 336712 - protein, 358 aa, unidentified
MYIGVDTHKKTHLLVAIDARGQMHGTQTVANTPQGWVTALEWARDYCGACRWGIENSGSLGKGFAQFLLADGETDVREVSPQRTAQYRRRGRTQDKTDAADALAIARLIGAEGEQLPLVQADDLSTELRLLSDHRDNLVAERTRLINQLHAQMLQIDPCYMEKSGVLTTATGVRYYHTLDLPHADGVLRTRLLIVRQLAGQILGLREEIETIETALRQRVQETGTPLLQLCGVGTLVAARLIGELGCTPRIHSAAALAALAGIAPVAVSSGGRHGHRLNRGGNRQLNKAFHVIALSQLRREPLAQAYYAKKRAEGKTARAAMRCLKRRLVDVLYRLLRTSENANGLRGGQELPIEAAA

SEQ ID NO: 336713 - protein, 430 aa, unidentified
MPYRITGIDVHKKMLAVVVSDVEVEGEYHFERRRFGSNPEQLRSLAAWLLEQEVEEVVMESTAQYWKPVWEALERHWKPLRQKQEGASRRSGTLHLAQAQSNRGRRGRKRDFPDAERLVKRLVARELILSFVPDTEQRLWRTVTRRKYQLTRDRVRLQNQLESLLEEVHIKLSCLVSDLLGVSAQRMLKALADGETNPAALAALADRKLRATPEQLCDALGACTDLKPVYRRLLKMVLEQLQSLDQQIGQLDQEMAMLLNQHQEAVTRLAEVPGLGVDSAQQIIAEVGPTATTFPSAKCLSSWVGACPGDDESAGVNYSHRSPKGNRHMRRVLNQTANAAARTKGSIFEIVYRRCVPRLGHNQAIGAIAHRQCRLIWLILHQGVRYEERGSAVTKQSKQKRTARMIRQLRALGYRIELPNTQHSNPAQVQ

SEQ ID NO: 336714 - protein, 482 aa, unidentified
MKKIKNIFRDGNQRFKVITDKHSLNEVLVVAIEIGKFNSKGIIADMYGDLIMDNFQFPNNQRGYRFLTGKIKSASQIADSKLVFIGMEGTGHYHENIALQLKSDGFSVEIIHPYDSKHERENKNAKTDGIDLLSIARMLITNKGRRSVLADGIYSNLKVVSRSRRKLVFMRTSLKNRITALVDRIFPGYWPKEVDEEIFSDNWGKASLLVLEHYPHPEKITMMGVKRLANFLKKHNTKLGEETARKLVEAAKNSLSRPFKDMDSHCLTLKCLISAYRTICENIETLEREMAVLIIQTPGAYLLSISGISVIYAAEFMAELGDITRFSYPKQIMSFAGNVPYVSQSAEYEAKGLPLTKKGASGLRPLLNQIALSLNSHCPQFGRYYQKKHLEKCDRPGIAKIGTGNKFIRLAFCLIKHQKLFVPEGFDPSLMSYKDYYREVFSQISAKLRNYKIDPSDLSGCEENYFAKIRSHLEDAYGLSPG

SEQ ID NO: 336715 - protein, 372 aa, unidentified
MQQSSTLYVGLDVHKESIAVAYVAQEYGAEVVSLGTIGTRQCDIDKLIRQLQSKSKQLVFVYEAGPCGYWLYRYLTKKGYTCWVVAPSLIPKKTGDRVKTDRRDAMQLARLMRSGDLTPVYVPAVDDEAIRDLSRAREDTLRDLKAAKLRLKAFLLRHDIRYTGRANWSPAHLRWLSEVVCPTPAQQIVFQEYVQTVTEQTERRGRLELELHEQVKTWRLAPVVEALQALRGVQFTVAVTTVAELGDLTRFENPRQLMNYLGLTPSEYSSGARRQQGSITKTGNTHARRALVEGAWAYRYPAKVSRHLQLRLEKLPQAMQAISWKAQVRLCKRYRQLMAKGKNANQVVVAIARELVGFMWAIAKQVTVPPKA

SEQ ID NO: 336716 - protein, 432 aa, unidentified
MSERKSLELRVSVDVGSRRHSVAIGLPDGQVLEEFEIAHRPEGFQEFFSRIEKHQNAQGCGVAVAMEGYNGYARPLDTLVRQRGYRLYNINNLKLARFKEIFPGAAKKDRIDARKGLELFQLRDHLPLAKGVLQEVTGTPKENEILKRLTRRRRRLVNERVRVVNNLQSDLQAVCPGLLEITTEASNQWFLNFLLSADSLPQLARLRKSTLLKIPAVGRKYASLIEQWQKRAHFSDEIEWVNEMVREDALRCLELDEKIRTLEAKIEEIAKSSEIAKILLSIPGFGPVCTSELAGEIGTVERFSKEGSLALYLGMSTLDNSSGDYHGSKQPKHVNTRAKAAMMIALDRHRKYVPESQRYYEKKRTEGKKHNQTIRSLGRHLCRIIFRMLRDQRNYEIRPQQGNTKTKIRSRSCVKTKIRRPKISATHLKQKV

SEQ ID NO: 336717 - protein, 368 aa, unidentified
MNTVKFIGMDVHKKTITIAIADEGRQNQPRVYGTIANDLDALNKFCRKMVSTSTQIHFVYEAGPCGYGIYRHLNQKGFDCMVAAPSMIPKKSGDRIKNDNRDAVMLARLHRAGDLTAVFVPDVQDEAMRDLSRARGDAVIVAKKAKQRLKAFLLRNGVVFAGRSQWSKAYFSWLADIAMPHPAQQIALQEYIDAVHESLRRVDRLTDQIRQMVTGWRLAPMVKALQAARGVSLVVAVTVLAELGDLGRFKKPSQLMAYLGLIPSEHSSGPNIRKGGITKTGNGHVRKALVEAAWAYRMQARVSRVLLKRQQGVSQPVRRIAWKAQIRLCARFRRLAAKGKPKQKVVTAIARELSAFLWAIAKQVQSVS

SEQ ID NO: 336718 - protein, 366 aa, unidentified
MKKIAHVGVDYHVENLCIAVMIEGAKDFHETIHLKNADAVVKKYLKKLSKDYDLKICYEASGSGYVFQRKVQSWGYHCDVIAPSLIPKKAGDHRKNDFRDARILAQHYAGGLLTIVHPPTQEEESVRQLIRCRIALKDNIKRIKLQINGFLLTQGHYWGKKKWTGKHYQWLAKQQLPTAQLQQVLDTHLQHLEYLAVCVQRIDTDIETIAESEIYGPSVKRLRAFRGIGTLGAMLLIAEITDFRRFASPGALMAFLGLVPSERSSGTVCKTGGITKAGNSRCRTQLIESAQHCAKKPHISSEMKRNLLQIDAGSAGIAVKCMNRLHKRFWALFNKGKNRQVAITAVAREFVGFIWAMMVPQPQIVV

SEQ ID NO: 336719 - protein, 355 aa, unidentified
MSQEKYIGMDVHQATISVAVSDSRGKLIMESILETKATTILEFLQGLHGSLSVTFEEGTSAAWLHDLLKPHVTRLVVCDPRKNALLKDGSKSDRIDARKLAELLRGNQLTSVYHGEHGMRTLKELGRSYVTITQDLVRVMSRIKALYRSWAIACSGTGVYAPRHRAEWLDKIPEPGVRLRAERLYQQLDLLQPVRQQARRDLLTESRKHHAVKLLRQIPSIGPIRAALLVAQLQTPHRFRTKRQLWAYSGFALETHDSGEYRYVRGKLKRNRDRMTVRGLSNNHNPEVKNLFKGAAISASTNPGPLYDFYVALLEKGMRPTMARLTLARKIASITLTIWKKGADFDATQLHRQEA

SEQ ID NO: 336720 - protein, 384 aa, unidentified
MVEGEVFVGIDVAKLRNAIAVADAGRQGEIRYLGEFDSDEASMRRIVKRIAAKHERLTFCYEAGPTGYGLYRLIRAMGHDCIVVAPSLIPRRPGDQVKTNRRDAVGLARLLRAGELTAVWVPDESHEAMRDLVRARLAAVETQRVHRQHITSFMLRHGRIFPRKTRWTMRYMRWLQEQRFEHPAHQIALQEMVDALRLASERIKRIEAAIEEFLPRWSLEPLVHNLRALRGVDLIVAATFAAEVGDVTRFENPRQLMGYLGLVPSERSTGASVRRGAITKAGNSRVRHMLVESAWTYRHPPRIGVKKLYIHERVSPAVREIAWKAQSRLTARYRKLSATGKRTTVVCTAVARELAGFMCVKRRSKGTPYRRRRGTPFSDMMLVS

SEQ ID NO: 336721 - protein, 361 aa, unidentified
MKTQPTAQPKLYIGMDIHKKSWSVHLRTDISDHKTLTIPSNCDVLYDYVEKHFHGHEVSLTYEAGCCGFSASRHFINLGWNVLVVNPADVPRMDKQNYQKTDKIDCRNLAKQLHGGQLKGIYIPDEAQDLLKSLLRQRAETSKQLRAIKSNIKGLLLYHGIEIPEEFDNPNWTKAFLKWLQQITWLHPTGKICIDSKLRMHEVIHKEYLQLANELRSYCRKHHNKDYYLLKSIPGVGGYLASAILAEIGDLRRFNNETQFASYIGIVPTMRNSGGTEKIQGVTPRCRGLLRSYIIESSWVALRMDPEMQAYYRKHIGRNPKSIIIKIARKLLNRMLAVIKTDKPYHTNYSLNNGKETKMNK

SEQ ID NO: 336722 - protein, 481 aa, unidentified
MKSKSQEKTKKAPCHPTRGHWHEMNRKQRRETMRRIQSDDLSLEVVHPDAAGIDIGNESHYVAVPPTRDTESVRRFGCTTAELKAMAGWLKQCRIRTVAMQSTGVYWIAVYDILEQAGLEVYLVNARETKNLPGRKSDVQESQWLMKLHTYGLLRNSFRPSQEIRTMRTYWRQRNDLVRAAGRHIQRIQKALTQMNLQLANVLSDLSGVTGQAIIKAILAGERDPHKLAAFRNCRVKATQEQIARSLEGNWQEDLLFVLKQEQDGYEFCQQQMAECDRRLKQYLQQREDRSQGASLPEEKRKERLKKKKGNAPQFDLRTELFRMTGTDLTQIDGIDVMTATTILSEAGWDMSKWQTEHHFVSWLRLCPDNKVSGDKIIGKGRLPTNNRITNTLKMAASSLRTSNTYVGAQFRRLRTKLGAPVAIKAMAAKLARLVYRMLRYGMQYVDQGAKFYEAQHRNLQIAHLKWKAAKLGFRITQLAA

SEQ ID NO: 336723 - protein, 340 aa, unidentified
MYPFYLGIDLHLKRTYAVLMTSTGEVIDERRISNLDIEKYLKSTVPRETYAVLEATRNWAFMYDLLDAHVERVELAHPKELKAIASAAVKTDQIDAKVLANLARTNFLPTAYAAPPETRDLRLYIRHREWLIRQRTQAKNRIHAILASYNRMSPVKDLFGVQGRAYVDEIMAEIRPTAQRVVSDHLTLINHLDQQVAALEADLTLSEADEQVVKLLKSMPGVGRITAIVILAEIGDIQRFDTPKALCHWAGLTPRVRKSDQVVRHGRITKQGSPYLRAALTRAATVASRTSKRWYHVHEKMLPRCGRTGAKVAVARRLLTVIFFMLTRHEPYLENYPTDR

SEQ ID NO: 336724 - protein, 339 aa, unidentified
MSLYCAVDLHGDNGFYGIVDETGRRVFKQRLPNSLPAVLAALEPYRDKLSEGVVVESTYNWYWLVDGLQANGYRARLANPAAVEQYNGLKNTDDETDAFFLAELARLGILPEGHIYEKEERPVRDLLRRRSLLVRQRTAHILSFQNLVARERGEKISSNQIQKLWPKEVSGLFEDERLILMGQTNIETIRFLTKQIRVIERCVLAHVQLRPEFEKLLTVPGIGKILALTIMLETGDIARFEKVGNYSSYCRCVKSSRTSNEKKKGENNRKNGNRYLNWAYVEAANFIRRYCPEAKAWHQRKLRRSMQVVATKALASKVCKACYFIMRDEVDFEVKLLFG

SEQ ID NO: 336725 - protein, 414 aa, unidentified
MGQNLIVGVDPHRKKNVMQLMDSNGQVLGPPFRTDNNRPGTAAFIEHVVDQLEGGQYEGLQLASEATGWYWFHFFQSLSQDPLLNQWPLELYLFNPRLTAKFKQSYGDRDKTDPNDAFIVADRFRFGRDLPTPFVYEETYLPLRFLTRYYFHVTHNLAREKSYALAIIYLKASEFTHSTKKAFSNFFGAASRAVLQEFASIEEIAALDFSDLVEFIDLKGKRHFSDPETTARKVQQVALDSYPLPPAFQQPINTILALSFKHIAFLETQQKRLKAAIADHLADIPNTLPTIPGLGPILSAGLIAEIGDLDRFEHNQAKVAKYAGFMWRKSQSADFSADHTPLIKNCNRYLRYYFVEGANLVRMHDPDYKLFYDRKFHEVRKHQHKRALVLTARKLVRLVVRLLTTNQPFRPRRL

SEQ ID NO: 336726 - protein, 347 aa, unidentified
MEELYCGIDFHKRKSWIYAIDNKKKVILDVEILSSKICEYLSNYSDQMQIAIEATGGANHLATKLVEMGFTVKLVETNQFHPRNKKRGSKTDRKDAESLCKYLRLEELPEVYLKSLEARQLKTLLVQREHIVNQRRNLTNHIRGILREYGMVMPVGVDAFLKSAKSLIAKISEVKSRDLLEFQLEQVNKYLTKEAEISKDLEDRAHLSEEASRLMTIPGVGPITALCFIAVVDQIERFADARSFGAYLGLVPREFSSGDKQRLGAITRSGPEMLRRYLIHGARAVLMRSGPRLASDPNRQWAERIKHRSNTNKAVVALAHKNARVAFGLMKSQTDYNPRRAMSELSA

SEQ ID NO: 336727 - protein, 310 aa, unidentified
MEITAVGIDVSKDRLDVHVVPSGEAFQVARDAIGIEAMISRLTPLGARLIGVEATGGFETVVAASLAAAQLPVVVVNPAQVRSFAAALGKRAKTDPIDAAVIAQFMAATRPEVRQLPDEATQALADLIARRRQIIQMIVAERQRERTATRRTRRSIQRLLKALQKELTDMDQDIDETVRGSPVWREKEDLLASVPGIGPVISRTLLAELPELGSLDRRQIAALAGLAPWTRQSGKWRGRSFIGGGRATVRTALFNGARVAARWNTPLRAFYQRLVAAGKPKMQALVAVARKLLTILNALLRDRTPWQEPA

SEQ ID NO: 336728 - protein, 460 aa, unidentified
MSKRKRQSRKRARAVQAGQPVLNHATHLDAAGIDIGSTELVAALPPDRDVQPVRTFSAFTSGVHALRDWLLEHGIKTVAIESTGNYWITVYDVLKEAGIDVWLVNARAVKGVPGKKTDVCDAQWLQQLHAAGLLKKSHRPEKEIVPLRYLMRHRADLVAQAGQQVQLMQKVLTEMNLKIHHVFSDVDGVSAQAIITAILAGERDPQKLAALRDRRSRSRLEDILEALRGDFRPAYLFVLRQLQQRWQQLQASMLECDSQIAELLRAVQIEAPGPLPEGPWQQRRTHKNMPVAVPIYEEAWRFFGVDLSVVPGIGGGLLGVLMSEVGTGPQLQAAFRHGGAFASWLALCPENRITGGRVLKAKTRKVSHRLADAFRLAAQSLSRSDDAMGQYCRRMKGRLGKAEGIVAVAHKLARIVYAMITTGQAYDEKEAFKVTPSAMAKRLQNLQKQAAALGLQLVAA

SEQ ID NO: 336729 - protein, 339 aa, unidentified
MKLYAGCDLHSTNNYWGIVDETGKPIFARKLPLDSPKILKMLEPFKPDLAGIAVESTYNWYWLVDLLMDEGYPVHLANPVAMKKYSGLKYTDDKHDAFWLAEMLRLGILPQGYIYPKEERPTRDLCRKRLQFVRMRTTHILSLQSMISRNTGQRIPAEKLKSLPQETITEAVGAHEDLMLSAALNKVSIDNLTRHIKIIEQALIKKIKIKHEYKNLMTIPGIGPILTLTIMLETGPISRFKEVGNYASYCRKVDSKWKTNNKNKGKGNKRNGNKYLAWAFSEAAEHARRVHQKAKIFFDRKMSRTNRMIAHGALAHKLARAAYYIMRDHVPYESNKMFS

SEQ ID NO: 336730 - protein, 391 aa, unidentified
MILVGIDVAKDKHDCFIMNSDGEILVKAFTFSNNLEGFNFLYEKIRSVTKPKDKIKVGLEATGHYSYNLLGFLLNKGLPTFVINPLHTNLFRKSLTLRKTKTDKVDSRTIAMMLMSDVALKPYTDTSYHNEELKSLSRYRFTKVQERSKLKTSVSRLVQILFPELEKIVCTIHMSSIYHLLEEYPGASYIASVHLTKLTNLLMEASHGRYNRNTAIKFREAARNSIGSILPAKSLELKHTIKLIRELTVEIDEIDAEIKKMMDSIASPITTIPGIGYSMGAMIISEIGDFSRFSSPDKILAYAGLSPSTYQSGQLNNCYSHMEKRGSRYLRYALFTVAQKVCIWDNTFAEYLSKKRAEGKHYYVAISHAVKKLVRVIFHLERTGQAYLKAA

SEQ ID NO: 336731 - protein, 314 aa, unidentified
MSTQGVVAGIDVSKDWLDVAIGDESLRVANDAAGIGALIERLRSTDVQWVVMEATGGYETQAASAIAGAGLRLAVVNPRQVRDFAKATGRLAKSDRIDARVIAAFGEAIEPQIVRLPDEQTRELQGLLTRRSQLVGMRVQESNRLALMEGAMRKQIKSHIAWLDKAIDEVNTDITARLRKSPVWREKDELLRSLKGIGPITSSTLMASLPELGQLDRRAIAALVGVAPFNRDSGTFRGRRAIWGGRAQVRQMLYMAATAAIRFNPVIRPFYERLIARGKPHKVAIVACMRKMLTILNAMTRSNTHWTPALHGAN

SEQ ID NO: 336732 - protein, 345 aa, unidentified
MHFIGVDHHKQTSTMTVLDSQGREVRTARLLNLRADIGAFIREVAPEGFLAVVEAGRASYGMADLLRELGGQVKMANPLQVKAIAHARIKTDKRDSRTLAQLLRADLIPEVYQREAWNREAQRVLRLRAFWMSLRVQVRNKIRALLAQQPEEIRIAIEQRSEQLFSQKGQDFLGDLRLGDRDGEILRALLRGYQTFQAFQAESDQMVADLYRELPPAQLIDTAPGFATTFSVLVAVEIAEVRRFPRADALHSYAGLIPSTYSSGARTYHGHIVKGNVWLRWALIEAVYPAIRKDAGLSILYHRLARTKGPNVAKVATARRLLTILYRMLTENRPYVPYRTNPTAA

SEQ ID NO: 336733 - protein, 314 aa, unidentified
MTFPAAAGIDAGQRYLDVGLPSGTVFRTANRPEAFPALLARLKREGVERVVLEAIGSYTHALVQALAAAGFAVGLVNPRRIKAFRVAEGKRAKTDRLDAGLITRFADRMRDAFRPLPDADQIALKALSTRRRQLTEMIAMEKTRLKQALDPLVSESHKATILALAEACRRIEDEIESRIAKDEQRAKNRRILLTIPGIGARVAQVLLTELPELGRSDRKAIASLAGLAPHVSQSGQAPPRAAIAGGRPCVRTALYMSALVAARHDPNLRAHYQTMRAAGKPAKVALVAIARRILVTANALIRQQAQYKPDPNLA

SEQ ID NO: 336734 - protein, 444 aa, unidentified
MKTSSSAPVGVVPDVAAWIGLDWADQQHVGCLYDVASGQQESFTLESCTEAIPQWLAQLRQRYGGRRVAIILEQRRGALIHALLGCEFVILYPINPQSLARYRQAYFSSGAKSDAKDAPLLMELVRHHPDRFHPWQPDDAETRSLQLLTEARRGWVDQQTALTNQLTQLLKGYYPQALELAGELTSPGACQFLKRWPRLAALQKARPSQIRKHYQRYGRLTAEELDRRLEQIRQAQALTGDPAVLRHGTLMVQALVDQLLPLFDTLRGFEREIAALFAQHPDRPLFDHLPGAGKVLSPRLLAAFGTQRDRWQQAGEVLTYWGIAPVTEQSGRGRWVHWRMACPKFQRQSWHEFAAHSRHHCGWAQAFYQQLRARGKGHHAALRALAYKWIRILFRCWQTRTPYDEQIYLNSLKQKQSPLLAVIAALPPRSAGRKAAAQLAEAAL

SEQ ID NO: 336735 - protein, 346 aa, unidentified
MGKARVDLRSVTTVGLDLAKHVFQIHAVDADGKIVIATALRRREVLSFFDALPPCVIGLEACGSAHHWARELVKLGHDARLMPPSYVKAYVRRQKNDAADAAAICEAVTRPSMRFVPIRSIDNQAVLMHHKVREILVSQRTQLLNALRGHLAEVGVIAVQGPNGAYALAAAILEGDSSIPLCVRDALAPIVRQLQTLNDEIAASDRAIMGLAKTNETARRLMSVPGIGPITASAIAASVQDVGAFSGPREFAAFLGLTPRQNSSGGKERLGRVSKMGNRYLRKLLVVGAHAVLFHRRSHQDGLRTWAAKLMETKPFKLVAVAIANKLARIAFALMRDGSIYGNAVA

SEQ ID NO: 336736 - protein, 362 aa, unidentified
MLQSTTIIAFDQHAATTVAAVVLPNHRTPALHSLTSDSATIVRFVERFRRQGAVACCYEAGPCGFELQRALRSQAIPCDVIAPALIPRRAGDRIKTDRRDAGHLAVLYRAGALTAIHIPTEQEEAARDLLRCREDIRADLLRARHRLSKFLLRHGRRFTGTKKAWSKRHDTWLRDQVWPIPALGQTHHAYLRAVDEAVARLRSVADDLRTLLALEPLRPRVERLRCFRGLDDLTALTIAAELGDARRFQSAPRAMAFVGLVPSEHSSGTKRARGAITKTGNAHLRRVLVEAAWHYRHRPFVGAALRRRQHGAPAAIVAQAWTAQQRLHRRYHRLAGRGKPNQQVITAVARELTGFVWAALIQ

SEQ ID NO: 336737 - protein, 341 aa, unidentified
MGIVVTGFDVHRAQITFDALDTETGEIATGRIRAAPEAVEQWVGRFAGREVHVALEACTGWYFVARSLERAGAVAHLAEVAETRALRGRKRRAKTDRADARWLRKLLAEGRLPEAWIPPDHICWLRIRTRLRKTLGDEAVAWRQRAQATLFHLGLPALPAGYEGRRARQWLSDLELPAAARERIEVCLAMIEAIEAQMAPVESELRAFSRRQPGCQALERLFGIGGVTAPAILAELGDVTRLHRSRQAVRMAGIDIGVNRSDRRSRVGKLSKQGAPALRWALYEAAQSACRPTSPDHAHYLALKERGLSHPRTSLTIARKLARRCYHTLRELGPAALEEPA

SEQ ID NO: 336738 - protein, 445 aa, unidentified
MRKIRAKRSASHKVVDCAPPVRRATRGNAQGVLTATKLRRQTVNENTTLVERPSPQTPAVASIELEERNPSAAGEAPAPERFTVFTGLDVHKDSTAIAAAEAGREAPRFIGTVGADLSELLKGLKSLGKPEAMLVVYEAGPCGYGLARVLRARGYACEVVAPGKIARRPGERIKTDRRDALMLARLARSGDLVKVMVPDERDEAMRDLSRAREDAVAARLKARQQLKALLLRQGQRYTGKSSWTEAHERYLAGLSFPHAAQHLAFTEYRQAVKDGHERVERLTESLRAQVEPWRLKPLVQALMSLRGIDFVAAVTLVAEIGDFARFAHPCEVMGFLGLVPSEYSTGQTRRQGEITKTGNSHARRVLVEAAWNYRFAARISRGLQIRQEGQSKAVRDIAWRAQLRLTRRHRCLSARKLHPNKICVAIARELAGFIWDVAHQVKLSA

SEQ ID NO: 336739 - protein, 402 aa, unidentified
MTNPTPDEGLVGGIDSHTDTIHVSLISAVGQDIADHEFSTTHSGYRAAVAWLSGHGPVTAVGVEGTSSYGCGISTALHQAGIKVVEVNRTRPAERRRQGKSDRLDAYRAARAVLSGEASTPPKRDSIEPLRALCVARRSAVKAQQAAWRQIGALLVNAPAHLRDTYRDLPPTKLVVALVSSRPAQVVDPDHADILYSLRTLARRHRDLTKELADLTERINARVGAANPGLLAIKGVGPVVGAQLLITAGDNPDRLRSQASFAALCGTSPVPVSSGRTDRHRLSRGGDRAANCALHLIVNTRMSNDPRTRAYRDAHLAKGWTTKDIYRALKRALAREIYRALLGRCTVPDYSDLRPARHAKNLTLTAAATHLHVWPTAISQIERGRRRDDQLAQAYRDWLNAA

SEQ ID NO: 336740 - protein, 400 aa, unidentified
MSDRRAQVWAGVDAGKGHHWAAVVDETGATLWSRKIDNDETAILTAIGEIMSLAEEVHWAVDISGTASALLLALLAAHGLTAVYVPGRTVNRMAGAYRGEAKTDARDAYVIAETARHRSDFTVIDVPAQLAADLALLTAHRADLIADRVRMINRLRDVLTGIFPALERAFDYSAHKGALVLLTGYQTPAAIRRCGHTRLTAWLDRRNVRGADQVAATALDAARAQQTMLPGEDIAAGIVADLAKQILALDDRLKRLDAQIRDRFRTHPQAEVIESLPGIGPILGAEFLVSAGDLAAYTDAGHLASAAGLVPVPRDSGRRTGNMHRPKRYSRRLRRVFYMSAQTSIIRPGPNRDFYLKKRGEGLKHVQAIIALARRRVAVLWALLRDNRVFTPAPPATQAA

SEQ ID NO: 336741 - protein, 392 aa, unidentified
MIYVGIDVAKDKHDCFITNTNGEILFNSFTITNNLDGFNDLYRKISSVTENITKVKVGLEATGHYSYNLLGYLLDKGFPTYVINPLHTNLYRKSLSLRQTKTDKVDARTIASMLMSDVNLKSYSDTSYHNEELKSLTRYRFDKVKERSALKVSISRLVCILFPELENLVPTLHMTSVYSLLYEFPGASFVASAHLTRLANLLSKASKGHYNKDTAVLFRQTARDSIGSVMPAKSLELKHTIKLIQELTSEIDEIEAAIKQIMDEEIKSPILTIPGISYRMGAMIIAEIGDFNRFDSADKILAYAGMSPSTHQSGQLDNCHSRMEKRGSRYLRYALYNATKYVCHWDKSFGAYLEKKRSEGKHYNVALSHAAKKLVRTIFAMERSGQSYIASV

SEQ ID NO: 336742 - protein, 347 aa, unidentified
MEGPIISIDVSNGCSHFRCFIDRNKAFGKVHKIKHDVDGFQYLLDCMERLNEKTNEEVCVVYEATGVYTKPLTRFLNKHKVRHYMVNPLQAAKMRKTDLHSKKTDKNDPNSIAKVYYDKDLYEYADEEPIYHTLRVMNRNYEDQLDHLRKYKVTFQNILSIVFPGYGSLFKNPYCDIALAILKKYPHPDMIRNKKPETVANYIEKHTCHHKDSCLKWAVKVIEYANKTYPGCDKDEIEVIELLRIIKELEVCIASCDTQLNEMVQLAEQLPNYFLILSIDGIGPNLACRILAEIGDIKRFGNTKQLISYAGIDPHISQSGDVDGLHLSISKKRKQKASLFTLSGSYM

SEQ ID NO: 336743 - protein, 354 aa, unidentified
MEQRTTIGIDLAKEVFAICVLSPSGAAVESRTMRRAAFERWLVGLQGELVVAMEACSSAHHWGRRLAAAGHTVRLMAPAFVVPFRKSGKNDANDAEAIAIAARQPTMRFVAVKTVEQQSILSWHRAREGWIAERTALINRLRGLLAEFGFSIAQAAFRLRKALPALSTDAALPAPIRALLLEASEQLRCLDARVARCDEEIGAHGRDNETARRLRGMLGIGPLTSSALVATVPDAAAFRNSRQFGAWIGLVPRQHSSGGKPHLGELTRRGDKYLRSLLVQGARSALQVALRVAPDKATRLQRWILALYSRKGYHKTLVAVANKHARIIWALMARGEHFDHNAWQRHPLQRAAAA

SEQ ID NO: 336744 - protein, 398 aa, unidentified
MLSIGIDVSKGKSTVCGMKPGGEIVYTPFEVQHTREGMSELVSLLRGSGEEVRVVLESTGSYHCPVVAALLENGIFVSVVNSLRMKRFCSQSIRRVKTDQIDAMQIALYGLAYWQELQPTRLPENTYRELQLLARQYYQMTSLLIKAKVDFNALCDQVLPGMQELMSDHAGRHKLSDFVLRYHHTAHILKMGETRFRKDYCKWAEKKGYRNHERMAALIFATAQNGIPVLPNAPSTQIVITEAIRVLHTVEASRDAILTQMQALAKTLPEYSLVREMPCIGDTLAPRLIAEIGDVRRFHSKRALIAYAGIDAPPYQSGKFCANNRHISKRGNRYLRKTGYEVMQSYVMHKPANDPIFTFIEKKRSEGKSGKLAMVAGLNKFLRVYYGKVTELSRSLPQ

SEQ ID NO: 336745 - protein, 475 aa, unidentified
MNIKGSKKKNQVLSVNIFEQQEIIAKADAIKAELKASTWHELETKGKFDKNDKLSFVSDDMLILGCDIGSETHYVRAIDTRGRELSKSAFGFSNTAEGFESMLDWSTKLAAANDKKQIVLGLEPTGHYWFCLTTWLVAKGISVVQVNPYAVKQTKEVEDNSQLKDDKKDPKLIANLVKDGNFGMPYLPEKLYAYIRRLSMFRDQLNEDRIRNLNRLHREMKIYFPEYKDAFGKIDGAFSLELLKAAPFPDELAALGTEGMKQIWHEAKLRGRGYANASSILEYAGKSVGIKDGADAGRQAVKWFVSRIIELDEQLSDIENQLNQRCNEIPYAKNILAISGIGENILSGILAEMGDISRFDNVKEIQKLSGLGLVACSSGKHTGETKVSHRGRKRLRYWLFQAAKSAVSHADEFKQLHEYYTTRSNNPLKKMQSLVVIACKILRVIFTILTKGTTYDPKKLLGDIVRPDQAIPQAA

SEQ ID NO: 336746 - protein, 374 aa, unidentified
MTAIRLNELSRNTVYAAIELSKKNWVLGIATPERDRPSIHRIAGGDLKALVARLRTAARTGLRILVCYEAGYDGFWIARSLAKENIECRVLDPASIQVNRRARRVKTDRIDVLALLRALIAIDRGERHVCAVVRAPSVEEEDARRPHRERQRLIRERTGHINRIKGLLFAQGIRGIEPKRRQTRIDFAALRTAEGHPLPERLRRELEREYARLDLIQDQIRDVERQRDVPDAQEPAVERKRQMLIGLHGIGETGAAILAREVFARTFANRRQLGSYLGLTPSAYDSGSTTRCQGISKAGNSWARRVLIEIAWLWRKYQPASPLSRWYAARTRNQSPRIRRIVLVAMARKLAITLWRYVETGVVPEGVNPARSAS

SEQ ID NO: 336747 - protein, 423 aa, unidentified
MQGVEDSEEIIERVAAIDVGKAEVVVCIRIPDPARPGRRQQEIVHSSTLTPRLLVLADRLVELGVTRVVMEATSDYWKPVFYLLESRGLDPWLVNARDVKHLPGRPKTDRLDAVWLAKVAERQMLRPSFVPPGPIRLLRDLTRYRAGLVKVRTAEKNRVEKLLEDAQIKLSSVVSDIFGVSGREMLAALLAGERRPTVLAQLARTRMRPKIPLLEEAFVGQFTEHHAFLLRLMLARIDEAGADIAALEDRIRQLVAPFATVVTRLDEIPGVGATAAWTVIAEIGLDMSRFPTPAHLSSWARFAPGVNQSAGKTKGRGATGHGNRYLGQALGEAAVAAAHTHTFLGDRFRRLARRRGGPRATVAVGRSILVIIWHLLSQPDARYHDLGPDYTRRRADPNRATRNHVQHLEALGYTVTLTPVALA

SEQ ID NO: 336748 - protein, 364 aa, unidentified
MCHDVGDSKHQTRSEETDMNHTILGLDLAKSIFHSVELAPGGKRPMRKKFSRGQLKEFMANRQPSKIAMEACASAHYWARLFEGMGHEVILLPPQHVKGYLRNQKNDYNDALAIAEACHHGAIRPAQIKSVAQQDEQALLRIRTQRVGQKTQLSNQMRGLLGEYGIVFPQGMAQLFRQIPLILEDADNTLTPQFRELLHREYEHLLIIKADVDWCNQQLEQKSKQDLVCKRLMKIPGFGPVVSCAVKTWMGDGQQFNKGRHASAALGLVPRQHTSGDKIRLMGITKRGDKHLRSTLVNGARAVVNHAEKKTDPLSQWINRLRETHCFNKVVIALANKLIRMAWVVISRGEDYHAYPGLAQGQST

SEQ ID NO: 336749 - protein, 339 aa, unidentified
MELYAGLDLHSRNTYIGIMDKAFNRVFKKRVPNHLEHILQTLDPFRDQIKSFVVESTYNWYWLVDGLMEAGYSSAHLANPSAIKQYEGLKHSDDQHDAFFLAQLLILGILPQGYIYPKKDRPVRDLARKRMFLVQHKTAHILSLQSLIARCCAMKVSASDMRHLTVKELKAWLEEEYLVLSAQANLESINFFKQNIQRLEKAIRKKVKLRKAFHYLKTVPGIGDILALTIMLKVGDINRFPKVGNFTSYCRCAPSRRLSDGKSKGSGNRKNGNRYLSWAFTEAVHLGRRYNERFRRYYNRKVAQANTSLATKALGNKLARICYYIMRDQIPFQEDLFCQ

SEQ ID NO: 336750 - protein, 394 aa, unidentified
MFLVGIDVGKLSHMFCIMDSSNGEILVSPVSFKNNKQGFDFLMGNIKLYPKDKLLIGMEDTGHYHFNLLKFLLDSGYTVALINPITTDLTRKMQLNPTKDDNLDTMTICDVLASSPRKKGYRISKINNFEFYEQKRLTREHHDLKEQLNVYANKLQKCIDIVFPEYNSLFKSKYGTVYMKVLKAFGSADSIAHADIRNIRKCFETNRNGRTISLTPEKLKEAAKHSIGFPSKAEVIEIRHLIDLIELIKEQINDVDIKIEEFSTQLNSPILTIPGISHFSGTSILAELGDLRNYSKASQIIKFAGVSPYKHQSSQYEAQHTAITKKGSRYLRKTLYQVILPVIRYNPVFNEYYHLKLSQGKGHRCAQGHCVRKLLRIIYHLVITNQPFDSTLLK

SEQ ID NO: 336751 - protein, 394 aa, unidentified
MAFKIFRKNCCGLDVHKTWIYACMGITDTNGRTEYKQARFSSFTKGLQELADWLAKYDCNDVCMESTGKFWIPVFNILEKTCWVTLAYPKYTKPQKGNKTDHKDAKWICDLYMCDMVNPSFIPPPDIRQLRDLMRYRSKLTNIMTSEKNRALNCLTVSNLKLDDVFSDVFGKSSRSVIRYILEHPGETFQVAPFIDRRCKHPVEEIQAVIDGTISHQQAVKLRECLQHLDELEVHKTNVEKEILCLVQQYPYQLELLQTVLGFSGNIMTAIALISEIGADMSVFPSAKHLVSWAGCCPRNDQSSKKVKSTRISRAGVYLKPLLVQVAIQPFTANADKLSAAGAAEIRCQICDGRFLSMWAALFIFLGCPLPPCQKGLHVHNGRIVILASVAWIF

SEQ ID NO: 336752 - protein, 349 aa, unidentified
MGEVSTIGVDIAKSVFQIHGVDADGTVIVRKRVGRAKVLEFFAKLPPCLVGMEACATAHQWARELKKLGHDTRLMPPTYVKAYVKRGKNDAADAAAICEAVTRPSMRFVPIKSVEQQSALMLHRTRDLLIRQRTQLINALRAHLAELGLVAAKGHEGLQQLVTAVTESSDERLPSHARFACQSIVAQLHATQTQINGLDKRVTQAHRANADSKRLEAIPGFGVILSTAVVATMTDPKAFRTGREFAAWIGLVPRQNSTGGKERLGSISKQGDRYLRRLFVLGAISIVRTARTRPDKYPWLTELLGRRPAKVVAVALANKMARVAWAVLARGETYRAPTRSSSAVIAAAA

SEQ ID NO: 336753 - protein, 349 aa, unidentified
MSCTLNTDIAVVGIDIGKNSFHVVGLDDRGAIVLRQRWSRGQVEARFANLPPCLVGMEACVGAHHLSRKLHGLGHDARLMPAKYVRPYSKGQKNDFRDAEAIAEAVQRPTMKFVATKTADQLDLQALHRVRERLVSQRTGIINQIRAFLLERGIAVRQGQRFLRAGLPGILAMPSDVLSPRMVRVIEDLAGDWRRLDERIEGLSSEIEAIARQDSGCERLMSVPGVGPIISSAMVAAIGAGDAFSKGRDFAAWLGLVPRQMSTGDRTILGKISKRGNRYLRVLFVQAAWVVLIKPKSWERHGLKAWLEAAKKRLHHNVLAIALANKLARIAWSVLARGRDFEASKLRVA

SEQ ID NO: 336754 - protein, 344 aa, unidentified
MKLIKKVIGVDISKDSFTVRFGTLDEELKQLISKPFKFANNLKGFNQLLKTIGKVHYFDLTGPSSKDIPVWFVMEATGVYYENLAYFLAENNFSLSIVLANKVKNFSKTLDNKSKTDDIDAAIQTQYGLEKKLKPWNPPSAIFKGLKELTREYQSIKESLTCIKNKLHAKSHSYKANEDTVKRLNQHKKFLNQQLKQVKDQIKKLIESDNDFNERIKTIITIKGVGLITVITAVAETNGFALIENKNQLTSYAGYDIVHDQSGTHKGKTKISKKGNSNIRRAFYMPALSAARYNNNLKRLYIRLCKTKINKKIALIAVARKLLILIYCLWKKNEKFIQNYPNVN

SEQ ID NO: 336755 - protein, 343 aa, unidentified
MQVIIGIDPHKATHTAVAVNGSEDEISRLKIRATRDQVAKLLTWAAPFPSRLWAIEGAEGLGFLLAQQLVTAGETVVDVPATLAARTRVLGTGRSNKNDPNDAMSVAVTALRTRDLRRVQSVGNSEVLRLLSKRNTDIGRQRSRVVSRLHALLVELAPGGIAREINVSAAVAFLANITPSSVVEQIRYDLARELIDDICRLDVQLKESHKRITIAVRASSTTLTDLFGVGPMTAAVVIGNVGDVRRFRNRDHFAAYTGTAPVEFSSGGRIVHRLSRRGNRTLNAAIHMAAVTQLRHKHSDGRVYFDRKVAEGKTKREALRSLKRHVSNAVYRQLVADADRIAR

SEQ ID NO: 336756 - protein, 520 aa, unidentified
MATSRTRRRPGPRRTVATVGKPRGVLHPRVQQVGPDHFGIVCFDCAKARSKFLLADFYGRVLIPPTTVAHNRPDLDDAVAQVRQAFASHQLHDGLVAIERTGRYHRLVQRTFAAAGFETRILHPFVTKQYRQPVDPGTKTDDTDLSALHRATVTGCALLEGARDEAWTTLQLVIRHRRDLVRKGAALNCQIRDHLEAALPGYAACFDKLWESQIPWHLLRHYPTAQQLRTAGVTTLCHSLRQAGIRFQRRTVQAVLDWAEQAAPGDIAAAQHHRIALALYDDRQRKTQEIQALEGESAGRLAQTPYVLLLSFPGINVVSAADFAGEMGPIEHYANAKAITGRAGLRPSRYQSDQVDKANGPLVRNCNRSLRAAILGIADNLILCNHHFQALATQWARQGKDPRDTHVRVGLRFCRIAFQMVAGRQVFRHPCIQGRHAILDKLTAFHREHDTPLPEVLRDLQAAIGQLPPREFAAEARPLQEELQRIQDGRRRGPQRLGDILPLVLARLGVGAVQSTESGE

SEQ ID NO: 336757 - protein, 377 aa, unidentified
MLKYSVGLDVSSKKIDGCFSVIDTMQKVTVKSTIVIANNRNGFKMLENWIVKQQKETSIPLVICMEATGVYYESCALYLFEKEYKVSVVLPNKAKKYLQAIGLKSKNDSIDAKGLAQMGAEQALKFWQPLGKYFYELRQYTRQYQNMQEQKTVFNNQLHSLKHGMYSNKTIVKQLENCIKLFDKQLDELEKRIHDHIKSNLEVQQKAINICKIKGIATLSLATILAETNGFELFESAKQVVSYAGFDVIENQSGNRVGRTKISKQGNSRIRRILFMPAFTVVSCKQKPFLDLYNRTFERHGIKMKSYVAVQKKLLIIIYSLYKNNQEYNPEKYNIQEKEQGFSSLLAFEKDIKNSPNQVEAIQGKHPVKDHSTLPLC

SEQ ID NO: 336758 - protein, 347 aa, unidentified
MDHYAGVDVSLEVSSICVVDGSGKIIREAKIVSEPAVFIKWFAGLGLNLARIGLEAGPLSQWLYAAMKEDGWAVELLETRHVHTALQTMPVKTDRNDARGIAQLMRLGWFRAVHCKSPAAQETRAVLTARKLVQSKLHDTEMCLRGILRGFGLKVGPTTSNRFAQRIDELVSGHPTLQFIAKSLLAAHEVLLGQFREFEKHVRLQAREDARARLLMSAPGVGAIVALTYVAAIDDPSRFSSSKRVGPHFGLTPRKYQSGETDVSGRITKIGDVSVRTALYEAANVILTRPIKGSGLKSWAMKLARRAGMKKAKVALARKLAVILHRMWVNGLQFDAQKASASAAVAA

SEQ ID NO: 336759 - protein, 334 aa, unidentified
MDNIKAIGIDVSKDTLDVCITKGIEKSDICKTYKIDNNARGISELGNKLKRLGIDNNIPIALESTGICHILACMLLSKKGYKVGVINPLNTKYFTSANIRKQKTDKVDAKALADMAILKPEILKTFVPDHAQVMLKKKISTLNKMLKGYQSIKASIKTYQDLERQLQVKESVAIYNLKKSAKVMKKIMDDLEQEILEEGRECTGFEKISSIKGISDKTTVKILAQIEGKKFDRKESLVAFAGIDISVRESGTSVRGKGRITKRGNPNLRNSLYQAAWGLMMHNTEFKQIYEYHRKNGKHYYTCLTILARKLLHIIYGMLKTNTTYKPELVHIPV

SEQ ID NO: 336760 - protein, 310 aa, unidentified
MEKVIEYPQVVAIGCGLDVHKEIIVGTISCGNQRFETREFGADTSSLTSLRDWCKQSGVTHVAMESTGIYWKPVFNILEEDFEILLVNARHVKNVPGHKTDKKDSAWLSKLLLSGLLKGSFIPPQDIRELRDMVRYKKKLIGQIASEKNRIIKVLEDCNIKLSSVLSDVTGSVGTRIIDAIIFGERDVDVLMGFYHGKIKASKEEFRKALIGRITPHHIRMLQFHKKHIEDTEWLIKDIDKEIDQAAEVYSVEIDLLQTIDGIGKDGAIAIISEIGVDMSKFPNEHHLASWAGVSPGNNESGGKKKVPKP

SEQ ID NO: 336761 - protein, 348 aa, unidentified
MNKKIVKQVAGIDVAQKELVVCLGRMYDDWAPELYSHKTFPNHEKGFMALVLWVKKLAVEEVPVRFVMEATGVYHESLAYFLEEKGYESSIVLPNKISNYSRTLEVKTVTDKTASEAIARFGLERKLDPWKRPKKLFKNLRQLTRERDQVVQMRTMAKNQLHAEQAEAEPNPGSVTRIKQQIVFLNKQELQIKKELLVLSRQDSQVQQSVKLLCSITGVGSLTATTVLAETNGFELIRNKRQLTSYAGLDVKEKQSGTSVKGKAHISKRGNRYLRKAMHLPALTAIRHDDRFKAIFARLVSKHGIKMKAAVAVQRKLLEMMYIVYKTNIPYDKKYLQRNEEQQQIKNG

SEQ ID NO: 336762 - protein, 376 aa, unidentified
MLRARGPEGRPAVKKRSTGNGTEGMGAWTVGMDLGDRTSHICVLDEGGTVVERGKVQTTREGLRKRFEERRRMRIALEVGTHSPWVSRFLKELGHEVLVANPRKTRLIYQSRGKQDPVDAEALARIARLDPKLLYPVEHRAESVAQDLAVLRARDALVRTRTQLVNHVRGAVKATGHRVKKCSTRTFTGQAVGEIPEEVREALSSVVKTIEVVSRQILALDGRIRELGKTKYPETALLRQVGGVGPIVALAYVLTLEHPGRFRKSRAVGPYLGLVPARSQSGDSDPQLRITKEGDAFLRRLLVQSAQYILGPFGGDCDLRRFGRALSARGQRNAKKRAVIAVARKLAVLLHRLWKSAEVYEPLRKTGASRDAAVAA

SEQ ID NO: 336763 - protein, 315 aa, unidentified
MYHFFIGIDISKDNFVVAKHGDKKSTNYPNNKKGFLHFCKDFKQYLPQSLVILETTGGYEIELTSYLQNKRFLVHRANTRKVKSFIRSYGTLAKTDSVDAFGLALYGFERHSKLEIYQESPHKKLLKLVQRRNDLKIMLVQEKNRLKAPDQKAFKISFNAIIKVIQQEMHRIEKIIATLCAEHPQIEEIVKVLKTIKGIGDITAIQLIALLPELGTLDRKKIASLAGLAPHPNESGKKIGYRATKGGRSDVKPVLFLSAMTAARSKSALGDFYNKLVNSGKKKMVALTALMRKILVIANAKVRDYLVSLPNLQHG

SEQ ID NO: 336764 - protein, 320 aa, unidentified
MQSVCGIDVSKDRLDIMVLPEQQCFSVHNDAAGWAELVERLRGLSISAIGLEASGGYERGAMRALLAAGMPARQVNPFKLRQFARASGVLAKNDPLDARMIASFVAIMPTQPAQLRAPAIERLAEMLAVRRQLSAEKVAAENASRLLEDAMLQRLSRRRIRRLAADIEMLDRHLAEIVGTDAALAHRYRLLTSMPGVGLVLACTLIALLPELGRMSRKQVAALVGVAPYAFESGKFKGRRCIWGGRAPVRNVLYMAAMSASNWNPVFKAFHDRLKAAGKLPKVVIVAIMRKMITALNAMVRDDVVWADHLSGRHSVPTAR

SEQ ID NO: 336765 - protein, 346 aa, unidentified
MEIETIGIDLGKTVFHLVGLSAAGEMVVRKKCSRKQLLQFTATLQVRLIGMEACCGSHFLGRALREQGHEVRLMAARYVKPYVKTNKNDYIDAEAIAEAVGRPRMRFVPIKTDDQLDMPSLHRVRESWVGRRTAVINQIRGLLLERGITIRKGRHHAEVALPQILEDADTNLSGRLRILLAHLQQELRQLQSQIDEIDVGIVQTAGEHEACQRLMAIPGIGPVTATAIVSAIGNGAEFKRGRGFSAWLGLVPGQYSTGGKQTLVGISKRGNCYLRRLLVNGARAVLQCKEKQSPGLHAWLSKFASRAHSNVVAVALANKLARMAWALLTKGELYRPPLLAAEAVPV

SEQ ID NO: 336766 - protein, 346 aa, unidentified
MSNITTIGLDLAKSVFQVHGADEDGRPVIRKKLRRGQVLDFFSRLPPCLVGMEACASAHHWARELQELGHDVRLIAPQYVKPFVKTNKNDAADAEAICEAVTRPTMRFAPVKSAGQQAVLSLHRARELLVRQRTMIINALRGHCGEFGIVTVKGACNAGRLVEIIEDDADGRVPDLAREALRLMVGQLQAAQAGIVELEKRLKTWHRASEASLRLAAIPGVGVITATALVATIGDASQFRSGRQLSAWLGLVPRQNSSGGKDRLGRISKRGDGYLRRLLVHGARAVLRWSKSGSGNGPGRTTWQQALLARRPTNVVLVAMANKTARTVWAMLSRNETYRPQMLNAA

SEQ ID NO: 336767 - protein, 307 aa, unidentified
MANTVKKITLGIDVAKDKHDIYNWQTGELTTLANERSVIKAWLKAFHGPVQIAIEPTSHYHLVMIEEAHALGYEVYSINTRQLVHYRQAVNVRNKTDPLDAWLLARYLEHEGSLLRPYEPQDPRAQRLWKLILHRATAVKSRQQLQQSFAGLKVSIKGVLSQYQQLLARIDRQVVTLIRELGWWSDYLYCLSIPGIGSGNASALVAAYHRGAFASSDAFVSYLGLDVRIRESGYYKGKRKLTKRGEPELRRLLFCASHPARKCHRFAEYYQRQLEKGLSKIAARVILSRKLARIAFALMRKEEMFTK

SEQ ID NO: 336768 - protein, 355 aa, unidentified
MSAIVRVGVDLAKRVIQVHAVDAKGRVVANKPLPRERFAAWCVQLPPGCLVAMEACSGAHHWGRKLRAMGLDARLIAAAFVTPFRMAGRSGKNDAADAAAICEAASRPSMRFVPIKTVDQQSVLTLHRLREGYKEERTACINRIRGLLAEFGLVVAQSPKALREKLSELLEDATNELGTLARLSLQRAQEHWAELDEHIAWCDARVAAHVKSDAQAQAAAQLCGIGPLTASALIAGVGEFKQFKSARQFGAWLGLVPRQNSSGGKTNLGSITKRGDDYLRTLLIQGARSAMMSAHQRDDRMSRWVLQLRERIGWQRALIALANKHARIVWAVLVKGKAFDADHVPIKPTGGLAAS

SEQ ID NO: 336769 - protein, 343 aa, unidentified
MLIIGCDYHPSFQQISLVDQETGEYQELRLEHKDGEAERFYRKLAGQQVRVGIEATGSMRWFERLLGELGFELWVGDPVKVRAAAARKPKTDKEDGRLLLRLLLENRFPRIWVPTMEQRDARQLVLHRHKLVQTRTRAKNQLQALAANEGMQKRVWTQAGQAELKKAALSHWASVRRQDWLELLADLNQRIDPLDQALEQQAEKRPEVQLLMTHRGVGPVVAMAFVVTLCDPKRFANSKQVGAYLGLVPQENSSGKGGQRLGHITKQGNNLLRGLLVEAAHVAVRFEPEWKRKYLRLAMKKNRSIAAVAIARCLAVRLWWMWKLGLNYEQFMEQKKESRSHAE

SEQ ID NO: 336770 - protein, 336 aa, unidentified
MDVPKKSWTAHFKTDLFDNKTVTMPAESESLINYVEKNFAGHAVSCCYEAGCCGYWIARSLQQRGWEVKVVNPADVPRRNKQDWQKTDRIDSRNLCKHLSDGNLKGIYVPGEEQEQLRALFRRRVHLARNLRSIKNHIKSQLLYFGIKLPAQYDNPNWSREMKTWIANIKWKYNSAAESMKSRLKQLEFMWYEELHISNELRAYCRKHYKKDYYLYKSVPGIGGITAAAIIAELGDIRRFNRLDELAAIVGLVPGIYQSSENKINLGMTQRSNHQLRSLLIEASWVAVRDDLGLQQYYRKYSHKEPNKAIIKVAHKLLSRIRAVIHSDIPYQKGLL

SEQ ID NO: 336771 - protein, 328 aa, unidentified
MAKGITICAGIDTGKYKLDIALEGASEQLQVDNTPADHTVLADWLRRHRVKRVGIEASGGYEQAVVAALRRRRFVVVVFQPAQVRAYAKFRLQRAKNDKIDAALIAACTAAVKTIHAPPDPRLAPFAEQLTMIDQIGEDIARLKNRLETCRDPRIWQTWSEEIARLTKRRNSELKALVAAIRQHRDLAERLALIESVDGIGLPTAVAIVVRLPEIGRITREHAAALAGLAPYDDDSGEYVGIRHIAGGRERLRRALYSAALPASMRWNPQLIALYRRLIAAGKEHKRALIACARKLLIFANTVVARGTPWGRTAPVLPTTSHAQLAVA

SEQ ID NO: 336772 - protein, 347 aa, unidentified
MRFYSKQHRYYCGIDLHARTMYVCVLDQAGKVRLHRNLPCDRDRFLRAIKPYRRDLVVAAECMFTWYWLADLCAEHAIPFVLGHALYMKAIHGGKTKNDRIDALKIASLLRGGNIPMAYVYPAKMRSTRDLLRRRTRLVRVRASLFGHVRNTRSQHNVPAIAAKIRYPANRDPFTEGFDDPVVVRAVEADLWQAEFLDGLIRDLELFLRKKTRVFSPTVYHRLRTVPGIGAILGMTILYEIHDIRRFPRVQDFVSYARLVKCPTESAGKRTGTAGAKIGNPHLKWAFSEAAVLLLRQSDAVKRYHARLQAKHGKGKALSILAHKLGRAVYFMLKRKQAFDLEVFLKR

SEQ ID NO: 336773 - protein, 353 aa, unidentified
MEYIAFDAHKHYTLASVARPDGQLVREQRLPHERGALQQFLARCEPGSPVAVETIGNWYWIVDEIEAAGCVPKLVHARKAKLMMGEINKTDKLDVRGLNQLQRNGTLPTVWIPPGELRDQRDLPRTRMVLVRQRTQLKNRIHATLAKYALHNLDVSDLFGVRGRALLRQRLDLLPPYTAYATQQLLEQVENLDRQVRGFEHQMQTVFKPTPTIQLLLTLPGIGLLLAVVIALEVGSIARFATAEKLAAYAGTTPRVHASGGKTRFGPSRPDVNRYLKWAFVEAANAICLNRGRAPRRHVSRLYERVARRKGHQKAIGAVARHLAEATYWILTKQETYREPKAAAVSSTGDKRG

SEQ ID NO: 336774 - protein, 364 aa, unidentified
MYDSTTTVTVGLDVHARSIRLAAVRADELLEERTLPYDEEAVALVLRRWPLVRCCYEAGPTGFGLQRFLVERGIDCQVVAPGLVPQRPGDRVKTDSRDARKLARLLAGGLLEPIHVPSRELEAARDLVRAREDARLDRMRDRHRLSKFCLRHGRALPTSSWTVARRKWLSEQRFEFAAQQQTFDSYLHTVDLVDARIQALERAIRETAEEEPWRRLVASLRCLRGIDTLTALALVAEIGDFDRFSSAEELMAFVGLVPSEHSSGERRRQASITKVGNSHVRRLLVESAWHARRRPTVGYQLARRQRGQDAVVVERAWRCQQRLYQRWQRMAGRGKPQQKIVVACARELAGFVWAIATEQPLRST

SEQ ID NO: 336775 - protein, 399 aa, unidentified
MASMTSISTTQLDGVVFGGVDTHKDMHVAALLDSAGRLVGTAGFPTTRAGYRRLLGWLNTAGTLSRVGVEGTGSYGAGICRWLSAAGIEVVEVNRPDRGQRRRRGKSDTLDAAAAAEAARSGQRSSVPKSRDGQVEAVRVLRAARGSAVKARTQAWQVLQQLVVTAPAQLRDQVRQLPRMELIRRCTRWRVDSRDAADPTTATRMAMKTLAGRYLQLSAEIDELDKVLDRLVADLAPQLVATFGIGTETAGQFLVTAGDNPGRISSEAAFAMLCGVAPLPASSGLTQRHRLSRGGDRQANRALHVIAATRTRSDPRTQAYLAKKTSEGHSPREATRCLKRLIAREVYYLLTPTPHTPPVPPSPPPSRRAGAVKVEPPTRGTTLTAPSTGTPSTMEEPSP

SEQ ID NO: 336776 - protein, 388 aa, unidentified
MCTIDRKDESEPRGAPLSTTTRDLMELADWLAAQGITRIAMEATGVYWKPIWHILEGRFELVLANAAHIRNVPGRKSDVNDAVWISDLLAHGLIRASFVPPAQVQDVRDLTRTRTQLAREIAQHIQRIQKTLEDANIKLTSVISNIIGTSGRRMLKAMIAGETNPAKLAQLGSTRLKCPRDELTAALDGRLTAHHRFLIAHHLSLIEELERHIEAFDARIEKLLAPLRDAVAQLITIPGVSQVSAQVILAEIGAEMTPFPTAGHLLSWAGLVPRLDESAGKRRSTRVRKGAPWLKPVLVQCAWGAARSKGTYYQAQFFRLKARRGPKRAAIAVAASLLTAAYHMLKNGTFHQDLGADFLVKRNKARIVTKLASRIKDLGYDVSITPAA

SEQ ID NO: 336777 - protein, 324 aa, unidentified
MADNMLGIDVAKGKFDVVLMRADGKRRWRTFANRAEGFAALLGWLEKQQARPVHACLEATGTYGLALATFLYQAGQPVSVVNPACIKAFSESELNRTKTDKVDAGLIARFCRALRPALWQPPAPEVAKLQGLVRRLESLQGMAVQERNRLSVPGLAEPVRESVERTLAMLEEEIKRLRGQIDDHVEGDPGLKQQRELLTSIDGIGPTTANLLLGELSRYDFRKAREVAAYAGLVPQERQSGSSVRGRARLSKKGNGRLRKALYWPAIVAIRHNPVLAAFARRLRAAGKPKMVVIAAVMRKLLHLAFGVLKHQRPFDPNWIARRI

SEQ ID NO: 336778 - protein, 344 aa, unidentified
MTITTVGLDLAKNVFQVHAVDSVGCVVARKALRRSQMLPFFAKLTPCVVGIEACGTSHYWGRRLSELGHDVRLMSPAYVKPYVKRSKTDAGDAEAICEAVTRPTMRFVPIKSPDQQAALALHRARDLLVRQRTQLVNMIRGLLGEFGITINRGLHHALELVTRIAGGATIEVPAVAARVVAGLAGQIMELQARLTALERELLTWFRQNEVARRLETIPGIGVVVATAFAATVTDPQRFRSGRQFAAWLGLTPLANSSGGKERMGRISKMGDPYLRRLMVIGATSRIRIAQRAPERERPLAELLQRKPARLATVALANRTARIVWALMARGGVYRSPASAMSASA

SEQ ID NO: 336779 - protein, 444 aa, unidentified
MKQEPEEIPDTEHELVLERVCAIDVAKDSGKVCVRVSSRASKRVSKVWDVPARTGAVAELAEHLLAEGIEKVTVESTSDYWRIWFYVLEAAGLSVQLVNARDVKNVPGRPKTDKLDAVWLAKLTEKGLLRPSFVPPAPIRELRDYTRLRIDLTRERSRYWQRLEKLLEDALIKVSAVASTLDTLSVRDMLEALIAGERDPRRLAGLARGRMKPKQAALVEALTGRFDDHHAELTRMLLDQIDALATQIGTLTTRIDELLTAMEPQARADEPDTRGGAGGARESTTIERLDEIPGISPGLAQIILAEIGLDMSRFPTAAHLVSWAKLCPRTIQSGAIQRSGKTGRGNPYLKGALGEAAAAAAKTNTFLGERYRRIVKRRGKLKALVAVARSILVIIWNMLNDPTARYADLGADYHATRINTERRTRNYVTQLMAMGYRVTLEPAA

SEQ ID NO: 336780 - protein, 370 aa, unidentified
MENITYVGLDVHKATVCVAIAEGSRSGEVRQLGVFENRPELLLKLVARLGKGGRRLSFCYEAGPCGYGLHRFLSGCGHDCVVVAPSLIPMKAGDRVKTDRRDAVMLAKLHRAGELTPIWIPDAAHEAMRDLVRARATAGRVLSKARQHLQSFLLRHDQIYRGVRAWTLAYRRWLTTVRFAHPAQQIVLQDYIHAVQDAEARLDRLTRQIEELLPSWSMAPVVTALQAMRGIALVVAVTVVAEVGDFRRFANARQLMAYLGLVPSEHSSGASIRRGGITKAGNALARRVLIEGAWTYRMPARVSRKLHDRNEKLSPAIRDIAWKGQIRLCSRYRRLAAAGKPKVVVTTAIAREMVGFIWAIARIAQPTLQG

SEQ ID NO: 336781 - protein, 409 aa, unidentified
MSSTIAGVDVHKRVLMVVVVTRDEAAAVIDKRRFGTTAGEMLHLAAWLQEHGVKEVVMESTAQYWKPVWLGLEGHVELFLAQAWSNRAPRGKKTDFRDAERLARRHLAGELTLSFVADAQQRLMRTLMRRRTQLTRERVRMQNQVESLLEETRIKLSGCVSDLFGATGLRMLMAVVAGQTDPVKLAALADARIQRSQEELVEALTGKVSDVHRDLLGQHLESVRLIDRHMVQLAELAAQAMREYAAAIRRLAKIPGIRVLAAQQIVAEAGPRASTFGSAARFSSWIGVSPGSQESAGENHSSRCAKGNTYLRRVLCQAAQAAVRTKNSFFQQKFQRLVPRLGYAKAIWAIARHLSVVIWNILHEGSEYIEYGMATSEQAIKRRIQRVRKELRVLGYSDELIPRLVTVAP

SEQ ID NO: 336782 - protein, 388 aa, unidentified
MSILALYVGLDYHDDSIQVCVMNEAGVELVNRSVPNDVEMVGELIWNHGPPRSVAIEACCGAADFIEELARVYQWDVRMAHPGYVSRLKQSPDKSDYNDAGLLADLLRVNYLPEVWLAPEETRQLRRLSRYRQGLAEDRKRVKLRIRALLREERLKHQGEGRPWSKPWMKWVREDAHLGEHARWVMNQHLLELEALEERIQAAEQRMEEATEEDPLMQALLKQAGIGLVTAFVLRAEIGSFHRFRSGKQLARFCSVTPLNASSGKKQADAGLVRQGNPELRRVIVEAAQRIGRYDDKWKALKQRLVARGKPSSVAIAAVGNRWIRWLYHRIKEEVVDSTWMESTTAEPPLRLDKGDAPCASALATAPGRAKGRCEGDGEGAPRNLMGN

SEQ ID NO: 336783 - protein, 387 aa, unidentified
MRRSKSRIVGLDVHPDSFAGAILQGMDPWKARVVSTSTRVALPLLEKWVLRHTREEDILVMEASGNAFCVAERLRALKHRVVILESHRAGKVGKTYCATDRVDAIKIARIYLSALSPVVWQPDTKTRERREVFSAYQAVVKEGMRLKQQIKSMLNEHCVRLEKGFRLSHPSAIGRLFQRRKWTPAQKMLLQQLHAGLVGARARRQQLRHYMAQEVLAQKELLRLTRLCGINLITLYGLIAAIGEIQRFATARKLSAYFGLNPSVEQSGNYEGSGALKRHGRGAIRALLVQSAKKLLQVDNPLQKWGLAIAMRRGRNKAAVAVARKLCVAVWHVMQGHVIGAIERMDTLHTKLHKLATDLGLSAIKQLGYDTKEAFVQKKLFLLRSYA

SEQ ID NO: 336784 - protein, 391 aa, unidentified
MDRAWAGIDAGKEFHWAHLLDASGRKMLSRKVENDEADISEFIGEALSLAEEVVWAVDQTGGGAALLLALLWERNQRVVYIPGLTVGRARETYRGESKTDAKDAYVIADQARMRPDLGELEPGEEEVAELRILLGRRRDLVIDQNRTITRLGETLLSLSPALERALDLNRRGPLTLLTHYQSPAQLRRAGHKRIAAYLRNRGVKGFESVAGKALTAAKSQSITLPAESIAARLVAELAAEILALKDHIELIDEEIEQRFFARPEAEVLASLPGMGPLLGAEFLVTVGNLSAFDSADHLAAYAGLVPAAKDSGKRVGNNRRMRGGNKNLKRVFYQAAFASLRSSPESRAFYDRKRAEGKRHIQALIALARRRVNVLWAMLRDGTTFEARSAA

SEQ ID NO: 336785 - protein, 296 aa, unidentified
MDYFAGLDVSVKETSVCIVDDAGKIVREARVATEPEALLQVLTNTLYRLKRVGLEAGPLSQWLYSLLAEAGLPVICVETRQMRAMLKAQINKTDRNDARGIAQMMRVGLYRPVHVKTLRSQKLRVLLTHRKLLQSKAIAIENDLRATLRNFGLKVGMVGTVKFEARIKELVENLPDVAVLVGPLLVVRRVLREQIGILHRRLLAVVRGDDVCRRLMTVPGVGPVVALTYRVTVDAPARFRNSKAVGAVFGLTPSKYQSGQNDRTGGISRCGDEMMRVMLYEAAQSMLMRSTKWSWL

SEQ ID NO: 336786 - protein, 349 aa, unidentified
MLHAGLDLSRHRLDFCLLDEEGERLESAAVPPDLDGLQGFARGVRERYGRVAVKAAIESMNGARFVHDTLERLGWEVEVADAQKVKGLGPLACKTDRIDAWVLAELSRRDLVPAIWLPGFEQRAERERARWRLFLVRKRSALKNRIHAQLLAFGHRCPVSDLFGRDGRELLGRLDFPEPWRGGVLAAVAMIDDLDCQITDIDRELKALGADHPYIPTLMTAPGIAWVLGYTIAAEIGDIHRFSSPAKLTGYTGLCPRVYQSGNTDRRGPLTHAGPKYLRWALIEAATNACKHRVYRDRYQRNKARLGRQRGTKIAQIDVARRLAEAIWYMLTRDQPFAPAGAPLPLAAR

SEQ ID NO: 336787 - protein, 432 aa, unidentified
MAEGKTGSEPEFAALVGIDWADRKHVWCLQAAGSRKREAGELEHKVETVEAWVAELCRRFGHRPIAVAVEQVKGALVFLLNKYEGLHIFPVPSTTTAKMRAALYPSGAKDDPRDADLLLDILGQHRDKLHRLSPDDETTRRVQNLVEERRKLTAERTAQSNRLTSYLKIYFPQMVEWFEKLDMPLVCDLLERWPTLEELQKVSPEELRTFFCQHHCQRGLRERRILAIGGAIPAKGDRAVIEAKSAVVKVIVQLIRSLLEGIAELDRKIAEAATEHPDFFIFDSLPGAGAVMAPRLLAAFGSQRDRYLCAAELQTYSGIAPVTERSGKRKWVHFRWACPKFLRQSFHEWAGHSIAQSVWARAYYQQQRDRGSDHHAAVRALAFKWIRILFRCWKDRVAYDERKYLAALAKRGSPLGKLLVVDMAACEIPCGS

SEQ ID NO: 336788 - protein, 430 aa, unidentified
MKSNTQNAKIEAITEKTLVLGIDIGSETHYARAFDHRGIEYSKKPFKFSNTEAGFVTFKEWILDLKEKHEKDKVVPGMEPTGHYWFNLGKFLQDNEMKPVLVNPHHVKKSKELDDNNPTKNDRKDPKVIAGLVREGRYMIPYLPDGVYADLRTASNIRFQLQAELTRIQNRISRWFNIYFPEYKTVYGKPDAKSGMLILKQAPLPEDILTLGIDGVNQIWRDAKMRAVGKARAKTLIEAAEHSVGSKEGAVSARMEIRMLLEDYESRNIRLQEVMTLIEELVNQIPMAEKLLEIKGVGIKTVSGFLAEVGDISRFNTPKELQKLAGLALVEKSSGKHKGKTTISRRGRKRLRYLLFEVAMSLVAKNPEFRELHNYYTTRRLNPLKKMQSLMAVAAKLIRVFYAILTKGVDYDPKKMVGDIKRPAVYLPAA

SEQ ID NO: 336789 - protein, 417 aa, unidentified
MIRKVIEVIHRRVGGLDVHKKVVVACRRRLVDDTHAEVETKKFKTTTAGLKELTRWLAEWEVTNVAMESTGIYWVPVWNVLQDHFKLMLVNAHELKKVPGRKDDVIDAEWIAQCLQCGLLRPSFVPSLEIRQWRHLTRQRAKLSDHHTAVVNRMHGVLHQVNIKLSDVASNIVGVTCRKIISAISKGETNPELLASLGKNRLKARTEDLVESLEGRVEDHDRWLLKQLMQQLEMIERQIRIYDDRIKFSMKDYDHQIERLDTITGVGRRVAENLLAEIGPHMDQFPTDDHLVSWAAMCPGRNESAGKKRSTRTRNGNKWLRRTLVEAAWAAVRSKNTYLAALYKRVSPRRGKNRAIIAVARTILQSAWHVLTKDCEYKELGSNHFDKLNQDKTRHYFVKRLQRLGYTVELKKTNAAE

SEQ ID NO: 336790 - protein, 348 aa, unidentified
MNHYAGIDVSLECSSACVVDANGKIGRESKIASEPAALIGWFGSLGFEVTRIGLEAGPTSQWLYAAMRDAGLAVELLETRHVHDAFKAMPVKTDRKDARGIAQLMRLGWFRPVHCKSLEAQETRAILTARKLVQSKLHDIEMSLRGILRGFGLKVGPTTPKRFEGRIRELVAGHPSLQVIADALLAVRAVLLREFNGFEKRVRSMARSDKQAKLLMSTPAVGPIVALTYAAAIDDPARFKSSKTAGAHFGLTPKKYQSGETDYSGRISKIGDAAVREALYQAAHIMLTKPLKGCSELKSWAMRIAKRAGTNKAKVALARKLAVIMHRMLADQKPFNPTVRTKLIPVEA

SEQ ID NO: 336791 - protein, 369 aa, unidentified
MKEQLVYCGVDIAKWYLDAAIGKEKRRLTNDGSGHREFIKWIKQIEGQAQVICEPSGGYERLFIQALVRAQVKVSLVQANRVRAFARAAGILAKTDTIDAQVLCAFGEAMQPQMVTASKLEQEQLRELESQRRHLSRLLVMEQNRGARLAECSVRVLNRSLIKQIQKQIEKIDLLIKEHIEGSQELSAKAQKLTAISGVGPRTAALLLAQMPELGQLNRREVAALVGVAPFNRDSGKMRGKRTIFGGRRAVRTGLYMAALVAARHNPILRTFYRRLRTARQTAQSCPDRHHAKTLNRAQQLPQTRSNLCLTARQLLTAGRRTASLHFMKIRSLQAGLVGSFAPLSRRYPARLCRLPRCFPARGVLASGG

SEQ ID NO: 336792 - protein, 309 aa, unidentified
MNSAVVYVGVDVAKAYLDVAWAERSGRFANGKSGWGALIKWIKQSALPVHLICEASGGYERGLLDAAEQNAIKLSLVQANRVGQYARAAGILAKTDKVDARVLCAFGSAMQPEPTVPLSAQQKQLRELETQRRHLSRMLVAEQNRLAQLNDKELQRLTRCLLGLLKKQMALIDTRLAGLIAQDQTLREKAQKLTAIAGVGRRTAVLLLAQMPELGTLNRAQTAALAGLAPFNRDSGTLRGKRTIFGGRRALRCGLYMAALVAARHNLILRNFYQRLRSNGKPHKVPLTAVMRKLILALNQALKPTACFA

SEQ ID NO: 336793 - protein, 396 aa, unidentified
MELMDERGRVLARGRLPEGVAGMARLHELIGEQLGEDADDAEVVIGTETDRGPWVSALVAAGYTVYGVNPLQASRYRERHGVSGAKSDRGDAHMLTDMVRTDSHQLRAVAGDSPDAEAVKVVARTHKTLIWERTRQVQRLRHQLREYFPAALEAFDDLDAPDALELLGKAPDPAKAAKLTRAQISAALKRARRRDIPGKATAILAALRSAQLGQPPAVTAAYAVTARSLIAVIAVLNEQVKALESQVEADFGRHPDAEIYLSQPGLGPILGGRVLGEFGDDPDRYVSGKARKNYAGTSPLTRASGKKKVVAARFIRNDRLIDALMAQALSALGSSPGARALYDAERARGVEHNAALRKLANRLVGILHGCLKTRTLYDEATAWPHREKTPQSDIAA

SEQ ID NO: 336794 - protein, 396 aa, unidentified
MPLFAGIDWAKAEHAICVIDENGRIRTRFRAAHSATGIAELLARLQSHAAAGELPIAIERPTGALVDALVQTGHPVVPIHPNAVKAARPRYSAAGAKSDPGDAYLLADLLRTDGHRFRPLRPRSDETRALRALVRSRDDLVAQRVALANQLRALLESFWAGAALIFADVDSPIALAFLAEYPTPAHAARLGPKRLARFLARHAYCGRRPAEQLLDRLHSAVVVQLGELEMQAKGELVRSLAAILATLVAELHKLTAAVEHAVTEHPEAWITSFPRIGRVNAAQILAELGEDRTRFASDAHLAAEAGVAPVTRESGKHRAVSFRWACNKRLRLALTCWADNSRHSSPWAARVYNVARARGCDHPHATRILARAWVRVLWRCWQDAKPYRLEQHRAAA

SEQ ID NO: 336795 - protein, 415 aa, unidentified
MQSFLFVGVDTHKNSHTAAAFSNYFDLLATITFANSFSGFSDFLTKLEKLSDGRAMIFGLEDSQGLGNFLAEFLIKKGFYVVDIDPVTTDRGRRRTAHKDKSDDRDACLIAKTLIREKDNLHKVIINKTSLALRELVKYRELLIGESTRIKNRLHVAIFNQYMEVSAIFPDLFSKCALAFFARYPDPSKLKGESLDNLTAFLKSNSMGRHGNKKAIDILSFANTDITPDILTDARSFIIKKHIRRLISIQEELKEISDMLSRLVLKSPYSTLTSVPGIDIVTAAKIISQVIDIGRFSSSSKLAKFIGVAPVEKSSGRKRRYQKSKHGKRYLYSAIFFIALNHISRTRDGRDNNPISRAYYLKKVSEGKTKKEAITCLARRLTDVIYAIMRDGSIYSPSKVKSSVDIKILETVVSL

SEQ ID NO: 336796 - protein, 309 aa, unidentified
MKEQVVYVGVDVAKAHLDVAWEEQSWRVTNDAAGRSALVKRLSQIAGSIQVICEASGGYERALIQALQRGGIKVSLVQASRVRQYARASGVLAKTDSIDAHLLCRFGQAIRPQATAEPKPHQETLREWESQRRHLSRLLVAEQNRSAQLTDKTLRRLSKGLLTQIQKQIAQIDLLLQQLIAQSPELCAKARKLTALAGVGPRTAALLLAQMPELGELNRRQAAALAGLAPFNRDSGTARGKRAIFGGRRAVRCGLYMAALVATRHNPVLAQFYQRLRAAGKPPKLALTATMRKLLIALNSSLKTDPLLA

SEQ ID NO: 336797 - protein, 344 aa, unidentified
MTKPNLLAIDLAKNVFQVCKLCPNGKVIYNREVSRAKLKEILINEKQALVAMEACGSAHYWARFAISAGHIVKVINARAVKAFQTKQKTDRNDALAIGVAAQQEHIHGTHIHSTEEQALQSLERMRHLAKVQLVAQSNQMRGVLAEFGVILPQGLSKLRKEIPFILEDADNFLPDSFRTALHRSWSHLLCQIEHLQELDRQLESLVKSHHICKKLMKLEGVGPLGALGLALRLGRGENFSNGREASANIGLTPKQNSSGGKERIGHISKYSADKRLRSILFQGALSVITHVLNRPATTNKEQWLQALVERRGKKIAAIALANKTVRTAYALLKNDSDYQPIKLS

SEQ ID NO: 336798 - protein, 357 aa, unidentified
MEGTQVEFTGQHVYVGLDVAKRSWKVCVLVGEIFHKRFSQQPDCRTLANYLRRNFPGAEYHCVYEAGYCGFWIYDELRQLGIDCIVTNPADVPTTDKERHHKTDSVDAGKLARHLRSGEVRGIYVPDRSALEDRTLLRTRSRFVRKQTRCKHQIKALLHFYGYTAPDAGVERYWSRAYIRWIETISLRESSGTYSLQALLKELFFLRRTILDLTKQIRHLSHQERYWRRAQLLCTIPGISIITAMTLLSELITIDRFRSLDALASYVGLVPGERSSGEDENITGISPRRSAVLRYVLIESAWVAQREDPALMMSFLSLSHRMPKPQAIVRIARKLLNRIRYVLKNDQPYVKAVVRSA

SEQ ID NO: 336799 - protein, 419 aa, unidentified
MKSTKTKKVKKINAKTVIAALDIGKNVQYGYFRAPNGNDVKPFAFYNSQKSYNAFWQKLCEFKTKEGLEQIVIGFESTGPYAEPLFHFLRTKDVKLVQVNPVHTKRVKELVGNSPNKTDKKDPRVIADVISLGHALSLVVPNGAAAHLRRLTQARERALKQRTATINQLQDLIFVIFPEFLSIMKGISTKTAAYLISHHPSAESICAIGVEALATKIKQTSRGRLGRERAQQLVAAARASVGINQGKESILLEVEHLNRRIENENRFIDKLEHQMAEYLQCIAYSGSILSIKGIGTVTVAGLIGEVADFNNFDTISEVMKLAGLDLYEISSGRHKGQRRISKRGRPLMRKLLFYAAINTVKAKGIMHEKYQQMLARGMLKMKALVAISRKLLGLIFAVVRDNSMYVQGYCSKYHYKLAA

SEQ ID NO: 336800 - protein, 342 aa, unidentified
MAVYYVGADVHLNNTELAVEYNKEIIRRFSVPTTVPTIRSALEELGGRCHLTFEEGPMAGWLYRNLKGTVESITVCDPRRNKLIACDGDKDDAIDSGKLAALLRGKFLRPVYHDHNTKQLELKQWVKLYHDFVKSATRNINKVRGCCRGEGIRIPSRVVKDIMSRQQWLDGLDNRVLAEQVCLLWQGYDIAAFQGRAAKKQLERRIRGNAVLHRWSEFAGIGVIRATTIYAYIDTPWRFKRKNRLWKYCGVGLQRSSSGKDAKGRQKNGRLELAWQINKMLKNAVMGAAMSAIRQKENEFSQYYERMLKNGITPGNARHSVARRMVTVLWGIWKQQTRQQQN

SEQ ID NO: 336801 - protein, 311 aa, unidentified
MTHDTIGIDISKLHFDAHRRMTGRHARFDNTAAGFKAFSHWIGADHPDLVVFEPTGPYHRDFEAAFAGRLPLAKVNPLQARRFAQSQGTRAKTDAVDAAMLARMGRALELVPDRPAEEIQTVLRELRVARSGLVRDRTALMNRLSAARLPLVRRLVKARLAQAERQIATLDAEIDGRLDACPRRRRAAQLLTSIPGIGRITARSILAECPEIGTLRHKQIAALAGLAPMTRQSGTWCGKARIEGGRRHLREALFMPALVAMKKNPELSAKYDQMRAAGKPHKVALTALMRKLIQLANTLIREDRTWHPKCA

SEQ ID NO: 336802 - protein, 435 aa, unidentified
MSKLHRIRSNCAGVDIGSSKIFIGIEDHPVRSFDTYTNSLKEAVKYITECGVTELAMEATGVYWITFFDMVMEAGIKVHVVNGRHVKHVPGRKSDVADCMWLQQLHSFGLLQNSFVPDDNIRQLRTYMRIRRDAIEMQVTHVHHMQKALTQMNIRLTEAISEIHGVSGLRMIEAILNGERDPEKLVELCDAQIIKRKRGIVLEALNGFYKEEHLFELDMAYKGYNFYEHQIAHCDREINEWLTKNLPDKEVGEVKKKSKKIRHHAPKIKELHQKMVQLYGGKDVTSLPGITQYTWLQLTAETGMDLSGWPTVKQFTAWLGLSPSKYSSGKMNKNKRRKSSTRAGQIFKEASVSVLNSKNHALGAFGRRIRSRRGPNVAIKAVARKIAVMYYYTLTQGISYVEQGIQAYDKQYQEGQRRLLEKRAKQFNLQLIPLE

SEQ ID NO: 336803 - protein, 341 aa, unidentified
MELELHTIGIDLGKTVDLHGEVVVRKKFSRVQLLRFTANVHVGLIGMEACGGSHFLGRALREQRHEVRLIPAQYVKPYVKTNKSDYIDAEATAEAVARPTMRFVPVKTDEQLDMQFLHRVRERWVMRRTAVINQIRGLLLERGITLRKGRHHVHAALPLILEDADANLSGAVRLLLTQLKLDLDQLSVRIDEADAVIQKTAHENEACRRLVAIPGIGPVTATALIAAIGNGRAFHKGREFAAWMGVVPREHSTGGQQKLLGISKRGNSYLRRLFVQGARAVLLQRTKQSSGLSAWLAQITSRTHRNVAAVALANKLARIAWAVLAKNEQYRPSVVADVAAA

SEQ ID NO: 336804 - protein, 482 aa, unidentified
MKPKPQEKNKRATNHPTQHHWHEMNRKQRRETMRKIQSEDLTLEVLHPDAAGIDIGNESHYVAVPPSRDTQPVRRCGCTTAELKAMADWLKQCGIRTVAMQSTGVYWVAAYDIFEQAGLEVYLVNARDTKNLPGRKSDVQESQWLMKLHTYGLLRNSFRPSQEIRTMRTYWRQRNDLVQSAGRHILRMQKALTQMNVQLANVLSDISGVTGQAIIKAILAGERDPHKLAQLRDRRVKASQEQIARYLEGNWQEDLLFVLKQEQEAYEFCQQQIAECDRQLAQYLQQREDRSQGAPLPEEKRKGRLKKKRANKPQFDLREGLFRMTGTDLTRIDSIDVMTAMTVLSEAGWDMSKWKTEDHFVSWLRLCPDNRISGNKVIGKGRLATNNPITIAFKMAASTLRLSKTYLGAQFRRFRTRLGAPIAIKAMAAKLARLVYRMLRYGMKYVDQGAAFYELQHRQLQVKQLKWKAAKLGFQIVQATAA

SEQ ID NO: 336805 - protein, 329 aa, unidentified
MTNFSNFVGIDVAKKDFYACFDEQSESRKFNNTTLGINSFIRHLSRSNFQNQDTAIGLESTGSYHLRLCLQCSNLGFTIKVLNPLIVKKYNQTKLRRVKNDKKDASLIRYCVSQGAGYEFKETAKTLLLKSLVRQRNSIANSLLKLKRQVEDVKYKEDCLKIKIPSVYQEIQEILRGKAKNLEKQLKTFRKQEQKLLQTIPGIGPITAVSFIAEIVDISRFEEAKKLVAFIGLDSRVHQSGTSVHGKGYISKRGNKILRTRLYNASSVAVLYDNLFRDYFQKKRSEGKPYRVALIATMNKMAHVIHSVWTSGKSFEDQRIKPKEDKCPL

SEQ ID NO: 336806 - protein, 527 aa, unidentified
MTSMLGSNRRRHSTPKSRPRRQSLQKPNGVIGPRVQKVGGERFAIVCVDPAKHRSEWMMADYFGNVLIEPKTLQHQAPCFKLVMEQIRQAQQEHHIQDTMVVVERTGNYYLPVKRAFASAGFETRVVHPFATKQYRMPADPGNKTDKTDLYAQHRAAVAGFGLCEFELEPPYRQLQLRARHRRNLVEKSAALACQIRDHLHLTMPGYADLFDRLFERLTPLAIARRGDSPAILLELGQVGLSQYLQDNKIRFQVRTIERVLAWAAEATKLSIQDGLLHHAIWTDLYELYQHFRRKISVLEQLLASDLTRTPYVRLLAIPGINVVSAAELAGEMGPIHRYANANAITGRSGLYPSRHQSDQTDNASGPIIRQANRRLRCVLMRIADCLACHCSYYRGQAELDQSRGVDKRASRVKIAKRFSRLVLACVAGDQPMRHPCFQQPDSILEKLRRFHHEHETSLECVMEDLHATVSQLPYNTRCHEAQVVAAVLEQQTKRRRGAITIGELMPAVLARLGITTTESKENRDRP

SEQ ID NO: 336807 - protein, 285 aa, unidentified
MAMLAELVDGVIGVDPHRDTLTAAAVSHLGGVVAQLATSSADAAGYRQLFDFAQTQLPGRRCWAVEGAGSFGAGLTVMLQQHGERVVEVGRPKRPASRSGAKSDALDAVRAAREALGHDRLATPRRRGQREALGVLLRTRRCATLAGVAAIGQLKALLVGAPEKLRAELRGQPTSRQIDDCARLRPRPTRSLEHQATVRALRATAARIQLLQAAAALLQAELAVLVGAVAPWLLEVPGVGPLSAAQVLVSWSHAGRFRSEAAFAALAGTNPIPASSGQVTRYRLM

SEQ ID NO: 336808 - protein, 320 aa, unidentified
MSASSVVVGIDVAKAHVDVAVLGAEFELQRFDNDAEGHSALAAALPPLGVALVVMEATGGYEAALACALQATGLPVAVVNPKQARDFAKSMGRLAKTDRVDARMLAELATVLVRRDDLARFLRPLAEAQQQALAALVTRRRQLLTMLLSERQRLQLAMPMVRPSIEAMIRAIRAQLDEVEGQMLAHLRQHFAELDTLLRSASGIGPIASATLIAELPELGRLNRREIAALVGVAPIANDSGATRGRRHVHGGRFEIRRVLYMAALTAATSNPAIKAFYQRLLAAGKLPKVALVACMRKLLTSLNAMVRSNKPWNNSLHGA

SEQ ID NO: 336809 - protein, 367 aa, unidentified
MKKVSTVAAKASKNFSQQKLTIGLDLGDRWSCYCVLDEGGQIVLEQRVRTTAKALREVFGGMPRSRIALETGMHSPWVSRLLSEFGHEVIVAHARNVRLIGESRKKDDRLDAQTLGRLARIDPQLLSPVKHRSAKAQADLTVIRARAGLVRARTALVNTARGLAKSYGERLRGCNVRNMNPEKAEALSPELQKALEPLLAASAALSEQIAEYNERIEQMAKESYPQTALLKQVKGVGTLIALTFLLTLEDPHRFQKSRDVGCYLGLQPGRRNSGQSEPQMHISKEGDPYLRTLLVQGAQHILGPFGVDCDLRRWGLRLAERGGRSGKKRAIIAVARKLAVLLHHLWVSGEVYEPLHKSNQRAMPAAA

SEQ ID NO: 336810 - protein, 416 aa, unidentified
MKKNSKSPMKKEQQAKRAKVQRPVQREVKAVLAELVEKLQGKLAVKATSASPAEAGPRAELSPNLDRLTVGVDLGDQWSHFCILGFEGETLSEGQLQTREAEVAEFFQAIPPARVVMEVGTHSAWMQEIIAGEGHEVVVANPRLMEGSKRRKRKNDRIDAKKLARLGRVDPQSLYPIRHRSREVRQDLVVLRAREALVAARTELINATRGLVKSMGTRLPQCSSPSFGEKVKDVIPEKVREALLPLVQLADALSDSIQSYDQKIEELGSEKYGHTKLLRQVKGVGPITALAYVLTLENPEHFARSRDVGPYLGLVPKQEDSGESQPQLGISKTGDTMVRKLLVGSAHYILGPFGPDTDLRRYGLRLCERGGKNAKKRATVAVARKLAVLLHRLWVSGEVYEPLGYASSRAIVQQAA

SEQ ID NO: 336811 - protein, 345 aa, unidentified
MTKLIAGMDLHSNNVVIGLMDMDGKRVGHQKVECRLSEVVRYLAPYKKRLEQVAVESTYNWYWLVDGLQALRYPVVLANPAGMEQYSGIKHADDTNDAFFLAELLRLKILPTGYIYDPQLRPVRDLLRRRLTLVHQRTALMLSFKSLYTRTTGQEMTLSRLKGLAIKEAQDLYDHPANQLIAGMQIKHIEQLTESIDKVEKGVLDCARELPFYSKLTTLPGVGKILGMTITMEVGDIKRFAEPGNFASYCRTVEAKRTSNSKKKGENNSKCGNKYLAWAFVEGANFARRYDPQCRRWYDRKVAKTSNVIATKALACKLAKAAWHVMAEGTDYDSQRMFGQAASTK

SEQ ID NO: 336812 - protein, 341 aa, unidentified
MPTVRTIGLDIAKNVFQVHGADVTGGVVFRKQLRRNKVLEFFSTCPPCLVAIEACGGAHYWAREIGRLGHDVRLIPPAYVKPFVKRQKTDAADAEAICEAVQRPTMRFVAVKSEEAQASAVVFRARDLLVRQRIQIINALRGHLSEFGIVVPQGPAHVGRLVEQMDDPHGAVPAAARAVLAIMVDTLRLLEDRIALFDKEIVRRAREDEEARRLTTIPGVGPITATALVALAPAVSQFRRGRDFAAWLGLTPKEHSSGGKQRFGATSKMGERTLRRLLIMGATAVVQHFGRRNPTSGSWLAQMLSRKPRMLVIVALANKMARIVWAMMTTGSNYRASAGAA

SEQ ID NO: 336813 - protein, 422 aa, unidentified
MLSVGVDWAEDFHRLALGRPGDGILEEFNLSHQPGAVERLVARIAELEPDPAEVRVLIETRHGLLVEALLDAGFTVVPVNPDLVARRRGPARKKDDGEDARILCRMGLDHFLDLRTLVPHGQLASELRAIARDDARSAQDQRRLLNRLRMDLLNTFPAALAIAGQDLAAPTQLRLLERWPTHQALAAASQEQLAAFARSNHHGWPERFADGVRQALGSANFVARPGLVRAKADSIRLAAQQLLLIGQQRKAWERRMGELLLGARRYGRTRQPQSDELGEKVPDGEIYLSFPGLGDRLAARVAGEIGDHFEQFESPNSLQCYAGKAPVTRRSGKSEFVIAHRLACNRHLANAVQQWAFCSLRESAWAREFYEDKVARGLGHHAALRSLGNRWLEVLGHCLKKHVPYDEAVHVANRNRALGRAA

SEQ ID NO: 336814 - protein, 417 aa, unidentified
METTETVYRRIAGIDVHKKMLAVVVRVERGEQVEYVKRKFGATRAEILHLEAWLRAQGVSEVVMESTAQYWRPVWYGLEPHFKLHLTHPLKTRAPRGRKSDFRDAQRLADRWSSGDRQDSFIPGAEQRSWRWLTRTRVQLRKKLCIIHSHAEGLLEQGGIKLSSVASDLFGVSGWAMLEHIAKGVTDVDVLVKLARGVLRKKDSALKEALAGRLEPIYQLLLRQHMEQVRLLRKQIEELNKAIAEAMKYHISALLRLSKMPGVDLYSGQELLAEIGPKAAAFPSAEQFASWVGVCPGSQESAGVNYSRRSAKGNRYLRRLLCQVAWAAIHTKQSFFAGLFARLKPRVDGKGAAWAVAHRIAKVIWLVLHEEVEYKEKGPALPNERTLVRKLRRMVKEFGQLGLDVRALLEQQLANPA

SEQ ID NO: 336815 - protein, 346 aa, unidentified
MLYAGLDLSRKRLDFHLLDGEGATLEVGAAPPDGDGLDGLTERLARYGAPIRAAIESMNGARFVHDRLELAGWQVEIADAQKVKGLAPLACKTDRIDAWVLAELSRRELVPAIWLPDPLVRAERERARWRLHLVRHRSSLKQRVHAVLLTHGKPCPVSDLFGVRGRRLLAQLGLPEPWQGTIEASLRLIDELDREIGECERELRRLGADHHYVPLLCTMPGISWVLAYTIAAELGDIGRFPTPRKLVGYSGLCPRVYQSGERDLRGPLAKQGPRYLRWALVEAATHACRHPAYRQRYTDTKARIGKQRGAKVAQVDLARRLAEAIWHMLTRNQPFAPKGATDPLAA

SEQ ID NO: 336816 - protein, 381 aa, unidentified
MKIASGLDVHKDSVFLCILHENGEKIQQKFGVLTEELELMRDLMLSEGVEECAMESTSIYWMPVWRVLERDFKLHLVNPYFIKQLPGRKSDVRDAEWIATCLIKGLISSSFVPEEKIQRLRQYNRRIFDLSASISRNLVKLDACVQRCNIRISNYVSTVDSKGYRTVVKMLSQGITDPEVLVGALHGRTVNKHGREVLVRALTGVINDTDIDIISQLMEEIELLQRHKDEAQQKMTELCRQWFPQELENLQTIPGVKERSATSIIAETGTDMSKFQTPKHLVSWVGLRPRNEESAGKIKSRRIVHGNKFMRKTMIECAWAAPRTKGSFYSAFYQRQTIGRRKNKMKVQVAIARKLLTVVWHVLHDGCPYVPYKDLSTQGTL

SEQ ID NO: 336817 - protein, 404 aa, unidentified
MELDVIYRSVAALDVHQAKLTVCVLFETNTGEVVSQIREFGGFKRDRREMATWVSSFNPELVVMESTGIYWKSPYAALEKHDLKLAVVNAYHVKQVPGRKTDIADAQWLAILARSGLLRGGFVPPQHFREYRLISRQLQKLTGLASGEKCRLHKLLTDGGLRLSVVVSDLYGKSAKAMIQGILDGETPEQLLAHADPRLKASPDELRDALEGDLSESHRFVIRELMAHIDELEARILRFRQMLLAHLSSYQVILQNLQTIPGIDELSAAMLFVEIGDDMSAFGSPAKLASWAGVCPGQNESAGKRKSAKTRKGNPYLRRILCEAANAVSRTRCSLQDKFKGLMIRRGRKRAIFAIAHKLLKTVFLLIQRGDYYRDANTDYEALSVQRNAPRWIKKLVQYGYISA

SEQ ID NO: 336818 - protein, 370 aa, unidentified
MAKSTPLFVGLDVHKDSIAVAHAQGQSADPPVFLGEIGTRQADLAKLIRRLQAKTSKLVFAYEAGPCGYILHRDLTGQGFDCHVVAPSLIPKKPGDKVKTDRRNAVDLARLLRSGDLTRVYVPTVEDEAIRDLCRARDAARLTLKNAKLRLKAFLLRLGLHYVGRADWNDAHRRYLAKVVCPTPAQQIVFQESVRAVDEQVDRLARLEAELRELAPAWRLYPVVQALQALRGVQWLVAITVVAELGDLTRFTSPRQLAAFVGLIPSEYSSGPTRRQGGITKAGNGRARRALIEGAWAYRHPAKVSQHIQTRIDALPKPIQDIGWKAQVRLCKRFRRLVARGKHPNVAVTAIARELIAFMWAIATEVPVTV

SEQ ID NO: 336819 - protein, 344 aa, unidentified
MKIVGCDLHTRYQQIAMLDEETGELIERCLEHESGEARAFYASLEGGVRVGIEATGHTRWFERMLAELGHELWIGDAAEIRASMVRKQKTDARDAAHLLELLLSGRFPRLWRPTMAERDLRQLVWHRQKLVWMRTAIGNQLHALAMGEGVCRKKKLFTKKGRIELESLSLDRWASRRRQELLRMLDQLDASLKEFDQAVAEQAEQNAGAVLLMTHPGVGPVTSLAFVLTLGPVERFAHSKQVASYLGLNPREHSSGGRQRLGSISKQGNPMMRSLLVEAGHTAARLDHELRQDYQRLKLRRGGGVAKIAIARKLAVRMYWMLRSQASYAQLVRMQGSPRGTLVE

SEQ ID NO: 336820 - protein, 316 aa, unidentified
MNSQVFVGLDVSKQHLDVAVRPQGRHFVTPNDDRGIKQLVKRLAALKPQLIVLEASGGYEFLVTAALAEVQLPVALVNPQAVRKFAGATRKLAKTDKIDAQVLAHFAEALRPEPRPLPDQDQQVLKAALQRRLQVVKMIGQEKNRREKTFMPAVRQDIQAHLTWLSQRLEQLDRDLSDQIRQSPLWRDRDRLLRTIPGIGPIVSRAVIAQLPEAGALPGKKAVALVGVAPYNRDSGRFRGKRMIRGGRSYLRRMLYMAAVVASRCNPVIRAFYQRLLAAGKPKKLALTACMRKLVLILNAMLKNNQPWNQFITQAP

SEQ ID NO: 336821 - protein, 338 aa, unidentified
MQAYAGIDLHSSNNYIGIINEQDHRLYGKRMPNDLNHVLMALEPFRDQLEGIVVESTYNWYWLVDGLQENGYNVHLANPSAIKQYEGLKHTDDKWDAYWLAHMRRLNILPEGYIYPKESRAIRDLLRRRLLFVRHRTSHILSLQSMITRNLGFKVSGNNIKKLKGEDVDRMFNSSNLKFMAKNNIAVIQFLKKIIVDIGKNVKSQVKLRKEFKTLLTIPGIGDILGLTIMLEVDNINRFPKVGNYSSYSRCVKSERISNGKKKDQNNRKNGNKYLSWAYVEAANFMIRHNAKAQRFYQKKKAERNGIVAIKALSNKICRASYYIMRDHVPFDEDMLFR

SEQ ID NO: 336822 - protein, 377 aa, unidentified
MKRIKFVGLDVHAETIAVAVAEQEGEIRSLGVIPNREESVRKLVKKLGPVEQLRFCYEAGPTGYALYWQLTRMGAKCEVMAPTLVPVKAGDRVKTDRRDALKLARNYRAGELTAVWVPDAEHEALRDLVRAREAAKKDQLRARHRLSKFLLRHGRRPPVGATPWTVKYLEWVKRDVHFAVKAQEATLLDYLHEVEHMAARIVRLDSAIEEAVKVAPAKMRAVIEGLQALRGIAQISAVTIVAELGEVTRFSKARELMGYGGIVASENSSGERQRRGGITKTGNAHLRRVVVEAAWAYRHRPAIGFTLRKRQENLSEEVKEMAWKAQHRLHARYGKLMAKGKNKGVVVTAVGRELLGFIWAIGVQVEAQQKESLRQAA

SEQ ID NO: 336823 - protein, 358 aa, unidentified
MTTTTTSMTHSALQRRVIVGVDTHKEIHVAVAIDELGALLGTGSFTADRAGYTALISWATSLGAEVTFGVEGTGSYGAGLASAIRRSGIGVLEVLRTDRRDRRLRGKSDALDAENAARSVLAGSVHAVPKSADGIVEMIRVTKVAKDNAVKARTSAMLSLKQLLVNADDELRQSFKGLPKMTLIRRAAALRPGPIDNVTAATKQAIRAIAVRWLALDEEIKGHDLLLTRLTTSIAPDMVAGFGIGPDVAAELLIVLGDNPARIHSEAAFARLCGTNPIPASSGKTTRYRLNRGGHRQANSALYRTVVVRMQYHEPTKAYVERRTEEGKTKPEIIRCLKRLLAREIWARTRDFRAQSGT

SEQ ID NO: 336824 - protein, 386 aa, unidentified
MKYVGIDVAKETHYGCVTSHNNKVLTPPFQFDNNISGFSLLLSKFKKFPKSDVVIGLESTGIYGENLMSFLSEQGYQVALINPIETAGARRKRIRNAKTDKIDSKAICKYLFQNDYRLLEPKELTSLELRGICRFRQTLKRQNARLKIQLVSYLDVVFPEYRTLFSSVHGKGSYAVLSEFSSPAVIAKTNITKLENLLKTNSRGHFGRAKAEELKALAKNSIGSKTNNKDFQIRHTISHIRLLESQIDDAETRLKELWSGIDTVLKSVPGIGIIDGSLIYSEIGDISRFRKPDQLIAFAGLDPATKQSGNFRAESTRMSKRGSPYLRYALVNAAWNVSLNNATFGEYFNQKLSEKGRHYKALGHVAGKLTRIIFKMLKDNVMFDLP

SEQ ID NO: 336825 - protein, 427 aa, unidentified
MYRMAGIDVHKKKLAVVVSDVEVHGEYQFERCWFGANPEQLRLLSQWLAEHQVEEVVMESTALYWQPVWGALERYWQPICQKREGAGATSGILHLAQAQSNRAPRGRKKDFRDAERLVKRLVADELKLSFVPDREQRLWRTLTRRRYQLTRARVQLQNQLEAMLEEAQLKLSSLVSDLLGVSARRMLQAIADGESNPEALAGLADRRLRATPAQLSDALGACTELHPVYRRLINMMLGEWKVIEEHRAELNQELATLLRPHQDAVERLAEVPGLGVDSAQQILAEVGANAAVFASDKNLCSWVGICPGDQESAGESSSHRSPQGNRQMRRLLNQAANAAVKTKGSIFEIVYRRLVPRLGHNQTIGAVAHRLCRLIWLILRKGVHYEERGPAVSQRSKQNRTSKMIRELRTLGYRVEFLNPVPSNPMP

SEQ ID NO: 336826 - protein, 343 aa, unidentified
MSKISIVGLDLAKNVFQVHGVDVSGGVVLRRQLRRGAVEKFFAQLSPCTVGVEACGSAHHWARVIGRYGHQVRLMPPAYVKPYVKRNKNDGRDAEAICEAVSRPTMRFVPVKSVEQQATMAVHSTRALLVRQRTMTANSLRAALSELGIVAAQGIKGLRELMAKLEAPNQEVPEIMRGALLLLAKHWQALDADERALEQRIAKAARSDREARRLMEVPCVGPIIASTVLAKVPDAKVFRSGRDFAAWIGLTGRDHGTGGKHRPGRISKQGDRMLRALLISGASAYLRHQRTRGVSDPWLRDLLARRPYKVVMVALAAKTARIIWAMLVKGEPYRDRASAPAAA

SEQ ID NO: 336827 - protein, 421 aa, unidentified
MDKNDDSRLEEFRQLKREIRGSTQHLVVGIDIAKERHHAFFGTPAGKVLLHRLVFDNTKEGFEKLCFQSDALKTQHGLAHVVFGMEPSSDYHKPLGEYLIEHGHGVVLVAGAAVKKNRELLDGRWDKNDTKDAANVADLITQGKCLFYEFPSLSLRELRSLLSLKRRLKKSEQGYKVRIKNHLIAQYFPEMDAYFNYAEGPALVRCLDPKKLAGLQFGEFMRMVPLGNGKQDERLGEIHAKAASSIGCAVHPSAVFEASILLDELKDIHVMMLETDRKIAGVCKKFPEYPCLLSIPGFGPDISAKVLGALGNSHRFENHRQVLKMAGLDLSADRSGKRTDVAPVISKKGKADLRYGLYEAALIASTRNAQFMTYFTKKLKGREREKGIGAKMRVKLSAKMLVIAWTLMKKKEMFNPDCIGG

SEQ ID NO: 336828 - protein, 371 aa, unidentified
MKSIIYIGMDVHKKTYSLCALLKETGEIIGETKIPADVSLIIKFIENAKKSVDSDDVQIKTGYEAGCLGYSLYWQLAAKGIECDILAPSTMHRSAKNKVMKNDRRDAKNIAANLANGTYKSVYVPTDEDVEIKEYIRMMHDFKIESKKVKQHINAFLLRFGHHYPGKSKWIPAHIKWLKELELSDMYREILDEYLSQLEILTEKIERFKYRLEELSQKETYNEKIGQLRCIKGIDTTAAMTIHAETSDFDRFPTANAFASYCGLTPGEDSSGESYHRLGITKQGNSIIRTTLVEAAQVLVRGNIGKKGKRVKSKQKDQDVKVIDYADKAVIRLQKKYHRMIFRGVKRNIAITAVARELACFVWGIETGHIS

SEQ ID NO: 336829 - protein, 321 aa, unidentified
MATCVKALQIGVDVSKAELVISVDGQAPFALENSTKAIKGWLKQLPSQCQIAMEATNDFHMSLATLAHAQGHRVYLLNGYRLNRYREGVGGRAKTDCADALLIVRYLQREQEDLREWEPAVKGYRELQVLLHRRATVIRAKTQIQQSLEGISVLDGVLKSLLKQIERVDQLIRKHILKIVAQAQWQGHLQRCQQIEGIGPITAAGLTMAYNRGHFKDSDAFIAFLGMDVRVRDSGAKQGKRKLTKQGDPELRRLLHLAAMQAKRQPAWEQLYQRYIDRGLAPIQVLNILARKLARVAFALMRNQTDYEPRRLPDTQAVMNC

SEQ ID NO: 336830 - protein, 352 aa, unidentified
MLWESIMNKIVVGVDLAKNEIQVCVTKHNKVHSNKAMTPREFKIWLANSDTMTIVFEACSTSNYWKQQAIACGHDSRLISAKLVAQIRQNQKTDKNDALAIVQASQLANVDFVNGKSKAQQALQSLVRLRELAIKQKVASYNQLTGLLLEFNIRVAGAKGGITDVVKSILEDADNDFSPEFRHALNIALHHYLSLLEDIAQYDMCIEKAANQHKTCQSLMAIEGVGPLNAINLYISLGCGEIGIFKKGRDAAACIGLTPIQHSSGGKVKLGSIGKYVKNKTVRSYLVSGAMSVVNQATRRVAKTKKELWIQQLVERKGKRCAAVALANKTVRTAFSMLTNKTEYKAELLSAK

SEQ ID NO: 336831 - protein, 459 aa, unidentified
MERKMKLGMDVVNFNASGIDVGSRSHYVAIGQELEDVREFGVYAENLTELCQWLLDSGVTTVAMESTGDYWQNLYVELISFGFEVVLANGKFTKNAKGKKTDVKDCRWIQKLHTLGLLTGSFLPDLTTEQLRTFCRQRGNWIDLAASATHKMQKYLKLLNFRLDVVVKDVCGLTGMKIIDDICKGNLDPQSLAEHRHYNCRKPKEEIARALHGNNRSDYLFGLQQEFDSYKFFQKKIADCDKEIEHFIKRELKEHPERSKMKTTEKPYKRINKNAPQIKDLNQIAFRYFDGVDLFAIEGLSHSTVLTIMSEIGPQGFKKFGSSKQFSSWLRLAPNNKISGGKTLSNRVPKGSNRLKIALRQAANAIGNLKDTHLSDFFRRVAYRKGRHSAVSATARKLAVIIWNMVTKKNGYQPPTKYLFLDQKRKLGLINRIKKQIDKFELKPEDFGFTKNLNINNLI

SEQ ID NO: 336832 - protein, 355 aa, unidentified
MNSEKYIGLDVHQATISVAVMDPRGKVVMESILETKASTILEFFTGLRGTLSVTFEEGTWAAWLYDLLKPHVTKLVVCNPRKNALLKHGNKSDRIDARKLADLLRLNDLEPVYHGETGVRMLRELARSYLTIVKDLSRVMNRLKALYRSWAIPCAGRDVYYNRHRKEWLGKIPEAGTRRRAEQLYQQLDMLQHLRQQARRELLAESRKHTITAKLRQIPALGPIRSALAVALIQTPHRFRTKRQLWTYSGLGLETRDSGEYRYVKGQLRRRKKQVSVRGLNKDHNHDLKGLFKAAATRASVQPGPFQDFYQRSLAKGIKPTMVRLTLARKIAAITLTLWKKGENFDLEKLKSQAA

SEQ ID NO: 336833 - protein, 361 aa, unidentified
MKIVGCDLHAGQQTIAMVDTETGEFTEKTLFHEGDAVRAFYAALEGSVVVGIEATGAMQWFLELLEELGIECRVGHPAKIRAQETRKQKHDRRDARLLLQLLSEDRFPEIWMPSIELRDLRTLLRDRDQWVRMRTRLQHTLQAIALNHALRQGRALWSAAGRSVLQALPLPPYTRQRRDQLLGLYAQLQKRIEELDKEVEAARQRPQARRLLTHPGMGAVTALATDVFLGDPSRFATGNQVASYIGMIPSERSSGKRQRLGKMSKQGNALLRYLWTEAAMSTVRKDPELQRFYRRKLIQKGMGKTRIAAARKLGIRLWIMMRDQIDYEQFCRRGRLRQKGKSHAGMPDFNSACNAVTGSTE

SEQ ID NO: 336834 - protein, 347 aa, unidentified
MSFIGVDLHQNSFTVCRRATDGAESFETLTLSAADLERFCLSLDADDELAVEATGNSAWFRDCVRPCVGRVVVVNPSQFKVIRKSVKKTDRNDAAALALFLAKDMLPETRVRTQGENELASLTQTRDLLVKQRTRLLNKIHALHVRKGLKLRKESLGSKRALASIDLALFSACEVIEIEVLREQALSLTASLARLDREIEGVASTFKGYAGLTSIKGVGPRSAAVLLSTIGNVHDFESADKLAAYFGIVPRVSQSNETDNRGRITKRGNKLARTTLVQCSLIAMRYSSYLKTYYDRIRQRRGTGKAIIATARKLLAIIYDTLKNGWVFDDFTQFSRRDPLIPAGQTS

SEQ ID NO: 336835 - protein, 338 aa, unidentified
MRYVGVDLHKHSITVCVMILVGRTRKIIERRRFRCDQEEEMAEYFASLGEYQLVVEATASYEWFVRLVEPTADRVVLAHPGHLRVIAQSKRKTDKLDAQTLAEFLALDQIPEAWRPTPRVREHRTLVRHRQYIVGRTTSVKNKLRRVLSHYNADLKGLFTQQGRKYLANIELSESDRFVTNLLCEELDQHNERLKQVDKQLKAFAKQASVAEREAREILDSMPCVGPVTIDVVLAEVGDIRRFGSQRKATAYAGLAPGIRESAGKAKQLGITKQGSGLLRTTLVETAWRLVIKTRRWSTVYEKLKVRCGAKKAIVAVARRVWCVMVSMLHSGQKYQPM

SEQ ID NO: 336836 - protein, 334 aa, unidentified
MMNEHAVGIDVSKKKLDICVVSANKTKTKVLKNTPAGHGELERWLRQRDLPKTTPVVLEATGPYSERVATMLADAGWAVSVVNPARITGFAQSELSRNKTDKADAKLIARFAQKAELQLWQPPSLAVRELRALVDRLQALIDMRQQELNRLEAIDQGSVTSVGDMVREHIDWLNSEIKNVQSEIDDHIDGNPELKHDAELMESIPGIGKRASAQFLAYIGDVRRFKSAKALAAFIGVTPRQKQSGTSLNGRSSLSRAGHTAARKALFMPGMVAKHHNPVIIAMAQRLEQRGLTPKAIVGASMRKLVHLIYGVLKSGQPFKAEIPMAGLEIQEGI

SEQ ID NO: 336837 - protein, 433 aa, unidentified
MNTPHPHDLIIGLDRSDKKADLHFITPATGQRRSQTIDTAPEALWEWLLELRQQHPQARVGLCLEQPAVHLIAFLEAYDWITLYPINPITLQKFREAFVTSRAKDDAKDALYLAELLLTHQDQLQPWAPEDSATRAVQQLVFHRRAVVDERTALTNRLIALLKQYFPQALVLCGEDLWRSLATRFLLKWSSLQAVQKAKPATLKAFYHLNGSRSDKLMEQRLALVQKAVPVTDETALIESFALRVQLICRQLQLVQQTLRSYEQQIAAAYAAHPDHAIFDSLPGAGPVLGPRLLASLGSQRERFGAAADLQQYTGIAPVTKRSGGSCYIHRRYLCPKFQKQSFHEYSKESILWSRWAAAYYLQQRTKGCPHHTAVRALAYKWQRVIFRCWQNRTPYQEAIYEAALRKSGSPLVALFDKVELGKSPFKNPVKKS

SEQ ID NO: 336838 - protein, 405 aa, unidentified
MVDYYTGIDWASDHHDIQVLDKEGNKVRSFQVKHNPEGIRQLCNGLKELAGGDPSRIAIAIETSHGLLVSALLDEGFLVYPVNPKESERRRKSSGAKTDFIDANNLAKMLRTEIKDMKPFKPSSETIAELRQLTRDQNGLIQTKTALVNQLQACLRDYFPAFLGLFSELDRDISLAFLRRYPTMEKALRLSMEQLAEFLRAHRHPRPYEAARLIHAKLRQPYLTAKPHVVRAKSRLVVALVEQIQVLKKQINSYDKEITALFRSHPDSVIFASLPGAGKRLAPRLLAGWGDDRSRFASAQEVGALAGTSPTPYQTGKFSRPRFRRSCMKDFRYALQIFAWESTQSEPWAREYYDNQRRRGKTHHQAVRALANVWVRIIFAMWKNHQPYDREVFLAAQMAHRRRVA

SEQ ID NO: 336839 - protein, 407 aa, unidentified
MNELASNHAEVNTSSVRSDRRLEASPERGCLADKATEGKEMSKTENSRLCVGVDLHKTQFTVCALNEDGEYLLEKWYPTKEEGYSEFSKTMHSQEEQGYSIELAVETTGNARFFKNQMEKEGFVVKVVNTNKFKVISTSTKKTDANDAATLAYYLMKEMLPESHLCSQTSEEIRRLLKTRSVLVQSMVKIKNQIHGMMMGYGIETKAAQFQSKRKRQELTNDLADHNYSDFTASSLKVMLKILDDLSAEIKDVEKHLEEMVESNEDVELLMTVPGIGINTATTIAAYTEDLERFEGNYKKFAAYVGIIPSVHNSNESNHYGRITKHGPQELRTAFVQAALGMIRLTKVTSEWRLIKEYQRRKDEKGSGRAIIALARKITRIVFVMLSKREKFNPDLMRCVDNEQQTA

SEQ ID NO: 336840 - protein, 310 aa, unidentified
MEQVFVGIDVAKDRLDVHVRPSAEAFAVARDSEGLANLVDRLANLTPGLIVLEATGGFETVVAAALGAAQLPLAVVNPRQIRDFARATGRLAKTDALDAQVIALFAERLRPEPRPLPDEQSRLMAELVARRRQIVEMMTAERNRRRRLTGKRMLKSVDRVLAALQKELSDLETDLDETIRGTPLWRETEDLLTSVPGVGDKLARTLIADLPELGQLNRKQIAALVGVAPINRDSGTFRGKRTTWAGRAKVRSTLYMAALVAAHHNPVLKGFYQHLLAAGKAKKLALTAVMRKLLTILNAMLRDQRPWQNA

SEQ ID NO: 336841 - protein, 348 aa, unidentified
MRVFIGLDVSLAKTAICVVDRDGAVQWQGKVPSEPGPLIKRLAEWHGMIELAGIEACPLSEWLHRGLREAGIPVVCVETRHAQRFLSSRPVKTDKNDARGIAEMMRLGHYRPVHVKSPAAQSMRTTLAARMQLVASQLQIEGTIRGLLKVYGLKIGAIHRNRFAARVLELLEMAALTELSAAIEPLLRVREGMRTERKAFDRTLASAARRSDVGRRLMTIPGVGPVTTLAYIATVDDPGRFGTSKALGAHLGLTPRVYQSGEIDRSGQISKCGDRMLRHLLYEAASALMTRTRKWSRLRAWGVAVAKRRGMKRATVAVARKLAVIMHRIWVTGEEFDFGGPAVAAKAA

SEQ ID NO: 336842 - protein, 422 aa, unidentified
MLTTTQDNEKLIERVAALDIGKAELMCCVRVPDEDHPGRRLQEVQAYSTMTRSLQGLLDRLRCLGVTRVVMEATSDYWKPVFYLLEAAGFETWLVNAKDVRHLPGRPKTDKLDAVWLCKVAERQMLRPSFVPPPPIRKLRDLTRYRADLVAARTAEKQRAEKLLEDACIKVSAVVSDIFGVSGRDMLAALVAGERDPKVLAQLARRSMRAKITVLEEAFTGHFTSHHAFLLGTMLSRVDGISADIAALDDRIAAEAAPFADAVSRLDEIPGISLASAYVILAEIGTDMTRFPTAGHLSSWARLAPGIRESAGKKKGKGSTGHGNAYLASVLGNAAAGAAKTDTFLGEKYRRIARRRGSKRAIVALGRSILVIAWHLLSDPEARFCDLGPGYYTARADSERRKHHHIRQLEALGYTVTLQPAA

SEQ ID NO: 336843 - protein, 423 aa, unidentified
MYERVAGIDVCKDMIKAGIRTPGHRAWTRTPEVLEYRTFCGVLQTMARGLRKRDVTHVVMEAGGVCTEPVYYALMEQDSGQVAVIGPAHAKALKGHKTDAKDALRLAELFECGLLRGSYIPPQALKDLRDLTRYRVKTVQARTSEIQRLAGALEPAGIKLDSVVSDLTGKSAGLMTGALTGGERRGRVLAGLAIGRMRTAGKLAELSQALAGRFTDHHAVLCRLHLDRIALSGTAVAGLEQKIAVKVTPYQRELDLLKSITGFGDAVAQAWLAGIGPAPHEYFASHEKLASWVTLCPGNHMSAGKRRHGRTGDAGTCIKPMLVQAAWSAIKSQGRLQARHHKLVRRFGGPKNPAAVKKAILAVAHTLLKIACQVLRSGKPYADLGADFCTQPESPEQRRACLLRQLEKLSPGCTITITPAEAA

SEQ ID NO: 336844 - protein, 454 aa, unidentified
MAPRHKKTKKKIVAQLPTLHPHAAGIDIGAREIWVAVPPGSDPKPVRSFDTFTDDLLQLRDWLLQCGVQTVAMESTGVYWIPLFQILEAAGLEVCLVNARHCKNLPGRKTDVQDCQWLQYLHAVGLLRASFRPPEHTCAVRTILRHRSRLLRCAADQVRLMHKALTQMNVQLQHVISDLVGVTGEVIVQAILAGERDPLKLAALKDHRIKASRDTIARSLRGDWRPEHLFTLGQSYQTWQHYQKQISACDEQIEGQLADWDARVDLQAQPLPPPKTTHRTAQRNEPRFDARTECYRVLGVDLTAVPAFQAPTVLLLLTELGPDFALKFPSSKHFSSWLGVCPDNRITGGKIMSSATRDVKSRVAEALRLAAQSLWHAQNYFGDLYRRWKAKLGTPKAITAMAHKLARILWHLLKFKVPFNPEIFPKEEEKLRRKKLARLQNTAAALGYRLIVSQ

SEQ ID NO: 336845 - protein, 461 aa, unidentified
MASRSKKSKRKQSKFEGMQIINPHAAGIDLGSKSHWVCLPGEGSVKDRVKEFKTDTPALEELADWLSMAGVTTVAMESTGVYWIPLYEILDARGYEVVLSDTRTVSNVPRRKTDVLDCQWIQQLHACGLLTGAFRPGEDIVKFRALVRKHTVFTQKAADWLRRIQKELDQMNIRVHRAVSDISGATGMRIIHAIVEGERNPAKLAEMRDPRCSLSKKEIQRQLTGNWRDEHLFNLELDLKTYEYMLGCLSELEEKIRELLADLQTVSEPPPPPASKSKEKQINKRGEEPLRQSLYMMSGVDLTTIDSIGVGTAQTILSEVGPDLSMFPSEKHFISYLRLAPGMDVSGGKAIRGKKKKPQLGSSRTRKALMMAALSAGKTQTALGAYYRSIAIRRGPGVAVFATARKLAQYIYRLLRFGKEYVDIGVKEYEERNYDRRLKSLQTRAMQMGYILTSIEQPAFT

SEQ ID NO: 336846 - protein, 339 aa, unidentified
MNSMAVGVDIAKQVFQVHYVDRETGEIVNRQIKRAKFLEHFANRAPCLIGMEACGGAHHWARELTKLGHEVRLMPAEFVKAFNIRNKNDAADARAIWLAVQQPGKPVAVKTEMQQAMLALHRMREQLVKFRTMQINGLRGLLTEYGEVMSKGRAALDKEIPAALGRIAARLPAALIDTLREQWNGLARLDEQIAEIERRMREWKQQDRAVKAISEIPGVGLLTATAAVAMMGDPKAFRSGREFAAWAGLVPKQTGSGGKVNLHGISRRGDTYLRTLLIHGARSVMTHTKEPGPWVEQMKQRRPMNVVIVALANKMARMIWAVLAHERPYRNDYVSVKPA

SEQ ID NO: 336847 - protein, 332 aa, unidentified
MMTTTTTTLPVLGIDISKATFDVALLRDAQACKPKTRKFDNRPAGFQALLRWLVKHDAPQVHAVMEATGAYGDALAEFLHDAGQTVSVVNPAQIKAFGQVELQRNKTDAADAALIARFGLRQQPAPWTPPAPEVRELQALMRHLDDLIGQRTQVSNRLTEGRLTPAVEKSWQQVLATLETQIAAIKEQVEAHFAQHPQLKQQRDLLDSIPGIAAETAARLLAEIPHLAELDSARAAAAYSGLTPRRHQSGTSVNAPSRMSKIGNARVRYALYFPAITALRCDPSFQQLAARLAAKGKHKLQIIGAAMHKLVRLAYGVLKNQQAYDKNYLVEA

SEQ ID NO: 336848 - protein, 432 aa, unidentified
MSWMMVTHRISNKVVCRKEKRMTSPVKTLQGVIVMFYAGIDIAKHKHEASVIDASGQALLDSISFGNTKAGCEKLLALFERLGVERETVLIGMEATGHYWLSVHAFFIELGYDVKVINPIQSEAFRKMYIRQTKNDSKDSFIIAQIMRFGQFSATSLSEENIVAMRQLSRYRLALVDSCGDCKRRVIALLDQVFPEYAKLFSDTFGVASSEVLLKYPTPEDMLAVSTKKLTTLLNRASHGRFGIEKAQQLKSAAKTTFGISFAKDAFAFQIKQLMEQLVFLEKQVDELEQQIATLLEQIGSFITTIPGIGDTIGAIILSEIGDIRRFDTPGKLVAFAGLDVKVNQSGEFSGTKNKISKRGSPYLRRAIWLAASRAAFCDPILSEYYQSLRARGKHHLTAVGAVSRKLCNIIFAILTENRPYEPNPPKKSLRP

SEQ ID NO: 336849 - protein, 323 aa, unidentified
MKTIPSATPVVHIGIDVSKASLQVDLQGSTTCFANTPQGHRKLAKCLPPHASIVMEATGSYHLALLAFLHGKAIPAAVVNPARAKSFAKASGTLAKTDPLDAAMLSAFGRALNPPLSTPREPDRIKLKELLALRDQLLAQATMFANRLEHGQCAAVGKMLASLLKHNAATLAKLDKQIAALLAESETLAHAARVMQGCKGVGPVTTGVLLSDMPELGHANRHQIAALAGLAPFANDSGSSSGRRSVRAGRARIKRALYLASLSAVRHHPTLKAAYKELRAKGKPAKVALIAIARRLLVILNAMLKEHFQQLPGPTPGHPAQPL

SEQ ID NO: 336850 - protein, 413 aa, unidentified
MEILYRVCCGLDVHKKTVAACLRFASPTGPRAEEIRTFGTTTGELLRLADWLAMTGCTHVAMESTGVYWRPVYQILEGSVELLLVNAQHIKTVPGRKTDVKDCQWIAWLLEHGLLRASFVPPTPFRELRELTRYRRQLIEERAREANRVQKVLETANIKLGDVATDVLGASGRAMLKALIAGERDAHKLAALARGLLRKKEVQLREALVGRVTDHHAFMLQSLLSHIEFLDQEIALFDARIETQTRPFTAALERLDTITGVARRSAEQILAELGDDMSRFPTAAHAASWTGICPGNNESAGKRKSGKTRKGNRWLRTTLIECARGAVRARDSYLAAQYHRIARRRGDKKGIVAVGHSILIVAWHLLRNGGSYRDLGHDYFDRLDRDRLVRYHTRRLTELGVVLPPPSPASATA

SEQ ID NO: 336851 - protein, 361 aa, unidentified
MNATTVAVDLAKSVFQVAVADANWMPIESHRLTRAQFERWFANREVGLVVMEACGSAHHWARWLNRQGIEVKLLPAAYIRAYVKRNKTDAADACALLEAARCADIVPVRIKTVEQQALQGLHRIRSLWMSTRTSRINALRGFCREFGLAVPTGARTGVEVMSRTLADPNSPVPILIRGSMKLLIEEIRLLELRIAQLEKELTALAKQSPACTTLLSIPGIGLLTATAMVAATSGDVTHFKDARHFASWFGLTPKEHSSGSTRKLGRISKKGDRYLRMLLTHGARSVLRTASLARLAGRGLDGLKSWALGVQGRTNHNKAACALANKLARICYAVLRDGADYGKPAPRLSRKIERASFAMAA

SEQ ID NO: 336852 - protein, 367 aa, unidentified
MEKSSKVFVGMDVHKESIDITLAEEGGEVRRLGQIGGDRGSLLKMVRRQQSKGRELVFVYEAGPCGFWIYREITALGERCMVVSPALIPRRAGDHVKTDRRDSARLASLARAGELEAIHVPDIRDEAIRDLVRGRDDAVIAQRRVRQQLKALLLRNDIRYVGKSSWTGAHRRWLSELKLPEPAQQIVFEEYIDAIVVATGRIERLTWAIETEVASWRFAPVVAALQAMRGIQFVHAVTLIAELGDLTRFASARQLMGYLGLVPREDSSGEHRRQGSITKAGNSYARRAMIEAAWAYRHPARVTRIIATRQTGLPKAACDIAWRAQLRLSAKYRRMNARHLNHNKIVVALARELSGFVWAIGQSVKPQ

SEQ ID NO: 336853 - protein, 372 aa, unidentified
MTSIIYVGMDVHTTNYTLCCYSMEDDRFFAEVQVEPDAKNILKYLARIEKQQSRDCRIVCGYEAGCLGYSLYHQLHAHGIDCVILAPTTMMTKPGKRIKTDRRDARLISKCLAFHTYSPVYIPTEVDDAVKEYIRMRDDANSALARVKQQIIAFCIRHGKIHDGKSYWTNKHLEWLSSLDLGNKILSEVLQEYLIRYYQLREQVDMYDMRINELAQAEPYRQKVEKLGCFRGIAAHTALPFCVEVGDFRRFATAQQFASYLGLVPGECSSGDKQQYTGITKAGNSHLRKLLVETAQVFGRSATKSGKSVALKERQAKCDSLTVAYADKANARLKKKYFKIAMRSKVNIAKTAVAREMACFIWGMMTDNISCA

SEQ ID NO: 336854 - protein, 432 aa, unidentified
MSEGSQEELMSQNQPEIQYAAFLAIDWADQKHVWSLQDANSGTCERGEVDHMPEAVEAWVAQMSQRFAGRPIAVAVEQSRGALVFLLSKYEQLHIFPVPPAMTANLRKAFYSSGAKSDPTDADLLLDLVQRHREKLRRLSPDTEATRLIQNLVEERRRLVDEKTAQSNRLEAHLKIYFPQIPRWFGDLGSPLVCALLERWPTLEALQKARPDTLRSFFRKHHSRKEELIESRIQAIGEAMPALKDRAVVEAKVAVVKVSVQLIQDLHEGIEGLHRQIQEAAEAHPDFFIFDSLPGAGAVMAPRLLAAFGSQRERYQNATEMQTFSGIAPVTESSGKSSWVHFRFACSKFLRQSFHEWAALSIPQSKWARAYYELQCRRGKKHHAAVRALAFKWIRIIYRCWKERVAYDENVYLAALAKHNSPLVTATRAEAL

SEQ ID NO: 336855 - protein, 412 aa, unidentified
MKDLLEISCGLDVHKEKIVACILTGPLGKPTRSEIREFSTLIPDMIALRNWIVSKNCHHVAMESTGIYWMPIYEILEDAFYGDITLLVVNARHMKNVPGKKTDMRDSEWISTLLRAGLLNGSFIPEKRIREFRDLNRYRKSVIRDITSQKNRIEKFLQSSGFRLSSFISDIFGASGRNIILHLIEHGQIDKTALDSCLKTKTRNRIDEILMSVNGTLSEHQKAFLRILMTHYDSLKKHLAEIETSLEEDMAPFTLQVEQLNSIYGISTTASCAIIAEIGIDMKPFKTAEHICSWAGLCPGNNESAGKRKSTSVTKGNPYIKSMLCEIAWVIAGKRNTYLSAWYWRIKQKKGAKKAIVTLARKLLVIIYTMLKQGTLFDESCFETRRKHCEQKQLSRYIRELEKHGYHVEAQS

SEQ ID NO: 336856 - protein, 447 aa, unidentified
MTHRIGPSRGDRRRNARKARLRGLIPREFAIVGVDLADRKQVFAVCDHDGGVHGRRSVNKRAWQLDETLGWAKAAAVEAGFAGVVVACEPTGHRWRVMLDQCDELGLTMVCAPPMLVHREREREDLTPDRSDAKDAVLIAGLAAQLRCYEPERPTAQWARMRHLGARRSELTTACGVVRQRMRSLLECVWPAALATAADPLASMTWRATMAVICARSVDGDPAAIRRMGWPRFQAAVRRELPRWGGHRVTWTIARELWDATTDPTGVMVHRHGALERVADALTDWQRLRVQRGAVEARMVHLLDELNLTSLVTTIPGLSAVGAAAILAETGDPHRFDSGRAVVKHAGLAPRDNESGTFKGTSRVSGRGRPELRLAVWRAVWGALPHNAVLSARHHHLRTREHNRLTDHQARVAVAGSLLRQLHAVIVGGVAWDARTAAGRQEVIAAA

SEQ ID NO: 336857 - protein, 369 aa, unidentified
MKKNSKNNKEKARQKALQAKSRKMKLTVGIDLGDEWSHCCFLGEDGEIVEECRVKTTREAVKSRFGELKLAVIALEVGTHSRWVSQMLSEFGHEVIVANARELRAITGSDRKSDRVDAEELARYARVDRRILRPIKHRGEEAQVDLVVLRARAVLVKTRTQIVNSVRGMVKSFGYRMPKCSTERFVKLNNEVPEKLREHLAGLMEVLEHVQKQIEEYDQRVEKLAKEKYPETTVLRQIWGVGEITSVSYVLTIEDKGRFEKSRDVGPYLGLRPRRSQSSESDPELRITKAGDCFLRSLLVECAQRILSKKGPDTALKQFGLRIEARGKKKAKKRAIVAVARKLAVLLHKLWVTGEVYEPFPETTVRKAA

SEQ ID NO: 336858 - protein, 409 aa, unidentified
MRYYVGVDWADQTHAVWVVDASGTKITARTVPHTAAGFSEWGRELDEWRAQGIERWAAIERPEGRVVDFLLDHGVVVYPVNPKALDRARDRFRQSAAKSDPFDARVLADFLRTDYLHLQALQPSSDGAQELKLLTEDCQRHIRQQTRLVNQLTTTLKAYYPRALEVAELTTALAREFLQAYPTPDALTALTTRQWQRWARGRRLSEARIGALWAVLQQPPLPVPAHVVRAKARLMLSLVEQLTPVVAAVAQYRKAIDDFFASMPAAQWARTLPIGKHGITAPTLWARLGDAPGRWESFRHLQAQAGTVPVTKRSGKHRSVHFRFACDKSLRHVVDQVAFLSLLSSAWARAYYEQQRARGHAHHQALRALGAKWLKIIFVMWHRQVPYDEQYHLATMARQQLRQRQQQIA

SEQ ID NO: 336859 - protein, 338 aa, unidentified
MKVTTLGIDVAKSIFQLHGVDEHGKVAIQKRVTRGKLLETVAQLPACVIGMEACGSAQYWAREFQKLGHTVKLMSPQFVKPYVKSNKNDSRDAEAICEAVSRPHMRFVPLKTVESQDIQAIHRMRSRLIKERTALGNQVRGLLAERGIVLAQGITRLRKQLPVIVEDLANELTPLSREVMQELYEQLVTLDERIARADRLVQRVFTENAQCQKLAHVEGIGPVIATALVAAVGNAQEFANGRHLAAWLGLVPRQCSSGGKERLLGISKRGDRYLRTLLIHGARATVHRARRKTDARSRWIVSLEQRRGKNIATVAIANKNARIAWALLTSDAEYRKAA

SEQ ID NO: 336860 - protein, 349 aa, unidentified
MIHVGLDMHKHFSKIETMDDSGRVLQKTTLYHDNKEAIHHYFRSLDKPATVAMEATRSWYWLYELMVEEEMEVKLAHPYKTKLIGEAKIKTDSIDAHVLAQLERTGFLPEAYVPPKSLREQRELLRYRLLLVLTRVRFKNRIHDIIDKLGIVHPYSDLFGTRGIAFLQSLSLPGLYQEELHRCLELLHFLDQKILEAEKDMKAILKEDPRAKLLMTIPGVSHLTAYLLLCEIGDINRFPSSEKLCAYGGLIPSTHQSGEKAYHGSITKEGNRYIRWALVEAAQKASRKDPALFVFYEKLKRNKGSGVALVAVARKLLTAVYHILKKGEPYRFRPIDKHYPGKPVGLSDH

SEQ ID NO: 336861 - protein, 408 aa, unidentified
MERYYLGVDWADEFHQVWVSDPEGNKVIEKKVVENVEGLTEFGRWLDENRAKGIELWAAIEKPHGRIVDFLLDHGVVVYPVNPKALDRARDRFRMSQSKSDSFDAYVLAEFVRTDHGHLRALEPNSDPAQELKLLTRDQYRLVRQKTRLLNQLSRTLKEYYVRPLEIFSDLETNIALDFLQEYPTPQALAKLTRRQWNRFSKREHHLGEDHCKELWEKLNQPQLEVPEHVVRAKARLLAVLVVQLKTLRDAVESYNKRVKSFFACMPAAELVRMLPGAKTGTIVATLWAELGDAKSRWESFRHLQAEAGVVPVTKASGKSRVVQFRFSCNKIMRHAAYWLAFVSLNRSEWANQYYRDQRAKGHSHHQALRALGAKWLKIIFVMWRDHKPYDENIHLANITRQKMRQAA

SEQ ID NO: 336862 - protein, 356 aa, unidentified
MNLIKERRPKMNLSNNNKEKNIYQYDQYIAIDWSQVNVAIARMKKNSIEPKKIEMDSNIKEVKKYISGIKGSKILTIEETTSTHWLYVELKETVDKILVCDPYRNSLLGTGPKNDKIDAGKLCELLRGNFLHEVYHSIDEDYRIRKLSSAYEDLVKFGVRLKNQKSAIYRAEGLRYKKDDLPDNPILQFIEENQNEGIGLYENKRKQYHSYFDKLSRKNELINNQEQIPGIGTISAVTIYAIVIQAARFEDKYKYWAYCGLVLNNKESGRRSYGKRKPRCSRKLKGIYLSAAMSAIGGTSDIAEYYNYLLQSGLPARESRRAVARHIAKISYGMLKTGEKYVPYKWRKSKDKEEIK

SEQ ID NO: 336863 - protein, 427 aa, unidentified
MDFTQNERLKQINEYTLIIGIDIAKHKHVARAIDDRGIDLSKRLIFPNSKEGFKLLLEWAKELSAQTSRPNLLIGMEPTGHYWMNLAYFLKSHGERPVVVNPMKVKKSKELDDDSPTKNDTKDAKVIAQVMRAGRYHEPTLPEGVYADLREGVKLFDIIQEDLSSIKAQIHNALDRYFPEFLNVFKKWNGKTALYLLKRGYLPKDIQQKTEDELLKEVKTSVTKNIGIERMRQLKKAAASSIGLTVGLRMAREELRYLVDQYELLNARLEALKEELEELVRLVPGADSMMAIKGVGPMTVVGFFAEIGDLSNYRDPRQIIKLAGLNLMMNQSGKHKGQTTITKRGRRRLRTILYQVARPLAFHNKGFKALHNYYKHRRNNPLKGKQSYVALGRKLIKILFAMGTRKCAFSEERMLRDIPHITDVQVA

SEQ ID NO: 336864 - protein, 343 aa, unidentified
MNEIKVLGIDLGKDVCSVVGFDGAGKVLLRRRMRRDSILKLASGMPTCVMAMEACCGAHHLGRLLREQGHDVRLMSPEYVRPYVKAQKNDDRDAEAIAEAATRPTMRFVDLKSDEQLDMQSLHRARDRLVGERTTLINQLRAILLERGIVMAKGRRKLELRLDQLFSGEVTISRRIRLLVEDMRVQWRALDERIGAFDAEFVAIAREDAATKLLSTIPGVGPLNATAFVASVGRAETFGRGRDLAAWLGLVPRQMTTGGKPRLLRISKRGNGYLRRMLIHGARAALPSLAKGRTLLGEWLRGLLARTHMNTAVVALAAKMARIIWAVLRSGRPFQVEATPPAG

SEQ ID NO: 336865 - protein, 424 aa, unidentified
MKVTFQTCCGVDVHKSFLVATIIKTTGGIEPSYQKRRFSTFNNSILEFKKWLLENECLYVCMESTGKYWIPVFNLLEDEINVTIANPKWVKAVKGNKDDTKDSKWIGDLFRLGLVRGSYIPCKKIRILREFTRYRYKLVSCRSSEKNRYQNALTVCNVALDSVVSDVFGKSSTSIIDYLLEQSGTSIDHEVIASKLLKRLKAKEDAVIESIEGYQMTDSQKYRMHLVRAHMDYITAAINDVDSEIESLIASDPDYENAVELLCTIPDVKYDSAITIISEIGIDMSQFCSSKRLCCWAGLTPGSNESAGKKKSVRITRAGVYLKPALVQCAHAAVKSDKSPYYKKKYESLVERRGKKRAIIAIARMILTAIFQMLTTGETWNPCDLYKIDMPEALLEKQKQKAIKQAQKLLIREGLLPPTEPIAS

SEQ ID NO: 336866 - protein, 418 aa, unidentified
MKKRSGSQTYWVGIDWGKEQHAVSIVDGQRRLVTQFMVQATLRGMERLGDTLAALDSVEGIAIETCRAQIFYYLLSKRYRLYPINPKLSKQWRDGTSVAGIKTDARDGRVLAMELARRHEELRAYSQTDPVTAELLGLCNKQRSLIDQRTALVHQLREALNAFYPAALDFFDDLTSPTAWAFFKRFPNPQTLAKSRKQTLLSFLRAHRIGLKPLWLERVENRAAALDWPKVPGALAEEEMMLACVAQLIALQARLNHLEKLIEQYAAPLPETKILRTLPGAGPCLGPALCAMVRSVDVQAEGGEALRCLSGIAPVDESSGKRRRVRIRRRCNKKWRTTLHLFAWSSATYCRWAKAFYDLCKERGDNHATALRKLADKWLRIIKRMIETGESYDDERYVQALRATHSPVYDRLCAKLGG

SEQ ID NO: 336867 - protein, 378 aa, unidentified
MLAEKEVAAPAPSIATDPIFIAIEMSRSKWVVGTHIPTSTKVGIHTVEWGDAAALLGLVDRLRSRAADIVGIADVPVLCCYEAGYEGFWLYRRLAAAGLRALVLDPSSLLVNRRAKRAKTDRIDAKAMIRALMAYNRGEDQVLSAVNVPSAEQEDHRRLVRERQSLVYDCTAHTNRIRGLLLTQGIVGFDPRAIGAELRLDELVTGDDRPLGPRLKDEIRREIGRLRVVLEQLKDVSAERNAIALGTKTDVPQCDQGSIDADAAMIVREAFWRKFNNRRELAAWSGLAPMPWASGTISRDQGIAKTGPAIFRSHMLQIAWRWLQHQPQSSLSQWFNERTNGAAGRVRRVMIVALARKLLVALWRYATTGLVPTGAIIA

SEQ ID NO: 336868 - protein, 340 aa, unidentified
MEITAIGIDLAKNVFQLHAVDRAGRPIIRKKLNRSHILSFLANLQPSLIGMEACGSANYWAREIKKLGHEVKLIAPQFVKPFVKSNKNDAADAEAICEAVQRPHMRFVSPKSIEQQDIQSLHRVRSRRVAARTALANEMRGLLSEYGLILPVGIQNLRKELSGLLDKARQEEKITPIGFDSFTLLLDELRDLDKKILSIEQKIDLIHRQSEVSQRLVSVPGVGKITSTAIVSAVGDAKVFKNGREFAAFLGLVPRQHSSGGKDRLLGISKRGDVYIRTLLIHGARASIRFLEKQPESASKRWLNELIQRRGKNRAIVALANKNARRIWALLAHNEEYKAA

SEQ ID NO: 336869 - protein, 324 aa, unidentified
MIDGILGIDVSKNTLDVSIAICTKVRSKSFANSSDGWRLLLDWLIAQNIQRVHACLESTGRYSLGIAYALYEAGHVVSITNPAQIRDFARTKLGRNKTDGVDASHIREYCELFKPSPWEPPTQAHRRLGELQTIRAGIIAGLTEWKNRKNSGIVDVEAQALADATISHFTSQLGAVDEAITRTIDNDCDLRSKRDLLLSISGVGETLAGVVLAELPGPDVLRSSAEVVAYAGLNPRQYQSGTSVVRATRISKIGNAVLRAALYMPALSAMRYNLAVVALVTRLKSQGRLKPKQIVVAAMRKLLVLCFGVLKTRRPFDAAIAMGC

SEQ ID NO: 336870 - protein, 368 aa, unidentified
MSVVSMPRGEVKWVGLDVAKDAIAVGVLDGVSEATPRLEKIAHDEVSIRRLVSRLGGPGRLRACYEAGPTGYELYRLLGSMGVACEGIAPSLVPVAPGDKVKTDRRDARRLVRLFRAGELVTVRVPTRQEEGCRDLSRLRAAAMVDRRRARQRLGSFRLRRHLVYRDGRAWTVKHRRWLRSLAFDDTGTQVTFAHLLASVEERELRVDAIDTDLARFFEAGLFVNEVARLGAYRGIAPLSALGLACEVCDWRRFPAPGKFMGFVGLVPSEYSTGASTSRYGITKSGNAHVRNILVEAAWAYRYPARVSPELARRHEGVAPDVIARAWNAQVRLCGRFRRLAARKDRRTVVATAIARELAGFVWAEMTA

SEQ ID NO: 336871 - protein, 363 aa, unidentified
MKAQVIKQNVGSDISKDDFKVNFHQLLSTQHIRIKGSRTFKNTLTGFRVFVAWVEKLRDLSVEVRITMEATGVYYEQLVHYLHHQTDYHISVVLANTTKAYFKSLNLKSKTDKIDAKALGQMGLERDIEKWEPLSDQIRILKQLTRDRVNLLNQKTALSNRLHALNYSYLPHKQVIKRLKQQIRLIQKQLKEVEKQIQQLINTDSIIKERIDKICQLKGLGLVTVATIIAETGGFVLFTSRAQLISYAGYDVVQKESGSSVKGKTRISKKGNKHIRRALHFPAMTAIKYDPGLKHLYDRVFDRSKIKMKALVAVQRKLLLLIYTLFKKNQAYDIDYEKDSSKHNEDKAITKSCRQDTLPAYAG

SEQ ID NO: 336872 - protein, 401 aa, unidentified
MESPIVSIDVSNGNSHYMCFIKNNKRFGKVKKIDHDIEGFKRLLEDIQKLEAETNEKVCAVFEATGVYTKPLERFLSKNSIKTYIINPLESARKRKEEIHNKKTDKLDPISISKVYYDKEEMMELTKKDETHNWLRKKNRLYEDQLNHLRKYKVTFQNQLSICFPGYLDLFKNGYSDIPMTILKKYPHPDLLKNKKAETVARYLEKNTCHTHKVSLEYALKIIEFAKKTYPGCEKDDVEVEIFKILLDKVIETQRECEKTLNEMITVASTLEEYRYILSIDGIGPNLAARIIAEIGDIEEFKSREALVAYAGLDPHIYQSGDQDGKHLKISKKGNKYLRCLLFLAVGCSIRGAKDNPVNRFYQKKKQQSNPLNSKAAKTACTAKLLKIIYGICKNKTTYER

SEQ ID NO: 336873 - protein, 451 aa, unidentified
MTNAKRRHPERDFTPTHPNAAAIDIGSRMHVAAVPPDRDPEPVRAFGTCTGDLQQLADWFERCGVRTVAMESTGVYWIPVYELLEQRGFEVVLVNARDAKHVPGRKSDVSDAQWLRRLHEYGLLRASFRPKGELAALRAYLRQRERLLDYSASHIQHMQKALMQMNVQLHHVVTDMTGETGMRIIRAVVAGERDPAVLATHRDRRCHASEEEITAALGGNWREEHVFALGQALELYDAYRAKVVECDLRIEMVLRRLRDAAAKPAGRLPPARHRDKTANAPAFDARAALHAVLGVDLTQIHGLGPSLALKLIGECGTDLSAWPNAKHFTSWLCLAPANKISGGKVLSTRTRRSGSRAAALLRLAAVTVGRTQTALGAFYRRLSARVGKAKAVTATARKIATLFYNTLRHGLDYADPGASYYEDRYRARVLANLRRRAKALGYMLHEMPTPG

SEQ ID NO: 336874 - protein, 356 aa, unidentified
MSRDIKYIGMDVHQEAIVIAVLNGSGKLVMETILETKASSILQFIHGLRGELHVTWEEGTWAAWLYDLLQPQVQQVLVCNPRRNALLKEGNKSDKVDARKLAELLRTGMLRAVYHGENGLRTLRELGRSYQTISKDLTRVMNRLKALYRGWGIPCAGTQVYAPRYREEWLSKIAQVGVRRRAELLYQQLDGLQALRRNLRPEFLAESRKHKAAKLLRQIPCIGPIRAARLIALMQTPHRFRSKRQLWTYSGLGIETRDSAQYRFVRGQLQRSKKPQQLRGLNQNHNHEMKEIFKSAATRASCGRGPLRDFYTALLAKGMKPEMARLTLARKIAAITLTLWKKGGRFDAEQLKTQAA

SEQ ID NO: 336875 - protein, 388 aa, unidentified
MQIAADRPQASTAIRTDLGAIFVSLELSRSTWLITSLSPGGGEKMSKHSVRGCDVAGLLERFAQLQEKARARTGQRFPIIVIQEAGLDGFWIHRMLNAEGIESHVVDPALIATSRRRRRAKTDRIDGEALVRTLLAYKRGEPRVCSMVKAPTPEEEDRRRLCRERKVLTAERVLHVNRIKGLLFSQGITGYEPLRRDRRERLEQLQTGDGHTLPDHLKGQVRRELDRLELLLNQIKAVEAERDALLAAERAAARTPAAMLLDIKGVGPEFAAILWSEGLFRHFDNRRQVAAYAGLAPTPWQSGSVDREQGVSKAGNPRLRTTLIQLTWLWLRNQPHSALTLWFHERVRRNGGRLRKTTIVAVARKLLVALWKYVTAGVVIEGAVMKPT

SEQ ID NO: 336876 - protein, 393 aa, unidentified
MICVGIDVAKDKHDCVILNSEGKILAGVFTIPNNADGFDTLLQKIRSCTSSEDKIKVGLEATGHYSYNILGFLINQGLPTYVINPLHTNLYRKSMSLRKTKTDRVDAKTIATMLMSNVDLKSYTDTAYHNEELKSLTRYRFDKVRERAQLKQSVSRLVTILFPELEKLVPTLHMSSIYALLIEFPGAKQITEAHLTHLKSLLKDASKGRYGRDMATEIRDAAKHSIGSVMPAKSLELRHTIRLIRELDSEIEDIEAAIEAIMEELQSPITTIPGMGFRMGAMILAEIGDFARFDSPDKILAYAGMSPSTYQSGQLSLAGTYSHMEKRGSRYLRYALYNATKYVCHWDPGFAAYLAKKRAEGKHYNVALSHAAKKLVRLIYAMEKSRQPYKRAA

SEQ ID NO: 336877 - protein, 340 aa, unidentified
MKISTVGLDIAKQVFQVHGVNEQGKIVLQKRLKRREMAEFFANLPPCLVGMEACGTSHYWGRQLAGFGHTVKLMTPRFVKPYLNREKNDANDAAAICEAVGRPSMRFVPLKSAEQQALLVLHRARSGLVRARTGASNQVRGLLLEFGITLRIGRREVAARLPEILEDAENGLPPVAREGLAVLGRQLKDLEQRIAEIEHAISVWHQSQEASVRLAAIPGIGVFSATALVATAGDATVFKNGRQFAAWLGLVPKQHSSGGRIRLAGISKRGDRYLRTLLIQGAHAVLRHRSPGADTWLDHLVQRRHPNVAAVAIANKNARLAWALLAHQRQYQSDFVSCAP

SEQ ID NO: 336878 - protein, 338 aa, unidentified
MFTIGIDPHKCSHLAAVLDERGTLLEQLRVRADCHQRERLLKFATSYSPRVWAIEGARGLGALLAQQLVAAGETVLDVPAKLSARVRVLDNECADKNDTHDARAAAIVAINNRRLVRVGPEDHAAVLRMLAKRHHDLHGRRTQSICRLHALLATMTPGGLPRLLSADRAARELRRIRPTDSVGAARRQACSELLGEVRNADRELEALHTRIVAGVRAADTTVTNVYGVGPVVAAVLIGYTGDITRFATKGHYARYNASAPLNASSGPRPRHRLNNRGNRQLNHALHMAAVTQISHNNTGRAYYQRKVAEGCGDKEAPRALKRRISDAVYARLHADATR

SEQ ID NO: 336879 - protein, 335 aa, unidentified
MQVYGIDLSKEKFDVNFIDAKGKEKNQEVKNAVVSISKYLSSVSEDSILCAEHTGAYGDLLVYLCNQMKVPIALVPGYTIKHSLGLLKGKSDPLDSKRIREYGERFTDKLEYAEYAEESITELKQLYTLRHQLVKQRKALRTVDKGRGHLPLQSISVHNHTITILVELDKEIATIDEEIEILIKLDPEMKENYELVTSIIGIGPVIATDLIIKTGNFKTIDTHRKASSYAGVCPFPNTSGKMLGKSKTSPFADKKLKSLLYMGAKAAVKYNKEYKLYFQKKELEGKPYFLIMNNVSNKLLRTAYSVVRNKTPYDKDHVCLDPRERNINSSTKKVA

SEQ ID NO: 336880 - protein, 362 aa, unidentified
MDNATTPIGEGSLTMGLDLGDKHTQVCVIDASGDIIEEARLRTTPSALRRRFAALPEARLILEAGTHSPWVSRLLEECGHEVYVANPRKLRLIYQNDSKSDRVDAEYLARIGRLDPTLLAPFRHRQAATQADLAPIRSRDVLVRARTRLINHVRGAVKSGGGHLTKCSSPSFAGKALAHVPEELGPALTPILEMIETLGVQIRSYDRAIEELARDRYPETQLLRQVPGVGALTALTYVLTLEDPARFPDPRAVGSYLGLRPRRADSGDLSPQLHITKAGDEMLRRLLVGAAHYILGPFGPDTDLRRWGLGLAERGGTRGKRLALVAVARKLSVLLLRLWATGEAYEPLRNSARKGQSLPSSA

SEQ ID NO: 336881 - protein, 373 aa, unidentified
MPDVSSNQPADVRLWVSLDVHKLSIVAATLPPTGGLPEVQRIETTRVAIRRFIERLGSPEGLAVCYEAGPGGFDLLRVLTELGVACDVIAPSLIPIRAGDRVKTDRRDAKKLVRLYRAGELVYVQPPTPETEGLRDLMRCRDDLRRARTAARHRVSKQLLRHGRIYRDGKSQWTKMHRGWVARQRLDDEFAQAALEQMLIHLDGLDRQLDALDRDLEQIARTGRWAETVQILTRFRGIATRTALGLISEIGDFHRFGHPRELCAWLGIVPTEYSSGDQRHRGHITKTGNHHARRLLIEAAWSYQHRPRRPDRGPEPDARAWQAQIRLHRRYRHLTTERGKRSTVATVAVARELAGFLWAAATNQPFALEAAAA

SEQ ID NO: 336882 - protein, 312 aa, unidentified
MDKAPTFVGIDVSKRRLDIHSRPSGESFTFGYDDESVAALIERLVAVAPALIVLEATGGMEVRLAAALAAAGLPVAVVNPRQVRAFARAMGQLAKTDRLDAAVIARFAEAVRPPVRPLPDEATRHLGALVARRRQLLEMLVAERNRRHAADPALYERIDAHLRWLEEALAEIEQDLDKAVRESSIWCAKEELLRSVPGIGQVSARTLLAELPELGSLTRRQAAALVGVAPFSRDSGKMRGRRTVWGGRARLRACLYMAAVAAARGSNPVIAGFYKRLRLAGKPAKLALTACMRKLVVTLNAMLRTNTAWKQA

SEQ ID NO: 336883 - protein, 337 aa, unidentified
MIGIDPHKASHTAVAVDRDEQVIGEFTLEASGCQVRQFTDWADRFTKREWAVESANGLGYLIARQLVAAGETVFDVPPVLVARVRVLGSGKSQKNDPNDARSIAIAALRSDRLATVRPDDHVTVLRLLVKRHRDMARLRNKHCSRLHALLGEVEAGGIGVKISVTNASGLLDRIGVVDEATRYRVLVAREVVEDITRLDDALKASKNRIADAVAASGTSLTDIVGVGPIGAATIIGYTKDVTRFPTRGHYATYNETAPIEASSGGHTRHRLNPRGNRTLNHAIHIAAVTQLRHDTNGRIYYDKKIADGKTPEEATRAFKRRISDAVYPRLIADTDRQ

SEQ ID NO: 336884 - protein, 418 aa, unidentified
MDVVHACCCGLDVHKQSVVASLRRAVTGGVRATTTRTFATTTEALTELATWLAAQGCTHAVMGSTGVSWKPVDNIVREQAPQVDVAVVNAAQVKALRGRKTDVQDAAWLAMLLQHDPLRPGFIPSREQRALRDLTRTRTTPTDERSAVVNRVQKVREDADIKLAGVATDVMGVSGRAILAALLAGTADPAALAALAVGELRTKRAELERALDGRMRAHHRVLVAMHLGHIDVLDEQIAELDRRIAEATRPVAEVIARLDTIPGVDVRTAQVLVAEVGVAVAQFPTAKHLSAWAGMAPGNNLSAGKRRDGKTRKGSTWLRRALVQSARAAARTKKEGQTAFAEQDRRLVVRLGPKKAAVAVGRAILTTAYYLLAHETTYTESARVRLADDRRRRLERRALAQLAALGYHVTLAPKEPAA

SEQ ID NO: 336885 - protein, 377 aa, unidentified
MSKLRFVGLDVHADTIAVAVAEVGGEVRSLGIIPNRLESIRKMIGKLAPIGTLKCCYEAGPTGYVLYWQLAQLGVACEVIAPSLIPTKAGDRVKTDRRDAEKLARCYRAGELTPVWVPDANHEALRDLVRAREAAKKDQLRHRHRLGKFLLRHGKRPSDAGKAWTQKYLNWIRIHVHFEQPALEATLKHYREEVDHIAERIVKLEQAIDEAVKQAPPEIRAVIEALQALRGVAQTTAATVVAELGSLSRFASPSQLMGYSGLVSSEYTSGNRVQRGPITKSGNAHLRRVLLEAAWTYRHRPNVQGRVLRRQRSLALSEEARQIAWKAQQRLHKRFAALTARGKESNVAATAIARELLGFMWAIAVHTEAQQKPAKAA

SEQ ID NO: 336886 - protein, 334 aa, unidentified
MEWTVAIGIDTHKEVHVAVALDALGAELDSREIATTPAGYQSLLSWAQELGVPAFSVEGTGSYGAGLVRFLEQAGINVYECERPRRQERRRGKSDLIDAALAARRLLGGEHLSIPRGGGRREDLRLLLLERRSAMRARTAALNQLSALLVTAPDHLRSRLGALSGERLACAAARLRSRPDVLNGVLRRLGQRVERLSTEVADAERALAEVAPDLLEECGVGPVCGAQLLVSSGDPSRMTSEASLAALAGTSPVDASSGKQRRHRLNRGGDRQLNWALHVIALARIRHHGETTAYYQRLLAAGKTTREARRCVKRALARHFYRRLCEIPTLPLTT

SEQ ID NO: 336887 - protein, 343 aa, unidentified
MELYVGLDVSLKQTSICVVDGDGRVTTEGTVLSAPLPIAEFLRAKAGSVKRIGLETGPTTTWLWHELRALGLPVICVDARHAKAALSLRINKSDRHDALGLARIMQCGWYKEVQVKSLPCHEVRAVLSSRAQLVKAKCDLENQIRGLLKNHGLVIGKASGQIFHRRAEELLGEYRLLHEAVRPLLAVHEVVRREIAGLTRKLITLARNDHDTRRLMTVPGIGPINALAFCAAIDEPSRFRRSRSVGAYFGLTPRRYASGEVDWIGRISKCGDAMVRTYLFEAAGVLLTRVPRWSKLKAWGHRLWKRIGFKKAKIAVARKLAVILHRMWRDGTNFIWSTKGAVA

SEQ ID NO: 336888 - protein, 351 aa, unidentified
MMNITTVGVDLAKEVITVCSMDTHGHVLKTRDLRVTEFSAWLLQLPANTILGMESCSSAHHWARKMQTMGLVPKLMAAEFVQPFRKSRSSKNDHNDAEAIAIAVKQPQMRFVTIKTEAQQARLAWHRCREGWKEERTALINRTRGLLLEFGHPLARSSKAFTIGLQAALHHDALPTQFRTLLTHVQQQLQQLDQQLAQCDRSIALSAKQDEPSQRLQAQPGIGPISADALTATVGNARDFKNGRQFAAWLGLTPRQYSSGGKTKLGRISRRGDAYLRTLLVQGAKSTLQSVLKKAPHLLSHMQQWILKLYGRVGYHKTLVAIANKHARQVWAILTKGEAYDQDAWKRIVST

SEQ ID NO: 336889 - protein, 395 aa, unidentified
MRFVGIDVGAERHVVASVDAVGAVLLKPTGFSEDAAGYQHLRTVLGSATDTLVAMEATGHYWKNVFAVLVTQGFAVALLNPLRTRRFAAEELQRTKTDAIDALGIARFAAQKRPVASRLPDPATEELRERLRYRDRLSQDFGNRERQLHRLLDLGFPEFPGHVHDVGSELATAILRDYPTAAAFQGVSVRRLGGLRYDGRYPVGAELAAALLAAAAASVGQHHGPAYQVQVRDACEDLDIVRRRLRTLDRDIERLLERHEVGTLLTTIEGIGPQTAARLVATFGDFSGVRSGAALACYMGAIPGLRQSGKRTSVRAHLTPIGAARLRAKLYMPVLSAVRYNPWLRAYYAALIARGKLPKVALIAAMRKLLHAVYSVATHRRAFVPHVGVPLEART

SEQ ID NO: 336890 - protein, 342 aa, unidentified
MVKNKVCGADIHKKFLVATILSIDGTKISERFGMKLDDILKFKEWVLENNCEQVAVESTGVYWVPIYTVLEDKIEVIVANAYQIKHTPGRKTDLRDSEWIAELCLKGMIEPSRIFPKEDRELRTLTRARESLVNNSTQMKNRIHQALESSCIKISSVLSDIFGKSGRYILDGLLEGKTIDEILLGVKSKKIRKKDQELREAIKNSLDLAQILVIRICLELMEEIQKKIKNFDTEIMSRIERMKEDVEIAMSIPGIAFTSASSILAEIGNYRDFENENKLAAWCGLVPKISESADKRIIGSITKQGSKHVRRMLVQVAHAISRTRNSRLKSFFLRLKAKKELK

SEQ ID NO: 336891 - protein, 345 aa, unidentified
MKIVGCDLHTRYQQIAMLDEETGELVERRLEHAGGEARAFYAELSGGVRVGIEATGHTRWFERMLGELGHELWIGDAAQIRAAMVRKQKTDARDAAHVLEMLLSGRFPRIWRPTMAERDLRQLVWHRQKLVWMRVAVSNQLHALAMGEGVCRKKKLFTKKGRVELESLTLDRWASYRRQELLKMLDQFDESLNDLDQAVAEQAAQDPAAVLLMTHPGVGPVTSLAFVLTIGPVGRFQRSKQVVSYLGLNPREHSSGGRQRLGSISKQGNPMMRSLLVEAGHSAARLDAELKQDYQRLKARRGSGVAKVAIARKLAVRMYWMLRSQASYAQLVRMQDSPWATLVKE

SEQ ID NO: 336892 - protein, 322 aa, unidentified
MSVPILGMDIAKQKVAVALLVDGKIKHKSFRNAPEGFEDLTLWLGKLGIQRVHACLEATGNYGEALAIYLHEAGHTVSIVNPARIKGFAQSELVRTKTDKVDAGIIARFCLAMQPESWVPPSPEIRSLRALARRADSLIDMLTQEKNRLGTAHESVIPRIKKHMEYLDKEIEEVRNQIADLIDRDPDLRHKKDLLASIPGIGKATIAVILAELDELDKFSHVRELVAFIGLAPKETLSGSSIKGRPRLCKTGHARLRKALYMPALVSIRYNPLMIAFYQRLQARGKNGKVIVCAIMRKLVHVIYGVLKSGKMYDPNHKPVFA

SEQ ID NO: 336893 - protein, 309 aa, unidentified
MKKEEVVYCGIDVAKSHLDIALCGERWRVANTQTGIGGLVERLKAAAPKKLQVICEASGGYEQALLGALPEAAVPVTLVQANRVRQFARACGILAKTDRIDAVVLASFGQALKPLPSPAPPLHLLRLRELDRQRCHLSRLLVAEQNRLAQLRCAQLRRLARSLIGKVQKQIASIDQRIASLIEQDQTLSAKAKKLTSFTGVGTRTAALLLAQMPELGRLNRRQVAALAGVAPYNRDSGSMRGKRCIFGGRRALRSGLYMAALAAARRNHILAPFYQRLLAAGKPPKLALTAVMRKLLIALNTALSPYPA

SEQ ID NO: 336894 - protein, 347 aa, unidentified
MLHAGLDLSRKKLDVCLLSDRGEHLDQLAVPPDVDSLRRLARRIEEVHCEPVCAVIESMTGARIVHDTLEQQGWSVEIADAQKVKGLAPLACKTDKIDSMVLAVLSHRDLVPAIWLPDPSVREERELARFRLHLVKHKSALKNRIHSTLINFGKPCPVTDLFGLEGRRLLKRLQVPEPWRGNITASIELIDDLERQIAEINRRLKEGHAEHPYVPLLLTVPGIGWVLAFTIAAEIGEIERFPSPEKFTGYTGLCPRVNQSGEKDRRGPLTKHGPTYLRWALLEATMHALRHPAYAERYQRTKRRLGKQRGAKVAQVDIARRLAHAIWHMLSRKEKFAPRGAAFRLAA

SEQ ID NO: 336895 - protein, 331 aa, unidentified
MDRIFHDEASVRRLVARLGDPTVLRACYEAGPTGYELYRLLVSLGVRCDVVAPALIPRRAGDRVKTDRRDAQRLARLHRAGELTAIRVPSPAEEAVRDLCRARADLVADRRRVRQRLKAFLLRHGRVYRGGRAWTQQHQRWLAAQSFDDSALRLTYAHYRSVLEARDGELAAIEADLMGWCDREPLSDTVHRLAAYRGIGDLSGLVLAAEIIDWRRFATAPLFMGFTGLVPSEYSTGEATRRGHVTKAGNRSVRTTLVEAAHAYRHRPAVGATLKTRQRRVEAVTVARSWTAQQRLCGRYRRMSAQHKPTGVIVTAIARELAGFCWAEMTS

SEQ ID NO: 336896 - protein, 359 aa, unidentified
MFYGIDLHTDSFKIAILGEKTEKITVKTVNLKTDAFTQFLNTLTEEDYMVVEASTNTFWFVEQVEKRVKEVYVVDPFKFSIIANSRKKTDKIDATKLAKKLKYYVCYDQSADEFPTIYIPCKDVNELRSMFTTYEMLKKQACMTKNRIRSLFSQNGIFNFTGENLSYNHVQEKIKELQLSASLSAQLRILLSLLNTQEDEKENIKAEILIKGKIFYREIKILTSIRGVSPFLAIAIMSDIADINRFPNAKKLCSYLRTAPRIDASGNKEYVGKVNKQSRTLTASLMTESIKHFIDSSDRLHKFYFDKRKGKSAGKVRIAVMRKIIVIMYNMLKEEKLYYYKDEKNYAAKLKQYESILAA

SEQ ID NO: 336897 - protein, 461 aa, unidentified
MSRERSKKQKRAGQGGAVPSLNCIEPNAAGIDVGATEVFVAVPQDQDPSPVRSFETFTQDLHRLKEWLQQCRITTVAMESTGVYWIPLFQILEEAGLEVCLVNAQHVKHVPGRKSDVIDCQWLQYLHSVGLLRASFRPEDRVCVIRSLLRHRDSLVQMAAAAHVQHMQKALTQMNVQIHHVLSDITGQSGLAILDAIVAGERNPVVLAQLRHSRVQASEEEVVKSLVGDYRREHLFTLRQSLEAYRYYQRLTTDCDAEIEQQLQNFDGHLPPDAPALPPARYPHSPRKNEFRFDMRSELYRIFGVDLTAIPSINALTGYTLLAEVGTDWSKFRNIHAFASWACFCPHNKKSGGKVFSAKTRKSANRVNRALRLAAQALERSTSYLGIFYRKMCARLGRPAGITATAHKLARIIFHMVTTGRAYDESIFAAEEQRQRKHLESSLRRKAAKLGYQLIPLPQTA

SEQ ID NO: 336898 - protein, 356 aa, unidentified
MSHDVKYIGMDVHKEAIVIAVLNESGKLVMESVIETKASSILQFLHGLGGELHVTWEEGTWAAWLYDLLQPQVQHIVVCNPRRNALLKEGSKSDKVDARKLAELLRTGMLRPVYHGENGLRTLRELGRSYQTISKDLTRVMNRLKALYRGWGIPCAGTHVYAARSREEWLSKIPQAGVRRRAELLYEQLDGLQILRRNLRPEFLTESRKHKAAKLLRQIPCIGPIRAARLSGLMQTPHRFRSKRQLWTYSGLGIETHDSAQFRFVSGQLQRSKKPQQIRGLNRNHNHEMKEIFKSAATRASCGRGPFHDFYAGLLAKGMKPEMARLTLARKIAAITLTLWKKEERFDAEQLKTQAA

SEQ ID NO: 336899 - protein, 441 aa, unidentified
MAMRKREEEVVFPNAAGIDVGASSHWVAIPRHAAEQTVREFGAMTDDLHALADWLLVCGVDTVALESTGVYWIPLYEVLERRGLTVWLVDARQMKYVPGRKSDVADCQWLQKLMSLGLLRAAWRPGDEVCVVRAVVRQREVLLSEQASWVQRMQKALVQMNLQLAEVLTDVMGVTGQAIIRDIVAGQRDPAVLAKHRNCRVKANEADIKRALTGNWREEHLFVLTQALAMYDSLAQRIVECDAKLDALLAGLKRHDVELAGSAKRAGKNTPGFDLRAALARWAGVDLTRINGLAVTSVLTVLSEIGPDLSRFANVKHFCSWLGLCPGTKISGGKVLSARTRRSTNRVRQALKLAAMSLSRNGSALGAFYRRLCARMDKPRANTAVAHKLARMIYFMLTRGEDYVDQGQQHYEEQQRQRSIAALKRRAADLGFAITPAAAAA

SEQ ID NO: 336900 - protein, 434 aa, unidentified
MIGIDWGDKKHAWALQAGDSTKIEKGEIEHTPEAIQQWAAELRRRFPSGRLAVALEQSRGPLVFALSKYEHLTLFPIHPSSAAEYRKVFRPSGAKSDGPDAVLHWDMLARHRDKLRPLNPDTPETRALQLLTEDRRQLVNERTRYSNRLTANLKSSYPQLLQWFDDLYAPVTLDFLEQWPTLEELQKAKPGVWSKFFQEHRCRDAKNQQLLAAIPTAVTATTDFAVVTAGRAGVCAAVRLLSNLNQAIQEYDRQIDQLAKGHPDFALFQSLPGAGKVLVPRLIAAFGTQRDRYQRAAEIQQYSGIAPVTEASGQQRWVHWRWSCPKFLRQTFHEWAAQSIAQCDWAAAYYRVQREDKNKSHHAAVRSLAYKWIRIAFRCWKDRQLYDGSKYELALKTRAKATPEPKQPSSFPLPLRWISCAGFHKLAEKNEENT

SEQ ID NO: 336901 - protein, 413 aa, unidentified
MSLFVGIDVSSSDFKVRILDERGNEPVKRLRALNDQPGCEQIARYLSEACAKVNVDRLVIGLEATSVYSWPLQMFLAEDHCLAPMHPQIYSFNPKVVANFKKAYVDLPKNDWIDAWVIAERLRFGRLPEGSQVDFRYLPLQRLTRFRCHLIEMISREKNYFLTNLFLKFSTLAQGSVFSNTFGATSESLTLEFFSPEEVAARPLDELIDFLMEKGRSHFEDPEAKARELKEAARKAHRLRGSLLQPINLILATSIETIHALEKQVKKIDKAIEAEIRHFPNTLITIPGIGPVLSAGIIAEIGDICRFPNEGALAKFIGLTWRSHQSGDFTADDTPLTRTGNTYLRSYIIQAANLVRQKEPEYKAFYQRKFSESKTHHHRRALVLTARKLVRMVDALLRSNQIYMPQGNRGNAS

SEQ ID NO: 336902 - protein, 342 aa, unidentified
MQITTIGLDIAKNVFQVHGIDAAEKVVVRKQVRRSQVLGFFEALPPCLIGMEACATAHYWARELTKLGHRVRLMPAKDVKAYVKRNKNDAADAEAICEAVRRPTMRFVQIKSVEQQGRLMLHRARDLLLRQRTQGINALRAHLAELGIVAAQGREGIKELLKIIANEEDARLPVDAQASLIVLAAELQAMQTMIGSIDKRIVAQHRSSEASRRLESIPGIGVTGAAAITATIPDPKVFRSGRDFAAWIGLVPRQDSTGGKQKLGPISKRGDRYLRRILVVGACAVLRYARQQPQKYLWLTQLLARKPFKVVAVALANKMARIAWALLAKGGTYRAHALAAAV

SEQ ID NO: 336903 - protein, 355 aa, unidentified
MKEYSMVVGLDLGDTYSRYCALDSDGEIEGEGRIRNTEKGVRGHFGRLEPCLVAVEAGTHTWWICRLLSELGHEVVVANTRRVRAISQNERKSDKADAEMLARLARTDRRLLYPVKMRRERAQTDLAMLKARDALVGARTKLINTVRGLLKPFGTALPRCSSHAFAARVRPLLPAEHEEALSGLLDLIGELTRRIDEYDKKLEAMVKKEYPEAGLLQKIPGVGPLTSLGFVLVVDEPARFGSNRDVGAYLGLTPRRDQSGGSDPQLRITRAGNGFMRRLLVSAAQHIMAHESADGELRRWAWKLAGGEESRDKRRKKRAVIALARKLAVVMLSLWKSGSCYESFRGVTPKAEPVP

SEQ ID NO: 336904 - protein, 412 aa, unidentified
MQAIIERCCGLDVHQETVVACLLIGAAGARARKEVRTFRTVRRELEALRDWLKAAGVTHVGMESTGVYWRPVYAVLEGHVELIVGNARHIRNVPGRKTDVKDAEWIADLVRHGLIAKSFVPPPPLRELRELLRYRRKLIEAQAAERNRLLRLLETANIKLASVMSDVFGVSGRAMLKALIAGSAAPEEIAALARGQLRRKRAGLIEALTGGLEEHHRFLLAMQLGRIEAIEADVATLDARIGERLLPYDAEMALLMTIPGVNWLVAAVVIAEIGTDMSVFLSVHHLAAWAGVCPGSYESAGKQKSGRARKGNVHLRTILVGAAISAARTKGSYLRDKFHRLKARRGALRAALAIAHKIVVAAYHMLAGGLAYRDLGDAYLDQIGERRTIANLKRRLERLGYQVTLEPKAEAA

SEQ ID NO: 336905 - protein, 407 aa, unidentified
MIFVGNDWSEGHHDVCVVTSDGQVVARDVFDEGIDGVAEFHALMADLVEDPDEVAVGIETDRGLWVDMLVACGYHVYALNPKSVARFREGRTLSGAKSDRGDAKMLADLVRLDRYNHREVAGDSNQVGALKVMTRTHQTLIWERQRATNRLRAGLVEYFPAAVKTFDDLKSRDAVAILTVALTPAEGKALTMAGITSALKDGGRQRYIQLTADKIRNGLQVPHLEAPEPVTAGYRAAMAPLVGMIGLLNTQIDELANEIKTVFRKHPDAAIYLSLPGVGDVLGARLLAEFGDDPERYVDGKSRRNYAATSPVTKASGTQRSVHARWIRNDRLHDAVIQIVPTAARTSAGFNALYRQRRAQGDTHTKAARRVGNRFVGILHGCLETRTLYDEQTAWGHRFEQQNRKAA

SEQ ID NO: 336906 - protein, 339 aa, unidentified
MKLYAAFDLHGNNNFLAIIDSNGKRIFGKRLLNDRERIVDALRPYQKDLIGIVVESTYNWYWMVDALKEKGYSVHLANPSAIQQYGGLKHTDDEYDSFWLAELLRLGILPEGYIYPQAERPIRDLLRKRGHLVKLRTSLIISLQNIISRNCGMKLNVNEVKVLKEDRVHPLLQDNADLALAGKVSKEAIDFLTRQIRTIERVVEGRIELKGSYGYLLTLPGVGKILALTIMLETGPVSRFAKVGNYVSYCRKVSSHWSSTGKLKGGGNKKNGNRYLAWAFSEAAELARRYEGGPRTYYQRKMQKTNFMVAHSALAHKLARAAYYVMRDQVPFRPEKLFS

SEQ ID NO: 336907 - protein, 415 aa, unidentified
MALKIVYQICCGIDVHKTFVVACIASTNKQGVTTYKRHHFSTFTQGLKELLQWLLDNHCKDVCMESTGKYWIPIYNVLEKDCNIVLAHPKYVKAIRGKKTDKKDAKWIADLFKHDLVAGSFMPPADIRQLRDLMRYRFKLTCFMSSEKNRLQNCLTVSNIQLASVVSDTFGKSSQRILDKILENPDDTSFDIEPLIHGSMKKKLPELELAIDGFITPEQAGKLKVIKKHFEDLESRKAELEKLILALASPYQQELDLILTAPSFKNKFTAIGIISEIGVNMEAFPSAKHLCSWAGLTPTNNESAGKKKSVRVSKAGCYIKPLLVQCANSVVKSEKHPEIRNRYLRLRKRRGHKKAIIAIARMLLTALYNMLKNKEPYNAELYRKSDVLPVNREITIEQAILMAQFQGYKIKSAAE

SEQ ID NO: 336908 - protein, 381 aa, unidentified
MEYYITIGVDVSDKTSKICVMTKDGGKRRVLVETTCPTTRGGFSECFSKFDRAWPAVFETGAHCRWMKAHFESMGFKAIVANPAEVKLITESNAKSDRSDARKLARIALADIELLKPVRLRDEKHQHMLRLHEARQLLMRFRSSMICQMRSFAKSCGFRLPDCATEWFHEIDKSKWTDDYEQTVWPVLHVIETVNQKIAAYDTMIEKLANTPVFKAQVERAKEVYGVGTVGATVVVAAIDGDPERFKHARDVGPYFGQVPKTFQSGQSDPQLGMTKAGNDLVRKVLTECAHVVMKSSAKDTDLKLKGLKIAARGGRIAKKKAIGAVARGLAVRIVALLKDPKREYVPLSEEGRRGFERYRAEQEYIAMRNDKRSMTETAQD

SEQ ID NO: 336909 - protein, 427 aa, unidentified
MPYRIAGIDVHKTMVAVAVADVEVEGDWQFERRRFGASPSQLRLLTAWLVERQVEEVVMESTAQYWRPVWDALERDWQPTQRTRVDAKPTSGALHLAQAQSNSGRHGRKRDFPDAERLVKRLSAHELTLSFVPDVTQRLWRTATRRKYQLTRNRVQLQNRLECLLEEAHIKLSSLVSDLLGSSARRMLRALASGETDPATIAALGSARLHATAEQLCDALGAATDLHPLYRRLLAMTLAELEVIETHMQQLDEELAGLLRAHQDAVQRLAAVPGLGVDSAQQIIAEVGPTAETFSTAKRLASWVGACPGHDESAGINHSHRSPNGNRQMRRLLNQAAHAAVKTKGSIFELLYRRFVVRLGHAQAIGAIAHRLCRLVWKILHDGVTYEERGPFVIKARAQRRAAKMIRELRSLGYRVEPVLAPSSNRA

SEQ ID NO: 336910 - protein, 309 aa, unidentified
MKEELVYLGVDIAKSHLDAAIGAQKHRFCNDTVGHRQLVRWIEQTEAAVQVICESSGGYERRLVQALARARIKVSLVQANRVRQFARAAGILAKTDRIDAEVLCEFGKVMQPQTVTAATLEQEHLRELESQRRHLTHLLVMEQNRGARVSDASVVRLNRSLINQIKKQIEKLDLLIKEHIEQSPRLSAKAEKLTSIKGVGLRTAALLLAQMPELGQLNRREVAALVGVAPFNRDSGKMRGKRAIYGGRRFVRHGLYMAALVAARHNPILRNFYLRLRAAGKPAKLALTATMRKLLIVLNSALKRDLRYA

SEQ ID NO: 336911 - protein, 302 aa, unidentified
MQTIAVVGLDLAKTVFQVHGVATDGTVVVRRQLRRGQVLAFFQSIGPCLIGIEACASAHHWARELMAIGHDVRLMPPAYVKAYVKRGKTDAADAEAIAEAVTRPTMRFVAVKSKAQQAVLMLHKTRDLLVRQRTMLINALRGHLGEFGIVAPQGPAGVRAALKSLREEGQALPDLAHAALGGLAEQLEHLGAEISRMERRILDWHRQDETSRRLATIPGIGPITASAMAASAPDPSLFRSGRQFAAWLGLTPRANSSGGKERQGGISKMGDSYLRRLLVVGATAVLRMARQRGREGLSLIHI

SEQ ID NO: 336912 - protein, 401 aa, unidentified
MNAVGIDVSKGKSMVCAMRPFGEVVLEPFEVLHTAQNLNDLAGKLKALDGETRVVMEATGNYHKSVAFVLHDAGLFVSVVNPVLIHDYDNNSLRRVKTDRKDAVKIANYTLDKWTRLRPYLPEDDTRLALKNCYRQYQQAVAIRTMLKNNLISSLDMTFPDANKLFTSPAKSNGCEKWVDFIGDFWHSECVSILSVDNFAKKYLKWCQKNRYQFTRSKSDEIYACAVNAASLPKSPTSKLLIQQQVAQLKAVSQSVAAFQQEMLRLSQQLPEFDTVMEMYGVGPSLGPQLMAEIGDVRRFSSKKSLIAFAGIEPQPNDSGKIVGNDKGISKVGSAVLRRTLFLIMTVILQNQPQDEPVYSFMDKKRSEGKPYKVYMMASANKFLRIYYARVKAIMDSTNTN

SEQ ID NO: 336913 - protein, 416 aa, unidentified
MSDQDKVASIDIHLKVLMAVVGSRQGEAMASECKLERRRFGTMASDRRCLLAWLQAQGVKEVVMESTGQYWKPIWWELEPYMRLHLAQAFSNRAPRGRKGDFRDAERLLRRLVAGELILSFVPDPEQRAWRTMTRTKTQLARERVRLYGQVDGLLQEMRIKLSNVLSDLFGASGLRILHALAGGETDPKKLAALGDDRLKCTEEQLIDALTGNVQAMQQKLLELYLQRLELVEEQIEKLKGMIAQALKGHQEVVARLAEVPGFGPDSAQQVVAEVGVQASAFPSAANLSSWVGACPGREESAEQNYNSRSAKGNKYLRRVLTEAAQAAVKAKGSHFQAVFRRLLPRLGYKQALWAVAHRLCRLVWKILHDGVHYIEQGEYRDPKAKKQRAQALARALRKLGYDVVIVPTQPATANA

SEQ ID NO: 336914 - protein, 412 aa, unidentified
MEVVYPCCCGLDVHKKSITACVLWAEAKGKSRKEKKRFGTFTHDLLQLADWLAQCGVTHLAMESTGVYWKPVWNILAEQFEVLLVNAQHIKAVPGRKTDQKDSEWIADLLQHGLLRGSFVPPQPTRELRDLTRYRVSLVQEINRIANRIQKVLEDANIKLASVATDALGASGRAILEAMLAGEQDAARLAEMSKGLLRNKIPELKLALEGRMTEHHRFLLRQLFEHLRFTESKRSEIEQEIDRRMLPFEDKVTRLCTIPGVDRVTAWGMLAEMGMNMNQFPSSGHLASWACLCPGSFESAGKRLSGKMRKGNVSLRRCLSQAAWAISMMKNNYLSALYRRIAARRGAKRAVMAVAHALLEIAYHMLKRKEDYRELGADHFDRMDVNRIRRSLVRRLERLGHKVTLEPLAQTA

SEQ ID NO: 336915 - protein, 416 aa, unidentified
MMTESYRIFVGIDWGADAHQVWVTDAAGTAVGEQTVDHTGTAIAALVDWIVGLAEGDARAAAVALETPRGPIVDACLARGCQVFAINPKQLDRFRDRFSVAGAKDDARDAEVLSSAVRTDRRAFRHVTAEDPLTVQVREYSRQDTELGEDLRRLANRLRDHLLRTWPELLRLVPAADEPWFWALLKRAPTPVEGRRMRPAQVRQLLRDHRIRRITAEALLTVLRAPSVSLAPGVREGVRVRILDLVDQLPVLARQRRAAERRLATTLEAMTQGPDGESVREHTDVTVLQSLPGIGTRIAATMLAEAADALRDRDYHALRLLAGAAPVTKRSGKSCVVIMRYACNHHLQTALYHWARGCMQRDPRSRAHYAQLRRAGHGNARALRGVADRMLTVLIAALKTHMPYDATRRRPWAAGA

SEQ ID NO: 336916 - protein, 343 aa, unidentified
MDNIGLDLHQRESQLGILTDDGEVIERRIRTTPERLRALLGGRPPARILLEASTESEWVARQLETLGHTVIVADPNFAPMYATRSGRVKTDRRDARTLADALRVEAYRPAHRSAEGHRHVRAELAVRETLVRTRTRYVGLLQALVRRDGLRLPSGMPEHTATRVAAVPVSPMLASELAPLLALLPALNAEIAAADQRLAAGLAANAVVQRLATVPGIGPVTATAFVATLDDITRFASAHQVEAYLGLVPSERSSGERQRRGRITKAGNTRVRWLLVEAAWRILRSPRADAAPLRAWAERIALRRGKRIAAVALARRLAGILYAMWREGTTYQPQRTAAPAAVA

SEQ ID NO: 336917 - protein, 436 aa, unidentified
MDIVHPRVAGIDVHKKVIWVAVRLPGEAPGQRAVTVRRFKTFWRSLQEMAAWLAGLGVTDAAMESTGVYWWPVYHALAGAGIEVCVCNAAHMRNVPGRKTDLRDCQWIAELHEYGLLRASFIPAAEVAALRQRTRYRKKLIEQRSSELQRLSKVLEDGGVKIDSVASTLTTASARDMIEALIAGQRDPAVLAQLARGVMRKKIPELQMACDGRFTDSHAQMCRLHLDAYDHLAAKIAELDLLVAKAAEPFAAVITHLITIPGIGQRTAQVIVAETGADMARFASPARLAAWAGLAPGDNESAGKRKKAAARQGDRHLRAAMVEAAWTVSRTATRPGARFRRLARRFGRGNEKKAAVAVAHTLTCIAWAVMRYDSDYAEAGADYYDHRDARNRDHLVRHYQQALARLGYQVTLTPPGDGHSPSAATTTPATPPGQAA

SEQ ID NO: 336918 - protein, 406 aa, unidentified
MELETLHKRVIGLDVHQAQITACAIIEEADGTTRLEQRQFGAFKRDRRALAEWAQALHPDQVVMESTGIYWKSPYAALEAVGIHAWVVNARHVKNVPGRKTDVGDAHWLATLARAGLLRRSFVPPAMLRELRLVARQRQKLVGHLASEKNRLHKVLTDGGIRLGVVVSDLHGQSARAMVKALIAGRPTHEVLDCASGRLKASREELFDSLQSELTGSHRFVLHELMGHIEEIEERIARFDAYLLQGLAGEQHALASLQTLPGVDLIGAAMLLVEIGTDMQAFGSADRLASWAGICPGNNESAGKRQSGRARKGNPYVRRLLCEFAHAASRTTSVFKSKFQALVMRRGHKRSIIAIAHKLLRTVFCMLQRGEHYRDSATDYEALAVQRNAPRWIKALTKFGFIANPV

SEQ ID NO: 336919 - protein, 434 aa, unidentified
MHVAGHPLAGGTPEMTEFRTTTEQILQCVNRLREREVTSVAMESTAQYWKPVWIALEGKFELQLAQARSNKAPRGRKSDFADARRLVKRWRAEDLTLSYVPDAEQRRWRAMTRFRRQAARQRIQLQNQIESLLEEGQIKLSCVVSDLLGASGLRILGALADGETDTKKLAEMRDSRVRASEEQVRAALSGQLHPVHRRLLKLSLERVEQIDQQLAELELDLGQAMQAHQEAIARLAALPGLGVDSAQQVIAQIGPEAAAFPTSEQLASWVGVCPGRQESAGVSVRNRSPKGNRPMRKLINQLAWAAVKTEGSYFQLLFRRWVPRMGGEESDLGGGAPPAAADLEGAPPRSALRRTRSAGIEQGRHPTAQAAALARPARARLQSDPRTDPSAGLYRLIFEGVPETRFRGSCGHGHYEEDGRPGAPEPGGGAAGVR

SEQ ID NO: 336920 - protein, 364 aa, unidentified
METIYIGVDFHARQQTICYLKTETGELVTCELKHQDKEKVRVFYAQFQGQVVVGLEASGYSPWFERLLEELGCEVWLGHATEIRRRARWRQKNDRRDAELILDLMLHQEFPRLHRPAPESREVLRMLRYRQKLIKLRTMSKNSLQAIALQSGLAKGSGLFTKTGQQELSTAEMSPVMQWQREHWLQLLQPLNQQLRETMGWFKAQSKGDVCITRLRTHPGIGLLTSLCILHTLQPVSRFRNTRKVAAYAGFDPVERSSAERKCFLGISKAGSRILRYLLVEAAQTAVRKDEDLKRFYKRLAERRGRPKAKVAAARKLLIRAYILMRSTMRNSAVEPSQLGLPDEVTGLNVPEVLIGQPASPART

SEQ ID NO: 336921 - protein, 359 aa, unidentified
MASKVKNNKVNFKGKTVSVGIDMHKISWRVTALVEGDTVLAVTLARPSYDAFKKIISRFEGNHVRIVYEAGPGGFDLYDKLTEDGIECIVTPPSLIPTESGSRVKTDKKDSYKLARFLESGMLKEVWVLSPEERAHRQLTRTRRQIVNHRSDVMRQIKSLLLFNSIDVPFKSTQHWRGPFMNWLLKLDLGYEPLNRSLKALVDLFNYLSAEKKRITEDVLELAKKEKYAKRVALLESIPGIGTLSAMEILVEIQDITRFKTADELAAYLGLTPSQYSSGEHIRMGHITHAGNTRARTTLVESSWTLIGKDPEMKGKYQRIKEKRGGKRAIVAVARNLSGRIRRMLLDHVPYELNFQKAA

SEQ ID NO: 336922 - protein, 367 aa, unidentified
MMGWMAPLRHRRAKLGVLKNHQEWEPSMSEITTIGLDLAKHVFQVHGIDAQGTTVLRKRLRRGQLLAFFSRIPRCVVGLEACATAHYWARELGALGHEVRLMPAQYVKAYIKRNKHDAADAEAICEAVQRPTMRFVPVKTAEQQATALLHRGRERLVRQRTMLVNALRAHLAEFGIVAAQGLRHVGDLIAIVRDDCDTRLPDVARQVLQVLANQIEQIETAVAALERQLLAWHKSNPVSQRLASIPGIGPIIATAIATTVADPKVFRSGREFAAWLGLVPRQNSTGGKIRLGGITKRGNRYLRRLLINGASANLLRSKATKADPWVIGLRRRRPPLVVAVALANKTARIAWAVMLREKEYQPRAVAA

SEQ ID NO: 336923 - protein, 342 aa, unidentified
MDYFAGLDVSVKDTSVCIVDDTGKIVREVKVASEPDALLTVLRNPTYRFKRIGLEAGPLSQWLFSALGEANLPVICVETRHMRAVLKAQINKTDRNDARGMAQMMRVGLYRPVHVKTLRSQKLRMLLTHRKLLQSKAIAIENDLRGTLRNFGLKVGIVGRTKFEARIAELVEDLPDLAVLVEPLLIVRRVLREQIAVLHRRLLTIVRDDEVCRRLMTTPGVGPVVALTYRATVDAPARFRKSKSVGAVFGLTCSRDQSGERDRPGAISRCGDEMMRTMLYEAAQSMLRSTRWSWLKAWAMQIAKRRGMKRAIVALARRLAVILHRIWVDGTEFRWTREAAAA

SEQ ID NO: 336924 - protein, 340 aa, unidentified
MGQVVTIGLDIAKSVFQVHGVDAEGGLVIRQKLTRARLLKFFEKLDPCLVGIEACGTAHHWARELIGLGHDVRLMPPSYVKPYVKRQKNDMADAEAICEAVTRPTMRFVPVKSPEQQGVMVLHRTRSILIRQRIQISNAIRSHMAEFGMAAAVGRQGLQALIVIVEDSSDARVPAEARGCLGMLAAQLRLVNEQILDTDRLIRTNARSTEVGRRLMEIPGVGPLLASALVGTIADPKAFKTGRNLAAWVGLVPKQNSSGGKERLGGITKQGDRYLRQMLVVGALAVVRYAVRNGTRRPWLVQLLARRTPKVAAVALANKTARMVWAIMTSGERYREPVAA

SEQ ID NO: 336925 - protein, 338 aa, unidentified
MVVIGIDPHKGSHTAVAIDEDERKLDEVLVRADKRQLERLLAWAEAFEKRSWAVESANGLGALLSQQLVGAGEEVFDVPPTLSSRVRVLGTGKSQKNDPNDALSVAVAALRSSRLRLVVAEDHVAVLRLLWNRHKNLTSLHTQAVCRLHALLAVIVPGGMRRRLSADQASAVLAGIRPRTMAEGARKGQARDLVGDVRRLDAQMKASKHTIAEAVAAVPTTLGELSGVGPIATAIILAHSGDIRRFPDADAYASYNATAPIEASSGPRKRHRLNPRGNRQLNHAMHIIAFSQLSHAGPGRDYFERKIAEGKTQKEAVRALKRQISNAVYRQMMRDAQR

SEQ ID NO: 336926 - protein, 432 aa, unidentified
MRKIRKHAAGIDIGSKKVFVGIEKAEVKIFDTFTEDLENLGEYLKTHKITSVAMEATGVYWVILYDILASKGLDVWLVDGRSTRQVPGRKTDVKDCQWIQQLHSYGLLNRCFIAEELVQELRSYQRIREDHIRSASMHINHMQKCLILMNVRLKEVLSQIHGASGMRIIRAILVGERDAEKLTEMCHTSILKTKRSLVIKSLKGHYHPSGLFGLEQAVKCYDFYKQQIAQCDEKLDEVLKRMKGKDQKLIIENTSRKPIRHHKPNVKNMGQHLLRIFDGKDATVLPGITDYSWMQLLAEVGTDLTKWKTQKHFTSWLGLAPKQNNSGKRNRNYKSKGTPKAGLIFKQAAVSLISSKNIALGSFGRKIRAKKGGLVAIKAVARKLAELYWKLFVKGLKYVENGIKKYQEKIMLNKQRAVIRMAKEIGMTIDYV

SEQ ID NO: 336927 - protein, 403 aa, unidentified
MNSVGIDISKGRSTIAVMRPFGEVVISPFEVRHTGSELSKLAKQLKSLDGETRVVMEATGNYHASVAKLLHNAGLYVSVINAKLVHGYGNNELRRVKTDRKDAVKLANYGLDRWLTLPRYIPEEDTRLLLKNCYRQYRQYSKVQTVLKNNLISLLDTVFPNANRLFSSPIRGDGSEKWVDFVAEFWHCRCVSEKSERAFTSKYLRWCRMHGYNFREAKAHTIYAEASGHIGVMPKSETTKLLVEQAVAQLRATSTALAALKHEMQSLASQLPEYPVVMDLFGVGPTLGPQLIAEIGDVRRFYSKKALVAYAGLDAPPNDSGDVTGRHKSMSKIGASSLRRTLFLVMSVYLQTAPLDEPVCQFMDRKRAEGKLYRVYMMAFANKFLRIYYATVKAYLESLEHTA

SEQ ID NO: 336928 - protein, 290 aa, unidentified
MNKNKQFCGIDISKDVFDVVDHNDNHHQYPNDQVGFKEFHKILTKKSHCVMEVTGSYYQCLASWLHSKSIDVSVVNPLSVKRFIQMRLKTSKTDKADARMIRLYGEAENPDLWLPPSEYIIEANELHRLVALLLRQRTALKNKLHGLNAKGVKKGPVITSIRRQIRNLDTEVSVLELKLEEVVKAHQADLITRLCSIPGIGKRTAIYLIVMTQGFEKFETSRQLISYFGLDPTIHESGSSVRGKSRISKTGNNLIRNLLFMCSFTACQHNKSCNEIYNRIIAKGKSKSWH

SEQ ID NO: 336929 - protein, 393 aa, unidentified
MICVGIDVAKDKHDCFILSSEGKVLADVFTIPNNAEGFGTLLQTIRRCTRPTDKIKVGLEATGHYSYNILGFLLDKGLPTYVINPLHTNLYRKSLSLRKTKTDRVDARTIAAMLMSDVDLKSYTDTAYHNEELKSLTRYRFDKVLERAKLKQSVSRLVTILFPELEKLVPTLHMASVYALLSEFPGARQVAEAHLTHLKAVLYDASKGRYGRDMATTLRDAARCSVGSVMPAKSLELQHTIRLIRELDAEIEDIETAIQSMMDEIQSPITTIPGIGVRMGAMILAEIGDFTRFDSPDKILAYAGMSPSTYQSGQLSLSGAYSHMEKRGSRYLRYALYNATKYVCLWDPAFAAYLAKKRGEGKHYNVAISHAAKKLVRLIYAMEKSKQSYRNAA

SEQ ID NO: 336930 - protein, 409 aa, unidentified
MEVVHPKCAGLDVHAETVVGCVRICEKARASYEVRTYSTTTSGLEKLREWLTQQGVTQAAMESTGVYWKPVWHVLEGAAELVLANAMQVRNLPGRKSDVSDARWLADLLAHGLIRGSVVPPTAFQDLRELTRTRSQLLAERGRHIRRIQKVLEDANVKLTEIVSDVMGVTGRALLEALMAGKPIDAALVTACRRGRMKSTTDEMVEALRGCVRSNHRFLLQMHIRQYDALTEAVGQIEQRLKGLIEPVRSDFERLTTIPGVKEATAYILLAEIGPDVSRFPTSGHLVSWAGLCPVNDESAGKRRSTALRKGRRWLKTALIQAAWPASRKTDSYLRAQFLRLRARRGPKKAIVAVAASILTAAYHILSRHVPYHDLGPRHFDDRDRDRTARRLVRRLQDLGLQVAIKPAA

SEQ ID NO: 336931 - protein, 430 aa, unidentified
MKSNTQNAKIEAITEKTLVLGIDVGSETHYARAFDYRGIEYSKKPFKFSNTEAGFATFKEWILDLKERHEKDKVVPGMEPTGHYWFNLGKFLQDNEMKPVLVNPHHVKKSKELDDNHPTKNDRKDPKVIAGLVREGRYMIPYLPDGVYADLRTASNIRFQLQAELTRIQNRISRWFNIYFPEYKTVYGKPDAKSGILILKAAPLPEDILTLGIDGVNQIWRDAKLRAVGKARAKTLIEAAEHSVGSKEGAVAARMEIRMLLEDYESRNIRLQEVMTLIEGLVKQIPMAEKLLEIKGVGIRTVSGFLAEVGDISRFNNPKELQKLAGLALVENSSGKHKGETTISRRGRKRLRYLLFEVAMSLVAKNPEFRELHNYYTTRRLNPLKKMQSLMAIAAKLIRVFYVMLTKGVNYDPKKMVNDIKRPAVYLQTA

SEQ ID NO: 336932 - protein, 429 aa, unidentified
MKPHQRQHLQRTRAQQAAAVVGVDAGKFRHALVVRRRGEPDSKPLTFATDRDGFEAAVEYITAISGGAAPSEVLVGIEFAGYYGFTLAHYLHQHGFQVVSVLPMHTKANKRIVHGMALKTDQKDAQNITDLVAQGKFTGFPFLRPVYAELRYLVSGRERLSTLRRGCISRLRTTLHIVWPEFETLFQKQLARRTPKALLRVYPGPGDFLAAPRRKVLKLLKEASRGHLGLEMYESLRREAERTLGLASAQGVLREEIVMLLDQLAFYEERMKGLEAKMAALMEPLPEARALQTIPSLTTVTAAIFLGSIGDPGTYSSSKEIVALAGLSLREHSSGVMVGRQRISKSGRPQLRQTAYMFAVRSISHDGIYRAAYDRLLARMGKQYAKKALVALSRDALKLMFSVARDRRTWTPEPPPPPRRNLALTEASA

SEQ ID NO: 336933 - protein, 366 aa, unidentified
MKQQHNRSEFTIGLDLGERRHRFCVLDGKGEVVEEGSLSNDRACLARLTARYCGALAVMEAGAHSPWISRYLEGLGWQVIVSNPRKVRAIYQHERKSDQRDALMLARIGRMDRALLYPVRHGSEEAQQDLLRIKLRDSLVRARVALINSVRFSLKSLGYPVSNPSSERFHKVAMEGLPEVVRQMIAPSVQALAELSARIAMLEREIRVLARTKYPQTLLLQQIPGVGAITALYFVLKIEDPHRFKNVRDVGAYTGLCPRRDQSGQSDPQLRISKRGDAYLRRLLVSAAQYILGPFGPQSALREYGLMLAADGTTRGRKRAVVAVARKLAVLLLSLWKNRSHYEAFPHWQTIEDKRSGTIAMHRVEA

SEQ ID NO: 336934 - protein, 340 aa, unidentified
MQAPRHIGIDLHRNQFKCCVRLENGRNYLTDWKLEDLPRFVKKLRPSDEIAVEVTGNTRLFRDAVAPYVARVVAVDPNQFQVISHSVKKTDPNDARNLALYLEKDLLPEVRMKDKTQAQLASLTQTRDTLVKLRTSLKNKVNNILSAHGINLEKEALSSEKKLNEVLAMKFDPMIRIELKVIVEQIRSLNQSIAELEKTIAAEGSKLEGHKNLTSIKGIGPLTGSILLSVIGDINDFADEGKLAAYFGIVPRVSKSNETERTGRITKRGSKLGRTALVQCALIAQRYSPYLKQFYERIKAKKGAGKAIIALARKLLGIIYRTLKNNWVFEDFPNFVLAEA

SEQ ID NO: 336935 - protein, 400 aa, unidentified
MRFFVGIDWASRAHAVCIVDQPGRIRWQGSVPHTTEGLTELVGRLRRFRGRLRVALERPSGLLVDTLVAAGVELVPIHPNALKATRPRYSAAGSKSDPGDAFILADLLRTDGHRFPALRPPSDDTRALRALVRGRDDLVRQRLALANQLRALLERFWPGAAAIFADVDSPIALAFLARYPTPLSAARLGEKRLAQFLGQHAYCGRRPVGELLARLRTAPASQVGEAEAEASGDLVRALVAVLTPLVGQVQHLSAAVTAALAQHPDGPLVQSLPRSGAVNAAQILAELGDDRARFPSDEHFAAEGGLAPVTHASGQHHAVVFRWACNKRLRRALTTFADNSRHASRWAALVYQRARGRGCRHQHAIRILARAGARILWRCRQDRAPSDVTRHRAAQALAAA

SEQ ID NO: 336936 - protein, 353 aa, unidentified
MRKIAYLAMDVHANHSVLGEMDFHGNFRGNQSFPTSEQNIIKALSAITAKEKYLTLEESNLAYWAAQVSSPYVTEVIPCDPKENALIYKSSIKKDKIDTRKLCRLLRLGELKRVYHPENDDRAIFKASALHYIDLRDQQIALKQKIKAMYRHWGIIDVAGEAVYSVEKRHEYLSQVKQVPIRNQLNRLYAVMDETESMQHKALKTMIALGRNYPEIKTFKKIPGIGDISAHVFDAFIQTPDRFAKRSKLWRYCRMGVTDRSSDGKPLGYRRLDRSGISEIKALIYQAWMSAMKGDNEVKQFYSNSLKRTHSRVHARLNTQRKIIAVMYGIWKKGEAYNPNLFLGSNDIVALYN

SEQ ID NO: 336937 - protein, 399 aa, unidentified
MLAVGIDISKSKSVAAILNQDGSMHTSPFEFHHTQPELDAFIKYILNSKQSATILMENTGHYHYPVLKAFQEAGLPVCMVNAYQIKKFGDMDLRKAKTDKKDAVRIARYALEKSYSLVPYTSMEQKYEDLRFLARQYNQRMLTLKTNKIFLLNLLDETMPGITNILPLTTRTPETSLSVLFIKRFKSYDRIKKMGKGRFLDAFEKIAKKSRNRQTKTYGLAIYEDALRNITTRGENEYTLAAQDQCLELVCESQKAADSIILKMQTLAETLPEYAVLRSMAGVGDRLGPLILAEIGDIRRFHSGKALNAYAGNDAPPYQSGTFESHNRHISKRGNAALRKYCFEVMQALKLTRPQDDPVYLFLLKKEQEGKPYNVAKMAGVNKFLRIYYARAMETLKQQ

SEQ ID NO: 336938 - protein, 361 aa, unidentified
MKCVQSNELDFSGQNIYVGIDVQLKSWSVAILSEHSVLKRFSQSPEPEALHKYLVNNYPGANYYSVYEAGFCGFWIHEKLMDLGITNIVVNPADVPTMGKEKLRKTDAVDCNKLARELRSGSLEGIYVPKADVLEMRSLIRMRNLIVKDSTRAKNRIKSLLRFHGVEIPKEFTRCSIGCWSKRFLSWLQAFELSTEYGKKTLELHLEQFIRLRKMLLQETRAIREISRKAPFDKPIRLLTSVPGIGVTTAATLMVEIDDIVRFCNAEHLASFIGLVPMCHSSGDNDSVGDITPRRHFMLRCLLVEAAWIAIRKDPAMTMAYTEYRKRMNPQKAIVKIARRLVNRVYYVLKHEKEYVPCVVK

SEQ ID NO: 336939 - protein, 350 aa, unidentified
MTMVGGLDVHRQQITFDYLDNDGLVHWGQIRPATRQGLRGWLVKHCPDGDGEFALEGCTGWRYVVEELAGAGVVAHLGDPAEIAALRGPKKRAKTDRADARLLRTLLLEGRFPESWIPLAHVVEIRTLGRLYCTLMEERRGWQQRIHAQLFHQGCPPITALLTEAGGEALAGAELSAAGRRCVDTALRRIDELSVEIQPLRTQLISFARRQAGCQALQRHYGIGWLCAAIIWAEIGDARRFSSSDQLVRFAGLDVTVYSSDCKRSPGHLSRQGSPELRWAAFEAAKCAARRGSPDHGYYRKLAAKRDGHNGKNPTLAVERKILRRCHHTLRELGDAALALPAPEREEVAA

SEQ ID NO: 336940 - protein, 403 aa, unidentified
MKSTTEKPQIERVQRVFIGIDYHKKYSTYAVIDEAGEHVERGRIDHRRPEDFKALVTRWPEVRVVFEATSNWHWLFEVLEEAIGRDRLRMANPFKTRVIAEAQVKTDKVDAAILAQLLRADLICAVHIPAKETRQRKEVLRQRCFFVRQRTRVRNRIHRLISGQHGLELPQLSDLFGVQGMSFLRKLQLPAPDGMLLQQQVALLGELQARITEDEKLLKQMHCEHPLLGHILSLPGMGPILGTVVINEIDDISRFTSAQKFCGYAGLCPTTSSSGGKTYNGKLFKHCNKWLRWAFIEAAWIAIRVDGSLGALYQRKRAVGKRPSLAIVCVARRLARITWQLLTQKRDFATNPPAQKNQGQPARTGAPAPAAGSAKGEGPIGRTAKNASVPRPCQLSPVAPLNV

SEQ ID NO: 336941 - protein, 444 aa, unidentified
MALSGMILIREVADAPVIMGISKPADLKSPCGEVKIMNPLFVGIDVSSKSNVAYLMKPDGSKHSSFSVQNNLGGAKLLSERIVSALGSMQLSDVVIGLEATSIYGDSLVYALREDGSLGRFQRKIHVLNPKQVRKFKEAYPDLPKNDWVDAFVIADHLRFGRIAKEVYMDDYRYQALRTLTRARFDVIQSLTREKQRFANYLFLKCSGIAQNKDIQNTSATTIALMERFETVDELANADLNELTAFISEAGRGRFADPDATAKTVQAAAKGSYRLPRTVNDTVNQAMAVSIASMRAMKEQVKVLDKAIEQQFEIIPNTLTSIPGIGKVYSAGIIAEIGDVHRFESQASVAKFAGLVWHKHQSGDFEAEHSQMIKSGNRYLRYYLLEAANSVRRCDSEFRRYYDLKFKEVNKYQHKRALALTARKLVRLVFRLLKDNRLYIPPEG

SEQ ID NO: 336942 - protein, 395 aa, unidentified
MTFDRRCTETAAIRSQLGAIFVSLELSRSTWLVTSLSPGTGETMSKREIRSGDVSGLLARLAELRRKALTRTGINHPIIVIQEAGLDGFWLHRVLQQEGCESHVVDPASIAAPRRRRRAKTDRIDGEALLRALLASKRGEPRVCSMVRPPTPEAEDERRICRERAELIEERVRHVNRIRGLLFSQGVTTYEPLRRDRRKRLVELRTGDGRPLGEHLKAQIARALDRLDLLLAQIKAVEDARDALLAQLAESRDEDRTEAAGAPPSPVALLMSLKGVGPEFAAVLWTEGLARSFANRRQAAAYAGLTPTPWRSGSVDHEQGVSKAGNRRLRTKMLQAAWLWLRHQPQSALARWFHARLPGMVGKAARKRLIVALARKLFVALWKFTSAGVVIEGRP

SEQ ID NO: 336943 - protein, 355 aa, unidentified
MKKSHFIGIDVHCQFCEIAVLNPAGKVVQRDRCDTTIPALVEAFDKVPRPCALVVEEGPMASWLWRNLHAEVDAMVVSEPRRNRLIAKEGDKDDDLDAEKLALLYRGGFIKEVHQVASLEQAVFKQQVALYHYRVRQRVREAHRITHLFRQHGVIIREKAYAATEDRPALLARLPAHGTLPEMVQWMWTSYDELVAQEEKWRQRLVGAAQQVELVRRLQELPGIGWIRAATLYAYLDTPWRFRSKEALWKYLGIGLERKHSGNGPEYVGVPRRTHRLLKCTILGAAKSAVAQGDNPFADLYRRWLEAGLTSKLARRNVARRLAATVWGLWKNSSVYHPEWVGVAAAAGTAVKVSR

SEQ ID NO: 336944 - protein, 355 aa, unidentified
MTASYDYHIGVDYHKSYSHLVVQDSSGKTLRSGRVKNDRQSLGGFLERYRENSHAVVEATRNWMVMYDWLDDICDDVVLAHPLKVKAIADAKIKTDKIDATVLAHLLRADLVPQAWAPSERARELRVALRERMFYVRLRTMTKNRIVTVFDRYPEQTAQLKKLGDLFGKAGRVQLAEVNVSEIDRVQINRGLAFIGDIDGRIKQSEATIRTMTKANANVKLLKTIPGIGEFFARLIDAEIDDINRFRNPKKLAAYAGLVPSTYSSGGKTFHGKIIRQGNKWLRWAFVEAVTPAIVSDAQLRAQYEHLKVRGTNKARVAIARKLLTIAFQILRDQRAYEPRGASPTEGASLISRLS

SEQ ID NO: 336945 - protein, 394 aa, unidentified
MKLIGIDIGKNKHFFCVMDQQTGEIISQPVSFSNDKEGFDFLVQKIKSYPKDSILIGMEDTGHYHFALLKYLLDLQYTVALINPKTTDFNRKMQGGITKNDKLDTINICDVLDTPELKKQYRITKVNSFDLYEQKQLTRHHHNLKEEKNVYKNRLQKCIDIVFPEFNKLFNSKYGIVYMNILKMFGSAENIANTDIRTIRKCFEIEGRGNRTSLTPERLKECARSSIGISSSAEVIQIKHLTAQIELIEEQLTEIDKKIEEFSIQNNSPILSIPGISHFSGTSILAELGDISNYSKPSQIIKFAGVAPLHYESSQFNAQHTAITKKGSKYLRKTLYQIILPVIRHNPVFNKYYQLKISQGKGHRCAQGHCVRKLLRIIYHLLKTNQQFDPQLLR

SEQ ID NO: 336946 - protein, 345 aa, unidentified
MDHVGIDVHKRESQLCILTPDGEVTEVRIATTRERFRGVLGSRPRAKVLIETSTESEWVARFLEGLGHELIVADPGFAPMYGMRTRRVKTDLRDARALAEACRSGTYRLAHRRSEQQRRVTNKLVVREALVRSRTSYVSVVRALLRKDGLRVPTGSAEHFPERVSRMGLPGWLQSEVAPLLAALVKVNEQLTWCDAAVENATKDDPAVALLRTAPRIGPITAASFRATIDNVERFHGPHQVAAYLGLVPREKSSGEKQHRGRITRAGDSRTRHLLVQAAQRIRYSRVPETLGLRVWAKRIEARRGKAVATVALARKVAGILFAMLRGGTPFDPIKQAGVPAVMAA

SEQ ID NO: 336947 - protein, 415 aa, unidentified
MSKIEITAVGIDVSKGKSTVAVRRPGGEIVMMPFTVLHTAEGLAELTNTLRSIGGEIRVVMEHTGMYWRPIALALKEGGFFVSVVNAMLIHDFSDNSIRKVKTDRADSLKIANYALTFWQDLRDYSVEDETRQMLKIQSRLYERTLNSSIALRNGLISLLDQTFPGANKLFDEQRTKAGHIKWVDFVRRFWHKDCVAASSLSTFVDTFQKWCKRTGYHYSLSDAERIHGIARNSVATLTKNDSTKLIITQAVDSLNAVYDTLQILRSEMQHLASMLPEYEVVMAMQGAGPITGPQLMAEIGDVRRFTSKGALVAFAGVDAPPFQSGTFDSKSRHVSKRGSPHLRRVLFTICSVILQHSDPENAVFQFMDRKRAEGKHFYVYTVAGGAKFLRIYYAKVKEYLRQHRTEKGTGCCQI

SEQ ID NO: 336948 - protein, 433 aa, unidentified
MTTAAYDLVIGLDRSDKKADLCLIDTRTGHRRHLTIDTAPEALWEWLAQLRQQHPQARVGLCLEQPAVHLIAFLETYPWITLHPINPITLQKYREAFVTSRAKDDTRDADYLADLLLSHQAKLPVWAPEDSQTRAVQQLVFHRRAVVDERTALSNRLIALLKQYYPQALTLCGEDLWRPLATAFLLKWPSLQAVQKAKPATLTRFYHLHGSRSQNLQEQRLALVEKAVPVTDETAVIDSFVLRVQLLARQLQQLHRTLSSFDERLAAVYAAHPDQDIFASLPGAGPVFQPRLLASLGANRERFAQRATQLQCYTGVAPVTKQSGGSYRVHRRYCCPKFHRQSFHEYAAESILWCRWAAAYYLQQRTKGNAHHTAVRALAFKWQRVIWRCWQDRQPYDDARYEAVLRQRNSPVVALFDQVKLGQSPWKNPVKKI

SEQ ID NO: 336949 - protein, 363 aa, unidentified
MSDGKPVGVGLDVHKSSVRLAAVCGGELLAEKTLAYDHEAVERELRAWPDARVCYEAGPTGFGLYRYLVAAGVDCVVVAPGLVPSRPGDRVKTDKRDARRLAALHAGGLLTAIFVPSPELEALRDLVRAREDARLDRMRARHRLGKFILRHDRRMPTTCWGVTRRAWLGRQAFELPGQQQAFDDYLFALDQVDRRIENLEAELSRLAQDGPHRELIARLRCIRGIDTLTAIGLAAEVGDFTRFATAEQFMGFVGLVPSERSSGDSRRQGSITRAGSAHARRLLVESAWHARRRPTVGYELGRRHRGQDPQVLERAWRCQQRLHRRWQRMAGRGKPSQKIVVACARELAGFVWAIATEQPMRTK

SEQ ID NO: 336950 - protein, 325 aa, unidentified
MQGKEASEQETRNCTAGIDVSKNRLDAHILPSSDSLSVANTSSGIRQLKRWLLKQKVDLIAVEATGKWHRELCRSLRASGLAVAVIDPYRVRNYAKAERILAKTDRLDAKVLAMFAATMKPDCRAPTPEVIEDMQELVTARANAVEEETSLQNQLGSAQTSFLKRQLARRVAQLKAHIKDIEQACLKQIKSDDVLARRYSILTSIPGFGTVVAITLIAFLNELGSLTNKQIGALAGVVPIADDSGERKGIRVVWGGRGIIRRMLYLAALSASRHNRDMKLFRQHLSAEGKAPKVCLIAIARKLVVLANILITQNRQWQPLAPQNA

SEQ ID NO: 336951 - protein, 356 aa, unidentified
MSTRLKYLGFDVHQTTISVAVVKADGKLVMQSVIATHAATILDFIQGLRGTLHLTFEEGTHSAWLYDLLVRRVARVVVCNPRQNALLKAGNKSDRSDARKLAELLRAGLLSPVYHGESSTRTLQELVRSYAALTEDTTRVMGRVKALYRSQAIACAGKKPYGRRHRPEWLSKLCEPGLHRRAERLYEELDALQGLRRVAKRELVMESRKHAAAKLLRTVPLLGAIRAALLIGRVQTPHRFRSKRQFWAYCGLALETRSSADYRFEDGQLVRAKKPVFIRGLNRNHNHDLKNLFKSAATTASAIHGPFREFYEGLLAKGMQPAMARLTLARKIAAITLSVWKKGESFDAEQLKPQAA

SEQ ID NO: 336952 - protein, 323 aa, unidentified
MRRVIGMDIHRTFAEVVFWEDGRLRHHGRVDMTRSGLEGFGRSLNMTDEVVVEATGNAMSVVRVLSPFVGRMVVANPMQVKAIAHARIKTDKIDAGVLTQLHASGFLPEVWVPDNRTERLRRLVARRNQVVRHRTRVKNEVHGILQAHLAPKCPHADLFNNRGRVWLERQVLPDDERAAIARHIREIDRLAEDLADLDGDIARDAVDDPQVRRLQTITGVNAIVATGIIAAVGDIRRFSEPQKLVSYFGLNPRVRQSGLGLAQHGRISKHGRSHAVNGHRSFRECGHSIFPGWRVKVSVISRGLDRWISLLLGGHAFSAAAVD

SEQ ID NO: 336953 - protein, 456 aa, unidentified
MVAGQELEQVEEPGELVARAAAIDVAKDSGMVCTRVPHESRSGRRVQKVWSVTARFAAVTELADHLACQGIERVVLEATSDYWRIWLYLLEARGLQVWLVNARDVKNVPGRPKTDKLDSVWLCKLNERGMLRPSFVPPEEIRDLRALTRLRTTLTAECSRHKQRTEKILEDALVKVSAVASDLFGKSGRAMMRALVAGERDPKVLADLALGRLQAKKAQLAEALTGRFREVHAYEIGLLLDLVGTLEAKIAELDTTIEAHLAALPGVPPACPDCGLIGGGHAPGCASHGTALLSLTERLDEIPGVGPRVAQVIIAELGLDTSQFPTAGHASSWAKLSPQTLQSGARTRPGKTGKGNRWLRGALGDAAMAAGKTDTYLGERHRRIRRRRGKQKAIVATARAILEIAWHLTGDQTLRFHDLGAGYYDKLDPGRQTRNKIRELERLNPGMKVTLAAAAA

SEQ ID NO: 336954 - protein, 420 aa, unidentified
MNKEVRAWIGIDWADEKHDVSLYEVATGRQERLEVKQSPEALAEWIGQLRTRYGNAGQVAVVLEQGRGALLNVLMGCEFLVLYVINPKSLSCYREAFYGSGAKSDPVDAELMREMVRQNPERFRAWHPDDVLTRSLRLMTEGRRDLVNQATAVTNQLTALLKGYYPQALRWIGALDTHWACDFLDQWPTLQALQSSSRRQILRFYEKHPRHHLDLEQQIQQFHQTLPLTGDEAVLQYSILMVQALIPQLRALLDSIDEFDRKIAEVFRKHPDRPIFESFPGAGAALAPRLTAAFGADRDRYAAASEMQQFSGIAPVTEKSGKQHWVHWRMACPKFIRQTFHEFADHSRRWSAWAKAYYQLQIQRGKKHNAAIRALAYKWIRILFRCWKQRVPYNEQLYLASLLKHQSALLSKSAPAVEKL

SEQ ID NO: 336955 - protein, 322 aa, unidentified
MIFVGIDISKLTFDVAVLIDGKYMSRQFENKQSGFLKLSQWIKSFKKPAYFCLEATGIYGLALAKHLYQNNQKVIVANPLQTHAFTKMEMARNKTDKADAMSIARYCQYLFNRGEIDKGLFIPRSPAFERVQFLVTRLDQLSKMKSQENNRSGVSLDKAAARSIESMLTFIDKQIVVIKKEITMIIKQDEQLTAQLKLLVSINGIGDKTAWALLAYIGDISLFENSKQISSYAGLNPSIDQSGTSLNRSSLSKTGSTRLRKSLYMPAMVAVRYNPLMLAFYNKLLTKGKPKKVALIAVMRKLLVLAFGVLKSGKPFDINYQH

SEQ ID NO: 336956 - protein, 322 aa, unidentified
MKTIANNPGIGIDVGKSELVTCIRHSNGAAEPPVAFANSSIGFRKFVVHLTNQKVQSDTPILLESTGPYHWNIARYLADEGYLSKVVNPLHTKQIARYSIRKRKTDKIDAGQLAFLASQNYGYAFVETKEIARKKALVRHYWKLKSVIGNLSKHERYLKQHRGITRATVTPYLIAKCESLKEKIIQDWENGNNLKYLDSIPGITPFLGATILAELAPLERFQRTEQIIAFAGLDPSVKQTGGKSGTHGKLSKRGSRVLRTTLYLAAFGAFNRSLRPLYDTYRKRGLRHSEILCIIARKILRIAVALLKKRRMFDPKYLEVIP

SEQ ID NO: 336957 - protein, 346 aa, unidentified
MMYAGLDLSRQRLDVHVLDEDGRTIEVTAVRPDADALRTLAVHVLRQGQEVSAAIESMTGARFVHDTLEFAGWDVAIADAAKVKGIAPLAAKTDKIDAWVLAELARRDLVPEIWLPTPEVRAERERARFRLHLVHHRTALKNRIHATLMTFGHPVSVTDLFGVAGRELLAGLALPEPWTTTLGTSLRMVDQLGAEIDACERDLRRLGADHASIPLLLTVPGVGWVLAYTIASEIGDIGRFSSPKKLTGYTGLCPLVRQSGNRDVRGPLAKNGPKYLRWALIEAATHAARDAHYRERYERTKQRLGRQRGAKVARVDIARKLAEAIWHVLTKNEPFAPAGPTMLLVA

SEQ ID NO: 336958 - protein, 346 aa, unidentified
MIIVGCDFHPGWQQVAVFDSATGEIREEKLENGNGEAERFYRRLPSPARVGFEASGNTHWFEDLLDSLGHEVWIGDAAEIRASYVRKQKTDRRDAAHILKLLIEDRFPRLWRPSQAERNLRQLLIHRHRLVGIRTRVKNGLQHLMLNRGVQLKQKLWNETGQKVLRELPLEGWAAQRRQDLLKLLSELNPQIAKLDQAVERTAYQHPRARLLMTQPGVGPITALAYVITMGDVTRFQRGKQVASYLGLIPSERSSSNRRRLGSISKQGNPFLRMLLVESVQTVCRLDEGFRKQYKHRCHRMKKGVAKVAAARKLAVRLFWMLRTNTAYPEIARIEGSPRHGVVGES

SEQ ID NO: 336959 - protein, 360 aa, unidentified
MECSEFKLELRAMDKILKQSLGFDVSQEKFDVALFVCGEDLAPREVASETFDNTKNGFKKLSQWYDKLIDKQLPIFACMEATGVYHEHLCRHMYTDPRVKVSVVLPNKSRKYIESLDWSSKTDKLDAKALSLMGLTRKLRLWVPPKELYRKLRRLTREREHLSIAHSAQINFIHAMETEFGSCEENLMRVKQLKELIHQQIKAIDKQIENIVNSDDELKQEVALLKTIPGVGQQTAVVVLAETNDFQEVERSKQLVSYAGLDIRQKESGKWKGKTKISKKGNRHIRAVLYMPALTIIRGNSRLAQYYKCQIEKGKHKMTAITAISRKLLVLMYGVWKTKTVYQDDFNLHLSQMASGNARD

SEQ ID NO: 336960 - protein, 355 aa, unidentified
MKTVKKLGSPAHIWEEPEQLPGPDKPASCKEGPERRQSLESEGPYVGIDVAKDRLDIAIRPAGDLWSMANDAPGIAEVVHQLAQLHPKLVVLEATGGLQMPVAGALATAGLPVAMVNPRQVRDFARATGRLAKTDRLDAQVLAHFAQAVQPTPYALADVQTQDLTALLTRRHQVIEMLTAEKNRLRAPRLESVRQRVQEHIRWLQQELNGLDKDLDHTIRQSPLWREKDNLLRSVPGIGPVVSITLLAKLPELGTLSRRQIAALVGVAPLNRDSGRMRGKRIVWGGRARVRAALYMAALSASRYNPVIKAFYQRLLTAGKAKKVALTACIRKLLTILNAMLKHGTPWRSLLPQTS

SEQ ID NO: 336961 - protein, 314 aa, unidentified
METLRTHVAGVDVHKDMLAITTMIGGEHEEVKIEQFECATMTEDLRAMGVILLERGVRDVAMESTGVYWKPVHNVWEPMGLKITVGNATHIKNVPGRKTDIKDSEWIAKLHRFGLIRPSFVPDGVYQRLRLLSRHRTNLVEDRSRVKNRVERVLQDGNIKWSSVVSDTFGVSGVKVLDLISEGFTNAQTLASGIVTRIKRMEDTEKALTNCLTTEHCYVIKELMWQYRHLEARIQEVENELVERMLPYAHLVEELDKIPGIDKILALGIIAEATADMSSFPDERKFAAWAGVASGNNESAGKKKDQNVGTGTRI

SEQ ID NO: 336962 - protein, 343 aa, unidentified
MQAVTTIGLDIAKSVFQVHGVDCNGQVVIRRQLKRRYVLAFFEKLAPCLIGIEACASSHHWSRQLLALGHDVRLMPPRYVKPYVKRQKNDATDAEAICEAVSRANMRFVPIKTPEQQSGLVLHRTRHLFIRQQTSVINAIRAHCAEFGIVAPVGRQGVEELLNVIADAEDEQIPEIARACLSALGDQLHRIKAQILEFDRMIGAWHRSCEASRRLDEIPGVGPALATALVASIADPRTFRSGRDFSAWIGLVPKQSSSGGKPRLGSISKQGDRYLRGLFTAGALAVIRYAKIHGIGHRPWLTALLARRPTKVAAIALANKIARMAWAMMARGERYREPVALAA

SEQ ID NO: 336963 - protein, 334 aa, unidentified
MEKITTVGIDLAKSVFSLHGVGEKGQVMLRRTVRRDQLVKVVAGIAPCLIGMEACSGAHEWGRRFQELGHTVRLMAPKFVAPYRKSGKNDGNDAEAICEAVTRPSMRFVPVKSAEQQALLAMHRVRQGFVVERTATINRLRGLLCEFGVVLPLRSVTVRRQAAAAAENLPALARRAIGDLLEQLRVLDERIGGYDREIEAQARLCEPAQRLMKIRGIGPTTALAIVATVGNAREFKNGRQFAAWIGLTPSQHSTGGKPRLGHISKRGDAYLRNLLVQGARSVLNSAGRHQDRMSRWILELQPRRGYYRTLVAIANKNARIAWALLAKNETLRAA

SEQ ID NO: 336964 - protein, 348 aa, unidentified
MALTIVEDTRAVTGGVDTHADMHVAAALDPIGGLLGIEEFPATAAGYARLLGWLDGFGTVALVGIEGTGSYGAGLARHVTAAGIRVVEVDRSDRQDRRRQGKSDPLDAVSAARAAQSGRARGAPKGRDGAVEAIRALMVAKRSARAERVQTINQARALVLTGPDDLRSRFAGHTAAGLVSGLASLRPRPGDVVGYATRIALRELGRRAEFLDGQLERLDELIVPLVTARAPGLLVLHGVGPDTAALLLIAAGDHPERLRSEAAWAHLCAAAPIPASSGKVTRHRLNPGGNREANHALWRIVITRMSAHPPTRLYVERRTKEGLSKKEIIRCLKRYVAREVYRHLRAVG

SEQ ID NO: 336965 - protein, 382 aa, unidentified
MPAYADPTPKPISADTIFLAFELSGTSWLVALHAPDADKVERHRLPAGVAAEVLGLIARTKARVTRRLGTTPRVACCYEAGRDGFWLHRVLEAKGIASHVMDPTSLQVDRRARRAKTDRLDAQALLRALMAWSRGEREVCSMVRPPSPEHEDERRLSRERGTLLKERLRLSNRIKGLCAAQGIYDYEPLGADRRDRLARLVTGDGRALPGRLAAEIGRQLDCLELVLRHLAEVEAVRDARAAQAREEGGSKLAALLRLKGIGPELATVLELEVFHRHFANRRDVAAYAGLAPSPYASGGTSREQGISKAGNRRARKALIELAWLWLRHQPESALARWYRDRVGTATGRVKRIAIVALARKLLVAIWRYVETGLVPAEAAVRT

SEQ ID NO: 336966 - protein, 393 aa, unidentified
MSLDHHFDEPTAIRTNLDAIFVSLELSRSTWLITSVSPGGGEKMSKRGVSAGNVAALLTRLSELKQKAFARTGKSFHVVAIQEAGLDGFWIHRVLQSEGVESHVVDPASIATSRRRRRAKTDKIDGEALVRALLAYKRGEPRVCAMVRAPTPEEEDRRRLCRERKTLTNERVQHVNRIKGLLFAQGISDYQPLRRNRHQRLDELKTGDARPLPPHVKAQISRELDRLELLLEQIKAVEIERDALISAVKPEEMNADAVRSPPAMLTKLNGIGPEFAAVLWSEGLYRSFANRRQVAAYAGLAPTPWQSGSVRHEQGVSKAGNSRLRTTMLQLAWLWLRHQPQSALTLWFHERVRRNGARLRKTTIVALARKLLVALWKYVNAGVVIDGAVTRAV

SEQ ID NO: 336967 - protein, 344 aa, unidentified
MLHAGLDLSRRRLDVCLLSGGGESIAEFATPADADGLRGLARRVSGQRVRAVIESMNGARFVHDTLEEAGWEVLVADAKKVKGLAPLACKTDKIDARVLAELSWRDLVPAIWLPDPTIRRERELARFRLHLVRHRTTLKNRIHATLITFGHPCPVSDLFGFAGRELLDRLAIPDPWRRNVDASLELIDELELQIAQLTVELKRQGADHRYVPLLVTAPGFGWINAYTIASEIGDIERFASPAKLCGYTGLCPRVVQSGATDRRGPISKHGPRYLRWGLFEAAMNACKHPLYAERYQRTKRRLGRQRGPKIAQIDLSRKLTEAIWHMLTRNQPFAPAGARFRLAA

SEQ ID NO: 336968 - protein, 385 aa, unidentified
MQKSPNNAEAVLYDTTLVLAIELSSKSWVLAAQVPGLPQTKAKRTIEPNKLALKSAIDGYRDRAAAAGYPVSRVVATYEAGWSGFWLARWLIAAGIEVHVVQPSSVPVDRRMRRAKSDGIDAELLLRTLLAWLRGEPRVCSMVPIPDAIDEDARRCVRERTELVSERVGLTNRIGAVLATLGIDGYNPQLKSRRQRLANLRTGLDEPIPPHALAKIERLLSRLELVLDQIAALENDRDVVAEKPASDDASRMIQQLCGLRGIGVQSATVLVREAFVRRFANAKALGSYAGLAATPYNSGAVERERGIGKAGNRRLRSLMVELAWLWHRYQPGSAQVAWFRERAGPNGKRVRKIMIVALARKLLIALWRFAVDGVVPEGAIMKPAA

SEQ ID NO: 336969 - protein, 412 aa, unidentified
MRRVIGIDTHRTFGEVVIWEAGRLRHVGRIDMTRTALEGFGKELLATDEVVIEATGNCMAVSRVLTPFVKRVVIANPLQVKAIAHAHVKTDKVDAGTLASLYAAGYLPEIWTPDAATERRRRLVARRYQVVRHRTRIKNEVHSILYAHLIPRCPHADLFGHLGRTWLTSQPLPDDERAAIERHLRELDRLGDDLRVLDQEIAQSALDDAAIKRLITITGVNLAVAAGLVAAIGDIGRFSSPQKLVSYFGLNPRVHQSGLGAAHHGRISKVGRSHARAMLVEAAWATAKAPGPLHAFFVRIRARRGHQIAAVAVARKLAVLCWHMLTKQTDYHWARPALIANKRRAMELQAGRPQKKGNKRGSTYAYNVKALRDQEMRLAQQAEQSYENLVAHWQPRPAKKQARGRLKPAGLE

SEQ ID NO: 336970 - protein, 352 aa, unidentified
MQYIAFDAHKHYTWALVQDEKGKVMAEQRIDHIRGALAGFLETFEPGSPVAVETIGNWYWITDEIEAAGMVPQLVNARKAKLMSGSINKTDRLDARGMNRLQRSGTLPTVWIPPRELRDLRELPRTRMVLVHQRTQLKNRIHSNLAKYGVRIDEVSDIFGVTGRNLLDQRLTLLPLHTSYATKRLLDQLDHLGEQINGFEKRMKELFTPTQVLARISTLPGVGLILGVVIVTEVGDVERFPSASHLASYVRTTPRVHASGGKLRYGRTRGDVNRYLKWAFIEAANATVIHRRRHPTRHVSRLYARVRSRRGHPKAIGAVARHLAEATYWMMNKKEVYQDPSPTYQVVSTREA

SEQ ID NO: 336971 - protein, 410 aa, unidentified
MKVAGIDVHKKVLMVVVVDASTPEEKPARRRFVTMPTELHRLLTWLQEQGVEEAVMESTAQYWRSVWLELEPHMRLHLAQAFSNRAPRGRKHDFKDAERLVRRLIADELILSFVPSGEQRIWRSLTRMKLQLTRDRVRLQNQIECLLEEMRIKLSIVVSNLLGASGLRILHALANGETDPKKLAQLGGERLQCTEEQLVDALTGRAQPVHGAMLALQLERLQVIDQQMEQLNRMIAIAMKPHQDAVMRLAEVPGFGVDSAQQIIAEVGAQASTFASAAELTSWVGTCPGKDESAEQNRSSRSAKGNKYMRRVLNQAAHAAAAKKGSHFQIVFRRLLPRLGYQSAIWAVAHRLCRLVWKILHEGVRFIEHGAEVHPREKKKRAQMLARALRKLGYDVTITPINQLAPKPVV

SEQ ID NO: 336972 - protein, 314 aa, unidentified
MNALTSVGIDVSKATLEVALAPEAKPFSVANERSGIDKLQDKLPAPGTCLITLEGSGGYERLVIAELLDRGHHVALVNPRQVRDFAKGLGILAKTDEIDACVLARFGQVVGPRSLEKPTGSQTELQQLVERRRQLISLRTAELNRRQQATSKRTIRSIDAVLKTLDRQITTLEANIAALVEQHADWKQKADLLTSAPGVGDITAMTLLADLPELGQLNRERIAALVGLAPYAADSGTITGVRSIRGGRADVRNTLYMAALAGLRCNPVLKAFYERLIASGKQAKKALTACARKLLVILNTMLKTNSPWKAPHAL

SEQ ID NO: 336973 - protein, 345 aa, unidentified
MQPMYYIGLDVHKQKISYCVKDSSGKVHIEGSISATRVDLDHWMKKLPQPWSAAMEATMFTGWIYDHLKPHAAALKVAHPLMLRAIAAAKKKNDRIDAGKICDCLRCDFLPESYMASTAIRERRRTLRYRNLVVRQMVQMKIKISALLMEAGVSYNKQRLHKAGYFRELLATNPDIDEGLCSLLRLCRETVVRLGKTESALVRSLERDSLLVERVERLMTIPAVGPITALTWALEVGDVQRFSSIKKAVSYCGLCGAEKSSGNTVQRTPLSKQRNKHLQTMLIEAAKMAPRYSPNLAMLYDQEKQKDNANRATLAVARKLVAYLMAVDRGQRNFQIAETRSNIAA

SEQ ID NO: 336974 - protein, 370 aa, unidentified
MAKYSEVFVGIDTAKTRHAVAVAEAGRDGEVRYLGEIDSAPATVERMIKKLGSRYEKVHVCYEAGPTGYGLYRQVRALGHECTVVAPSLIPKKPGERVKTNRRDAVSLARLFRAGELTAVWVPDAVHEAVRDLVRARASAAADVRKKRQQLLSFLLRHGRVYSGGKHWTQAHARWLAKQAFEHPAQQIVFQDAIDAIEDCTGRLQRLGEQLQAIVPTWSMAPVVAAYQAMRGVSFEVAVTFVAEIGDVRRFDSPRQVMAFLGLVPAERSTGDNVRRAGLTLSGNQRARRALVEGAWTYRYPARVSARLQRRSEKLPKAIRDIAWKAQVRLCARFRRLAASGKKTPVIIAAIAREMAAFLWAIGQHVAPVS

SEQ ID NO: 336975 - protein, 356 aa, unidentified
MSHDVKYIGMDVHKEAIVIAVQNESGKLVMESVIETKASSILQFLHGLRGELHVTWEEGTWAAWLYDLLQPHVQHIVVCNPRRNALLKEGNKSDKVDAGKLADLLRTGMLRPVYHGENGLRTLRELGRSYQTISKDLTRVMNRLKALYRGWGIPCAGTQVYAARAREQWLSKIPHTGVRRRAELLYQQLDGLLALRRNVRPELLAESRKHKAAKLLRQIPCIGPIRAARLIGLMQTPHRFRSKRQLWTYSGLGIETHDSAQYCFVRGQVQRSKKPQQVRGLNRNHNHEMKEIFKSAATRASCGRGPFHDFYAGLLAKGMKPEMARLTLARKIAAITLTLWKKEERFDAEQLKTQAA

SEQ ID NO: 336976 - protein, 342 aa, unidentified
MFYAALDVSLRSVAICIIDQDGKVRLERSVPSDVPDLVRCLREFGEPIHQVGLEAGTLTQHLTYGLTEAGFDVVCMEARQVAAALSAMRNKTDKHDARGIAQILRSGWYSRVHVKSVASHHLRALLSCRKVMQRKCIDLENEIRGLLKIFGVKLPLRLSRGGFDIAVRETIENDPALSHAMLPMLQARRVLFDTFTELDRRVRKAAHADPVCQRFMGVPGVGEITALSFKAAVDDPARFKSSRTVGAHFGLTPRRFQSGEKDNPGRISHAGDADVRATLYAAANAMLMRSIRWTSLKAWGVKLIKTKGRRRAIVAVARKIAVVLHRMWIDGSDFRLGSEAAA

SEQ ID NO: 336977 - protein, 344 aa, unidentified
MDYYVGLDVSLRSVAVCVVDSDGKAILERSVPCEIEDIADCLLAFQTAKLRLGFEAGAMSQFLFFGLQAEGFDVVCMEARQVNAALSAMRNKTDKSDARGIAQVLRSGWYNSVHIKSREAHAVRALLSSRKAVQRKCIDLANEIRGLFRIFGLRLPSRVEQSSFDERVRPIIEADQGLSYALLPLLDARVQLYQAYRELDRRVKRIASNDEICMRFMAIPGVGPIAALTFKAAVDDPSRFTNSRTVAAHFGLTPRRYQSGEKDNPGRISKAGDPDVRSALYSAANAMMMRSIAGSEIKSWGLRLMKRKGRRRAVVAVARKLAVVMHRMWADNTEFHQKPLEVAT

SEQ ID NO: 336978 - protein, 382 aa, unidentified
MAGTEPHAWGTGLMDDITYVGLDVHKATVCVTVAESGRGGEIRQVGVFENRPEILCKVAARLGKGGRRLSFCYEAGPCGYGLHRLLTGCGHSCIVVAPSLIPIKSGDRVKTDRRDAMMLAKLHRAGELTAIWIPDAAHEAIRDLVRARATAGQVLSKARQHLQGFLLRHDRIYRGVRAWTLAYRRWLTTVRFEHPAQQIVLQDYIHAVEDAEARRDRLTRQIEEMLPSWSMAPVVTALQAMRGVALVVAVTVVAEVGDFRRFANARQLMAYLGLVPSEHSSGSTIRRGGITKAGNALARRVLIEGAWTYRMTARVSRKLHDRLEPLSAAIRDIAWKAQVRLCARYRRLAAAGKPKVVVTTAIAREMVGFIWAIARIAQPALA

SEQ ID NO: 336979 - protein, 410 aa, unidentified
MLLLVGDDWAEDHHDVELMDASGRRLAKARLPEGVAGMARLHALIAEHTGDADPEDVEVRVGIETDRGPWVAALVAAGYTVFAINPMSVARFRDRHRVSGAKSDPADAHVLADVVRTEAHQLRTVAGDSAEVEAIKALTRTHKTLIWERTRHALRLRHALREYFPAALVAFTDLDAPDTLELLGRAPDPDRAARLSFKQIRAALQRARRRDLDTKATEIQAALRTEHLGQPPVVTAAYAATTRATLAVLAVLNEQIRELEDEVGAHFGRHPDAEIVLSQPGMGRVLGARVLAEFGDDHARYTSAKARKNVAGTSPLTIRSGKKKTVRTRYVHNDRLVDALMGQAFVAMRISPGARAYYQHQRARGLGHNTALRQLANRLVGILHGCLKTRTTYNETTAWAHHTNINNAAA

SEQ ID NO: 336980 - protein, 417 aa, unidentified
MGEALRLFVGDDWAEDHHDVELMDVTGRRLAKARLPEGVAGIARLHAMIGEQLGEDADEDDAGQVAVGIETDRGPWVQALIAAGYTVYAINPLQASRYRERHGVSGAKSDAGDAHVLADMVRTDSHQLRAMAGDTALAAAVKVVTRTHKTLIWERTRCTQRLRHALRDYFPAALEAFEDLDAPDTLELLARAPDPASAARLTSAQISAALKRARRRGIAGKAERIQAVLRSGHLGQPDVAAAAYAASVRALIAVLTTLNEQVKTLQGQVEAYFGQHPDAEIITSQPGLGPILGARVLAESGDDPGRYASAKARKNYAGTSPITRKSGKKKTVLARYVHNDRLTGALMSQAFAALQASPGARAYYDHQRARGSEHNPALRQLANRLVGIQHGCLKTRTLYNEATAWPQHAAEAGKTAA

SEQ ID NO: 336981 - protein, 386 aa, unidentified
MDASHPLMFEVRRRSGGMSGPSRADGIKVPKGEEQALREQTGGSEMKTSRTVVGVDTAKRVFQLHWVDMETGEIVDLKLTRAKFLEHFANLAPCVVAMEACGGSQHWARRLRELGHEPWLLPAKAVRPFVFGNKNDAHDARAIWTAAQMPGIRTVAVKSEEQQAILALHRMRQQLVKFRTAQINGLRGLLTEYGEVMPQGRAGMRRDVPQALARVSERLPAIVIDTLREQWARIGRLDEEIGEIERRIGVWHRGNADSKRVAEIPGVGVLTATAVVAAMGDPAAFRSGREFAAWLGLVPRHDGTGGRVRMLGISKRGDRYLRTLLIHGARSVLTNAKAPPEWAVRLAERRPANVVTVALANKTARTIWALLAHDRAYRANYVSQPA

SEQ ID NO: 336982 - protein, 335 aa, unidentified
MDIPILGIDVSKATFNVALLETDNKFKNRKFANNPKGFEELQAWLLSNKLTDLHACMESTGRYGNQLAMYLHKLGFKVSVVNPARIKAFGISKLTRVKTDKADGKLIAIFCQVMRPRLWQPTPEEIMLVKQWVDRLDNLIAFKIQESNRLECIECLDASISGHIKTSIVSLDQQIQNAEENIKQLIQSHPDLANKAKLLASIPGIGVKTTAYILALLPIEKFASAKKLIAFTGLNPKINQSGTSLNKHKSISKMGNARLRKAFYMSALVAIRYNPMVKDFAERLIEAGKTKMTTVIAAMRKLIHIVYGVLKNGTPFTVNAGKNEKIVMGNLNSLT

SEQ ID NO: 336983 - protein, 340 aa, unidentified
MCKITLCVGFDYHDDSIRVCVMDEDGNSLVNRSVANDVGTVIDLVSQFGTFAVCAVEACCGSSDFAHRLRTSTGWDVRLAHPGYARRLKQSPDKSDHDDAQLLADLVRVKYLPEVWLAPTETRELRRLVRYRQQLKRNRTEIKLQIRALLREERITPPANAWTKAWRGWLDEAAELSPATRWILTEQFARLVEIEDRVKRVEQELQRATAQDRATQALQEQAGIGFVTAVTLSAEIGRFGRFASGKRLARYCGLTPCNASTGKRQADAGLVRAGNRELRGVLIEAAHRLAQHDPKWRALRDQLRKRKPYNVALAAVANRWVRWLYHQMIRVETEPAAEAA

SEQ ID NO: 336984 - protein, 434 aa, unidentified
MSKLEVLHPHAAGIDIGSRDFFVDAGDDLVQKFPTYTEGCIALKDYLLKRGCDTVAMESTGVYWVILYAILEEAGIEVYLVNGRDVKNVPGRKSDVKDCQWIRQLHSYGLLKKSFIPSENIRNLRSYLRLRQDHIRAQSTQVHLIQKALTLMNVRLTEAISDVMGASGAAMIKAILDGERDTEVLVSYCHTSILNNKREIVLKALEGSYREEHLFALRQAYETWHYYQKMIDQCDAALEKQLLETTKEMDEIDINGKRKPIRYNAPNIKNLPKHLLKLTNGNDPTGIAGITDYTFLQIVSEVGTDLSAWKTEKHFVSWLKLAPIKNSSGKTSRRVNVKRTNPACQLFRNAAQGLVTSKYLALGSFARRIKAKRGSGVAIKAVARKIACFYYRTMTKGEVFVEKGIKQYEEALKEKQKKYLIRMANKFDMELVPK

SEQ ID NO: 336985 - protein, 343 aa, unidentified
MGEISTIGLDIAKSVFQVHGVDGTGAVVMRKRISRSKLLEFFGGLSPCLVGIEACPSAHYWSRELQVLGHTVKLMPPSYVKAYLKRNKNDANDAAAICEAVTRPSMRFVPIKSERQQCGLMLHRTRQLLIRQRTMLSNAIRGHMAELGVIAAKGRNGTAELLQIIGDLTDDRIPPVARFCLDLLARQYLTLNAEVSSIDKRIHSWHRSCEQSRRLEEIPGVGPIVATALVAEIGDWRAFRSGRSLAAWIGLVPKQHSSGGKERLGSITKQGNRYLRWLLVAGAMAVIRYARQRGTKRAWLTRIMDRRPVKVAAVAFANKIARMAWAIMVHGERYREPKLLLAA

SEQ ID NO: 336986 - protein, 420 aa, unidentified
MNNTIAYKLAQLPKNALIVGIDPHKRRHAVVVRNQQAQVLSKFKIGNRRDDFEQLLVRCQKLKGRQGAERVIFAIEPGSHYWRNLAYFLEDQQQVLRMINPFTLKRQRDGDDLMRRKNDYRDAAAAADLVAQGKYNWTRLPKDQYAELRVAHDTYQQLVEEETRARLQLTTALDGLFPEFQQAFKSLDGQTALAVLQTCPNPHQIVSMEESDFIAQVAKTHNKPRLMVKKLVHLYQLAKRSVGIRHGSVALARQVGLLAERLVFLKKQRQKAEDNLQLCLESLEEKDFLLSIRGLGMINVAGLLAHIGDCCQYSSVKQLSKLAGIVPIENSSAGHSSSHTPMSKKGRRGLRAVTYRSVIALLRHNEWFARYTESLQKRPGGKNPLTRREAIGAAMNKLLRIIYALLTKRQTFDPLKAFAL

SEQ ID NO: 336987 - protein, 329 aa, unidentified
MFPVGTDVSKKNLDLCMLYDGIKGRIKTRNIQNNRHSVENILRWLRLQHCSPEDVHVVMEATGVYHERLATELHDAGFRVSLANPHRSREFARGMGIMTKTDKVDAYMLACYAFLKKPHRWEPPAPEIRYLGALLRRRDVLLGDALREENRLEKYLSTDTPADIISSCRRMAQLLREEVSNIERQIKAHIKASPALRRDYTLLTSIKSVGPQLGMHMLVVLRSHNFVSAEQAAAFLGVVPIEKRSGTSVRRRPRMSKIGPPQLRAKLYMSALCGKIYNKRMRNIYDEMCLRGKPKMVAIGALMRKLVHWCYGVLKTGTVFNDEDLKQVL

SEQ ID NO: 336988 - protein, 362 aa, unidentified
MNRNAGMSAGQIIGTMNGQQVVGLDIAKNVFQMHTVDMGTGEIINVQIKRGKVLDHFANKLPSLIAMEACGSAHHWARELAALGHSVRLLHAKAVRPFVAGNKTDATDARAIWLAVQQPGVKFVGVKTTQQQATLTLHRQREMMMKMRTMQTNALRGLLYEFGATFAKARKALLSEVEQALVALSNQLPQAVVDSLREQVARIKVLSEDILALEKRLGQQLSQDPKMQRIAQIPGVGLLTATAAIATMGEARAFKSGREFCAWLGLVPKQNGTGGKVRLGSISKRGDTYLRTLLIHGARSVLTHAKEPGPWLEGLKGRRPANVVVVAQAAKMARTIWAVTAKEQSYQRGYQSVRPSAMVQAV

SEQ ID NO: 336989 - protein, 462 aa, unidentified
MKPKQPEKNKKAICRPTQNNWHEMNRKQRREMTRKIQSEDLSLEVVHPDAAGIDIGNESHYVAVPPTRDSQPVRRFGCTTSELKEMAVWLKCAIRTIALQSTGVYWIAVYDILEEAGFEVYLVNARETKNLPGRKSDVQESQWLMKLHTYGLLRNSFRPSQEIRTMRTYWRQRNDLVRSAGRHIQRMQKALTQVNIQLANVLSDVSGMTGQAIVKAILAGERDPYQLAALRNWRVKASEEEIARSLEGNWQEDLLFMLQQEQDGYEFCQRQMAECDQRLQQYLQQQKDRSHGASLPEEKRRERLRKKKKGNAPQFDLRAELFRVTGTDLTQIDGIDVTTTMTILSEAGRDMSKWKTEHHFVSWLRLCPDNRISGDKVIGKGRLPTNNRVTNALRMAASTLRLSNTYLGAQFRRLRTKLGAPVAIKGYGCQVGSIGLPHAALWHDIHRPRSRVLRRSAPRTAN

SEQ ID NO: 336990 - protein, 436 aa, unidentified
MRGCRCSMIMGFTKPIEHFNLQRKKVITMNTLYVGIDVSSKSNVVYLMLPNGDKHSNFSVANSHEGSTLLVKKIYSALTSHSLDTVLIGLEATSVYGDNLVYFLREDATLAPFNRKIHVLNPKQVKKFHDTYNDLPKNDYVDSFVIADCLRFGRINKEVYMGDYRYKALQNLTRARFFAVQNLVKEKQRFMNVLFKKYSTMTQEKVFSDAFSTTALAVYDEFESAEALANMDLHELTDFIIEKGKNRFPDPVAVAKAIQKAARSSYRLPKTVNDSVNQVLSISITSMKALESQIKEFDKAIIALMELLPNVLISIPGIGPVYSAGIMAEIGDINRFDNQASLAKYAGLAWKQHQSGGFEAEVTRLIPSGNRFLKYYLCEAAFSLVRCDKKYSDFYHLKYKEVNRCQHKRALALTARKFVRLVFRLLKDNRLYCPAK

SEQ ID NO: 336991 - protein, 337 aa, unidentified
MKYSGIDLHSNNSVVVVSDDADRVVYRRRLPNELGKVVEALQPYRDELAGVVVESTYNWYWLVDGLQAAGHKVHLAHPAAAKTYEGLKYTDDDDDALQLARLLRLGILRTAYIYPLAERGLRDLARRRMQLVRHRTMQVLAVENVMARQTGARMTAYQVKTLHCQQVEGLGFAPDVARGVRANVAVIETLNREIAALEKWLHERVELRLQYAVLMTTPGIARTLATVIMLETGSIERFAAVGNFSSYARCVDSVRLSNGKKKGEGNVRNGNKYLAWAFIEAANMARRWCPEARRFYDRKKAKTNAVVATKALAHKLARACYHMLKSGQLFDVKRCFG

SEQ ID NO: 336992 - protein, 391 aa, unidentified
MREPIRMDEEVSPTTKNGDKHMNKTDKYIGLDVHKDTTVIAVAEGGRVGEVRVYGSIPGDLRSLEKVLGKLGGENVRLHVVYEAGPTGFLVYRRLRQLGIDCIVVAPSKIPQQKGVRQKTDRRDAEQLARLHRAGELRAINVPDEVDESVRDLTRARADAVHDLTRAKQRLKSFLLRQGYRYPGSANWSEAHQRYLRKLTLPLPALRSVLEEQLLAIDQATDRVKRLDELLEVQIPQWRHYPAVQALMCLRGFQMTAAAIMVAEAGDVRRFAHPRGFMGFLGLVPKEETTGSSRKLGSITKAGNAQARWCLIEAIQSAYGPPKVSSRLSLRQEGQPKAYRDLAWKIQVRLHKRGWHLLHRGVMKAKVNVALARELAGFVWDLLRQVPAPDA

SEQ ID NO: 336993 - protein, 383 aa, unidentified
MKAVCGLDVHKDSIFLCILHSDGELFEQVFGVLTFQLEEMRKLLQKHHVFEVCMESTSIYWIPIWRVLSPHFTLRLVNPYFIKQLPGHKSDIKDAQWIAECTLKELVRGSFVPPEIIQQLRQYDRRIFDLNAEIVRKVSKVDGVLQRCNIRLSNYVSNIECKSYRDVVRRLSEGVTNPNELMKLVHGRIINRHGAETILASLTGVVSQAEIDVLRQLHEEIGIAESHRNECQQRMLEICEKHFPEELERLQKIPGIKERAATSLIAEIGTDMSKFETANHLASWSGLRPRNDESNKKIKSRKITHGNVYLRNTIIQCAWAASRQKDCFFSRFSYHQTIVRKKNKMKVLVAVARKMLIAVWHVLHDNTNYIDFTTDRKTSQTRG

SEQ ID NO: 336994 - protein, 466 aa, unidentified
MKFFLGGDVSKGYADWVILSEKKQAVLENFQLDDTYDGHCKLYSMLEDYSDKHPGCEIYAAVESTGGYENNWVTTLKGFQKTINLKVSRINPSGVSFNRRASLKRNVTDAISAVSIAEYLINHHENVVYDQDDKWKSLCRHWNFVEMQKHQRVQTINQLETILYNANPTLMAYKKGDFPNWLLELIIICPTSDVLAKSNPEKLAKIPYLTLARAKTLVAEAKQNIASATDQNAEILVSQIAQQIKMFDQNIKGQMQLIERDLTCPEIELLRTFNGIDTVSAIGLLLEIETVERFPRTKGISCYFGVHPKFKQSGDKVIGVRMSKQGSKNMRKILFNIAKTAIVHNPLIKEIYEKKVSHGMSKMAAIGVCMHKILRIIYGMLKNKQAFNPAIDKQNTEHSKAKHEEKLQNENANINKSRRFQEFDEKAPISRKQTKKRKEHDLSQCEVASQSTGSTCSFDAKLLKIP

SEQ ID NO: 336995 - protein, 345 aa, unidentified
MQLTTVSVDLAKTVFQLHAIDQQGKTALRKQLKREQVVPFFANLEPCLVGMEACGGAHYWARKLQALGHTVKLMAPQFVKPYVKSNKNDVADAEAICEAVTRPNMRFVPIKTVEQQAILAVHCARQGFVKARTAQANSIRGLLGEFGVVLPQGIRHIVERLPDILEDHENALPGSLRQLMQRLMEHFKELDRQVVELEREIQQWHRSNEDSCRLAEMPGVGPLTATALVASVGDAKNFSNGRQMAAWLGLVPRQHSSGGKPTLLGISKRGDGYLRTLLIHGARSMVRVVESKTDPSADWLKGLLARRHTNVAVVAQANKTARIAWALLAHGTKFRPDYTPDVTVA

SEQ ID NO: 336996 - protein, 356 aa, unidentified
MKSTKLNFSNQNIYVGIDVHKKSWDVTIILNGMKVKKFSMNPNPQELYNYLVKHYPNGEYYSVYEAGYSGFWADRELRSLGIRNIVVNPADVPTKSKERRKKTDRIDSGKLARELSVDHLEGIYIPEEKAEALRVLVRLRRQLVTDQTRQKNRIKSLLLFLGERVSEDIEEKHWAKRYIIALRNLPIKQEESKRALLELLDNLESIRNQIASVVKQLRNYVAKDKRISKTISLLTTIPGIGFVLSIILYSEIIDIKRFDRLDELAAYVGFSPAVYSSGEKEITLGLSKQKNKYIRNYLIEASWIAVRRDAALQMAYGKLCNRMPGNKAIIRISKKLLNRIRYVWNNQQPYQFSVIE

SEQ ID NO: 336997 - protein, 385 aa, unidentified
MYQLSGSTQAALDYNSTIIGALELSEKKWVLAVQLPGVRRHSRHVLEACGDGLASFVERLKARCAAAGRKIARVILTHEAGRDGFWLARFLARRGIEVHVIQPSSLPVDRRARRAKTDIIDVEMLLRTLMAWLRGEPRVCSMVPIPSEADEEARRAYREREDLTGERRSIVNKIDGILATLGVKGYKALRRDRREQLTAVRQPDGDPIPQKARARIERLLDRLDLVLKLIEQVESARDAVLKKDAPADEAERMIRSLTDLRSIGPDFATLLVREAFVRKFRNRRALGGYVGLGGTPFSSGGSEREQGIGKDGNRRVRAAMVELAWTWLRWQSDSALSVWFRARVGAMGGRIKKIMIVALARKLLVALWRYVMDGVIPDGAKMKAA

SEQ ID NO: 336998 - protein, 423 aa, unidentified
MDVIHHRVAGLDVHKASIMACVRTVNGGTVDRACRTFETTTAALLELLAWLTECRCTHVAMEATGVFWKPVWNILSDGGFELIVANARHIRNVPGRKTDMNDAMWIADLLACGLIRASFVPGPAQQELRSLLRTRKQIGREQTRHVQRLQKTLEEANIKLDSVISDIMGVSGRRMIEAMIDGVRNPRRLAELADRRLKATPKELYDALHGRLTTHHRFLLKLHLGQYDVLAAAIDEIDGQIETQISDMDAEVKDGQAPFRALIRLISGIPGVSALSATAIVAEIGRDMGRFATAGHLVAWAGLCPGQNESAGKRKSSRLRKGAPWLKTMLVQCAWAAKNQKNSYYKALFHRLTSRRGPQKAICAVAASLLTTIYHMLKDGTQYQDLGAAHFDRRPVEVTAKRLVTQLAKLGYKAELIPMARAA

SEQ ID NO: 336999 - protein, 341 aa, unidentified
MRPKKNITQADDGMRMYAALDVHKVYSQIAVEDEDGVLLCEERLENDPDMIEKFSDSLPPDTSMVLESSSSWYWMYSILSKRHKVILSNPIKTKAIASAKVKTDRVDALTLVNLLRGGYIPECYVPPKRIMELRELVRYRANLVRMRSNVKNYIHAYLLMNNVRISAKPFTKEFIDEVRKIEEPRVKGYLRLIDSLNDEMHEASRIICERASNDEDAKLLMTIPGISFFSALLIGSEIGDVSRFPDAYHLISYAGLAPSTHSSGGTTYHGRITKAGSPELRWILNQCVRVYIREEPDSEIAAFYNRLRKKKGDSKAIVAASAKLLKIVYLVLKEKREYYHG

SEQ ID NO: 337000 - protein, 472 aa, unidentified
MKKAGYLGCDVSKGYCDFILLDSDENVVEKAISLDDNKNGKLKLKSLIDRWMSQGFTELYCGVESTGGYESNWYNYLARLSQQQTIHVAKLNPKGVKGVNEASLNRTVTDAVSAENIAKYLIHFPKKVRYNTSFRRDEIDQFTEGRQLVTYLKMLSKQKVQLTNQLEKLLYQHLSEVIVYCRHGIPGWLLRLLEKYSSAREIQKAGLEKIGRISGISLLKAKSILEKVGTSDHVVSPQIQHVISVTAKEILHKENQHEQEKQYLIEQHKDNEQVKLLTSFPGIGLHSAVILLLEIEDTGRFEKCKNLTSYFGVHPKYKKSGDGIWGNHMSKQGRSEIRSALFMVGLSAIRHNPILRALYKRFRTQGFNHYQAMGVVMHKTLKIVYGMLKNNTAFDIKVDQSNVEKYKAKQLQLEQSKQSGTIEQKQVKYRYSAPSQEAPISRRKHQQNKKENNYMPLSDIEKAGFLGGNLPE

SEQ ID NO: 337001 - protein, 351 aa, unidentified
MQFLGIDWGTRKAAWCSLDEHGHIVGEGFIPADQDGLARLVVNLGPDVRGCVEMMSGAAWVRDRLQACGWQIDIANARKVKAVAPLACKTDRIDARVLAELVRRDLVPALWVPSLDERAVRELLRRRAHLIRLRTSAMNRTFGLVTQWGLRTGVTTLRKPGALERLAEQGVPPTWCRSIAVLIEVIDDLDRQIDPIDRELRPLARADDRARLLVSIPGVAELLALTLATEIGEISRFPSAKKLIGYAGLAPKIKQSGQTSRTGKLSKAGSTTLRWAAVEAAQQAWRPSNPWHELYSDVKRRHGKANPAKAAVARKVLIACWHILARNQPFKPSAARATDPAPASSSIRLAA

SEQ ID NO: 337002 - protein, 354 aa, unidentified
MLAELVDAVVGVDTHRDTHQVEIALSNGAPIACTTISNDTSGYAELLAWIVDHAPGPRLAVSIEGTRSYGIGLARAAAAAGLVVLECEQPHRKARRGKGKSDPIDAHLAVLAALRLDADRLPTPRADGDREALRILLGTRQELTTASTAQTNRLRALLLGGDDTDRELARGALTETRLASLARRRPPREASREQAVRHAEIRRLALALREAARAVKANRAQLQTIVNDLVPGLIERRGIGPVSAAQAIVSFSHPGRCRNDAAFAALGGASPLPASSGRTVRHRLNRGGDRALNRALHTIAATRMRSCPTTQAYVARRTAEGKNPREIRRCLKRYIARQLYRTLATAMTPAAETS

SEQ ID NO: 337003 - protein, 371 aa, unidentified
MHESSKTLFVGLDVHKDAIAVAYASEERGAEVVSLGSIGTRQCDLDTLIRKLQAKGATLVFVYEAGPCGYWLYRYLTRKGLSCHVVAPSLIPRKPGDRVKTDRRDAITLARLMRSGDLSSIYVPGIEDEALRDLSRGREAAMEDLKRSKRRLKSFLLRQDIRYEGRASWNAAHLRWLSEVVCPTAPQQIVFQEYVRAITEQQERLQRLERELHEAVTGWRLYPVVEAIQALRGVELTGAVILMTELGDLTRFETPRQLMNYLGLTPSEHSSGARRRQGGITKAGNSHARRALVEGAWAYRYPAKVSRHLQLRLEKLPAEVQAIGWKAQVRLCKRYRQLTVRGKHVNQVVVAIAREMAAFAWAIARLVPVAA

SEQ ID NO: 337004 - protein, 313 aa, unidentified
MSETQSTNYVGMDVCQEWLDLHHPSLPKLRVPNTPVGFSKFIGKLNRIPNPHVICEATGGCERKGVAALQEKNISVSVINPRQVRDFARAQGRLAKTDQIDAKVLADFGRAMSPEPMKAQSAAQTALAELVKYREQLKAQILSIENQARHLELSALIKLSKGSIKHIEKALNTVEKLIKEQLETEAPLKETVERLAQVKGVGHVTATTMVGLMPELGTLTRQEAAAIAGLAPYNRDSGPHRGKRSISGGRSKVRRALYMSALVASRHNPILRAFYGRLIIAGKPPKLALTAVMRKLIVLFNHLLKKPSFSIAR

SEQ ID NO: 337005 - protein, 354 aa, unidentified
MIIIGADYHPSFQQIAFVDTETGELQERRLEHPEEAEKFYRDLGAQGACVRVGMEASGHARWFERLLSELKFELWIGDAAKIRTKRVRKQKTDRQDAELILQLLVENRFPQIWAPSGENRDLRQLLWHRHRMVQARTRIMNQLQAVALNEGLLCKKRLWRETGRKQLESFPLGPWASRRRQDLLELLDRLTPTIAELTQAIEREVEKCPEARRLQTHPGVGPLTALAFVLIIGKSDRFQCGKQVASYLGLVPLEDSSGKRRRLGHITKQGNSLLRFLLVEAAQVTVRSDPEWRSKYFHLAMRRGRKIAKVAMARRLAVRMYWMLRKGWDYELLNKFGSHAGQPGHRHGVPLNTE

SEQ ID NO: 337006 - protein, 491 aa, unidentified
MNNCAASHDKVGGRPALVRSRSRAFNPVRVVARLPAEPVALATTSNRKVPQEGHYIRAMDSRAKRRTSDKHPKTMNEAAQWQQHRAFGAVDWASEKHYVIVVDQAGKVIEEFQIEHSALGWKKFREKLQPYGPIPFAIETSQGAVVEQLLESAMIVYPLNPKSAQAYRQRKAPSGVKDDQLDAWSFADALRVDGHGWKALRPEEPLIKELRLLCRDEVTLIEQRTAFVQQLRHALAEYYPAALEAFENWTSVSAWIFLQRFPTPTALAQAGKRQWQKFLHTRRLWGSDQGPRRMEIFSHASEFAGTQPTVNAKSLLALSLVQMLFSVEKQLAVYRQRIEELFARHPDHDLFGSLPGAGPKIAPRLLSEIGDDRQRFDGDAQALQCLGGTAPVTKRSGKYRHVHQRWACDKHLRHAVYLFAEQSLSRCVWAELYYRHHRQKDRSHANAIRRLGHRWLKIIHKMWIERAPYNAELHHRNQLQHGSWIFKLKPS

SEQ ID NO: 337007 - protein, 410 aa, unidentified
MLFVGDDWAEDHHDVEIQDETGRKLAARRLPEGAAGIARLHELIAAHLGQDGDPGEVVVAIETDRGLWVQALTAAGYQVYGLNPKQVARFKERYNLSGAKSDAADAHALADMVRTERHQLRAVAADTAAGQAIKVVARAHQTLIWERTRHTLRLRSALLEFFPAALAAFAGLGLTGADTLELLARAPDPAAAAKLTLAQVSAALRRARRRDVPARAAAIKDALRVPQLAQPAQVTAAYAAAVQAAVAVLTVLNEQIAQLEAQVEAHFLQHPDAEVYLSQPGIGTVNGSRVLAEFGDAPGRYASAKARKNYAGSSPITRASGRSKVVLARFIRNDRLADALQSQALSALSASPGARAYYDKQRARGLGYNSALRQLSNRLVGILHGCLKTGTRYDEATAWPGAANTEPLAA

SEQ ID NO: 337008 - protein, 338 aa, unidentified
MNLSRIGLDLAKQVFQVHGVDRHEHVVCRRQLKRAQVRDFFRQLPPCLVAMEACGSAHYWARELRELGHTVRLIAPQFVKPYVKGDKHDAHDAEAICEAASRPSMRYVPVKSAEQQAVQSVHRVRSRLVRARTALCNEVRGLLGEFGLIATRRGRAATMALLETVMATEPAPLPAPMGELLRELKDELQTLEARIARLERQIQAHVRGDARIQRLLAVEGIGPISASAVAASAGDARQFRTGRQFAAWLGLVPRQHSTGGQQRLGNISKRGDTYLRTLLIHGARAVVRCCANKTDARSRWLQGLLQRRPANVVAVALANKNARILWALLSRETCYRPG

SEQ ID NO: 337009 - protein, 367 aa, unidentified
MKKVSTAATKPSKNVSQSNLTIGLDLGDRSSCYCVLDETGRIVMEQKVSTTPKALQAAFGAMPHSRIALETGMHSPWISRLLSGLGHEVIVAHARNVRLIGESRRKDDRLDAQTLARLARIDPQLLCPVKHRSARAQADLTVIRARAGLVRARTALVNTARGLAKSYGERLRGCNVRNMNPEKAEGLSPELQAALEPLLVGLESLSEQIREYNERIEKLAQESYPQVALLQQIKGVGTLIALTFLLTLEDPHRFRKSRDVGCYLGLQPGRRNSGQSEPQMHISKEGDPYLRTLLVQGAQHILGPFGADSDLRRWGLKLAERGGKNGKKRAVIATARKLAVLLHRLWVSGEVYEPLRNSNQRAMPAAA

SEQ ID NO: 337010 - protein, 471 aa, unidentified
MGHDRSRIDQQGGKKRKIVSPSLLKRINHNAAGIDCGSETHYVAVPPERDPEPVRSFKTFTTDLNRLADWLQACGIKSVAMEATGVYWIPIFEILEQRGLEVVLVNARHLKNVPGRKSDVMDCQWIQELHSVGLLRASFRPAAEIASLRAYLRHREKLVQGAASHIHRMQKALVQMNLQLHNVISDIMGVTGMRILRDIVAGVSDPKALAAHRDGHCRASAEQIAASLTGNYRPEHLFTLRQNLEMFDAFQRQIQVCDTEVESVLNALAAAQQRKPNASPPPPRCKPRFSDNEPRFEIRDPLFRLSGADITQIDGIGPYTALQLIAEIGTDMTRWRTHKHFTAWLTLAPRNKVSGNRLISSKTQPSANRAAVLLRMSAMVLGRTSTALGAYYRRIAYRIGKPKAITATARKLAILVYRVLSGELNYADPGAQAYEESHRTRTLQNLRNRARTLGFGLVDLETGEAIRGTVS

SEQ ID NO: 337011 - protein, 310 aa, unidentified
MSSKKKETKIEALMSIGIDIGKDVFHLVGFDPDGNVVVRKKIKRMALEKTFEDLPPCIVGMEACLSAHFVSRALRKMGFEPRIIPAIYVKPFNKGQKNDYNDAEAIAEAALRPNLKIVPEKSQDQLDLQALHRVRSRLVSRRTATINQIRAFLIEQGITVRKGLRALKTSFLIILEERKDEISPRMCKILIGLYEDWMWMDDRIDVVSKEIEDISRTEENCVNVMTIPGIGPMISTAMVAAIGTGDAFDRGRDFAAWVGLVPRQYSTGGRTVLGRISKRGSRYLRMLFVQAAKVIPVSYTHLTLPTTPYV

SEQ ID NO: 337012 - protein, 341 aa, unidentified
MSEVRTIGLDLAKNVFQVHGADETGAVVFRKQLRRGQVLKFFGGLQQCLVAMEACGSSHFWAREIGRLGHEVRMIPPAYVKPFVKRQKNDMADAEAICEAAQRPTMRFVPVKSEETQGAAVMLRTRDLLIRQRTQTINALRGHLAEFGEVAPQGLNYASKLIAMVEDPQTALPETARVALRFLTAALSQLNDQIRTLDAQIVRRAREDETAGRLMTIPGVGPLIATALVALAPSPETFKRGRDFAAWLGLVPRQHSTGGKQRLGSTTKMGERSLRRLLIIGANSELVWRTRKGATPGTWLAKMLAHKPPMLVRVALANKMARIVWAIMAKGGIYKAPVAAA

SEQ ID NO: 337013 - protein, 351 aa, unidentified
MKQTKRKMTYAGKEVYAGMDVHKKTYSITVICEGEIVKRDTMRADPEGVARYLSRHFEGGKLHSAYEAGFCGLGLHRILIASGIDNIVVNPASIEVAANDKVKTDKRDSKKIAEQLSRKTLVGIYIPTEEEELKRVLSRTREQIVEQRARVATQIKSKLHYFGRMDPDDDRAVTESYLKELAHKDLDKNLSYALGLLSSQWRFLTEQIKEIEKRLAEQAKQDESEKVYRSVPGIGPVSSRVLSNELGDLSKRFENERALFSFTGLTPSEHSTGSSVHKGHISRQGSSRIRKYLIEVAWRAIEQDVALKDIFERIAQTRGKKRAIIAIARKLIGRIRACFRQGCVYQLGVVA

SEQ ID NO: 337014 - protein, 335 aa, unidentified
MMIAVGVDTHKHQHLAVAVDALGQLLAEITITTTLAGYRELLAWITGLEGEIRVGIEGAGSYGSGLCEYLQDNGIIVFEVERPRHRERRTGKSDRLDALLAAKKVLADDGLSTPRGHGKRVALQMLLVAYRSVISERSRLYNQLQALNVGAPATLRERIGPAKNGAKLAQRLTGMRTRPNASPQENTTLQVLRDIANRTRALDVQAAAYTRQIDALTRELAPTLIDTPGVGPITAGKLITFNPARFTSEAAFARANGTAPQPASSGKTVRHRLSRGGDRQINTAIYTIALSRSVHHAPSRTYIQRRIKEGKTKREPMRSLSHDLCNKLSNTLLTT

SEQ ID NO: 337015 - protein, 401 aa, unidentified
MNAVGIDISKDKSTIAVLRPFGEVVISPYEIKHTNGELKELAKKLKTLDGETRVVLEHTGRYYEPVINTLYKEGIFVCAVNPLLIKEYGNNSIRKVKTDSADALKIAKYTLDNWADLREHSPMEDARNQLKTLNRQYQLYLKNRTAYKNNLIALIDQVYPSANTFFSSPARKDGSQKWVDFVAHFWHVDCARGISERAFTQRYQKWCKRNGYNFNADKASLIYHHSKELVPTMLKNQSSKLLIASAVNQLNATSKTIETIRAEMLRLAEMLPEYPVVMNMFGVGSSLGPQIMAEIGDIRRFVRKQSLSAFAGVDPMPSQSGTYERQSNPSSKRGSPYLRKSLFIVMQVLLQNAPEHDDVYQFLNKKRSEGKPYYVYMNAGCNKFLRVYYGRVKEYLDGLDS

SEQ ID NO: 337016 - protein, 480 aa, unidentified
MNIKAKKAKVQALSKKSVINVLSQDEIKKKVQVIEQELKASTWRELETKGKFEKNDKLSFISEEMLIVGCDIGSETHYIRAIDTRGRELSKGAFEFSNSSEGFASAKAWVLKLAAKNDKKQIVLGLEPTGHYWFAIAAWMVSNGISVVQVNPYAVKQSKEIEDNSQLKDDRKDPKIIANLVKDGNYGMPYLPEDIYADMRRLSMFRDQLTEDRIRNINRLHREMKIYFPEYMDAFGKIDGAFTLEILKVAPIPSDIVELDEEGLKSLWHEAKLRGRGYSRARVIVDYAKKSVGLTGGTDAGRESIKWFVEQIIQLDERLAEIENVLHQKCMEIPHAENILEINGVGENILAGILAEMGDISRFDNVKEIQKLSGMGLVACSSGKHKGQTKISHRGRKRLRYWLFQAAKSAVAHAVEFKQLHAYYTTRSMNPLKKMQSLVVIACKILRVIYTILNTGMKYDPERMLRDIRYPQGNTVQAAA

SEQ ID NO: 337017 - protein, 361 aa, unidentified
MLHVGLDLSRRRLDFDLLCEDGSRIERDAVAPDADGLRRLVRRVAVYREPVRAAIESMNGARYVHDELERSGWEVEVADAQKVKGLAPLASKTDRIDAWVLAELSRRELVPAIWLPSFEQRGERERARWRLFLVRKRSSLKHRVHAQLLAFGHPCPVSDLFGRAGRELLARLECPEPWRSGVLAAVGMVDDLDAQITAIDRELKDLGADHRYIPLLTSVPGIAWVLGYTIAAEIGDINRFPSPQKLCSYTGLCPHVRQSGSKDHRGGLTHAGPKYLRWALMEAATNACRDPISTTIATSATSDAWESNAVPRSHRSTSRAAWRRRSGTCSPVTKPLLRQAPEALWPHRQPSLKCATGAMPQ

SEQ ID NO: 337018 - protein, 421 aa, unidentified
MHEERRWFVGIDWASQEHVVTLCDSQGKKMGERKFAHGGTGISDMISWLLKASEGEPGDIHVAIETPHGPIVEALLERGFNVYSINPKQLDRFRDRFTVAGAKDDSLDAYVLADSLRTDMHLFRKLTVADPLIVELREWSRIDEELKVERVRLANRLRDQLWRYYPQMLELGDLDEDWMLDLWEAVPTPEKAARASKAAITRVLKKHRIRRFDAAHVLSELRKPALRVTQGTIEAATAHIRTAVERLRLVNRQLADAEVQLDRLCKKLAEPVAGDGGENVPGQRQEHRDVTILDSLPGVGRTVLATMLAEAPDALQRRDYHALRTMCASAPVTRRSGKSRIVTRRRACNRRLSNAAFNWGRVAVQHDPVSKAKYETLRARGHSHARALRSVIDRLLYVACIMLERGTLFDPSFAETKNAVA

SEQ ID NO: 337019 - protein, 366 aa, unidentified
MKKISTVQVFGNEILTGQKLTIGLDLGDRWSFYCVLDEAGKILLEQKVATTPEAMKQTFGKIPRSLIALETGTHSPWVSRLLTELGHELIVAHAQKVELITKSNRKDDRHDARTLARLARIDPQLLGPVRHRSAKAQIHLTVIRARAELVSARTALVNAARGLVKSYGQRLPKCGTQQVSRELGTGLPPELREVLEPLLKEVESLNERIQEYDERMEKIAKESYPHVELLKQVKGVGTQIALTYVLTLDDPQRFLKSRAVGCFLGLRPGRRNSGESEPQKGISKEGDRYLRTMMVQGAHYILGPFGEDSDLRRWGLKLAERGGKNAKKRAVVAVARKLAVLLHRLWVSGEVYEPLRNSQKAMRAVA

SEQ ID NO: 337020 - protein, 407 aa, unidentified
MEVLYPRCAGLDVHAGSVTACARIAIEAQVTYEHRTVQTTTRGLLELAEWLTAHGCTHLAMEATGVYWKPVWHVLEEHFTLVLANAMHIRNVPGRKSDMNDARWIADLLAHGLIRSSFVPPAPIQELRDLTRTRRQLVHEVARHVLRIQKTLEDANLKLTQVMSDIVGASGRAILNALIAGETEPDRLIDLTRGRLKATRADLRDALHGRVTDHHRFMIKLHLNQIDALESAIVAIETRIGDALGPFRAAISLLTTIPGISDTTARVLVAEIGTDMTRFPSGGHLISWAGFCPRLDESAGKRRSTRTRQSTPWLKPTLVNAAWAATRKKDSYLRAQFLRIKSRRGAKKAILAVASSMLTAAYFMLRDGVEYHDLGAHHFEQRDKQQLAKRLLQRLRDLGVAVEVKVA

SEQ ID NO: 337021 - protein, 408 aa, unidentified
MKATYFLGLDAAKHKVRIALRGPDKRFLCEKDLPVSAAGRRELLALLGRHLPQSESLLVLIEATGVLHLNWAAALAKAGYPVAVINPLMARRLYTLKNSIRENKTDPVDARGLCALATLYGTELVQKYRFTLQPERLALQRLGTVRKAVRNALTNLKKTYASLLDASFPELGGLMKLDGVGLRALLLEAPSPAAIARKRLGTLEKDWKLRPKAAQLKALAADSIADPELATASAPAVRGILQSIAALESRLAQLDRQIEQLALAVCDPERKQLIQNIPGFGPATAARVIAYLPDELLHSGNNRTAATRLQAFMGNDPRLKESGQWKGQTKMSKRGVEVLRTAFFQAAFTASQHDPELKSYYQRKRTAGKAHKVALSNLMRILTRRMVAVLRSGKPYSPNYNLVLQNAA

SEQ ID NO: 337022 - protein, 392 aa, unidentified
MYIIGIDIGKNHHEASIVSPEGKQIGRSLRFATTHKGADSLMSFIFKNIGNSPCVFGMEATGHYWYPIYSFLKAKGYTIYVINPIQSDSLRKMYIRQTKNDSIDSFLIAEVIRFGQFGTTSMADENILAMRQLCRYRDSVISSRTEIKLRIGTIMEQIFPEYEKQFSSLWVSTSMGILEKYLTPENIENAPIDELFEIIKDKSHNRLTRAKAISIKEAAADTFGIKIAQDAFSFQLKQLIDRMNFLDKQIEALDCQILEYYEKFDCYLHTIPGIGMIAAATILAEIGDINRFKSSSALVAFAGIDPTVRQSGEFSSTHNHMSKRGSPYLRHAIFLVATTCSFHNSPLNAYYKKKRDQGKHHLTATGAVARKLTTIIYAVLRDSKPYEPKKFC

SEQ ID NO: 337023 - protein, 350 aa, unidentified
MLIIGCDYHPAFQQIAFVDTATGECGERRLEHREEAEKFYRDLAAQGIKVRVGMEASGHARWFERLLSELQFELWIGDAAAISTKRVRKQKTDRQDAQLILQLMLEDRFPQIWVPSGENRDLRQLLWHRHRMVQARTRMMNQLQAVALNEGLRCKKKLWREAGREQLESFRLAPWASQRRHDLLELLDRMNPTIAKLTQAIDLEVEKCPEARRLKTHPGVGPLTALAFVLIIGRADRFQCGKQVACYLGLVPLEKSSGNQRRLGHITKQGNSLLRFLLVEAAQVTTRSLPEWRSKYVHLTMRRGRKIAKVAMARKLAVRLYWMMRKEWDYERLRKFGSHAGKPGTGDGVK

SEQ ID NO: 337024 - protein, 331 aa, unidentified
MQPGDIDVWLGLDVGKSSHHACALDHDGNTILDTPVDQDEKQLRRTIVKLQRRGTVLVIVDQPNTIGSLPLTVARDMGARTAYLPGDAMRKAAQLLPGGSKTDRRDARIIASTALRMPETLRDCEPDDETMAALRLLSGWDEDTAHELTRTVNRLRGLLLHLHPALERALAGDRIKSDTALGLLEHYKGPDGLRRAGAARIREYARRHGLKGTAITDAVADAIGEQTVTVPGTRAAESLIPQLVSDLRRLRDRRTDISRQVEELLADAPLLTVLTSMPGIAARTASQILLAIGGDIGRFKDAAHLAAYAGIAPVTRQSGTCLLYTSDAADD

SEQ ID NO: 337025 - protein, 344 aa, unidentified
MQITTIGLDLAKSVFQVHGIDAAGQVVVRKSVRRAQMLAFFSKLPPCLVGIEACGTSHYWARELIKLGHEVRLMPPAYVKPYVKRGKTDAADAEAVCEAVTRPTMRFVPVKSPEQQAALSMHRARDLLVKQRTQLINMLRGLLAEFGVDIPKGLERALLMARQVIEGNAPEVPIEAARIATTLSQQALDIHVRLRQIDRDLAIWLRGNDVARRLMTIPGIGTVGATALVASVTDPHQFRSGRQFAAWLGLTPLQKSSGGKERLGRISKMGDKYLRKLLIVGMTSLVRRAKYAPDKIDPRLADLLARKPTRVATVAMANKTARVIWAIMARGETYRTGHQPALAA

SEQ ID NO: 337026 - protein, 278 aa, unidentified
MNNIKYVGMDVHKSITVIVVLNELGQFESRSQVKTKSENICDFFRGISGKVEVVFEEGTHSAWLYKLLKPLVASVTVCDPRHNKLIEDGNKSDDEDAETLAHLLRLGALKAIYKGDDQQQQLKEICRAYDNLIEDSTRVQNRLKAIYRGRGISCSGHDLYRADQRSDWLAKLGEDSARFRAESLLDQLDSLSQLRKQAKRRLLAQARTHADYRILIKLPGFGPVRVAQLIATVGTPHRFRTKRQFFTAFMQSSPAQAPTTRSLRERLSNSGRRFQHAD

SEQ ID NO: 337027 - protein, 479 aa, unidentified
MNVKTSKAKKQVNIENETVNLLSKEELNKRIEVIKKELRSYTWRELETKGKFVKNDKLSFITDDMLIVGCDIGSEMHYIRAIDVRGRELSRGAFEFSNTAEGFENARAWVLELAAKNEKKQIVLGLEPTGHYWFALAAWMISNGISVVQVNPYAVKQSKEIEDNSQLKDDRKDPKLIANLVKDGNYGMPYLPEKIYADLRRLSMFRDQLTEDRIRNVNRLHRELKIYFPEYMDAFGKIDGAFTLEVLRVSAIPSDITELGAEGLRNIWHAAKLRGRGYSRAGEIVRYAEKSVGLTDGKDAGREAVKWFAEQILQLDEQLVEIESALHRKCREIPYAENILAIQGVGENILSGIVAEMGDISRFDDVKEIQKLSGMGLVACSSGKHKGQTKISHRGRKRLRYWLFHAAKSAVSHAEEFKELHVYYTTRDNNPLKKMQSLIVIACKILRVIYAILKTGTTYDPQKMLKDIKRPALQASMAA

SEQ ID NO: 337028 - protein, 416 aa, unidentified
MKKGQNTRGYERYMALDILREYLLVGAQNEEQDWVLTPRRVSIEKFSEWAKKNIRSGDIVVLETTTNVWTIYDIVAPLASRTLVANAAEVKEIANARVKTDKEDIKKLLKLLIGGIVPEVWVPPLHVRELRAFISYRGRLVKTSAMIRNRLQSLLHKHNLKLSETGLLDQVWWEAQKEISPLEKMQIRQELALLQEVEKLKTAVDEELQRQSTGALWGKPALQLMQLPGVGYIVAMTVLSAIGDISRFESAKKLVGYAGIGAGVHDSGKTHKDKKITKKGRRELRWAMVEAAWRAVGMSPFWKAEYEKYLSRLRKKNQAIVVIARKLLVAIWHVLSKEETDVHASEEDLAYKMLLLSWSLKEDTRMGLTYKQFAKYALMQLGVETDITRFVRRDVPRRLAPKEEVLARMTELGLTA

SEQ ID NO: 337029 - protein, 353 aa, unidentified
MKRDKYMGMDVHQATTVVAVMDAEGKIVLETIVATAAGAIRRLIESISGPLHVTLEETTQAEWLHDLLQGFVAEVIVCDPRRNKLLAEGSKGDKADARKLAELLRTGMVRSVWHGRQTTRGLKEMVRAYETFAIDTRRTMMRIKALYRSRGIATKGSAVYQQKQRDQWLMHLTEQGMQQRAAWLYEQLDHVRELRKRAKAAVLTEGQRHQAVQLLRTIPQVGPIRAAQIVATAGTPHRFRTKRQFWSYSGLAVVTHTSAEYELRAGRVVRRNKPVATRGLNSNCNRRLKSVFISAATAGGVSHPWQTYLDNLKEKGMKSDMARLTLARKIAALTLAIWKKGESFDPKKLNWTN

SEQ ID NO: 337030 - protein, 375 aa, unidentified
MENFSTFIGMDVHKETIAVAIAEKHGTPRYYGEIGNTAEAITKLVKKVVPNGGRAAFCYEAGPCGYGVYRQITEMGYRCDVVAPSLIPKKAGDRVKTDRRDAVTLTRLYRAEELTAVWVPDQEQEAIRDLTRIREDMKSMERHARQRLSGFLLRNKKIYTGKNKWTQAHFRWLEKIRFESPIQQIVFQEYVDTVKQLQGRVASLEEEMWKALSGWSLGIVVEALMSLRGVNLVTAMTIVAEIGDMSRFESPRQLMAYLGLVPSENSSGKRQRRGEITKTGNSHVRRVLVEASWSYRLPARKTAHLQRKAEKTTEAVQAIAWKAQKRLCRRYWHLTLKGKLKVQACTAVARELAGFVWAIAREIREKNNTPAVIAA

SEQ ID NO: 337031 - protein, 407 aa, unidentified
MRVYLGIDWSQSKHDLCLLNEAGAVVAELTIPHQPEGFEQLDDLRRTAGVAASECWVGLETAHNLAIDFLWARGYHQVFVIPPNAVKSARGRYRQTNAHTDRSDAYVIADMLRTDQARLQPWHPDGDVTQQLRAKVSLVLHLTHTIRRLDNRLQAVLGRYYPAARHVFHDTLTLVGLRFLQAFPTPQAATALTRAAFSDFVRAQHYTRSEQMLLAAYARLTQPYPQAAPVIVAAYQAEAVLLAELLERLLNHKMTQLKTMQLLFHQHPDATVFASLPGVGDFLAPALLAKFGDDRERFPDAASVQCLAGTCPVTEASGKRKVIRFRRACDHEFRWLVQQWALQSLNDSVWAVAYWEQVRARGGSRSHAYRCLANRWLAIAWKCWHMRQPYDEAYHLHQRARRSQPRS

SEQ ID NO: 337032 - protein, 415 aa, unidentified
MALKIVYKICCGIDVHKTFVVACIASTDNKGITSYESHRFSTYTSGLKDLLQWLLTRNCKDVCMESTGKYWIPVYNILESDCSIVLAHPKYVKAIRGKKTDKKDAKWIADLFKHDLVAGSFMPPADIRQLRDLMRYRFKLTCFKSSEKNRLQNCLTISNIQLGNVVSDTFGKSAQAILDKLLENPADTSFDLEPLVFRSLKKKLPELRDAIDGYITPEQAGKLKIIKAHYENLESRKAELEKLILALAAPYQQELTILQTAPGISSEFTAIGIISEIGTNMEAFPSAKHLCSWAGLTPTNNESAGKKKSVRVSKAGCYIKPLLVQCANAVVTSKKHPEIRNRYLRIKKRRGHKKAIIAIARMLLTALYHMLKNGENYNAELYRKSDLPPVDREITVEQTLMIARNQGYKIKSATA

SEQ ID NO: 337033 - protein, 354 aa, unidentified
MVERETEVKSSGIGVTNPYHRTEHCDKIHEYRCDKEVGVIGVDVSKEHLITSRGRVRRYENNLKGYEEILKMKPCTIVLEPTGVYAIRPSQYFKERGVRVLQVSPNVLSREKELRGKKTDFYDAEKLENMVDKAKEYDYNPLKELVTLYLFLKDIETKYKNRLKRALFLVSDNDKVSKDRLEKLAKGDFTREELYQLEYTPIVLEEIKILAKNLLETQERLKEVRRMIEGQVPQDHVLLTIPGVGRLAAGIIIGIVGDVKRFPKPESFVAYCGLDPVVERSGRAVISRGISKSGNKYLRSLFYFLAVRNYSRNPTLLKFYETHKDKLKGKKLYVALARKLARIVWSVWYNNRPS

SEQ ID NO: 337034 - protein, 385 aa, unidentified
MTGQYRVPAFIPRDYEIFAGLDVDKQSIAVTFADHEKLVRSLRLPYSSEQLISYVRKHFPAQRVAFVYEAGPTGFGLYDDLVAEGHPCLVVAPSMVPSAPGQRVKTNRLDSKKLSEGLRGGQLHSIHVPSAVYRELRHLVQLRDTHVRQMTATKCRIKSLLLYQGMAFPAEDGRWSARALGELKLMPCSGAVRFKLDQLIRTLQFHFQSVVTVQKEIRRFCQNDPELRQSISLLTSIPGIGWIVASHLVARLGDWREINNVRQIGGFLGLVSSEHSTGDHQDRGAITRAGDSRLRNKLIQSAWVAIGKDPELRAFYRRIYQRHPIKVAARKAIVAVARKLTTRIYAVLKEQRPYEFRVDSSAAPLTAEETGGPRERLDMAQSEQP

SEQ ID NO: 337035 - protein, 417 aa, unidentified
MTQTFPDTFAAFVGIDWADAKHDICLQVTGTAKRECFQLEHTPEAIDAWVTTLRTRFSGQPIAICLELTKGPLVSALRKYDFLVLFPINPLTLARYREAFTPSRAKDDPTDAELQLELLLTHRDKLQRLQPQSPTMRALEQLVEHRRRLVGDKVRITNRLTSALKNYFPQVLQWFQDKDTHLFCDFLSRWPTLKAAQLARRSTLEAFFRDHHVYGEDVLAKRLHAVKTATPLTTDEGVIAPQALLVQALTSQLRVTLDAIEAFDQAIAQRAQCHPDFPLFQALPGAGPVFASRLLVAFGEQRERYTSAAALQKYAGVAPVTERSGKKAWVHWRLQCPKFLRQTFVEWAAESIRHSFWAQVYYQKQRAKGNTHQAAVRALAFKWIRILYRCWQDRTPYDESVYLQALYRRGQNLAEAS

SEQ ID NO: 337036 - protein, 339 aa, unidentified
MNVSTLGIDLAKNVFQLHGVGCNGQTVLKKKLTRDKFLPFLMQLEPCLIGMEACASSHHFARVLRQYGHEVKLIPPQYVKPYVKTNKTDAADAEAICEAVARPNMRFVQIKTAEQQAILVLHTERNILIRERTACANSMRAILAEFGIIMPRTLSQLYKKIPEILEEYDNELSAFVRCSVARQLEHLQGVEDQITLIEQELSRWAKTQPACQRVMKVPGVGLMTATYLVASVGNGQQFHSAKQFAAWLGLVPREFSSGGKQRLGRISKRGDRYFRYLLVHGARAVAAVIERHKDNMPWLYRLLNKKAYNVAVVAQANKTARILWSMLVHHTEYRTLSAV

SEQ ID NO: 337037 - protein, 368 aa, unidentified
MKKVSTAATMQSRDFCVQQKLTIGLDLGDRHSWYCVLDEAGKVQLEQRVRTSGKALRELFSTMPRSRVALETGTHSPWISRLLSELRHEVIVANARKVRLIGESRKKDDRLDAQTLARLARIDPELLCPVKHRSAKAQADLAMIRARAGLVRARTGLVNTARGLAKSYGQRLLSCNVGNMNPEKAEELSPELQRALEPLLSAIEELSERIVEYNEGIEALAQKSYPEVVLLKQIKGVGTLIALTFLLTLEDRHRFGKSRDVGGYLGLQPGRRKSGQSEPQMHISKEGDPYLRTLLVQGAQHILGPFGVDCDLRRWGLKLAERGGRNGKKRAIVATARKLAVLLHHLWVSGEVYEPLHNNSRTAVAAAA

SEQ ID NO: 337038 - protein, 356 aa, unidentified
MDNRKYIGMDVHQASISIAVSDAAGKVLMECIIETKAATVLEFIQGLRGSLWVAFEEGTSAAWLYDLLKPRVTKVVVCDPRKNALLKAGNKNDRVDARKLSDLLRAGLLTPVYHGESGVRTLRELSRSYLAASKDLTRVMNRLKAIYRSWAIPCAGQQVYSPRHRAAWLEKLREAGVRRRAEQTYQQLDFLLGIRKETRKELLTESRKHPARKLLEQIPRLGPIRVALLIALIQTPHRFRTKRQLWNYCGLGLRTRSSGEYRYTGGHLQHARKPPALRGLNVNHNHDLKNLFKSAATQAGTCKDDPLGEFYQNLLARGMEPPMARLTLARKIAAIALKIWKKGERFDPAKLKQQAA

SEQ ID NO: 337039 - protein, 356 aa, unidentified
MLNDKKYIGMDVHKESISIAVRNDAGKIVMECVIETKASVILQFIDGLRGDLQVTFEEGTWAAWLYDLLKPHVTELVVCDPRKNASMREGNQSDKIDARRLAELLRLNHLNPVYPGEHGLRSLKELVRSYLTMTKDLGRVMSRVKAIYRSWAIPCSGKQVYAPRHRAEWLAKITEPGVRRRAEFYYQQLDALRALRQQVRRDLLAESKKHPAWKRLCQIPSIGPIRAAVLLGLLQTPHRFRGKRQLWAFSGFGIETQSSADHRSVDGQLQRVKKPSSIRGLNRNCNHDLKNLFKGAAIVASSKPGPFQEFYTALLTKGIRPEMARLTLARKIATIVLIVWKRGASFDAQHLKPQTA

SEQ ID NO: 337040 - protein, 430 aa, unidentified
MKSNTQNAKIEAITEKTLVLGIDVGSETHYARAFDYRGIEYSKKPFKFSNTEAGFVTFKEWILDLKERHEKDKVIPGMEPTGHYWFNLGKFLQDNEMKPVLVNPHHVKKSKELDDNNPTKNDRKDPKVIAGLVREGRYMIPYLPDGVYADLRTASNIRFQLQAELTRIQNRISRWFNIYFPEYKTVYGKPDAKSGMLILKAAPLPEDILTLGIDGVNQIWRDAKLRAVGKARAKTLIEAAEHSVGSKEGAVSARMEIRMLLEDYESRNTRLQEVMVLIEELIRKIPMAEKLLEIKGVGIRTVSGFLAEVGDISRFNNPKELQKLAGLALVENSSGKHKGETTISRRGRKRLRYLLFEVAMSLVSKNQEFRELHNYYITRRLNPLKKMQSLMAIAAKLIRVFYAMLTKGVDYDPKKMVSDIKRPAVYLQVA

SEQ ID NO: 337041 - protein, 309 aa, unidentified
MTAYAGIDVSKATLQIALFPQSQNFGVPNTDEGLAQLVDWLSDKQVARILIEATGGYEKLSVKHLANAGFKVLRINPVRARQFARAMGKRAKTDPVDAQMLATFASALQDKDFVVPDEARERLTELVNQRDVFVQQRDDNRRRIQQARVAEVLEAYEQINATLQAMIRDVDKRIAAQSQEVDGPLMERLSAIKGIGPVTIASLFCYLPELGSLNRSQVAALAGVAPYNNDSGTKNGVRRIYGGRYKLRRAAYMSALVMVRHNEDFKARYAGLRAKGKCAKVALVACMRVLLIRLNAMVRDGTPWRDQAV

SEQ ID NO: 337042 - protein, 324 aa, unidentified
MIDGVLGIDVSKNTIDVSMSGCNKVRARSFANSADGWRHLLAWLISQKIQRVHACLESTGRYSIGIASALYDAGHVVSIVNPAQIRDFARTKLGRNKTDGVDASHIREYCELFKPQPWAPASEAHRRLGELQTIRAGIIAGLTEWKNRKNSGMIDAVAQSLADVTISHFTGQLGAVDEAITQTIDNDPVLRRKRDLLLTISGVGKTLAGVVLAELPGPDVLRSGAAVVAYAGLNPRLHQSGTSIDRMTRISKIGNAVLRAALYMPAMSAMQHNPAIVALVARLKSRGRLKPKQIVVAAMRKLLVLCFGVLKTGKPFDPAIAMGC

SEQ ID NO: 337043 - protein, 341 aa, unidentified
MAVAGGLDLHRGQLTFDYVDTGTGESWRGRICPADRESLRGWLRRFHGVPDVEFAVEGCTGWRYVAEELQRAGITPHLAEPAGTAGLRGRKRRAKTDWADARHLRDLLLDGRIPESWIPPGHVLEARALVRLYKDLLEERTSWQQRVHATLFHQGIPVVPKLGTADGQQRLEAAELSAAGRRAVQAGLRQIERLTQEMASLRRELARLSARQPGCRALRRAHYGIGGLLSVAVWAEPGDCRRFSSSDDAVRHTGLDITVYDSDGKRARGHIARQGPPVLRWALYEAALYASRPASPDYAYYCGVRDRIDGQRALLSVARKLARRCYHTLRDLGEDALAPAA

SEQ ID NO: 337044 - protein, 343 aa, unidentified
MSIVILGVDLGKNACSVVGVDAAGAVVVRRSMRRQTLIDYVAKLPACVVAMEACCGAHHLGRLFAANGHEIRLMSPEYVRPYVKAQKNDDRDAEGIAEAASRPTMRFVELKTQEQLDIQTLHRVRSRLVAERRSLINQLRAILLERGTIFPVGRRKLELGIDALLADEDTTLSPRLRQLVGELRAEWRELDTRVEALNGEFVELARNDAAARRLTSIPGVGVLNATALIAAVGDASSFAKARDLGAWLGLVPRQHTTGGKPRLLGISKRGNTYLRTLLIHGARAALPSLARSETPLGRWLTGMIERGVHRNAIVVALANKLARIAWAALRKDATFERGYPVAV

SEQ ID NO: 337045 - protein, 475 aa, unidentified
MLVKGTYLRMYNQRYFLQESLAIVKFITVTARGHASGDACGSLCNCEHLPCVVPPAIVGLQDICQPNSRFDSTSPVNALLRWDEKAGLHGMRYAPNNRRARSTRERRPAVKKISTVAKRGNEIFEEPKLTIGLDLGDRTSHYCLLDEAGNVILEHSLPTPPKGIQQVFSRISRSRIALETGTHSPWVSRQLTRLGHEVIVAHARNVRLGGESSRKDDQFDARTLARLARIDPDLLGPVRHRSAKAQIHLTVIRARAGLVSARTALVNTARGLAKSYGERLRKCGTGQVGRALAGGLSAALRDALDPLLQGIESLNERIAEYHRRIEQIAKEVYPEVALLKQVKGVGTLIALTYVLTLDDPHRLRRSRDAGCFLGLRPGRRNSGMSEPQMHISKEGDRYLRTLMVQGAHYILGPFGEDSDLRRWGLKLAERGGKNAKKRAVIAVARKLAVLLHKLWVSGEVYEPLRNNHKVVSAVA

SEQ ID NO: 337046 - protein, 339 aa, unidentified
MNEVTFIGIDLGKHSFHLHAQDAAGRMVFRKKLSRQQLLRTLANVPCCRVVMEACAGSHWLARQLAGMGHEPRLISPQFVRPFVVGNKNDFGDAQAICEAACRPSMRFVSPRNEAQQTVSAMHRLRERLVRERTATVNQIHGFLLEFGISLPRGAALMSRLPTVLDHETLPPRLVGLVVRLHAQVHYLEEQIRQVVQDLKASLREDDKGRRLLEIPGIGPITASALAVELGDARQFANARQFAASIGLVPRQYSTGGKPTLLGISKRGDRNLRRLLVQCARAVMQHTASRTDALSLWVKTLSTRRHSNVVACALANKLARIAWAILARGTHYEARTLTT

SEQ ID NO: 337047 - protein, 475 aa, unidentified
MTTPFRIFTLPKAHLRRASKLYGMSEQSISMEVVNPNAAGIDIGSRSHWVAVGQREKDVKEFGVFNEDLFALADWLLQKQIVTVAMESTGTYWQNLHAVLISRGFHVILCNGKFTKNIKGKKTDIKDCQWIQKLHTLGLLSSSFLPDQQTEQLRTYCRHRANLIHTAASTSKKMQKYLRLLNLRLDVVVKDICGLTGLKIIRSICDGEKEPIKLAALRHYNCKKSEEEIAKALQSNNRKDYLFTLQQELETYDHIQNKIQQCDIEIEKMLNEIIDNDDYKKQHLIESKPHKRINKNTPKNIDLNLKAYQMFEGNDLLAIEGMSYATVLALMSEIGIEGIRKFPSAKHFSSWLRLAPNNKISGGKILSSKVPKGSNRLKIALRNAANAIGNLRDSTPLRDFFQRINFRKGRVSAISATARKLAVIIWNMVVKNVPYKNPEGYLYLDQKRKLGLVKRIKKQIDKFDIKPEDVGFLST

SEQ ID NO: 337048 - protein, 421 aa, unidentified
MIPAVIERCAGIDVGRKFVVVCVMCGDAQATPTLEVRKFSMLTEGLEQLRVWLHQNECTHVVMESTGSYWKPIFNILDDGQLEVVLANSQQVKNLRGHKTDPNDARWLAHLLRHGMIRPSFIPDRDTRELRDLTRRRKKLVECAAEERNRVQRVLQEANIQLGMVLSDVFGESGLNMLDALMNPDASAEQIADLAVRTARKKIPEIRKALEGHRMTEHHRRLIRHSMEHLAFLEEQIAELDREIDDHTNSRPALKSATELVKSVPGIQPTSAAALVAETGADMGHFPSGGKLASWIGICPGNHESAGKRKSGQTRKGNPWAKRALVECAWSASRKKDSETKRYYERLKPRLQHKRALVATAHLMTLKVFEALSTGQPYQVDQQPELTAAKLRRLVRHHTHRLRRLNKWLQGHKKRHAQAPH

SEQ ID NO: 337049 - protein, 414 aa, unidentified
MEVIHSRCAGIDVSKRDAKVCVRIQGSGARPTRTTVTTWAAVTSRILELRDHLQNEQVSLVVMEATSDYWRPFYYLLEDDGLQVVLVNSRDARNVPGRKTDVSDAAWLADLGAHGLVRASFVPPPPIRELRDLTRARTIITRERTREIQRLEKLLEDACIKLSSVASDITGVSGRLMLQALIDGQEDPAALAQLAKRKLRAKIPELTEALNGRFKDHHRYMTALYLRRIDAHTADINDLSARIEAAMEPFRGARDLLTSIPGFNTTVAEVFIAETGADMTVFRTAGHLASWAGTSPGANESAGRVKSAKARPGDSYLKGALGIAALTAVRSNNTYFSAKYRRILSRRGPMKALVAVERAMLTAAWHMLTTGEFYKDPGAGYFTNHAPARVKARALGQLESLGYHVTLEPFPQTG

SEQ ID NO: 337050 - protein, 347 aa, unidentified
MKHYAGIDVSLKNSNVCVVDANGKIVREGKVVSEPVALISWLESLGVSLERIGLEAGPLSQWLYGALREAGLAVELLETRHVKAALSAMPVKTDRNDARGLAQLMRLGWFRPVHCKSMAAQEVRALLTARKLVQSKLYDIEMSLRGILRGFGLKVGPTTSQNFEARINHLVAGQASLEALAATLLSLHAVALRAFKSLDKSVRQISRADARVRLLMSTPGVGPLVALTYVAAIDDPARFTSSKSVGAHFGLTPKKYQSGETDVSGRISKMGDSSVRTALYEAAHVILTRPIKGGGLKSWAMKLAKRAGMKKAKVALARKLAVVLHRMWVDAANFDLQKTNAGMRAAA

SEQ ID NO: 337051 - protein, 369 aa, unidentified
MEQITRGLIVRVGVDLAKRVIQVHAVDAAGRVVVARALSREKFLSWCAQLQPGCIVAMETCSGAHHWARRLREIGVEPRLIAGHFVGPYRMEGRCGKNDANDAAAVCEAASRPHMRFVPIKTAEQQAVLAVHRLREGYKEERTGCINRIRGLLAEFGLVFPQSPQALRLQLADTLEDAANELPHLARVALQRAHLQWLELECHIAWCDERIATHVKADEQAQTVAQLMGIGPITASALVASVGDFRQFRTGAQFGAWLGLVPGQNSSGGKTSLGRITRRGDDYLRTLLIQGARSAVMSASKRTDRISQWLVQLTARVGWQKAVVAMANKNARILWAVLAKGRRFDADHCSLKPSWPPWPGRPGRLERKR

SEQ ID NO: 337052 - protein, 339 aa, unidentified
MKLFVGIDLHGSNNVVVIRDETGHTHLKKRLKNELELVLNQLAPFREQVEAITVESTYNWYWLVDGLMDHGYSVKLANPVEIQQYNGIKHTNDMSDAEFLAELLRLDILPTGYICPRETRHLRDLLRKRLLINRQRVTHILSFQGTLQRNLPSFMKAQEIKKLEEGDLNGMFDNPHLSLSAKKSIAIIQFLSKQLKEVEQVINKSAGKIDIHADLLTVTGIGKTLAATITLETADISRFFAVGNYTSYCRLVNSSRISNGKKKGENNRKNGNKYLSWAYTEVAQFSRQWCPQAKRFYQRKLAKTNKMIAQRALAHKMARACYYVMKDHVPYDPVRAFGH

SEQ ID NO: 337053 - protein, 385 aa, unidentified
MTNQDQETSFIPRDYDIFGGLDVDKKSIAVTFKDHGTMRKSLRLPYSANQLLNYTRKHFPGQRVAFVYEAGPTGFGLHDELTAASHPCLVVSPSMVPTVARKRVKTNRLDSDKLSDGLRGGQLRGIHVPPPSYRELRHLVQLRDTQVAQLRASKCRIKSLLLYEGIPFPTANGKWSAQALRQLEALPCNATVRFKLDQLIDALQFHFLAAAKVQKQIRYFCQNDPELSRCISFLVSLPGVGTITATHALARLGDWRQIKDVRQIAGFLGLVSSEHSTGDKENRGEITRIGDSRLRNKLIQCAWTAIRKDPELRAFYRRIYERQPKKVAARKAIVAVARKLTTRMYAVLKEQRPFVMRADSSIAPLTAEETGGPRERLDAAQNEQP

SEQ ID NO: 337054 - protein, 401 aa, unidentified
MSKKNTRNALDTSLSYAVIGLDLAKADCAVAAVPCSDDELGLIDRMDYESLFEQAEKLEPTLFAMEPCCGYSQISLRLQNMGHEVKVISGHAVKNWIATHKSNQKTDLNDAMALAKLALYDHDLQPIRVKNVEECRIASVQAIRIQLRSQATKSLVCFKSLCQCWGIVIRRGSSNTKKMAEAVAAVEKLLGAEVASSLMILRDAYKFTMKQINALDKLLDALVEANEQARTMKTVLGIGTQTAARLAVTTGDIKRFPMPRSYVAYFGLAPRNIITGHSGTPSPSKRGALKPVSSRGQGKVSRRGDRVARSFIIQGAATIYMLYCKDMLPECQLRRWLHEQIKRGKPYGKIIVSLAAKLLRIVWALLTYGEKFDSHKAGVPRSVLAAMEKPLKHDVAAESAA

SEQ ID NO: 337055 - protein, 405 aa, unidentified
MQNVYRRCCGIDVHKKLIVACFRNGKKAELRKFDTLTSSIKELGNWLLDNKCQMVAMESTGAYWKPIYNILELLDLDVMVVNAHHMKNVPGRKTDVKDAEWIAELLQHGLLKASYIPDREQRELREIVRYRKNLVEERSREINRLEKTLEGANIKLSSFVSDLTGVSSRNILQLALTGEVNEENIENLMHPSMKATKEQLLKAMDGVLSPVQKKLVRAILDHIDDMTRRIQDLDEIIDDQIKDNGNLIKNIDELPGIGKRSAEVILAEIGTDMNRFPSAGHLASWSGLCPGNNESAGKRKSGRTTKGNKYLKSTLIQCAKSAIKNKDSFFHAQYQRLVVRRGANRATVAVAHSMLIAIYHILKDGVPFKDLSSDYYTKFNTEAKARYYMKKLLELGVSVPVSLTA

SEQ ID NO: 337056 - protein, 341 aa, unidentified
MGDVSTIGLDIAKTSFQAHGADASGAVIFRKKLSRGRLLAFFAAQPSCVVAMEACAGAHHWGRELAGLGHTVRLIPPAYVKPFVKRQKNDAADAEAICEAAQRPTMRFVPVKSQAQQASGVVFRARDLLVRQKTQCINAIRGHLAEYGWVAPKGVCHVERLIQRVDDPAQTLPEAARAIVKVLAEMLRVLDQQIVVLDAEIGRRAKQDPVARRLMTIPGIGPVTASAIIALAPAPEAFRRGRDFSAWFGLTPLQKSTGGKQKLGRITKMGERTLQRLLVIGASAVIKQVILRGAPAGSWIGQMLARKPRMLVAVALANKTALIVWALLARGGIYRAPVAAA

SEQ ID NO: 337057 - protein, 378 aa, unidentified
MKIVYQRCCGMDVHKDSVTVCVLLIDEYGEWGSEKRKFRTMTRDLREMATWLASLRVEAIAMEATGVYWKPVWNILEAENKFRLLLVNAHHIKQVPGRKTDQKDSEWIADLLQHGLLKASFVPPPTIRRLRDLTRMRVKMRQMLATFANRIQKVLEDANIKLGSVASDVLGVSGRHILHAVVEGQQDPEQLAGLALGRLREKRAELQLALEGHITDHHRFQLKFLLESVQFGEKQLSQLEAEIRRLINQVEPGLVSSDGAVTAELAAAPGTGEAAVATTVKSPLQTVVELWDTIPGIDELTASTLVAEMGANMDQFPSAGHAAKWAGICPGNKEASLRQDIQRQRLVTTSSLPSCLGCLAHQEYLSGGAISSPDCAKG

SEQ ID NO: 337058 - protein, 390 aa, unidentified
MDNGFIVIHARAPVAARVFAPPSSTNPQPPMVSARQLDGPWGHQARGRACSGAPSLTFNPNGCLGFKPVLCARMGMSEKGMERFVGIDISKNSLDVCIEPDREVFRVAYEEAGIAELLSRLAGLAPTLIVIEATGGLQTRMATELAARALPVAVVNPRQVRDFARATGQLAKTDRIDAAVLCAFARAVRPSVRVLKDEATRELDELLTRRRQLVQMRVQERLRLHSAPKVQVKSLKRHIAWLDKCIAEIDADLHGRLRASEIWRVKDELLRSIPGVGDLTSRAMLGGCPELGSLNRREIAKLIGVAPLNDDSGKHRGRRSIWGGRAELRSVLYMAALSAVRRNPPIKAFAERLKAAGKAPKVVLVACMRKLLTIMNTMIKNNTPWSPKTA

SEQ ID NO: 337059 - protein, 354 aa, unidentified
MQYIAFDSHKRYTYAVVEEKEKGRVMEKRIEHRRGEIGAFLSQCEVGSPVALETIGSWYWIVDEIEAAGMLPRLVNARKAKMMIASSKKTDRLDAKGLNTLQRTGTLPTVWIPSSELRDIRELYRTRMVLTQMVIRLKNRILSCFSKYGISFDETSDAFNIKGRASLEAALEILPTQTCFAVKELLRQLDLLQEAVKEFEARMLQVQSNDPEIKLLQTIPGVGAILSYVIAYETGDIHRFPSASCFASYAGTTPSVHASGGKVRYGHTASDVNHYLHWAFIEAANVISMRHEVLRFRHTARLYERLRQAKGHGIAVGAVARHLAEATYWILTTKTAYREPNQNKQVVVVSSKEG

SEQ ID NO: 337060 - protein, 416 aa, unidentified
MLYVGIDWAVESHTVTLLTCPGKVLESLVIANTLKGFLKLLDAIRRYIGKDKPALTTKDVLFIIEDRNQRLVDFLLAQDFAGYLMEPSRMTGYRLRYRSSRNKTDPDDAFIMADVLCRDRDQLPTISPMNATVQTLKTLLMDREGFVRDQTRLTNRLIACLRQYYPEALELFSGVAGKTALAFLAAYPDFAAAHRLNRKQIRLFLAEHHCSRAKQLERMMAVLTQEPIAVPAAVIATKRRLALHIIRQLQAVQATVAEYDAEIQRIGAENAEVQRFKGLPGAGPQIAGGLYTLMGDDRTRSRFRCATALQSFVGTAPRTIQSGKMRAVCFRFGRNRFYQTLAQQMALGALRASAWAKQYYRGKRAEGKRHQHALRCLANLLMKIAFAIWRDQTTYDENRHLAQIMRHQMRQKSSMA

SEQ ID NO: 337061 - protein, 449 aa, unidentified
MREPQEIEDEEHEQLVERVAAVDVAKASGMVCTRVPHPSRPGRRRTRVQEVDATTNAIIELGGQLAAEGIEKVTIESTSDYWRPFFYLLEAAGLAVQLVNAHDVKNAPGRPKTDKLDAVWLAKLTERGMLRPSFVPPAEIRQLRDYTRLRTDLTRDRARHWQRLEKLLEDALIKVSAVASTMDTLSVRDMLEALIAGQRDPQVLAGLARGKMKAKRAALIEALTGKFDDHHAELARMLLDQIDALTAQIGTLTTRIEQLIAAIPAAQGVDADGTTGPGAGSGPGAARLDAITRLDEVPGISAHGAQIVLAEIGLDMTRFLTPGHLVSWAKLCPRTIQSGAKNRSGKAGKGNPYLKGILGEIAAAAAKTDTFLGERYRRIVKRRGKLKALVAVARTILVIIWHLLADPAARYHDLGAGYYASRIDTERKTRNHIRQLEALGYTVTLAPAA

SEQ ID NO: 337062 - protein, 408 aa, unidentified
MQVLYTRCAGLDVHKDTIVACVRCVSPPMHQEVRSFGTTTAELLKLADWLAEHSCTHVAMEATGVYWKPVWHVLEDEFELVLANAAHIRNVPGRKTDVNDAMWIADLLAHGLIRSSFVPPQAIQQLRDLTRTRKQLVREVSQHSLRIQKVLEDANLKLGSVLSDVLGKSGRAMLDAIVAGETDPARLAALAQGTARNKTAELREALRGRVTEHHRTMLRLHLQVVDALQRTLAELDAAVGKALAPIQQRTRLLTTMPGVSDLTASVVVAEIGVDMSRFPTAGHLISWAGLCPRSDESAGKRRSTRVRKSGTWIKTTLVTAAWSAVRVKTSYLRAQFLRIKARRGAKKAILAVAASMLTAAFHMLRDGTEYKDLGSEHFDRQDRSKTIRRLLKRLQDLGCAVPVEAHVA

SEQ ID NO: 337063 - protein, 349 aa, unidentified
MRFYQNQHRFYCGVDLHARCMYLCILNADGQTVLHQNYPADARAFLAAVAPFRDGLAVAVECMFAWYWLADLCAEHQIPFVLGHALYMKAIHQGKSKNDRLDAAKIAGLLRGGLLPQAYVYPKAMRATRDLLRRRSFLVRRRAELLTHLVNTNSQYNLPPLNKKLVYPANRGELDLPARFTDPSARKLVECDLALVDTLDVQIHELERHLIKTARVDDVQAYARLQSIPGVGKILGLVLLYEIHDVARFPAAGNFLSYARLVRPTLESAGKASGFGNKKIGNAHLRWALGEAACLYLRSSERAKRWQLRMTQKHGPGKTLGILAAKLGRTVYHLLRTKRIFDEARFFAT

SEQ ID NO: 337064 - protein, 346 aa, unidentified
MQAVTTIGLDIAKSVFQVHGVDATGKVIIRRQLKRHYVLAFFQKLSPCLVGIEACATSHHWSRELKAIGHTVRLMPPAYVKPYVKRQKNDAADAEAICEAVTRANMRFVATKTPEQQSCLMLHRTRHLFIRQQTAVINAIRAHLAEFGIVARVGRTGVEELLDVVADSAGSDDRRLPEVARVCIAALGVQLRMLKSQILEFDCRIMAWHRSNETSKRLDEIPGVGPALATALVASVADPKAFRSARHFSAWIGLVPKQHSSGGKDRLGSISKQGDRYLRSLFTAGALAVIRYAKIHGTKHRPWLTAMLARRPTKVAAIALANKIARMAWAMMAKGERYREPAALAA

SEQ ID NO: 337065 - protein, 348 aa, unidentified
MQVTTLGIDLAKNVFCVHGCDANGKAVLRKQLSRRQLLSFVANLPRCLVAMEACAGAYYWAREIEKLGHQVRLIAPKFVRPYVKANKNDASDAEAICEAASRPSMRFVAIKSAAQQDVQAVHRVRQQLVKARTSLANQVRGLLAEHGIVIARGFAPLRRALPMILEDRDNGLSAVMRELLGEIGERLRFIDDRLRKYDVTIHRLFREDERCQRVAAVEGVGPLTATALVAAVGNATDFRNGRELAAYLGLVPRHRASGGRTVLLGISKRGDRYLRTLLIHGARAALHRIERHRGARAIWAARLKLRRGANVAAVALANKNARVLWALLSREQSYRPAPFPARVPQAGG

SEQ ID NO: 337066 - protein, 401 aa, unidentified
MPTLWAGIDAGKTTHHCVVIDRYGTVLLSTKVTNDETPLLDLISTVMDLDGQGEICWATDLTDGGAALLIALLAAHGQQLLYIPGRVVHHAAATYRGDGKTDAKDARIIADQARMRTDLQPVRIATQVAVDLRLLTSHRLDVVHDRVRAINRLRATMLEYFPALERAFDYSKNKAALVLLSHYATPESLRRIGVTRLAAWLKARGCRNSAGVAKAAVGAAHAQGTNLPAQSVGSALVSKLAAKIAAIDDDLAGIDAEITQQVAQHHGATNLLSMPGFGPVLAATFLAQIGGSLDAFDNVDRLACVAGLAPVPRDSGRISGNLHRPRRFNRRLLRTCYLAALSSLKNSPASRTFYDRKRAEGKSHKQALIALARRRMNVIWAILRDNTHYMEPVASNIQTAA

SEQ ID NO: 337067 - protein, 370 aa, unidentified
MNKCITIVGLDAHKESIEIVTADTVGKQEVRHYGKIGGDMASIDKAVRRLQSTGAALHFVYEAGPCGYEIYRHLTKRGIHCAVVAPSMIPKKTGSRIKTDRRDAEALARLYRAGELTPIYVPREDDEAMRDLSRAREDASKAQRTARQRLGAMLLRHGYRYPGRKAWSPAHMRWLSDVTMPHPAQQIALQEYIHAVIECTTRLQRLTEQMLVLLPVWRMSPIVKALQALRGVAPIVAITTVAEIGDLTRFDNPRQLMAYLGLVPSEYSSGNSISRGSITKTGNGHVRRVLVEAAHTYCHPARVSRSLLKRREGLPKHICDIAWKAQVRLCGRYRKLMAKGKMRTKVVTAIARELSGFIWAIAKEVPVATA

SEQ ID NO: 337068 - protein, 419 aa, unidentified
MSFKILKNNCCGLDVHKTWIYACIGITDSLKRTEYKEARFSSFTKGLQELCDWLSKYNCTDVCMESTGKYWIPVFNILEKNNIWVTLSHPKYTKPQKGNKTDRKDAKWICDLYMCGMVKPSFIPPADIRELRDLVRYRFKLTCMITGEKNRAHNCLTVSNLKLDDVFSDIFGKSSRSITEQILQHPGETFDVSPFVDRRCKTPIEEIQAAVDGAISNEQTVKLRQCLNHIDELEMHKAEIEREIFRLSDKYESVLNLIRTVPGFDKNPLTAIQVLSEIGGDMSVFPTAKNLVSWAGCCPRNDQSNHKIKSTRISRAGSYFKPVLVQVANALIKSKKHPEFTTRYRRIKAHRGHKKAIIAICRMILTAIWHILSDLKPYTSEGFLESRPVNKSKILTTSQALNLLKQRGYIIKDDVVPVT

SEQ ID NO: 337069 - protein, 310 aa, unidentified
MDAIVVGIDVSMDRLDVHVLPSGEAFFVANDASGVEMLASRLAGLGPNVVALEATGGFEMLAASTLSAAGLPVVVVNPAQVRSFADALGRRAKTDTIDAAVIARFAVASGVKAKPLADEQTRLFAELITRRRQIGAMIVAEEARLKRAANRQLKKSISRLLVALRREMETLDDDLDSQVRTSPLWRIKENLLSSVPGIGKGIARTLIAELPELGSLSAKQIASLAGLAPFTRQSGKWRGKSFISGGRASVRAALFMGALVASRHNPTLKAFRDKLVAKGKPKIVAIIATARKLLTILNAIIRDQKPWQNA

SEQ ID NO: 337070 - protein, 492 aa, unidentified
MNDPNRKIPTAASPSHTANTSDYLKSIGRLAERARRDADECARLASLPIQHTHAAGVDVGDASHWVCVESTPDGSDAVREFPAHTPGLRQLVAWLTRCGVTTVALEASGVYGHVLFLTLLEAGFHVVTTAPTFTRQIKGRPKTDRRDCQWIQRLHKHGLLPSIFQPDEAVQTLRDYVRQRANLVRLSGHHIQRMQKALELMNLKLTKVLGDVTGVTGLKILRALLAGERDPHVLASLRDRRCKHTLEEIAVALDGRYRPEHVLELRCCLTLWEHYQRVIAEVDQAIAAQLRTMARHTDLAPLPPKPRQRGRKPHDPRFDVRTALYYATGVDLTAVEGVDEIHALTLVSELGSDFTKWPTVKHFSSWLGLCPNWKKTGGKVQSSRTRRGKNRAAHALRLAAWSLMRSKSYLGAYLRRQRSRLGAPKAITATAHKLARILYNLMRHGVAYMKQEEGAYAEQVRFRLEKQLQRRAKELGFEVKKIEPAQLPTAAQ

SEQ ID NO: 337071 - protein, 345 aa, unidentified
MGKHFVGLDASARSVNICIVDSNGQVVHERKMGVDPEAIATHIFNLALDIERIGLEAGMLSQYLYAGLAAAALPIICVETRHMKAALSAQLNKTDRHDARGIAQMMRVGLYKVVHVKTPTSQRIRTVLTAHQLLRTKLLDVENEVRGFLRNLGYDLGKVTARDFEPRVRELAGDTDLMIVVEPLLVVRRTLRDGFAQLDDLLVRLAREDAVCRRFMTVPGVGPLVALTFRATVDVPARFARSRAVGAHFGLTPRKHQSGEVDRMGRISKWGDAMMRTALYEAAQVLLTRVKRWSALKAWAAQVSRRRGHKKAIVALARRIGVILHRMWVDGADFHWGTPPVAAAN

SEQ ID NO: 337072 - protein, 310 aa, unidentified
MDAIVVGIDVSKERLDVHVLPSGEAFFEANDAAGIEKLAGRLIGLSPAVVALEATGGFETLAASALSAAGLPVVVVNPAQVRSFADALGKRAKTDPIDAAVIARFATAAGVKAKPLADAQSRLFADLVSRRRQITAMIVAEDARLKRAANRQLKKSIARLLVALRRELAALDADLDKQIRTSPGWRIKEDLLSSVPGVGKGISRILIAELPELGSLDRRQIAALAGVAPFTRQSGKWRGKSFISGGRTSVRAALFMGAMVATQHNPPLKAFRDKLVAQGKPKMVALIATARKLLTILNAIIRDQKPWQSA

SEQ ID NO: 337073 - protein, 348 aa, unidentified
MKKVSVIGFDMGDKTHKVVALAEGGEVVERIEVSCTPEGVREYLSGHPGALVAMETGTHCRWMCALGVELGHEVLVGHARKLRSIWQSSRKNDWNDAEQLARLARADRKLFHPVRLRSDAAQALLRMVKARDILVRNRTGIVTMIRGFTKADGERLKSCSTESFVCLEFEVPASLRKTTKPLFAMLRELAKKIALYDKMLADALKDEALAADAKLLQTVDGVGPVTTAAYLATVGDAQAFGNARDAGAYFGLAPRQSQSGDIDKQMRISKEGNGLVRRLLVSSAHYILGSFGPDSDLKRHGLRIAERGGKNARKRAVVAVARKLSVVMIAMLKNRTEYRSLSQVEGMA

SEQ ID NO: 337074 - protein, 338 aa, unidentified
MTIVMGLDQHRAQITAEWLDTDTGEISRKRVAPADGDGVRRFAATFRGRDLEVALEATTGWRFVVEELRAIGAGVHLAEPAETAARRGSKKRAKSDRADARHLRELLMVARLPESWIPPDHLLDLRARVRLRHTLADQRGEWQQRIQAVLYHHGCPQRRQLMTRDGREWLAEQALPETAREQVTVAIAMIDALDVQLAPIEKELRAYARGQPGCRALMGHYGIGELTAVTILAELGDCRRFSSSRHAVRYSGLDITVHQSDQRRAPGHLSRQGPPALRWALFEAAQVARRTGSPDRDYYTQAAERLGSNRACLAIARKLLKRSYHTLRALGEEAPQPA

SEQ ID NO: 337075 - protein, 469 aa, unidentified
MKRKSHRDKGQKMSPFSGDLQLIEPDAAAVDVGSRSHWVAVNPERDPNPVREFGTFTTDLMSLADWFAQCEVKSVVMEATGVYWVSLYDLLEERGFKVYVVDAHTVRHLPGRSKSDVKDCQWLRRLHSYGLLRGCFRPPAQIRQLRNYQRSRSNIVDAAAQQQLRMQKALTLMNVHLHHVISDISGLTGLAIVRAIVGGERDPKQLARLRDPRIVASKETIQKSLEGNWQEELLFDLKIALESYDHFQSQINAYDEQIRRELKEVPSKVDLRQQALPAGRLRVCRKRPGMSQQDQLELRAELYRISGVDLTRIDGISLQTAQKVFFEIGTNVSAWDDEKKFSSWLGLSPNHRISGGKVLKRSSRKVVNPLSTALRLAARTLRNSHSALGANFRRLIAKIGMPKAITAMARKLAVLIYRMLKYGTQYVDKGMQHYEAKYQATKIQYLRAQAATLGMILLPKQSAGAGATT

SEQ ID NO: 337076 - protein, 505 aa, unidentified
MILPPEDGCRNNLSRKSRLKAIARGQGKKKQRKQKPQPASNKSQKPEEAPKVAPRGGLPVAAAAGLDQLEQVNRNAAGIDLGADVHFVAVPPGRDPETHVRCFSTFTADLVALADWLKQCGIETVAMESTGIYWIPLYDLLEQRGFEVLLINPADFKKFRRKTDVSDCIWLQTLHTFGLLQGSFRPHEKIVTLRSYLRHRDNLVKCATDEVRRMQKALEQMNVKLTEVLSDIMGVTGLAIIRAILAGERDPQRLAQLRDERCKNNGATIALALQGNWREEHLFALRQGLELYEVYLQKLTQLDERIAAYLETFEDRSAGQKLAALPRNRALEPQLNLRDLMHKLTGVDLTEVDGIGGQAALQIVSEIGTDMSKWQTDKHFVSWLCLCPELQLTGGSRKSTRSRTQPSKNRAAAVFRLGAQSLLKADCALGAFGRRLRAKKGGAQAVTAVARKLAIIVYHMLKEGRPYKDQGAAYYEARYRERLVEGLRRRAKQLGLDVVPLATAP

SEQ ID NO: 337077 - protein, 410 aa, unidentified
MEVVHAHCAGLDVHKETVVACVRHMTDGKVTTTIKTFNTATQELLALSDWLSAENATHIAMEATGVYWKPVWNILSDGEFELVLGNAAHIKNVPGRKTEVKDAAWLADLMAHGLVSGSFVPDQTTQEMRDLLRTRKQLVRERTSHTQRIQKTLECANIKLDSVVSNVVGVSGRRMLEALIAGQTDPKELAAMAHGRLQATPAELEAALRGRVTAHHRFMLKLHLDQIDSFDEAIARIDKEVKDNDKNFRAAVELLKSVPGVGSLAAEVIVSEIGIEMSRFATAGNLVSWAGLCPRNDESAGKRRSNRLKAGAPWLKTTLVQCAWGAARSKGTYLHAQYVRIRARRGNQKAICAVAASILTTAYHMLKDGTFYEDPGPDYFDRRNKDQQANKLVNRLQNLGFNVTIHPAAA

SEQ ID NO: 337078 - protein, 343 aa, unidentified
MERYVGLDVSLKLTSICVVNQTGSIVQEGVVDSDPEAIASFVRSKAPGTVRIGIETGPTTTWLWTELKRLGLPVICIDARHAKAVLKMQINKSDRNDAAGIARIMQTGWFKEVRVKDLDSHAVRALLASRALLVKIKRDLENQVRGLLKNLGLVIGRAKFNVFAVRAEGLIENRSELVAAVRPLLEARKAIERQVDDLDRKVHKLARHDVQVRRFMTVPGVGPITALCFKATIDDPTRFKRSRSVGAYVGLTTRRHASGEIDWSGRISKCGDAMLRMYLFEAAGVLLTRVPKWSGLKAWGAKLTKRNGLRKAKVAVARKLAVILHRMWIDGTEFNWSTKKAAA

SEQ ID NO: 337079 - protein, 349 aa, unidentified
MSMVCGLDLHRGQITFDALEVESGEVWRGRVRQPDRTRFRRWLTEDLAARAKGGAVAVAVEGCTGWRYVTEEVLAAGFEAHVAEPADTQAARGRKKHAKTDRSDARLLRELLASGDLPESWIPPEPVLEWRERVRLYKTLLDQRRMWIQRIHAELFQHGVSLPEGQIGSAETRQWLSGDTAQLSAAARQRVAVGYHLIDATDAMRLPLRAELDRFGRRQPACKALAAAHYGIGPLTAVVVWAELGDCRRFTRSAQVVRHTGLDVTVDSSDRHRARGHLSRQGPETLRWALFEAGLAASQATSPDRAYYQAVKQAHDGKLAAICMARKLARRCYHTLRQMDPQVVYAMPT

SEQ ID NO: 337080 - protein, 373 aa, unidentified
MPRYSTAFGMDVHLRSTTVCALDAETGEAVTRRFRGNPWGEVAEWMSGFPGPSLAAYESGYLGFAPQRELSGLGVDCVVAAVSKVPRSAADLSSKNDRNDAARMAKAILSHDISPVWVPSPEIEGLRDLAGAHDAATARLAAAKQRLLAFLARRGYAYGGTTPAGNPRRYWTYDFLRWLDKVRPADDGGIRALAALRSEVEAAAETRDDPLAECRAAVAAGPLSAEVEALQSIKGCGFALAAAFASEVGDFSRFRSGRQVTAYFGLAPKQRSSADSVRLGGISGAGNALVRRLAVEGSWSYVQASHQPKLMPKGSGVPLGVRMHGRKGSERLLRRREEMLARGMPQAKANAATAAELVRWLWALGAMCREATE

SEQ ID NO: 337081 - protein, 355 aa, unidentified
MTRMKYIGLDVHQASISIAVLDESGKLVMQSVIATRASAILEFLEGLRGTLQITFEEGTYSAWLYDLLVRRVSKVVVCNPRKNALLKQGNKSDRIDARKLSELLRNGSLSPVYHGENSTRTLQELARSYMTLTVDTTRVMSRLKAIYRSQAIPYGGKKLYTRKHRQEWLTQLHQPGLLRRAERLYEELDLLQQLRRQAKQELMMESQKHCVCERLRTIPYLGPIRAAVLAARVQTPHRFRTKRQFWAYCGLGLETRSSADYQQMEGQLQRSRKKVLIRGLNVDHNHDLKNIFKGAALSASIFAGPLQDFYQERITSGIQPEMARLTLARKIAAVALTIWKKGESFDAAKLKTQAA

SEQ ID NO: 337082 - protein, 344 aa, unidentified
MKYYAGLDVSVKETSICIVDETGKICGELKVASHPEDLLRVLQNPAWSLARVGLEAGPLSQWLFSALAEAGLPVVCIETRHARAYLKAQVNKTDRNDARGIAHMMRVNLFRPVHVKTLASQKQRALLTARKLLQGKAIAIENDIRGLLRNFGLKVGVVGAAKFEQRIQELVEGLPDLGELMEVLLEARRKLREQFTKLHRKLLAIVRDDTVCRRLMTIPGVGAVTALAYRATIDVPARFRNSKAVGAVLGLTPAQHQSGEMNRVGRISLCGDGMMRALLYEGAQTVLTRSVKWSWLKAWAMKIAKNRGLKRAIVALARRLAVIMHRIWVDGTEFQWTKEKAASA

SEQ ID NO: 337083 - protein, 348 aa, unidentified
MKIVGCDFHPSFQQVAILDISTGEVRELKLMHADGEAERFYRELEPPVLVGMESMGNTLWFERLMERLGHELWIGDAAQIRASYVRKQKTDKRDAGHILQLLIEKRFPRIWVPSHQERDQRQLLLHRHRLVQMRTKVKTELQHLALNQGLQQKRSLWSVRGRANLEKLPLAGWTARRRADLLKILEMLEGQVADLDEAVGKVAFANAQARLLTTQPGVGPITALAFVVTIGDVARFKRGKQVASYLGLIPSERSSGQKRRLGAISKQGNVFLRTMLVEAAQSAVRHDEEFKKEYAHRCHSKPTGVAKVAAARKLAVRLYWMLRTQTPYPEVVRKVVRNEGSPSHSLVG

SEQ ID NO: 337084 - protein, 326 aa, unidentified
MTSLPSPTRDARITVGVDVSKATLEVAISEGARSLVLPNDEAGCAALLSELRELDVALVLFEATGGFELACATALQLAGLAVAVINPRQARDFARAMGYLAKTDRIDAAVLADMARTLLARSDLSKLVKPLPDAQQLELQGLVTRRRQLIAMKLAEDHRMKMPGVRQRRSLNTIIKALDREIARVDKDLQAFVGANHAELAALLDSVKGVGKATISTLLAEVPELGKLSGREVSALVGVAPINRDSGTMRGKRTIFGGRPSVRKVLFMAALVASRHNPVIKAFYQRLLAAGKPKKLALTACARKLLTILNAMARTRKPFNAALHLD

SEQ ID NO: 337085 - protein, 334 aa, unidentified
MNNVTTVGIDLAKSVFSLHGVDASGRVVLRRSVSRAKLVSVVAQWPPCLIGMEVCTGAHEWARSFEQFGHTVKLMPGQYVAPYRKSGKNDGNDAEAICEAVSRPNMRFVPIKTREQQAQLCVHRVRSGFVEERTGIINRLRGLLAEFGHVMPLGVIQVKREVPRLLELLPALVAQIARDLLEHVRLLDERIGQYERQIQAHVQHSELAQRAQTQKGVGPLTASAIVASVGEAREFKNGRQFAAWLGLVPRQHSTGGKARLGQITRSGDSYIRTLLVLGARAVLRRAPYERDPLSRWAVALRERRGYHRACVAIAAKNARRVWAALAGRTPLTVE

SEQ ID NO: 337086 - protein, 375 aa, unidentified
MSDHSEAFVAFDTSKLRNAVAIADAGRTGEIRFLGEIENTGAATAKLVRKLAAKYARLTFCYEAGPTGYGLYRLIKSLGHECIVVAPSLIPKRPGDRVKTNRRDALSLVKLLRAGELTAVWVPDRHHEAIRDLTRARGTAALDLRRKRQQMSAFLLRQGLHYPENRHTWTKAHMSWLASQKLAHAEQRLVFEEMMLAMRQAQERIERLEQAIRAAVPDWSLAEVVTALMAMRGMDLVSATTFLAEIGDLSRFQTPRELMAYLGLVPSEQSTGDKVIRGPITKAGNGRARRMLVECAWSYQHPPRVGKDKQEKVAAAPPAVREIAWKAQCRLNRRYRALVRRGKPKTVAITAVAREFAGFIWAVARAANAARAEAK

SEQ ID NO: 337087 - protein, 361 aa, unidentified
MGNTIICGIDAHEKTLVTRIGVNQEAAETKRFSNTRSGRQALFSYVKKLSGEYAGGKMVMAYEASTLGYGIYDESVTSGIECHILAPTKMPTARKDRKKKTDERDAQRVFEIVRAYALAGNELPRIWIPDHQTRDDREVVRGRLDAAQKLTGLKCQVQTLLKRTGVVKPAEAGDSWTQRYRLWLKGLCIKPGAQIALQSLLRQIEGIEAEIKILDQAVEQLAEGERYKAVAGALVRKVKGVGLLTAMVYVTELGDLSRFNNRKQVGSYLGLVPSSNESGEVADHKGHITREGSARVRKVLCQATWARVAHDKEEAVVYQRIVKKNPKHKKIAVVASMRRLGVLLWHIGLAAQKEAVKEQAA

SEQ ID NO: 337088 - protein, 342 aa, unidentified
MDYFAGLDVSVKDTSVCIVDDVGKIIREVKVASEPEALLGVLKNTAYRFKRIGLEAGPLSQWLFSALGEANLPVICVETRHMRAVLKAQINKTDRNDARGIAQMMRVGLYRPVHVKTLRSQKLRMLLTHRKLLQSKAIAIENDLRGTLRNFGLKVGIAGRTKFEARIKELVEDMPDLAVLVEPLLVVRRALREQIAVLHRRLLTIVRDDEVCRRLMTIPGVGSVVALTYRATVDVPARFRKSKSVGAVFGLTCSKYQSGEIDRSGRISRCGDEMMRVMLYEAAQSMLRSKKWSLLKAWAMQVARRCGMKKAIVALARRLAVIMHRIWTDGTEFCWTREAAAA

SEQ ID NO: 337089 - protein, 355 aa, unidentified
MNDAKYIGLDVHQATISAAVRDSSGSLVMEATLETKAETILEFVHGLRGSLHVSFEEGTCAAWLHDLLQPHVTEVLVCDSRKNALLRVGNKNDREDARKLSELLFLNKLHAVYHGETGIRTLKELARSYLTITRDLTRVMNRLKAIYRGWGIACAGQQVYAPRYRAEWLAKITEAGVRRRAEIYYLQFDTLAALRQEVRRELLAESRKHPAMRLLRQIPSIGPIRAALLIALMQTPHRFRTKRQLWAYCGLALRTYDSGEYRFVGGQLKRSKKAVTIRGLNKNHNHDLKNIFKGAATRAAATAGPLQNFYQARIAKGMKPPMARLTLARKIAAITLLVWKKGVRFDAEQLKQQAA

SEQ ID NO: 337090 - protein, 330 aa, unidentified
MEVYYGVDFHPHQQTICWLDDGTGELKTRTIFHKNREELAGFYREMPKGTVGIEATGKADWFEELMFENGHKLLVGNSGLIRKRAESRHKSDTRDAENILTLLMRQDFPALWRRSRESVAILEMIRLRSGLVRAADAGLQPAAGAGARFRAAEREDGDASVPGDPGGGAGRSAQGAAAGDPAADGRAAERNIREIERRLEEEGGTDPRVALLRTQAGVGILTALCLIHTLGEVARFSSSRQVVAFAGLCPLEKSSGARVSFGGISRAGSPLLRYMLGQAANAAARRDERLRAFYRRLARRKPGGWRKRPSPESFLSNSRSCCGEHHRTGV

SEQ ID NO: 337091 - protein, 349 aa, unidentified
MSDKRKSAIAVVGIDIGKYSFHIVGLDERGAIVLRQKWSRSQVGARLANMPPCLIGMEACVGAHHLSRQLKVLGHDARLMPAKYVRPYSKGQKNDFRDAEAIAEAVQRPTMKFVATKSADQLDLQALHRVRERLVSQRTGIINQIRAFLLERGIAVRQGLRFLRAELPGILANPSDVLSLRMVRVLEELSLDWRRLDERIEGLTTQIELLARHDTACERLMSVPGIGPIISSAMVAAIGTGDVFSRGRDFAAWLGLVPKQISTGDRTILGKISRRGNRYLRVLFVQAAWVVLIKPKAWERYGLKRWIEAAKKRLHRNVLAIALANKLARIAWSVLARGRAFETSKLQAA

SEQ ID NO: 337092 - protein, 351 aa, unidentified
MIIIGVDYHPSFQTIAFLIEETGECAEQELSHSDGQAEKFYRDLKQRGLRVRVGMEATGYSRWFERLLAELGIEIWMGDPAEIKAKRVKKRKTDRNDALLLLRLMRENNFPRIWVPSPENRDLRQLLWHRHRLVQMRTRIMNQLQALAMNEGYRWKKKLFSEQGRAQLDKLALAPWASRRRQELLELLDRLNPTIEELTAAVEREARKRPEALRLMTHPGVGPLTALAYVMIIGTPARFQRGKQIGTYVGMIPSEDSSGGKQRLGHISKQGNSLLRFLLVEAAQAAARINAEWRRRYIHLAMRRHKSIAKVAMGRKLGVRLYWMWRNGCEYSQSLEFGSYAGQLGIGHGVK

SEQ ID NO: 337093 - protein, 317 aa, unidentified
MDVETTADRFVGIDVSKARVDVHVRPDGTAFGCATDPEGLSALVARLKPLSPCLVVLEASGGYERVVAAALAEAGLPVAIVNPRQVRKFAGAIGRLAKTDAIDAAVIAHFAQAVRPMARPLPDDLSVRLAELMARRRQLVVMINAEKQRLAKAQDRIAQRSFKALLKSLEAERARIDKAIDKLIEASPVWCAQQDLLKSVPGIGDVVARTLIAELPELGRVDRHQIAALAGVAPMNRDSGRYRGKRKIQGGRVEVRAFFYMAYLVAIQHNPALKSFYRRLREGGKPARLALVAAMRKLLTILNAMLRDRKPWASAQS

SEQ ID NO: 337094 - protein, 335 aa, unidentified
MEHCGIDLAVRSSWICVTEESGKVLKELVLATEEEALRGFFEGRGQMSCLVEASPLAEWTAKVLEGLGHRVTVIDTRKAKGVIRTKKKTDRLDARNLAKMSRTGWYTAVHRKSARARAMRTYLQARQGVLATALAQGSRIRGLLRAHGIKLGQVADSRYEQRVRQLTLEQAPQLWPMLQPLLRLRAEAIRSAREMQKQIASQMSQDQVGRRLMSVPGVGPLTACVFMATLDEPQRFASGDQVAAYVGLVPSVQQSGEKDIHGHITREGDKVLRSHLFEAAHTLLTRKKGTSRLKKWGLKLAKKKGYGKARVAVARKLAILLHHLWITGQSFQAAA

SEQ ID NO: 337095 - protein, 320 aa, unidentified
MQTPTKVLDIGADVAKDEIVVACSEGSFPVRKIANQRTALLAFLKGLPPNSRIGMESTGIYHELFANLAHKLGFIVFVLNPKDARHYAKGVGKRGKTDRVDAELLARMVAKEHADLHAWVPPTPEQREINRLLKRRAKLSALRQALGMSLKGMVGFSTDLKTLRQRFDQVIARIDQRVKELVEANPDRKEHVTHLRTITGVGPVVSAALVNSLERMPLKNADAFVAFTGLDPRPDDSGRHQGKRRLSKRGPSELRRLLYLAAMSAKKTKAWKPLFEHYRAKGLSTTACFVILARRIARTAWSMYSYKTEFDPVRLTKGLT

SEQ ID NO: 337096 - protein, 496 aa, unidentified
MKAKACKAKGKHSHSSKRGAEIAARRGAEGMEIVNPHAGGIDCGAQEHYVAVPPQSVEPGEPVVRCFSAFTEGLDALVEWLKACGVTTVAIESTGVYWIALCQKLEAAGIEVYLVNARHVRHVPGRKTDVKDCQWLQRLHSFGLLSASFRPEDMICRLRSLQRHRLNLVSTAGAEIQHMQKALQQMNLHLHHVVSDITGVSGLRIIEAILAGQRDAVQLAKLRDHRVYKSTLAQMQAALVGDYRPEHLFVLGQSLQAYRFYQARTQECDLEIESQLQQLAQRFESSSALGAELSQPEALDEADAPSQNRQPAKRKVKRKPQANEPKIDLADYLRRICGVDLTQVVGLNVLSVLLIVSEIGVDMSKWRSAKAFSAWLGLCPRNKISGRKVLDTRTCKVISRVATTLRLAAQSVGRTDTALGIFYRRKKGHLGPAKATTATARKLACLVYHLLKYKEQYREPDPNTYQLKVQKSILVKIQKQAATLGFKLLPTALVPA

SEQ ID NO: 337097 - protein, 373 aa, unidentified
MERNTTFIGLDVSKETIAVAIADGGRRGEVRFYGTISSKPESVAKLIKTLAAKHRSLAFAYEAGPTGYGLHRQLIELGHACHVVAPSMTPARPGSQIKTDRRDAVVLASLFRAGELTSIWVPDTEHEAMRDLIRVRISAVETVRRARQQLLSFLLRHGRIYKDGIKHWSKRHRRWLGDQRFDHPAQQIAFEEYIRAIEQAEDRRSRLEKQIEALLPSWSLHPVVAAIQALRGVSLIAAVTIIAEVGDFRRFANPRQLMGWLGLVPRERSSGSTRSQGKITKAGNSRARRMLVESAWTYRLPARIAGDLLRRSANLSQEARDIAWKAQVRLCARYRRLLRSGRPKNVVTVAIARELAAFVWAIAIQTPAPAQTA

SEQ ID NO: 337098 - protein, 383 aa, unidentified
MSYRIAGIDVHKKMLAVVVSDVEVDSEYQFERVRYSSSPEHLRLLAEWLIAQQIEEVVMESTAQYWKPVWGALERYWKPICQEREGAGPKSGTLHLAQAQSNRGRRGRKKDFPDAERLVKRLVADELVLSFVPDTEQRLWRTVTRRMLKALAEGETNPATLAAMADKNLRATQAQLRDALGACTELKPIYRRLLKMFLEELQFIDQQISKLDQELASLLSQQHDAVVHLAEIPGLGVDSAQQIIAEVGAGAATFPSAKQLSSWVGACPGEEESAEVSKSHRSPKGNRHMRRILNQAANAAAKSKGTIFEIAYRRLVSRLGHNQTIGAIAHRLCRLIWIILHRGVRYEERGPSVNAKTRRHRTNRMIRELRNLGYRVEPLVNTV

SEQ ID NO: 337099 - protein, 367 aa, unidentified
MCVGLDTHKARIAVAVAEPGRAGEVRFHGEIANRPEAVRRLIERLGAKHGQLKVCYEAGPCGYGLHRQITALGHECTVVAPSLVPRKPGDRVKTNRRDAVTLARLHRAGELTGVWIPDPTHEAMRDLVRARTTAMEAVRRARQQLQGFLLRHGRVFTGRRAWSPAHRRWLAGLRFEHPAQQIVLQEQIDAVEEAERRRDRLGEQIRELARDWSLAPVVAALQAMRGVAFLSAVVLAAEVGDFRRFATPRQLMAWLGLVPSEHSSGSKVERGGITKAGNGRARRVLVEGAWSYRLPARVTGELQARLEGVPDAVRTIAWKAQLRLCARYRRLVAAGKNANLVTTAVARGMAAFAWAIACQVQPAVAAA

SEQ ID NO: 337100 - protein, 403 aa, unidentified
MFYLGIDVSKSTARYLILNESGNKLRSFTLSNDKESLESLPERFSSLSINRDNLLIGIEATGSFWENIYSFFKDRGFHIVLLNPYNTNKFREALSKKAKTDDIDALIIAQLLRTGEYVQSQVAEENIQALRELTNLRYEFVKERKNLQRQVYSLLCIVFPEYGKTVIAKPFSQASMAILMRFPTSKHLGEAKTKHIEKIVHRIQGNNFSIEEIQHLIETAKNSIYSGRAKDARAITLRMLLGHIENLSSSIEELESEMKQILSPSDKDGSFPGENLLSIKGVGDKTLAALLSYLGSDGSNFSSSKAAVGYVGFYPNIYESGQTRKDNTISKRGPKVLRWALYMAAVASLKHNKEMRTLYHKKLSQGKTEKQALICVGKKILQIALSLLKSGEPYNPARVFVSN

SEQ ID NO: 337101 - protein, 341 aa, unidentified
METTRHIGIDLHRNKFTCCMRVENGRSYLSEWKLENLPRFVKKLRSTDEVAVEVTGNTRLFHDAVAPHVARVAAVDPNQFRVISHSVKKTDPNDARNLALYLSKGLLPEVRMKEKTQAQIASLTQTRDTLVKLRTALKNKVNNILSAHGINLEKEALSSEKKLNEVLAMQFDPMIRIELKVIVEQIRSLNQSIAELEKTITEEGQKLKGHKNLTSIKGIGPLSGSILLSVIGDIHDFADEGKLAAYFGIVPRVSNSNETERSGRITKRGSKLGRTALVQCALIAQRYSPYLKKFYEKTKARRGTGKAIIALARKLLGIVYRTLKNNWVFKDFPNFVLAEES

SEQ ID NO: 337102 - protein, 392 aa, unidentified
MLYLGIDVGKRTHVASLLDEKGKILFKAFSFSNTTEGGEKLLSNLKNFINSSDEVEIGMEATGHYWLSLFSFLLDQSFTVYVVNPIQTDGWRKGTEIRKRKTDIIDSMLIADLIRYGDFLEASLSDEDTLSLRNLSRFRNYLVNSSSDLKRKAVAVLDQVFPEYENVFSDIFGKTSKELLLHFSCAADFDDITSDQLKKALENIKFKQLAAKKLDTLANLAKQSFGIKYATNSFSLQIKMLIEQLNFIENQISQLNEELKLLLDKINSPILTIPGIGPVNAATILGEIGDINRFSRPSKLVAYAGLDASISQSGEFTSPNSKMSKRGSPHLRKAIYQAAFIASNNDPVFKAYYHKKRSEGKHHIVAVSACARKMCNTIHAIMKKNIPYIPQI

SEQ ID NO: 337103 - protein, 407 aa, unidentified
MDVLHPKCAGLDVHQQTVVACARTGAGKAVTYDVRTFGTTTAEVLALSDWLTAHGCTHVAMESSGVYWKPVWHVLEGHFELVLANARHIRNIPGRKSDVNDAPWIADLLAHGLIRGSFVPPEPIQELRDLTRTRKQLVREIAQHTLRIQKTLENANINLTAVLADVLGSSGRAILRALARGERDPERLAELASDRVKASRAELVAALHGRVPPHHRFMLTLHLTQIEALEAAVREVEARLGDALAPFRAALDRLITMPGVSETVARVIVAEIGFDMTRVPSAGHLVSWAGLCPRLHESAGKRLSNRTRSSNPWLKTTLVRAAWAAARKKDSYCRAQFLRIKSRRGPKKAVLAVAASMLTAAYYMLKHGVHYRDLGADHFDRRDKAKLAKRLIARLHDLGLTVEVRAA

SEQ ID NO: 337104 - protein, 418 aa, unidentified
MTSSKDIVYVGIDIAKRKNDVQVELPNGRRQRFTVVNRKEDFERLGKYLSSLGYDCQIGLEASGNYHRPLAYYLQEKGFKVYLISSLSLARTREAIHNSWDKNDPKDAQVIVHLLKTGIKQRYYDTFIHGFQDLEELSKTHYQVSLRKMKIQHSLLTHFLPLYFPEVEKYFCSSRAAWFSKVLYHFPSPHHIREMGEQQFVKKAWDLVGRKVSKGEFLRDFYITATKSIGIPVGKDSCALEMFRITLKEHHELCVKRQELEDLAHQRLKDNRIYQILRTVPGIGPVIALTIISETGEFGRFKHHRQYLKFCGFDLSTNQSGQFRGQSKLSKRGNRRLRCAYWLASAVAVRMRENTFRKKYSRYIQSDPDDADLKRKAVVATAAKMARVCYGLVKNSVEYRPYYDEDIPSGEIRSLCVR

SEQ ID NO: 337105 - protein, 400 aa, unidentified
MDAIIERCCGIDVHKKSLTACLLAGSLNGKPEATVKTFSTMTNDLLKLKDWLEEEGCTHVAIESTGVYWKPVFNLLEDSVNVVLANAREIKNVPGRKTDVKDCQWIAQLLRCGLIKGSFIPPVEIRDLRDLTRYRRKLIQNLTAEMAKGRSRNKTSELVEALTGNVREHHRFMIEKSLQHIAFRTESLSGLDKQIDQSMEPFRQEEENLDTIPGVKKKTIESIIAEIGVNMDQFPSAAHLASWAGMAPGNNESAGKRRSGKTTHGNKHLQSTLVEAAHAASKSKGTYFKAQYHRLAGRRGKKRALVAVGHSILTIVYHMIKNNCTYIELAEDYFNKVNHQAVLKRQVKRLEKMGYKVSIEPVTQRRSDYFQSKASWMARSRPSTTKHENSRSRSCNNSIF

SEQ ID NO: 337106 - protein, 398 aa, unidentified
MNMNAVGIDVSKGKSMVAILRSYGEIISKPFEVKHTVSGIRSLIEQIQSIDGESRIVMEHTGRYYEPLVRELSKADLFVSAINPKLIKDFGDNSLRKVKSDKADAVKIARYTLDSWTELRHEIRNQLKTMNRQFDFYMKHKTAMKNNLISILDQTYPGANTYFDSPAREDGSQKWVDFSATYWHVDCVRKLSLNAFIDHYQKWCKRRKYNFSRSKAVEIYEASKELVSILPKDDLTKLIIKQAVEQLNTASQTVEQLRTMMNEAASKLPEYPVVMAMKGVGKSLGPQLMAEIGDVSRFTHKGAITAFAGVDPGVNESGSYEQKSVPASKRGSSTLRKTLFQVMDVLIKTKPQDDPVYLFMDKKRAQGKPYYVYMTAGANKFLRIYYGRVKEYLSSLPE

SEQ ID NO: 337107 - protein, 374 aa, unidentified
MKDQLIKETVKDTQMQEQITKPDFSNQTIYIGIDVHKVNWSVTLRSGRLVLKTYTMDPKPEVLAGYLQRTYPGATYKSVYEAGFSGFWTHRKLCALGIENIVINPADVPTKGIEKVQKTDMIDSRKLARELESGNLKGIYIPSEAEESLRSLSRLRQQYTKDMVREKNRIKSQVNRLGLVLPPNHELYHWSRAFIEHLKTLPFGQQTDRVVMEQMITAMIQKRTLIAEAIMVLRKTVKADPALAKTIELLMSVPGIGFITAVTLMTELVDIKRFKHLDELLSYIGLIPIVRASGERSRNLGVSRRHLPYLRNLLIEASWMAIRKDPALLMSYNTLWSKKHKEKSEAIIRITKKLVNRIMTVWSKQTPYVAAVVQ

SEQ ID NO: 337108 - protein, 536 aa, unidentified
MRRVIGMDVHRTFAEVVVWEEGRLRPAGRVDMTRSGLEGFGRTLSKEDEVVVEATGNAMAVVRVLGPYVARVIVANPLQVKAIAHARIKTDRIDAGVLASLRAADFLPEVWLPDTATERLRRLVARRNQVVRHRTRIKNEVHAILHAHLIPPCPHADLFGRLGRAWLGRQTLPDDEVAAIERHLRELDRLAEDLAVLDREVAQATSDDPAVKRLLTITGVNLTVAAGLVAAIGEVARFSSPQKLVSYVGLNPRVRQSGLGLAQYGRISKHGRAHARAMLVEAAWAASKAPGPLRAFFLRIRARRGHQVAAVAVARKLAVLCWHLLTKEADYLWARPALVAHKVRAMELQAGQPMRKGSARGRPTRTTSRRCGTARSRSPARPSAPTSTPSAIGSRRGRRARAGARAPQRRSDDKAARRGLHLHAPLFATRSPVPGEDSKPAQEMSCRSHPSSAPTSTGLRRNSCGWRRSVDKETAGWALSREIFTVQGAGAMEKSGRPHHAHHLGEVHVGRAPSETPLTRGHHRHGSQGDPRGRLA

SEQ ID NO: 337109 - protein, 349 aa, unidentified
MSKKLIPLDVHSEWSQMGVVEEETGEVILEMKVRTDPEELRRVIGGIPGPKKVIMEEGPMSGMIKDALDGVVTEVVSCDPTRNALIARAEESNDRLDARRLAVLCRNGSLHEVYVPPEPYRTLRSLVRHDRRLARDVTRSKNTIKALCHRHGIACRGVRVYRAAERKGLLKRLPSAALRWQLESAYRQLDFLRAERVGVHRVLVRQGRGLAVIRRQQSIPGVGPVVARTLVAWVVDPTRFKSLSALSAYAGLGLGKAVTNWQVVRRDRASKRGQRDLKAMLFVAAKAAIKGDNALAKRYQARLAAGWEPRKAIRDIARHILFIACALWTGRKEYQDALVKVPATTQPSR

SEQ ID NO: 337110 - protein, 366 aa, unidentified
MNPIYIGVDFHSRQQTICYLKTETGELVIADLKHRDKEQLRAFYQQFQGQVIIGLEASGYSPWFETLLEGLGCEVWLGDATEIRRRARWRQKSDRRDAELIWDLMVHNEFPLLHRPALPSREILRMLRYRHKLVKVRTLIKNSLQSLSIQAGLSLQARLFTRQGTQQLEALALSPVMGQQRQQWLELLQELNHHITETEGWLKQQALSDPRISRLRTHPGLGLLSALGIVHTLIPVSRFSTTRKVAAYGGFDPMERSSADKKRYLGISKAGSRLLRFLLIEATQTAVKTDPDLQRFYRRLVQRRGKPKAKVAVARKLLIRSFIMLRDEINYAEFQQRAIAARLAREFARPNVPVPLIGQPASPAKG

SEQ ID NO: 337111 - protein, 339 aa, unidentified
MESNKNILFKHYVSIDWSIKDISVARIRSEGNEPIVKSFPSDIKKIKEYLGQLRGKKILTIEETTGSHWLYVELLESVDKLIICDPYRNSLLSEGPKNDKIDARKLCLLLRSGLLKEVYHTSNEDYKIRKLTSAYIALVKFGVRIKNQNSALYRGVGLKYKKDKIKKQEELLCFVEAQQKRSISLYEEEKAKYEKLFKELKRKNEIIKMLCGVSGIKEVSAVKIYSVVIDAGRFENKYKYWAMCGLVKQDRESGGKNYGKKNPRYSRILKNVYRSATLAAIGGNNDIREYYESLLQKGYSIKDAKNQIARYIAKVTYAIMKNKQPYRAYQFRGNKKQTA

SEQ ID NO: 337112 - protein, 363 aa, unidentified
MKVKTSTKKEETARILASIERVCVDLAKSTFHVVGLDADRKTVFRKKFSREAFLGWLESLEKKVIVVMEACAGSQWWGQQCQALGHTPMLIPPHRVKPYALNQKNDYNDAEAIGEASRNPKTVPVPVKTLEQQDLAMLIAARQGLINDRTALANRIRAFLLERGIALPKGISVLRCQLSDILDDGTNALTQIARSYLREMQAQLRELDGKIEEIVLMMQKIASLNAVAKILQTIPGFGPLVVAALVAVIGDPKRFKNGRDMSAYLGLVVRQNTSGDKIRLGGITKRGDAGLRTLLIHGARAALRCIETNEEGKMGNGRLRAWCLALLARKDNRNKVVVALANKLVRIAWAVWTKETAYNAAIA

SEQ ID NO: 337113 - protein, 317 aa, unidentified
MQQGKTNTKCAGIDVGKHWLDGALHGQAETVRVSRDAAGIDALIGWLRSHRIERVGLEASGGYERIVIEALEAAGLAVVLHQPLEVRLFARLKRLRAKNDRLDAALIAAATAQVDAVKAAADPRLRDLADRLTAYEQISDQLAELKSFLEHVTAKEIMRQLKAQVASLARLKARLADGVLERLKAHPDLTARYELLISLPGVGPIVAASLIVRMPELGAMKRGQAAALLGVAPFDRDSGQLKGKRFIAGGRRRPRRLVYLAALSAKRYDHDLKAFAQRLAERGKPAKLIIVAVMRRLIEAANLILARQTPWVRATQA

SEQ ID NO: 337114 - protein, 408 aa, unidentified
MEVVVVVGAGLDVHKKRIVACCIDGRSSPPTVVTCTFGTFRDELERMREWLLKRECTHVAMESTGVYWMPVYEVLEGTLEIILGNPRHMANVPGRKTDVTDAQWIAKLLRHGLIQKNFVPPRPIRILRQLTRYRRKLIQTRTSCLLRVEKLLQCANIKLSSVASNIFGVSGRLMLEELSRGVTDPATLSDLAKGRLRGKRGALMRAFRGAFTKEDASLLGVELKVIADLEAQLERLDKLVEQKAYPFNDILELLDTIPGVNRTLATDLIAEIGTDMSAWPSHAHFAAWTGTCPGNRESAGVRRKAKTREGNPYIKTILIQAAVCARQTHGSHLAARFHRLAARRGPRRAAVAIAREIGVAIYHMISKKQPYTPPTCADPNFAREQRSKQLLRELKKLGYEVNCKPTTT

SEQ ID NO: 337115 - protein, 375 aa, unidentified
MDHHSGAFVGIDTSKLRNAVAVAEEGRNGDVRYFGEIDTTEATTRKLVTKLAAKYRQLTFCYEAGPTGYGLYRLIKKLGHDCIVAAPSLIPKKPGDRMKTNRRDAVGLVKLLRAGELTAVWVPDERHEAMRDLSRACEAARKDLKGKRQQISSFMLRLGRHYPGKKTWGPAHMNWLMLQKLEHREQRIALEELLGAVRQESERIERLEQAIRDAVPEWSLAEVVTALQAMRGIDLVAAVTVLAEIGDLSRFQTPRELMGYLGLVPSERSTGDTVNRGGITKAGNGRARRILVEAAWSYRHPPRVSREKQMKVAAAPRAVREIAWKAQMRLCGRFRSLTRKGKRPNVVATAIARELSAFIWAINREVVGSHATANQ

SEQ ID NO: 337116 - protein, 387 aa, unidentified
MDVLYQSCAGIDVHQANIVVCILHGPLTSTRPKREMATFDTTTKGLRACHDFLSQFHVEAVGMESTGVYWRPVWHALCDDFKLILAQPAHMKAIPGQKTDKKDAHWIAKLTRIGLLPRSFIPDETIQELRELTRQRKHYVESRNRETNRIHKILQSGGIKLTTYIEDIMGLSGRNLLQLLVDGTPITPRIVHQSVYTSLKKKVPQLLEALDGYFSDHHRFMLKQSLEIYDFYQKQIELLEERMNVYLSQYENHVEILDSIPGIDVITASVIISEVGVDMSQFPTAGHLASWAGLCPGNNESAGKKRSTKIRHGNSYLKKCLCQAAFAIKKQKGSPLADRFYQIQSRRGSQKATIALAHQLLKIAYILLKEQMTYPEFLAQKRLLGTS

SEQ ID NO: 337117 - protein, 376 aa, unidentified
MQAAQVKAYEVGTVLYMAMELSNSKWKLGFGNGAKLRRKTIEARDRSQLMQEVVLAKARLKLPEEAQVVCCFEAGRDGHWMYRWLESAGFEVLEIDSSSIETARGRKHVKTDRVDVEKLLDLLIRYHCLGLRKAFSVVRVPTVQAEATQRLHREDAYLLTQRTRISNRIQALLVTQGVTKLRLGGDFADRLDRVELWNGEGLSAELKTELTRLHAQHVVFAEQLRELQRAYVAELSADTPVAACRRRLERLKSLGPKTSRVLAAEVFGWRRFDNGKQVGAMAGLTPTPSQSGVTQREQGISKAGNRRVRRTMIELAWLWLRWQPDSALSQWFNQRWAHGGKRQRRVGIVALARKLLIALWRYVEHGVIPEGAVLKA

SEQ ID NO: 337118 - protein, 420 aa, unidentified
MNWKTVAQNRAAIKPNMVVVGIDIAKKWHYARIQYPDRQFAPALRFYNDADGFARLVAYIRHHQELAACDDAVIGFESTGHYWMNLAHWLTSQGFKLVQVNPLHVKRSRDMLDNNPSGSDPKSALIIASMIAEGKYLKLTLPRGIYAELRELTTRRSRLMHERTQKLNLLQAALDRLFPEFTDVFKDPKGKTALYLLEHYPAPEDLLLIEALELTRQLRAQCQKSLSMKKIERLQAKARVTVGIQEARHLIRDGLLDAVRAVKSLQDQVRVLEARLQELVPEADESKYLLSVKGIGLITAAVILGETGGLASYSHAQEVLKMAGLNLYVVKSGQYEGEHRISKRGRPQLRKTLYMAALRLIQKGMALHEFYDRVVVHQKRKKKAVVAAACRLVRILYALVRDRRHYSEHWSGPKPQVSGA

SEQ ID NO: 337119 - protein, 407 aa, unidentified
MSMVSGVVGGVDTHADEHVGAVIDANGGILGIQSFPVGESGYEALLGWLSSHGEIQMVGVEGTGSWGVGLARFLHDREITVIEVDRQDRQNRRKVGKSDTTDAVAAARAALSGSARVIPKARNGPVEQIRVLMIARRSARSQRIETLNQLRHLVFTGPEQIRVRFKDRYKTGLVTEVAKLRPRKGSDPVLFTTQVTMRGLTRRIQQFNAEIKHLDSMLTELVTDAAPSLVGLFGVGTDTAATLLVAAGDNPDRLRSERSWAHLCGVCPIPAGSGKTDGRHRLNRGGDRQANAAFYRIVLTRMSQDPRTKTYVARRRDEGKSTAEIMRCLKRYVARETFKHLPRIWAKKFNPWFRRDASDQAALKCPYLVVRSLDPTGKGRRRWMKRWKGALNAFAITLEGRILPTDR

SEQ ID NO: 337120 - protein, 387 aa, unidentified
MTVRTVSNLPAATHGETVRCLFAIELSKQSWIIGFITPLSTRIGRRILSGGDWKGLLKLIDEVRARVSREIGRTVEVMSCYEAGYDGFWLHRQLEAHGVRNYVIDPASLQVDRRARRVKTDRIDTERLLRSLMAYVRGEPKVWSVVRVPSVAEEDARRLHRERDRLISERVQHVNRIKGLCALQGIYDYHPLRPQAMARLEQLRTAQGGALPPRLKSEIKRELHRLEVVVEMIATLDAERDAIVEDVTSTHVNAEKIRALHKLKAIGPEFAAVLVGEIFHRDFNNRRQLASYVGYAPSPFQSGNVAHDQGISKAGNRKGRTTGIELAWLWLRYQPDSDLSVWFRTRVGTVKGRIRRISIVALARKLLVALWRYLETGLVPRGAVLKG

SEQ ID NO: 337121 - protein, 429 aa, unidentified
MNSEILIRIEKFRQFKERIRGSEEYLIVGIDISKNQHHAFFGSANGKTLKRRLIFKNDFNGFMNLISMAEALRDQNGLSQIVFGMEPTGNYHKPLGMFLLNHNQEVVLVSGIATHRNRELLDGRWDKNDTKCAANVADLISQGKCLFYEYPAPEISGLRSLLSLRERMKKNYHILRMRIRNNLVAEYFPEFDRYFGQSPKQTLSIVKYCLDPVKINRMEFKEFLIKVTTTNRGLAQEKRLRQIYALASESIGSESNRYTEFEGKVLVDQVEQIKSLIKEIEDKIAEAAGEFEEYHCLLTIPGFGPYISALVLAKIGNPFRFENRKQVLKMSGFDLSAKRSGKSSDKAYPVISKKGSNALRYALFQAAVISSSRNHYFIQYFTNTLKGREKERGIKIKMRVKLAAKLLVIAWTIMKTKKAFDPALLESMK

SEQ ID NO: 337122 - protein, 355 aa, unidentified
MSQEKYIGMDVHQATVSVAVMDSKGKLIMECILETKAATILEFIHGLRGTLAVTFEEGTCAAWLHDLLKPHVSKIVVCDPRKNALLKDGSKSDRIDARKLAELLRGNQLTPVYHGDHGLRTLKELGRSYLTLTQDVTRVMSRIKALYRSWAIPCSGTTVYAARHRSVWLARISEPGVRLRAERFYQQPDLLRPLHQEARRDFVMESHKHPAVKLLRQIPFIGPIRSALLVALLQTPHRFRTKRQLWAYSGFAVETHDSGEYRYVRGKLLRNRERISVRGLNDNYNHDLKNLFKSTAISASTRPGPLRDFYLALLAKGMRPTMARLTLARKIAAIALTMWKKGVDFDVKHLDQQTV

SEQ ID NO: 337123 - protein, 413 aa, unidentified
MDTLYPCVGGLDVHKQTVVACVRRVGKAGRVWKEVRTFGTMTRHLQALRAWLTAEGVTHVAMESTGVFWKPVYNTLETHFTLLLVNARDIKQVPGRKTDVKDCEWIAQLLQCGLLRSSFVPARAQRELRELTRHRTKLVQQHSAVVNRLHAVLQDANVKLSSVATDIVGVSGREMIAALQAGENDPAKLAELARGRLRGKIPELRVALDGLVREHHRFLLQLLLAQLDFLATAIDQLSQRIEAISPPDFRAAVQLLTTADGIQQRTAENVLAETGIDMAPFPSHKHLSSWAGVCPGNNESAGKRKSWKTPKGNRWLRAALAEAAWAASHTKDTYIGAQFRRLARRRGKKRAMVAVSHTLLVSIYHMLRAQVPYADLGADHFERLHPERLTRYHVSKLEHLGYKVSLVPVQEAA

SEQ ID NO: 337124 - protein, 383 aa, unidentified
MGEGTMRFVGLDVHAETIAVAVAEGDGGEVRSLGTIPNTAEAVAALLRRPGPAGRLRVCYEAGPCGYVLSRQLAELGIECVVVAPSLVPTKPGDKVKTDRRDALKLARLHRGGDLTAVWVPDAAHEALRDLTRARETALGEVQRGRARLRSFLLRLGLRPPAGVRPGTVRHRDWLAQLKPGQPAHRAVLAEALTALDQATARLTRLEDAIAEQAQTSPMAPLLGALQTLRGVAAVTAATVVAELGDLTRFASPRQLMAYAGLVPGEHSSGGRTRRGGITKTGNAHVRRVVVEAAWHYRHPPRVGATLRRRQAGQPAAAVAIAWTAQGRLHQRFRRLLGRGKLKQEAVVAVARELLGFLWAIARQVDAATARPAAAEQAAAVAA

SEQ ID NO: 337125 - protein, 339 aa, unidentified
MKRYIGVDLHKNNFQVCYLSKTTSKQSTYEISPIGISKFKASLSKTDEVGIEATGNARYLAGEIERKVKTVVIINPWQFKVISKSVKKTDEKDAAIIAKYLSKDLIPKVRMRSKENQQIASLITTRDKLVKLRTSLKNKIHGILSANGYVTKKEAFSSKKALENIFNLKLDDAYKFELKVITDQIKSLTKSIEEITNELTNRGKGLKGYSNLKSITGIGDISATIMLNAIGNVNDFETADKLSAYFGIVPRVNNSNETIRQGRITKMGNKIARTALVQSTLIAIRYNSYLRTFYDRLKAKKGSGKAIIATSRKLLGIVYRALKHDLVYENFNHYKLVVT

SEQ ID NO: 337126 - protein, 339 aa, unidentified
MDHVAIDLGSKKSQICVRNAGGEILEEKRWETWDLKRYLEGRPKSRVIVETCAEAFRVAEAARELGHETRIVSATLVRTLGVGARRTKTDQRDARVLSEVSCRVDLPTVHIPKAGSRERKTLCGMRDSLVGARTKVINTVRGWLRGQGHRLGKGSRVTFSERVRAVCVADLPDYVERQLRVIEALTKEIDEADKEVEAQAEGDVICARLMTVPGIGPLTSLRYVATIDDIGRFANAHQVEAYLGLVPGESSSSERQQRLSITKAGPPALRWVLVQAAWALRTRCRQPSAVPLQLWAHQIELRRGKRTATVALARKLAGLLYALWRDGTEYDGARGAKMI

SEQ ID NO: 337127 - protein, 458 aa, unidentified
MPKTSSKKVKSQRSRERALLEKVNLNAAGIDVGASTHWVAVPADRDENPVRSFRVFTSDLMALCNWLKQCQIETIAMESTGVYWIPLFQMLERNGFEVRLVNASHVKNVPGRKTDIKDCQWLQELHTFGMLRGSFRPEGRMCVVRSYLRLRDTLSKDCNSLVQRMQKALTEMNIQIHRVISDITGLTGMSILRAIVAGERDSIKLAQMKHPQIKSSAQDIAKALEGDYREEHLFALQTALELYDSYQFKIMECDRRVEEAFGVFEAKVSVAAPDLGRLRSAEKRQEALQRHHLEAVTGADLTKLPGLELLAVERILSEIGLDMSRWPSEKHFCAWLNVAPNNRISGGKILSSKPRKNANRAAAALRLAAQSAMQSKTAIGAFIRRIKSRLGAPTAINAGAHKLARLLYRMLKFGKAYVEHGQQAYEKLFKERTLRNLQRKARELGFDVTPMAATALVS

SEQ ID NO: 337128 - protein, 407 aa, unidentified
MEVLFPRCAGLDVQKDTVVAAVRCVSAPLAHEVRTFGTTTGELLTLAGWLESHGCTHVAMEATGIYWKPLWHVLEGRFELVLANATHIRNVPGRKTDVNDATWIADLLAHGLIRNSFVPPAPIQELRDLTRTRKQLVREISQHSLRIQKVLEDANIKMASVLSDVLSLSGRAMLAALIDGVTDPEHLADLAKGTARNKRPELIEALRGHVTPHHRTMLKLHLDVIEALRTALSEVDATVGKTLGPVSEAVGLLKTIPGVSDVVAHVVVAEIGVDMSRFPTAGHLLSWAGLCPRNDESAGKRRSTRVRKSGTWLKTTLVTSAWSAVRKKDSYLRAQFLRLKARRGPKKAILAVAASMLTSAYFMIRDHTAFRDLGPRHFDARDKTKAINRLVRRLQDLGCQLELKHVA

SEQ ID NO: 337129 - protein, 339 aa, unidentified
MKLNVVGVDIAKRVFQLHWVEADTGEIVSVQLKRERFLEHFANRAPCLIGMEACGGSQHWARALRKLGHEVKLLSARWVKPFVGGNKNDVADARAIWTAVQQPGIKTVAVKSEAQQAILALHRMRQQLVKFRTAQINGLRGLLTEYGEVMPQGRAGIKKDIPAALQRIADRLPAVLIDTLREQYARLAELDQQILEIERRLRQWHHQDVDSQRIAQIPGVGLLSATAAIATMGDAKAFKSGREFAAWLGLVPRQSGTGGRVRLLGISKRGDTYLRTLLIHGARAVLTHSKEPPEWLTNLTQRRPKNVAVVALANKMARTIWALTAHERTYQKGYVGQSA

SEQ ID NO: 337130 - protein, 378 aa, unidentified
MLTQGFQATAAANQDGTIYLAFELSKSRWLVARLLPGSSKISRFRLEGGDTAGLLQLLTEAREKAARLGFAKPRIVSCYEAGYDGFWLHRWLQAHGVDNRVLDPASIEVPRKARRAKTDKIDLAKLMRVQLAHERGEPQVCSIVHVPTVAQEDAKRVSRERASLLQERISHTNRIKGLLFAQGVRDTDPLARNFLARLDELVTPDGRRLSHHLLGELRREHARLSLVVSQIAKLEAEVRTAVQQAQPGTPEAKMALLVQLKSMGPTWATLLVNEVFYRDFHNRRQLGAYLGLTGTPYNSGQSVREQGISKAGNGRARNVALEFAWLWVRNQPKRPSNRRHATPRRRRQDGCVTALTLGPYQPFREKGPILPGLSLACG

SEQ ID NO: 337131 - protein, 341 aa, unidentified
MDIATLGIDIGKTWFHLIGCNRAGTPVARHRLNRGKLMQFIANLPRCLIGMEACPGSQHFARAFQSHGHDVRLIAPKFIKPYIKGQKNDFNDAAAIAEAVTRPTMRFVLPKSNDQLDLQAIHRVRDRMVGERTAVINQIRGFLIEYGLPVKEGRAALRRNLASVLEDAGNGLSGKMRQLIARLREHWQQLELQIDQCMEEIDLIVSRNDDCRRLVSIPGIGSLGATALVAAVGNATTFRKGRELAAWLGLVPRQWSTGGKPTLLGIGKRGNSYVRRLFIHGARSVLQHLKRGNHQLGSWMTQLQKRAHKNVVIVAIANKMARIAWAVLVRQETYRSGIALV

SEQ ID NO: 337132 - protein, 343 aa, unidentified
MQTITTIGLDIAKSVFQVHGVDATGQVVIRRQLKRRYVVAFFQKLSPCLVGIEACASSHHWSRELHALGHKVRLIPPAYVKPYVKRQKNDATDAEAICEAVTRTNMRFVPTKTPEQQSGLVLHRTRHLFIRQQTAVINAIRAHLAEFGVVAPVGRHGVEELLNVVADPSDKRVPEIARACLSAFGAQLCRIKEQILEFDRLIRTWHRSNEMSMRLDEAPGVGPVLATAVVATVADPKSFRSGRNFSAWIGIVPKQHSSGGKNRLGNISKQGDRYLRGLFVAGALAVIRYAKVHGTEHRPWLTALLARRPTKVAAIALANKIARMVWAMMVKGERYKEPVALAT

SEQ ID NO: 337133 - protein, 424 aa, unidentified
MNCKQNQKINQVKESTLVVGIDIGSTTQYARAFDWRGIELGKVFTFSNSREGFESFKNWMQHLQDRNKKSDVIVGIEPTGHYWFDFGAYLEDEGILLVMVNPYAVKQSKELDDNSQSKNDRKDPKVIAKLVIDGRYSEPYTPDGVYADLRVMVANRKRLVREMTQIKNRFARWFAIYFPEYGDVFGEYEAQSSMLLLKVACTPKQVVELGAEKINQIWRDAKLRAVGMKRATTLCETAKRSIGLKKGSSAAEYEMKLLLADYEYKKAQYDAIMVEIERLCKEIPESGQMLAIKGIGVITVAGFLAEVGDVRRFESPRQIQKLAGLSLRENSSGKHKGQTTISKRGRSKLRTVLFNAAIPLIARNPEFRSMHEYYTTRANNPLKKKQSVIAISCKLIRVFYAILANGVTYDPEKLISDIHRPQAA

SEQ ID NO: 337134 - protein, 345 aa, unidentified
MKIATVGIDLAKNVLQIHGVSESGKAVLKKQLKRSQVLEFFGNMEQCLIGMEACGGAHHWARQLQALGHTVRLMAPQFVKPYVKTNKNDAADAEAICEAVTRPNMRFVPIKNAEQQAVLALHRARQGFVKARTAQANQIRGLLAEFGLVVPKSLANLSRQVPELIEDASNELPGAFRMLVQRLLDEVKNLSLQAAEIETQIIVWHREHAMSSKLATVPGIGPITASALVATVGDAKNFDNARQLSAWLGLVPRQHSSGGKNVLLGISKRGDAYLRTLLIHGARAVVNAAERKKGQVDGWLGGLLARRRKNVATVALANKNARIVWALLRHDRKFQSDYAPAKVTA

SEQ ID NO: 337135 - protein, 323 aa, unidentified
MSTPSSTVTPLGVDIAKAKFDAAAWIDGKYKTKVFPNTPTGFEAFLTWLRPFAPVHVCLEATGRYGEALATFLVEQGITVSVINPAQIHAFGKAELQRTKTEKADAKLIARFCQRQQPPAWQPLPPAVRQLQALVRRLDDLTAMRQMEHNRQDGADPTVQASLTRVLALLDAEIEQTRAAIRDHFAQHSGLRKQRELLDTIPGLGATTSAVLLACLGDIQRFDNAKQVAAFAGLSPAERQSGKYKGQTRLSKLGDGLLRKALYFPAVVASRYHPLLQAFCERLKAKGKPGKVIVCAVMRKLLTLAYGVLKSGCPFDPKWTLAN

SEQ ID NO: 337136 - protein, 457 aa, unidentified
MPARGKQPRSGAGSPAHTIDPNAAGVDIGATEIYIAVPTDRDPHPVRKFSTFTEDLLAAADWLKQCGIKTVAMESTGVYWIPLFQILEAGGMKVCLVNARHVKNVPGRKSDVCDCQWLQHLHSAGLLRASFRPEQQICAVRSLVRYRDSLVQLSAMHLQHMQKALDQMNLQLHHVISDLGGKTGMAIVEAIVAGERDPHQLATLRDPRTRASKETIAKSLVGDYRREHLFTLRQSLTGFRQNGQLIADCDVEIESLLKEFSSGDGSGAEAVPEPQAELKRKPRRNEMNFDLRTQRHRIFAVDLTEIPGIDTLTAHTLFTEVGRDLSKFANVAAFTSWMGLCPDNRVSGGKILHAQTRRVNNRVAKALRMAAQALSRSHGWMGQYYRRMRAKLGGPKAITATAHKLARIIYHLLTTGQAYDETVFAQQEAQNNQRNEKRLRHQARKLGFELTLIPTEV

SEQ ID NO: 337137 - protein, 351 aa, unidentified
MVVVGADVHKRSHTFVAVDAVGRKLGEKTVKATTEGHHVALMWARDQFGVELRWGIEDCRNMSARLERDLLGAGQAVVRVPTKLMAQTRKSGRTRGKSDPIDAESVARAVLREPDLPVASHDEVSRECKLLTDRRDVLVAQRTSAINRLRWNVHELDPERGPAPRALKATKHQQALQAWLQTVPGLVAELARAELGDVIRLTSEINALEQRLSQRVREVAPALLEIPGCGDLTAAKLVGETAGVSRFKSEAAFACHAGVAPIPVWSGNTEGQMRLSRSGNRQLNSAIHRIAVTQIRMPDTEGHAYHQRRIANGKTKAAARRCVKRGIARRVYRALLADHHTRTQPHQPTAA

SEQ ID NO: 337138 - protein, 340 aa, unidentified
MGEQYVGIDLHRRRSVIVRMTGEGEVLETVRIDNDPVALSLELAKAGPDPEVVLEATYGWYWAADLLQACGAKVHLAHPLGVKMFGYQRVKTDARDSTNLAELLRMDRLPEAWLAPPQVRELRELVRYRAKLVALRSGLKAQVHAVLAKEGVRVPMSDLFGVAGSRLLDQLHLGHAYALRVASLRSLITTYDQEITMLGREISTALAGDVGYLAIQAIPGVGPVLAAVFVAEIGDVHRFASAPPLCSWAGLTPRHRESDTTVRRGPITKQGPRLVRWAAVEAVQRLPRGSKQATDFHRIADRRGTGIGRVAAARRLLTLVFYGLRDGQVRCLAPAPREAM

SEQ ID NO: 337139 - protein, 345 aa, unidentified
MTTMNYIGLDVHKKTISYCVKDVSGRIQQEGKIGSTRRELDCWMKTLPQPWTVAMEATIFSGWIYDHLLPHATQIKVAHPLMLRAIAAAKKKNDQIDANKLADCLRCDFLPECHMMPRAIRDRRRTLRYRHLLVRQMVQMKNRVSGLLMETGVEYNKQRLHKVSYFRELLSANGEVDPSLRPLLKLSRETIERCQKTEYALVSSLQRDPVLADRIKRLRTVPGVGPITALTWALEIGDVSRFGSIKKAISYCGLCGDERNSADKAMRMPLSKQRNKHIQRALVEAAKLAPRQSHEMAVIYDQERKKGNSNWATLAVARKMVAYLLAVDRQQRDFVPAEERRTTAA

SEQ ID NO: 337140 - protein, 392 aa, unidentified
MVVSVGIDVSKDKHDCFILSSEGEVLVDVFTIPNTMDGFNCLLQRIQDCTTPQDKMKVGLEATGHYSYNLLGFLLDNGLATYVLNPLRTNLYRKSLSLRKTKTDRVDARTIASMLLSDAGLKPYTDTAYHNEELKSLTRYRFDKVKERAKLKSSISRLVCILFPELEKLVPSLHIASVYALLAEFPGAKQIAAAHLTRLKALLETASKGHYKRDMALEIRDAARNSIGSWMPAKSLELQHTIRLIRELDDEIVEIEEQIQAIMDELNSPITTIPGLGFRMAAMIFAEVGDFNRFDSPDKLLAYAGMSPSTYQSAQLKNCYPHMEKRGSRYLRYALYNATKYVCHWDPTFAAYLAKKRAEGKHYNVALSHATKKLVRLLFALEKSRQPYRSAA

SEQ ID NO: 337141 - protein, 399 aa, unidentified
MLTSQSLQLRVGVDVGTQRHSVAVGLTDGSLLEAFEIPHTAAGFEDFFTRIEGHARRYPDPIAVAMEGYNGHVRPLDSLVKVRGWRLFNVNNLKLARFKEIFPAAAKSDRIDSTKTLELFQLRDHLPMARDVLQEVMATPAENDILKRLSRRRRRLVNERTRVINSLHADLQAAAPGLLQITRYVGNLWFLSFLTCRKDIRKLARLRRATLLKLPGIGATYAERIQAWQQSAYFGPDARLVGDMIHQDAERVLELNRQIKALEDEMAHIAATSAIACQLASIPGCGSVCSAELAGEIGTIARFQSEASLALYLGMATLDNSSGKFRGSKSPKHVNVRAKAAMMAAVDHHRKRVPQSHRFYERKRAEGKKHNQAIRALGRHLCRVIFKMLSQERPYRIDP

SEQ ID NO: 337142 - protein, 370 aa, unidentified
MGKSVLYVGLDVHKMSIDVAIAEAGPGAEVRFYGQIGGDLDSLDRVIRKLLATGAQLQFAYEAGPCGYVVYRHLTAQGWPCLVAAPSLIPRRPGDRIKCDRRDALSLARLFRAGELTSVKVPDADDEAMRDLTRAREDAVSVERRAKQRTAAFLLRHGRRFPGKTTWGRGHWRWLLQQVMEHPAQQIVLQEYLDAVREAGARVQRLTGQIQELLPQWRRAPFVAAYQALRGVSLIVAATMVAELGDLSRFNNPKELMAYLGLVPSEHSSGATVRRGRITKTGNGHARRVLVEAAWAYRLRARVSRPLLQRQEGLPENIRQISWQAQLRLCARYRRFLARGKHKNTIVTAIARELAAYIWAIGQAVKPLTV

SEQ ID NO: 337143 - protein, 391 aa, unidentified
MVCVGIDVAKDKHDCCILDSDGMVRADCFTIPNNMDGFKQLLQTIRNCTKKSDKIKVGLEATGHYSYNILGFLLDNGLPTYVINPLHTNLYRKSLSLRKTKTDRVDARTIATMLLSDVDLKSYTDIAYHNEELKSLTRYRFDKVQERAKLKQSVSRLVTILFPELEGLVSSIHGTSIYALLSEYPGTKQISEVHLTKLTNLLTTASKGRYGKEKAIQIREAARASIGSVMPAKSLELKHTIKLIQELASEINEIEDSIQKIIDELNPPILSIPGMGVNSAAVILAEIGDFSNFSSPDKILAYAGCSPSTYQSGKLTNCYAHMEKRGSRYLRHALYNATKYVCYWNPVFAEYLAKKRAEGKHYNVALSHAMKKLVRLIYALQKSGKAYLAAA

SEQ ID NO: 337144 - protein, 331 aa, unidentified
METDQYIGIDLHKASFQVCVITKTGERVWEGHFPRDPEGIATFVARCTPRMAVAVEATSPTWSFVDAIAHHVGRVCVVDTRKTKLKAGYAAKTDRLDARRLADALRRESVVSIYIPPPAIREQRELARHRLMLTQMRTRVLQRMRALLLRQGLGDPPTRRLRTRAGQAWLDGLVLPPQAQRALTTLRQIERDLCTQLVPVEADVVREARADPIVQRLQTVHGIGPVLGLMLRAEIGDVSRFPTPGHLASYAGLVPQVDSSASRTRYGRITKDGSPWLRWALVEVGVQTLRRRDPLGRWGRKLAVRKGAMTAHVALAREMCREIMATWRHAA

SEQ ID NO: 337145 - protein, 314 aa, unidentified
MEKKEKFIEYEQVIERGCGIDVHKKVVVATVRGTGIKTETRKFDGFTESLERLRDWLKECKITHVAMESTGVYWKPVYNILEEDFEILLVNARHIKNVPGQKTDKKDSRWISKLLLSGLLKGSFVPPRNIRDLRDLTRYKRKVIEQISSEKNRIHKLLEDANIKLSSVVSNLSGATATKIIDAMIDGQEDINELVKLRHGKMHCSVEELAASLKGKLTSHHKFMLQTYKDSIKSKEAIIEKLDQQIDTLLKESELLLDAELLATIPGVGKEGASYILAEIGDNMEQFPSEQHLASWAGMSPGSNESAGKKKAHE

SEQ ID NO: 337146 - protein, 414 aa, unidentified
MDMDILHERAAGIDIAKRGATVCVRKPGGSEQGFTSTVTSWEATTDRILELREFLVGQKVTVVMMEATSDYWKPFYYLLEEDLPVMLVNAKAARNIPRRKTDVADAVWLARLAAHGLLRASFVPPEPIRELRDLTRSRAIAVRDRTREIQRLEKFLESSGIKLSSVASNLTGASGRAMLDALITGERDPEVLACMAKGKLRNKIPELTDALKGRFKDHHAFMVGLHLEQIDAHTRMIDALTERIEASMRPFRCAREALMTIPGIAELTADVIIAETGADMSVFPDAAHLASWTGICPGNNESAGKVKSTKIPPGNKYLKAALGTAAMVAVRDQNSYLGARYRRIKTRRGAQRALVAIEHSILTAIWHMLANGECYKEPDEDRYVRMNQVKTTNRAVKQLRQLGYDVTLAPTSAA

SEQ ID NO: 337147 - protein, 325 aa, unidentified
MDARGAIVLRQKLSRGQVEARLANMPSCLIGMEACVGAHHLSRQLLALGHDVKLIPAQFVSPFRKSHKNDFRDAEAIAEAVLRPTMRFVPTKTVEQLDLQALHRVRARLVSQRTAVINQIRAFLLERGIAVRQRLRSLRQALPDILAQRTDVLTPRMTYLIEGLMQDWHHLDERIDAVTGEIEALVAADEACQRLTSIPGVGPIIASAMVASIGNGAAFSRGRDFGAWLGLVPRQISTGDRTVLGRLSKRGNSYLRSLLIQAARVLLLWPAKWRQHSFGEWLTAASMRLHHNVLAAALANKLARIAWSVLSQNRIYEPRTVAAAG

SEQ ID NO: 337148 - protein, 433 aa, unidentified
MTAHPYDLVIGLDRADKKADLCLLETATGQRRDLTLDTAPEALCEWLAELRQQHPQARVGLCLEQPAVHLIPFLEAYAWITLHPINPITLQKYREAFVTSRAKDDTKDAEFLADLLLNHHAQLPVWAPQDSATRAVQQLVAHRRAVVDERTALSNRLLALLKQYFPQALTLCGDDLWRPLATAFLLKWPSLGVVQQAKPATVKQFYHLHGSRSAKLLEQRLALIAQAVPVTDEIAVIASFVLRVQLLARELQQMVRTITEFDRQIAAAYSAHPDHGVFASLPGAGPVLGPRLLASLGADRERFAASAAQLQCYTGVAPVTKRSGGSERIHRRYCCPKFHRQSFHEYAKESVLWSRWAGAFYLQQRSKGCAHHTAVRALAFKWQRVIWRCWQDRKPYEEAKYEAALRKSGSPIVELFDRVELGKSPWKNPAKKN

SEQ ID NO: 337149 - protein, 323 aa, unidentified
MTVYIGIDIASKKFDAAELRDGAYRCKTFENTPTGFTALYNWLKTDSIPDIHVCLDATGSYGTALATFLYEKNLKVSVVNPARIKGFAASELTRTKTDKADSRLIARFCKAAQPDPWRPVPAPVRKLQVLVRRIGALNGMLRMECNRRENADIDAQESVERMITHLKMELKSVRQAIKEHISNVPELKKQNDLLLSIPGIGAVSASLILSFMASKDFTKAKEVTAFLGLNPRHHQSGTSVRGKTRMSKMGDAKLRCALYMPALVALKHNPDIRAFGLRLLAAGKPRMLVVGAIMRKLIHIIFGVLKSGTGFSSRVTVNAGFNQ

SEQ ID NO: 337150 - protein, 414 aa, unidentified
MNTLVSNIGVSGTLIALDIAKKHHDAKIRHPDGRTSYLRIENTLEGFNRLLALTASPHEDIIAAFEPTADYHRNIAWWLHKQGVQCHLVSSVRCAGAREMLFKTWDKNDRKDASVIMYLLEQGLSSPFYDPLANGIIDIQEISNTYHQVTLARTRCLNSLVNHYLTLYFPEAEQFLHMSRAEWFCQFLLQFPTPSCITSLNRDVFVKQSWDVVGRKQYKQQFLEHLYDVAANSIALPLPDDSLAVATFRLQLHRYIELSAQRLQLEKQAEKYLQERSDYQHLRTIPGIGPVIALMVIAESGDLTRFAHYRQYLNFCGFNLSAIQSGQKHSGYRLSKRGNARLRYAFWLAATVAVRTRENSFRYKYERYLRENGDKPDQKRKAMTAVATKVARVAHAIVKQDIDYKGYYEISHGT

SEQ ID NO: 337151 - protein, 378 aa, unidentified
MEKDVYVGLDVHKATVAVAIAPGGRSSEIRYYGSVPHCPGTMADLARKLAGKHPGRRITFCYEAGACGYGLARELTEAGHECLVVAPSLIPSRPGDHIKTDKRDATTLAKMHRAGELTSVWVPDTQHEAMRDLVRARETSMYWRNKARQALSSFLLRQGYRYNGTKAWTVAYWRWLATLEMEHPAQQIAMQEYILAIQEADARHDRLVQQIEAAVPNWSMAPLVAALQSMRGIALITAATIVGEIGDVSRFENPRKLMAYLGLVPAEHSSDMKIRRRGFTKAGNARVRRLLVESAWTYCRAPRVSQSIQRRQEGLDLDIVKTAWKAQLRLHDRYRRLSTTGKPKNVVVTAVAREFVGFIWAIGRQVAASNQREEQLAA

SEQ ID NO: 337152 - protein, 428 aa, unidentified
MIGNHESIDVFIGLDVGKGEHHAVALDRAGKKLFDKALPNDEVRLREILDSLNKHGSILLVVDQPATIGALPVAVAQAAGVTVGYLPGLAMRRIADLHPGEAKTDARDAFIIAEAARTMPHTLRSIQIADEQLAELTMLCGFDDDLAKQATATSNRIRGLLTQIHPALERVLGPRLDHPAVLDLLRTWPTPEALRHAGRRRIGNRLKKLAPRMGERLAGEIIAALDQQTVTVIGTNAATIVLPQLARMLADIRESRDTVFTQVEALVEAHPLHPVLTSLPAVGVRTAARILTEIVGKDFATAGHMASYAGLAPVTWRSGSSIRGDHPSRKGNKILKRALFLSAFAALKDPPSRAYYDRKRAEGKRHNQALIALARRRCDTLFAMLRDGTSTNHERPQQLDENHRGTPGRRTRGRAGPHAVDHGQPEES

SEQ ID NO: 337153 - protein, 357 aa, unidentified
MSNSIAPDEPTAKVIVGVDTHKLVHVAVAINLLGARLATISVPADRAGYAELVGWARALGAVEAFGIEGTGSYGVGLASFVRRQAIKVVEVNHCDRRKRRNNGKSDTIDAETAARSVLSGVATAVPKTADGASEMVRQIKIARDTAVKARSAAIITLKTLIVNAPGDLREALEPLTDRKLIDRCAALQSGDLVDPSESVKHALRALASRWLMLSAEIGTHDEALDTITLAAAPTLREAFGIGPDSAAEMMIVAGDNPHRVRSEAAFAKLCGACPIPASSGVTNRHRLFRGGHRQANAALYRIVIVRMRWHQPTIDYVTRRTAQGLSKKDIIRCLKRFVAREIYNALIADHQARIKLA

SEQ ID NO: 337154 - protein, 309 aa, unidentified
MNEELVYLGVDIAKSHLDAAIGKEKHRFSNDAVGHRELIRWVKQTKAPIQVICESSGGYERRLVQAVARAGIRISLVQANRVRQFARAAGVLAKTDSIDAEVLCAYGEAMRPQTVGASELEQEHLRELESQRRHLTHLLVMEQNRGARLSDAFVRRLNRSLINQIKKQIERLDLLIKEHIEQSPRLTAKAEKLISIKGIGLRTAALLLAQMPELGQLNRREVAALVGVAPFNRDSGKLRGKRAIYGGRRFVRHGLYMAALVAARHNPILRAFYQRLRTAGKPAKVALTATMRKLLIVLNSSLKPDLNYA

SEQ ID NO: 337155 - protein, 430 aa, unidentified
MNYNTQNAKIEAITEKTLVLGIDVGSEMHYARAFDYRGIEYSKKPFKFSNTEAGFVTFKEWILDLKEKHEKDKVVPGMEPTGHYWFNLGKYLQDNEMKPVLVNPHHVKKSKELDDNNPTKNDRKDPKVIAGLVREGRYMIPYLPDGVYADLRTASNIRFQLQSELTRIQNRISRWFNIYFPEYKTVYGKPDAKSGMLILKEAPLPEDILTLGIDGVDQIWRDAKMRAVGKARAKTLIEAAEHSVGSKEGAVSARMEIRMLLEDYESRNMRLQEVMVLIEELVKQIPMAEKLLEIKGVGIKTVSGFLAEVGDISRFNSPKELQKLAGLALVENSSGKHKGETTISRRGRKRLRYLLFEVAMSLVAKNPEFRELHNYYTTRRLNPLKKMQSLMAIAAKLIRVFFAMLTKGVDYDPKKMVSDIKRPAVYLQAA

SEQ ID NO: 337156 - protein, 378 aa, unidentified
MSKVRFVGLDVHAETIAVAVAEAGSGEVRSLGTIPNGPESVRKMIGKLGPVGKLKCCYEAGPTGYALYWQLTGLGVACEVIAPSLVPMKAGDRVKTDRRDAEKLARCHRAGVLTPEWGPDAAHEALRELVRAREAAKKDQLRDRHRLGKFLLRHGKRPTDAGQAWTKKYVDWIRVHARFDEPALAATVAHYREEVDHAAERIAKLDQSIDEAVQHAAPAIRAVIEALQALRGVAQTTAATVVCELGSLSRFENPRQLMAYSGLVPREHSSGGKVQRGAITKTGNAHLRRVLVESAWSYQRRPSAQGRLLRRQKALALDDEVKRISWKAQQRLHKRFTALAARGKAKGQIVTALARELLGFLWDIARHAEAQFALSKAA

SEQ ID NO: 337157 - protein, 343 aa, unidentified
MDYFAGLDLSVKETSICIVDDAGKIVREVRVASEPEALLQVLTNNNYRFKRIGLEAGPLSQWLFSALAEAGLPVICVETRHMRAVLKAQINKTDRNDARGIAQMMRVGLYRPVHVKTLRSQKLRMLLIHRKLLQSKAIAIENDLRASLRNFGLKMGLVGTVRFEARIKELVENLPDLAALVEPLLIVRRVLREQLGILHRRVLAVVRDDEVCRRLMTIPGVGPVVALSYRVTVDVPARFRNSKSVGAVFGLTPAKDQSGERDRSGAISRCGDELMRVMLYEAAQIMLVRSAKWSWLKAWAMKIARHRGMKKAIVALARRLAVIMHRMWIDGTEFRWTREVAAA

SEQ ID NO: 337158 - protein, 388 aa, unidentified
MQTVADRAEAPGAIQTDLRAIFVSLELSRSTWLITSLSPGGGERLSKHSVPGSDVAGLLERFAQLRGKARARTGKVFPLIVIQKAGLDGFWIHRILQSEGIESHVVDPASIATSRRRRRAKTDRIDGEALVRALLAYKRGEPRVCAMVKAPTPQEEDRRRVCRERKVLIVERVQHVNRVKGLLFCQGITGYEPLHRDRRERLEELRTGDSRSLPDHLKAQLRRELDRIELLIEQIKAVEAERDALLARDHAVTPAPAAMLVDIKGIGPEFAVILWAEGLFRHFDNRRQVAAYAGLAPTPWQSGSIDREQGVSKAGNPRLRTTLIQLAWLWLRHQPHSALTLWFEERVKRNGGRLKKTTIVALARKLLVALWKYVTAGVVIEGAVLKAI

SEQ ID NO: 337159 - protein, 335 aa, unidentified
MDSQGKVVMESILETKASPILEFLAGLRGSLFVTFEEGTWAAWLYDLLKPHVTEVLVCNPRKIPLLKQGNKSDKIDARKLAERLRLHDLKPVYHGETGIRRLRELARSYLTVVKDLSRMMNRLKALYRSWAISCAGRDVYYRRHRSQWLEKIPEAGTRWRAEQLYQQLDLLRHLRQQARRELLAESRKHAITAKLRQIPSLGPIRSALAVALIQTPHRFRSKRQLWTYSGLGLETRDSGEYQFVKGQPQRRKKQATIGGLNKDYNHDLKGLFKGAATRASVKPGPLQEFYQRSLAKGIKPTMVRLTLARKIAAITLTLWKKGEDFDINKLNSQAA

SEQ ID NO: 337160 - protein, 424 aa, unidentified
MEVMHERVAGLDVHKAMIVACVRIMSEGKIKRECQTFETSTANLETLLDWLTASGCTHVAMEATGVYWKPVWNILSDGSFELIVANAAQIKNVPGRKTDVNDATWIADLVACGLIRPSFVPDEATRQLRSLLRARKQLIREQTSHIQRIQKTLEEANIKLDSVISDIMGVSGRRMIEAMIAGVRNPHKLAALADRRIKASPKVLYDALHGRLTEHHRFMLKLYLGQHDALGKAIAEIDAAVDTATARMDEAAEAAGRATFCSLISLLCSVPGINVLGATIILAEIGRDMSRFPTAGHLLAWAGMCPGQNESAGKRKSSRLRKGAPWLKTILVQCAWAATRKKDSYYGAQFKRLRAKRGPKKAICAVAASMLTAIYHMLKDGTHHHDLGADHFDRRSNEVKARHHVAQLARLGFNVELQPVAQAA

SEQ ID NO: 337161 - protein, 337 aa, unidentified
MDRVTMFAGLDYHQESIQVCVMDAQARVRVNRSCGNSVGEVVSLLGSAGNVGAIALEACCGSADLAERLAAQGSWRVELAHAGYVAKLKGSPDKTDYSDARLLADLTRVGYLPRVWLAPRGIRDMRQLVNHRQRLVNQRRDLKLRVGACLREQRVKVEDAGRWSRRWVERVRVHTGLTESVRWIIGQMLEQMVQVSRWIEQAEEKLREATAGQELIGRLRKIEGVGEVTAWMLLAYVGRFDRFRNGKQLARYCGLSPRNSSSGQREADGGLIDACCRSLRAVLIQAAHRLVRMQGRWRVLARRMLDRGKPMCLVVAAVANRWVRSMHHRVLMSVGKE

SEQ ID NO: 337162 - protein, 309 aa, unidentified
MSSWVGIDVSKNTLAVWVRPSGVNFIVCNSSEGHQALLLNLAEIQVERVLLEATGGYERAVMGCLAQAGHSVVRINPRRARAFAQAMGKLVKTDPVDACALAHLAQAIEPSACQPVSLARDELQELVRRREQVVKLRDDERRRLTLARSGVVQESLQTNISQLNEQIARLNSAIEAAAHRTDNQLVKQLSAIAGIGPVTVASLLAYLPERGQLNRRQIAALAGLAPYNNDSGQHSGKRCIKDGRASIRRVLYMATWSVIRCHSSFGARYASLRARGKCAKVALVACMRVLLIRLNAMVRDHSSWRAEAV

SEQ ID NO: 337163 - protein, 271 aa, unidentified
MNIRTIGIDLGKTVFHLIGMDTDGTIVMRKRLSRPQLLAYMANVPQSLVGMEASCGAHYLGRELRKSGHDVRLIPAQYVRPFVKSQKNDYADAEAIAEAVQRPTMRFVPIKTDEQLDVQALHRVRDRLVERRTCLINQFRAFLLERGITARTGREALRRELPALLVSAEQQLSGRMYHLLERMVEEWNEIDKQIEQVSGEIEAVAKADDACQRLLTIPGIGPLGATAMIAAIGNGAAFSKGREFATWLGLVPQQHSTGGKPKLLGISKRGN

SEQ ID NO: 337164 - protein, 400 aa, unidentified
MKGFLFMKLIGIDIGKNKHFFCVMDQQTGEIISQPVSFSNDKEGFDFLVQKIKSYPKDSILIGMEDTGHYHFALLKYLLDLQYTVALINPKTTDFNRKMQGGITKNDKLDTINICDVLDTPERKKQYRITKVNNFDLYEQKQLTRQHHNLKEELNVYKNRLQKSIDIVFPEFNSLFKSKYGTVYMNILKTFGSAENIANTDIRTIRKCFEIDGRGNRISLTPERLKERARSSIGISSIAEVIQIKHLSAQIELIEEQLSEIDKKIEEFSIQNNSPILSIPGISHFSGTSILAELGDISNYSKPSQIIKFAGVAPLHYESSQFNAQHTAITKKGSKYLRKTLYQIILPVIRHNPVFNKYYQLKISQGKGHRCAQGHCVRKLLRIIYHLLKTNQQFDPQLLR

SEQ ID NO: 337165 - protein, 346 aa, unidentified
MKFHTGQHKFYCGVDLHARTMFLCVLDEKGYPLLEKNIKTDQELFLKTIAPYREDIVVAVECMFTWYWLSDLCSREKIPFILGHALYMKAIHGGKAKNDRIDANKIAVLLRGGMFPVAYVYPPKMRSTRDLLRRRMFLNRKRSALITHIKCTFAQYNLPEPEQNVSRVSQREGVAAQLPDPGASRNVQLDLDLLAFYDQTLTKLEQELTVIAKDHDPDSYFRLRTVPGIGKILSLVILYEIHDINRFPSVQDFASYCRLVKPAKESGGKRLGSGGAKIGNVHLKWAFSEAAVLFLRKNESAKIYRARLVKRHGKAKSLTILAHKIARAVFFILKRRTVFEAETFFA

SEQ ID NO: 337166 - protein, 448 aa, unidentified
MEQSFQYFVGIDWGTQTHRVAVLDGSGRPVEQYNADHSGEGLVALVNKLKQRTAYEPALVAIGIEVAWGALVETLVEAGFAVFSINPKQVDRFRDRFTVAGAKDDARDALVLASSLYTDRQSYRRVEIDSPELIRLRELSRFQYELKVELRRVTNRLWQQLHRYYQQMLAISPAADDRLMWDLLEAAPTPDAGAKITSLRIMRILKANRIRKVSVDEVHAALRPAPLILAPGAAEAACEHVQLLLPQVKLLEEQLREVVNRIKRLLNVMIEENAGTNQPPCDAGLVLSIPGHGPAVAADLLTEASKPIRERDYEALRCYAGTAPVTRQSGKRKTVGMRQACSPRLRNAVFYWATCSLCCDGRSRRQYDALRAAGHFHARALRGLADRLLGVLVALLKTQKHFDKARRDGTFAKNPLVIATAWWRVYRRLVIKPETLLMGAAFGRTNKA

SEQ ID NO: 337167 - protein, 497 aa, unidentified
MIQIPAVLERCAGIDVGKREIAVAIITGPADQEGEVQTRLYGTTVPALEELREWLIQEGCTSVAMESTGSYWIPVKNVLEGSMEVVLVCAKKHKPERGDKTDFRDAIHLAHLHRHGLLKSSLMPSRSVVELRDMTRRRKKLLSNYAAEKNRIQKVLEVTNVKIGSIISDMFGVSGQAMINVLIGGEEITVEQIAELSKRKLRARIPELTEALQGHQMNDHYRWLISQSVEHAVLLDKQMEELEDKITVQVAPWQRQYELLQTIPGIKDMTAAIILAEIGPEMNQFPSAKHLSSWAGICPGNNRSAGKSKSSRIKKGNKFLLAALVQAGWAAARTKESIFQRKFHRWMGRLGKAKANVAIAHSLLELIYTILRDGRPYQEPEPELIHATEKAKLVRHHAKRLRQLGADEKLVEEMIARMNQADACSAAKAEQASAPPQNVIRKQSPAKVCRGALGFRARQTRKQEYSVVTDRAAGRPSQARPKTKQKTKPDKTAPPPQ

SEQ ID NO: 337168 - protein, 369 aa, unidentified
MKNVITYVGIDAHKKDLFIAMLVGDQKTPPVTWTVPNEPNAVRRLVRKLEREAPGPVRAFYEAGPCGYALQRQLTTPRMSCDVVAPALIPRKPGERVKTNLRDSRKLVELGRGVLLTVVRPPTPAEEAVRDLARARDDAREDLQRCRHRLGKLLLRRGLHYPGRNWTQGHRHWLNRLIWTHAAEQAVVDDYLLAIDHTEARLIELDARLAAIADTEPYRTLVGWLRCFRGIDTLTAIVLLAELHDFRRFPSPRALMAFLGLVPGEDSSGEQHRRGRITRTGNTLVRRLLVETAWHYQHRPSVGVALTRRRQGQPSRVIAIADKAQQRLCRRFRRLAERHLPAPKIAVAIARELAGFLWAALQPVPVPVQ

SEQ ID NO: 337169 - protein, 417 aa, unidentified
MANPLIVGVDVHSQTNRTCLLDREGEPQGKRLSTDNNRPGTQVLIARIAQAVHAGDFDSVRIAAEATNWYWFPLFQTLRQDPVLARWPLDLYLLNPRVTAKYKDSFNDKDKTDDSDAHIIADRLRTYSRQDLPAPFAADLAHLGLRFLTRYRYHLVQDLVREKNYCLAILYLKANAYREGHPFSDVFSATSRALIEEFASFEEVAAMPLEGLATWLDTQGKGRFPDPDKVARELQQVARDSYPLDPQLQPPVNYVLIWSFQLVNGLERQVQRVNSAIAAAMQGIPQTLDTIPGIGPVFSAGIIAEIGDLTRFNHDEAKVAQFAGLHWRKNESGQSKAEETHLTKRGNAYLRYYFCEAANAVRIRDAEYAAYYQRKHDEVRTHQHKRAIALTARKLVRLVVRLLTTNQSYQPRRQPGG

SEQ ID NO: 337170 - protein, 380 aa, unidentified
MNRVALQSKDNTVEQKLYMAMELSDKQWKLVFSDGGEKRRHETIEAGDCMELVEAIRKAKEKFDLSSEAKVVSCYEAGRDGFWLHRYLVTLGVENQVVDSSSIETNRRKRRAKTDRIDGVKLLTMLMRYWGGERGLWSVVRVPSVEDEEGRRLHRELASLNKERTRHRNRIRGLLVAQGLRLEPKGDFLQRLEALILWDGAPLPLELKGELEREYQRLRLVEAQRRALEKTRKSRLRQADTASVQRVVQLMGLRAIGPNCAWLLVMEFFAWRGFRNRRQLGACAGLTGTPYDSGSSKRDQGISKAGNRRVRTMMVEIAWLWLRYQPSSKLSHWFRERFAGGGARMRRVGIVALARRLLVALWRYVEDGVLPEGAELKAAA

SEQ ID NO: 337171 - protein, 291 aa, unidentified
MKLDADEHGLQQLCEALPPVGTCSIVLEASGGYEKRLAAELIDAGYKVARVNPRQVRDFARSLGRLAKTDRMDAEVLALFVQKVEPRPCQKQPENQEEIDALVTRRRQLVQMKAAEQTRLHQVPKGKARKSVSHILDELRKEIDVIDAEIANLIEENDEWNQRATQLATVPGVGTITSHTLVAELPELGKLNRQQIASLVGLAPFNWDSGMMRGKRAIWGGRPSVRAVLYMATLSARKYNPVIRQFADRLEKAGKPFKVMLTACMRKLLIILNTMVRTGTNWNPKIISQTT

SEQ ID NO: 337172 - protein, 375 aa, unidentified
MWIAEDFGAALQADGEYEVRVDGLKHQKEKRSMDYFAGLDVSVKETSICIVDDTGKIVREVKVASEPEALLAVLKNPAYHFKRIGLEAGPLSQWLYSALAEAELPVVCVETRHMQAVLKAQINKTDRNDARGIAQMMRVGLYRPVHVKTLRSQKLRMLLTHRKLLQSKAIAIENDLRGTLRNFGLKVGMVGTVKFEARIKELVENLPDLAVLVEPLLVVRRVLREQFVILHRRLLAIVRDDEVCRRLITTPGVGPVVALTYRATVDVPARFRKSKAVGAVFGLTCSKYQSGEIDRSGRISRCGDEMMRVMLYEAAQSMLRSKKWSWLKAWAMQIARRRGMKKAIVALARRLAVIMHRIWVDGTEFRWTRERAAAA

SEQ ID NO: 337173 - protein, 448 aa, unidentified
MSKKMSLEIVHPNAAGIDVGSRTHHVAIGQALDDVKEFGVYDQDLKAIAKWLLDNNITTVAMESTGSYWQNLFATLQEAKLEVILVNAMFSKNPSNKKTDVKDCRWLQKLHSIGLLSGSFLPDTDTEQLRTYCRHRNNLLDCSADTVRKMQKYLRLLNLRLDVVVNDIVGQTGLAIIDAICKGETNPAALATLRNGRCKKSEEEISKALCGNGRKDYLFALKQEYEIYLNLQAKIKGCDTEIEKLLQEQINSDEQKKQLSIDKKKHKRINKNTPKNMDMNLLAYQYFGGVDLLAIEGVSHATVMSIMSEVGNCIHDFPSAKQFTSWLRLAPNNKISGGKVLSSKIPKGSNRLKIALRNAANVIGNLKDTALSNFFKKIAFRKGRKAAISATARKLAVIIWNMLVKKTAWQTTSPEEFVVQQRKKKVTEVKKLIHKFGIKTDELGLNFT

SEQ ID NO: 337174 - protein, 338 aa, unidentified
MKYFVGMDLHSSNTVLGILDEKGNRVYKAKVANFLPLILNELELFRRGIVGVVVESTFNWYWLVDGLMEAGYKVHLANPSAIKQYEGLKHTADYHDAFHLANLLRLGILAEGHIYPKQERAIRDLLRKRLMLVRHRTAHILSFQSLYNREKGCRIGGDDVKKLGEEDIDELFDTDYVVLSAKANISTIGFLKRKIEEIEKIALGTMKLLPEFQKLKTVTGVGDILGLTISLETGDIRRFAKVGNYSSYCRCVGSQRLSNEKKKGEGNRKNGNKYLAWAFIEAANYTKRYCSYARRFYQRKTAQTNKIVAIKALAHKLARASYFVMRDRVDYDPMKAFG

SEQ ID NO: 337175 - protein, 329 aa, unidentified
MQTILHNCCGMDIHKDSIVACILKTHPLPATKCVRNDVEKEIRVFGTFPDDLAQLRAWLEAEDCRHVAMESTGVYWQSAYEALEDAFNGKIDIKVVNAQHMKNVPGKKTDIKDAEWIASLLRSGLLAGSFIPPQDVRELRQMTRYRKTIVQDISTQKNRIEKTLQQAGFKLSTFLSDVFGVSGRNLICVLIKKGKLSPSDVENETRRISKEKKAEIKRSVNGHLTQKQRHFLQLQISLLDSLLSHLDSVEQSIAELSAKWNDDIERLSTIPGIATTSATAVIGEIGSDMSKFPTSEHFCSWAGLVPSNNKSAGKKKVQESLSATHTSKA

SEQ ID NO: 337176 - protein, 355 aa, unidentified
MVKSIGIDVGKKRCRASIKDERGAVLSEFFFSNDRAGIQCLLSEASRHGEARAVVESTGNMWIRIHDVLEENGIDTVLAHPLKTRMIAEARIKSDKLDSRVLADLLRGDLVCESYVPSKEFREKRSLVRHRAALVKARTSIENRVHALLDRYEYCCEFSDMFGKAGREWLRSLELSHIDRVIMDTSLAAVESINAQIGIVSGEIARYAWDSDDVKILLSMNGVDVFSAMVITTEIVNIARFATSWKLVSYAGLAPGCRESAGKMRRGRITKAGSRWLRWVMVQCARQAVRRDGRFKAYYERIKSRKGDAKAIVAVAKEMLVVVWYMLSKREVYRGVDEELYRRKLAKLERLSLRA

SEQ ID NO: 337177 - protein, 335 aa, unidentified
MIEFWIGVDVSKRKLDVACLDGRGKIKSRVFGNDVAGHAAFGRWLLERGTTPAATHLCLESTGPYSEAPAIALADAGWRVSVVNPARVKAFAGSELQRNKTDRADAALLARFCARMQPEPWQPPPLAQRQLRALVDRLQALKDMHLQESNRLEGLDVAGQETQVKSIHEHLAWLQERIDALQRQIDDHIDSNPSLKNDAALMRSIPGIGDTTAAKVLAYLGDLRRFSSAKALAAFIGVTPRQRLSGTSVRGRTMMSRVGHGHMRKALFMPAMVALRHNPAIKAFGDRLRTNGLARKAVVGASMRKLAHLLFAVVTSGRPFEPRYGLSGLDGQVSI

SEQ ID NO: 337178 - protein, 454 aa, unidentified
MKKQELSLQVINEHAAGIDIGSRFHMVAIDQRKENVRQFGVYTKDHEQLIDYLSNVGITTIAMESTGSYWQTLFSALQAAGFEVLLVGGSQTKNVKGRKTDVIDCMWIQKLHSLGLLSGSFLLSNAIQELRTRYHYRQHLIEQAATYVHKMQKSLRLMNIRLDIVIRDVVGKSGLNIVEAILAGNRDARHLATLVDIRVKKTHQEIADALQGSWREELLFELKTSLEFYKVYEKALLECDKAIEKKLISYIPQISLDSQEEKMLKENNKKNRKHAPALNVSRLAYQYFHTDLFAISGISHTTVLCLMTNMGHDIRKFSSAKSFASWLRLVPNNKISGGHILSHKTPTGKNLIAIALRQAANSIGNQKDHELTPFFKRIAFRKGRIAAITATARKLAVIIWNMIIKMQPYRKTQASNTEKNKTTQLKNIEKRIGLLQLTQDELRKLFLRTSLLTE

SEQ ID NO: 337179 - protein, 331 aa, unidentified
MSASVGIDVSAKKVDVVVLEKEQFHKALSYPQTPKGRDLLAKKLVKLKPKYVVMEATGMYYIDLAKALSDAGLPVCVINPKSFHHFAKLKLKGTKTDPIDAALLAEYGAAFKPRNWTPPSDHRLQIRSIGRHINRLVGARAKAKNRLHALESTETSPQLLLEDERLGIAQLDQRIDMLRKEAIRLLQEEPELERVYTSLSQAVGFGDASILAILAELCVLPESLKSNQVSRYAGLDVRHSQSGSSVNTPGRLSRTGNSYLRTALFYPAMSARTHDETTRLFYENMVGRGKKKKQALVAIMRKYLTALWAVYRSGEQFDPRLLFDVKTRKTA

SEQ ID NO: 337180 - protein, 341 aa, unidentified
MDISVLGIDLGKNSCSVVGLDVTGKVVVRRRMRRETVITYAASLPACVMAMEACCGAHHMGRALARQGHAVRLMSPEYVRPYVKAQKNDDRDAEAIAEAATRPTMRFVELKTEEQLDMQTLHRIRDQLVGDRVSLMNQIRSLLLERGYIVPQGRAKLAARLGEMLDDDEPVLGPRIHRLVSDMRLRWIALDDRIADLDAEFTEAARSDERMRRLLSIPGIGALNATALVAAVGDARTFGRGRDLAAWLGLVPRQATTGGKPRLLGITKRGSRYLRKNLIQGARSSLPTMSKSNTRLGAWLRGLLSRAHPNTVVVALAAKMARIVWALLRHERTYEPVAQAA

SEQ ID NO: 337181 - protein, 352 aa, unidentified
MKKDSRKQVVAVGVDLGDRHSQVCGLDAQGERVLERRVCSTTAGLTSVFGKLPACRVVLEASGSARCVAELLREMGHDVKVVNPRRMRRIYENENKSDVVDARELADAGLYRWEKLPVVYLRSKEAQEKLAVLRARDLLVRTRTGLVNLVRSLLKQEGVRVPKCTTESFPKRAEALVPEGLRVALEPLLAQAVALTDRVKGLDRWIMGEAQEDPAVRCVCQVKGVGPVTGAAFVWTLEDPERFRKSRTVGSFLGLRPKRDQSGETDKQLPITKVGNSYVRQLLVECGQYILGPFGQDSALRQWGLKLAQRGGKRAKRKAVVAVARKLAVLLHRLWVTGEVYEAFPAHRKAAA

SEQ ID NO: 337182 - protein, 412 aa, unidentified
MQVVYARCAGLDVHQKTVSACASVCEPNGKKRRQIRVFGSFTGDLLVLADWLREQGVTHVAMEATGVYWRPVWAVLEGQFEQLLANPRHMKAVPGRKTDAKDCEWIADLLQHGLLKGSFVPPTPIQDLRDLTRYRVELRQSQSRVANRIQKLLEQANLKLGSVASNALGVSGRQMLEAIVAGQDTPEQLAQLARGKLNNKIPQLVQALQGRVRDHHRFLLAEFIEEWDWFEQRIVRLEAEIDKQINPFEQALALWQTMPGVERVTACSLVAQIGVNMNQFPTAQQLASWAAICPGNHESAGKRKSGKTRDGNKWVRRTLCQAAWAVSRKKNCYLSSQFKRIATRRGPKRALMAVAHTMLVIGYPMLKTGQGYRELGGNYLEQINKDQLQRHFVKRLEKLGFKVTVEPSLEAA

SEQ ID NO: 337183 - protein, 387 aa, unidentified
MIYIGIDIAKLNHFAFAMNSDGEILLEPFAFTNDHIGFQKLLTKLSKFPKEDLLIGMESTAHYAENLNYFLFSMDFKLCIINPIQTFGIRKGGIRKTKTDSIDTFIIIKSMIMNNHRIFSQRDMYTLQLKSLCRFRRKLMKSRTKVKIQLVTYVDLLFPELQYFFKSGIHGKACYALLKEEPNPDKIAKMHLTRLSNLLNKTSNGHFGKQTAIALKELASQSVGTKNDTLSLQIFQSIIQIELFTSQLKEVDKDISVIMDSIDSVIKTIPGIGNLNGAMILGEIGDINRFDKPCQLLAYAGLDPSVYQSGNFNASGTRMSKRGSKLLRYALINAAWQLTLNNDTFKTYYNLKRSQGHRHYCALGSTSHKLVRVIYKILTDELVFNLN

SEQ ID NO: 337184 - protein, 343 aa, unidentified
MEMKVIGIDLGKSVFHLVGMDQHGKVVARKRLSRSQMMVFTAKIPHCLIGMEACCGSHFVGAALTAQGHEVRLIPAQFVKPFLKSNKNDYLDAEAIAEAVQRPNMRFVPIKTDDQLDLQALHRVRDRLVSRRTSVINQMRAFLLERGITFRQGRAYLRKQIPELLGDAEQKLSPRMRQLVDRLWQEWKALEEQIEALSREIESIASQDAACQRLLDVPGVGPLVATALVAAIGNGAAFTKGRDFAAWLGLVPRQHSTGGKAWLLGISKRGNAYLRRLFIHGARSIVMSLNRDNHAIGKWMSQSGARTHRNVLVVAVANKLARIAWAVLARGEVYRSTPAFVAS

SEQ ID NO: 337185 - protein, 400 aa, unidentified
MLSIGIDVSKGKSTVCGMKPGGEIVYTPFEVQHTREGMSDLVSLLRGSGEEVRAVLESTGSYHCPVVAALLENGIFVSVINSLRMKRFCSQSIRKVKTDRIDAMQIALYGLAYWQELQPTRLPEDTYRELQLLARQYYQMTSMLIKAKVDFNALCDQVLPGMQELMSDHAGRHKLSDFVLRYRHTTHILEMGETRFRKDYCKWAEKKGYRNCERMAVLIFATAQNGIPVLPNAPSTQIVITEAIRVLHTVEASRDAILTQMQALAKTLPEYSLVREMPCIGDTLAPRLIAEIGDVRRFHSKRALIAYAGIDAPPYQSGKFCANNRHISKRGNRYLRKTGYEVMQSYVMHKPANDPIFTFIEKKRGEGKSGKLAMVAGLNKFLRVYYGKVTELYRSLPAIE

SEQ ID NO: 337186 - protein, 355 aa, unidentified
MTMLAEVVDAVIGIDTHRDSHEVEIADPAGRPIAVMRIGNDSAGFARLLAAIAEVAPGPRVAVSVEGTRSYGVGLTRALAAAGLLVIECEQPRRKQRRGKGKSDPIDAHLAVLAALRLDAGKLPVPRADGDREALRILLVARQEITEASTAQAGRLRALLLAGDDTDRRAARATLTGKALATLAGREIPVQASREQAVRQAEIRRLALALDQARQQLRDNRAQLLAIVEDIAPGLTSRFGVGPVSAAQAIVSFSHPGRCRSEAAYAALGGTSPIPASSGQTIRHRLNRGGDRALNRAIHAIALVRMRSCPRTRAYVTRRTAEGKTPREIRRCLKRYIARELYRYLTRTMNPPVGP

SEQ ID NO: 337187 - protein, 385 aa, unidentified
MKQNSEQAVVATIGVDLGDKQSRVCVLDEAGDIVEEGSFSTSASALTRKFERLERHRIVIETGTHANWVHDLLVSFGHQVVVANARKVRAISANERKCDELDARMLAQLGRSDTRLLRPVKVRPAQVRQDMMLIRARELLVKSRTQMVNSARGLAKSAGERLPCCSTNSLHKKDLGRLEFELRPIFDALEKLDDQIEAYDKKIKEVTAKNYPQAALVRQVAGVGPITSLYFVQALGDVRRFKDGRAVGAYFGLIPRRDQSGSRDPKLSITKCGDELGRRLLVQCTHYILSPYGPDTDLRRFGLKLAAKGNKKRAVVATARKLAVLLFALLKKSEVYEPLRNSPKSPCTAKAVPDGKPPISRPPRTQPSLKCVADGRSAPHAPTTK

SEQ ID NO: 337188 - protein, 348 aa, unidentified
MRNRPLGAVVYGIDLGKTRFDVVGCDEAGQPIQRLKFSRDTLLTFFAAAPKALIGMEACPGAQWMARKLGELGHTVRIIPAQFVKPFVKSNKNDARDAEAIAEAVIRPTMRFVQIKPCEQIDLQALHRVRDRIVGNRTQLICQMRAFCLEYGIAIRQGTGAFKLDIARIITDEANDLTPAMRGLLKELWDELKIVDIRLAAVSRQVEVLAAKHDTARRLMTIPGIGPIGATALIAAVGDGHQFRKARDLAAWLGLVPRQNSTGGKTTLLGISKRGNPYIRRLLIHGARSCMIHLDRSRDRIGVWLKALDGRMHRNKAIVALANKIARIAWALLRRPHALYERIAPAHA

SEQ ID NO: 337189 - protein, 405 aa, unidentified
MNAVGIDVSKGKSTVTIRKPGDVVLMSPCDIPHSQSAINDLIKQIKSLEGETKVCMEHTGRYYEPVATWLSDAGIFVSAVNPILIRDFGDDSLRTPKTDKADSKKIARYTLDRWAKLKQYGIMDKTRNQLKTMNRQFGFYMAQKTAMKNNLIALIDQTYPEANDFFDSPARNDGSQKWVDFIHTYWHVDCVRSKSLNAFAEHYQNWCKRKNYNFSAEKAAKIYQISSDLIAVFPKDDITKMLIWQAVALLNTASKTVESLRSKMNELASTLPEYPVVMDMNGVGATLGPQLIAEIGDVSRFTHREALTAFAGVDPGKNDSGKHIQNSVRTSKKGSPYLRKTLFQIMDSLIKRSPVDDPVYAFMDKKRSEGKPYYVYMTAGANKFLRIYYGRVREYLSNLSNNETI

SEQ ID NO: 337190 - protein, 404 aa, unidentified
MRAWSTRKAPIIAEREFSHSGTGLAELADWLIQMTGAASEVVVAIEVPHGPVVDTLLDRGFAVYSINPKVLDRLRDRFSVAGAKDDQRDAYVLADGVRTDRRLFRRIQVSDPRFIELRAWSRLAEELQEERVRLSNRVHHQLWRYYPQMLKLSSDAAAPWLLELWTIAPTPNKGSQLRKSTVERLLKQHRIRRVTAEIVVGTLKEPAITVADGVAAAACAHMRSLVARLRLVNRELQESEHKLDELCSAVGEVDAVSGEGLQHRDVVILRSMPGIGRINLGVLLSEGSGLLKSRDYQGLRTLCGAAPVTRRSGKSQIVIMRYAAHARLRNAVYHWARVATQHDTKCRAKYAALRRRGHSHGRALRGVADRLLALACVLLQRQTLFDPHLRQTEGHRVLCDAQAV

SEQ ID NO: 337191 - protein, 403 aa, unidentified
MNNVAGIDVSKGKSMVSVLRPFGEVVAKPFSIGHTGSELKELADYLKSLDGETRVVMEHTGRYYEPVARFLHEEGVFVSAVNPKLIKDYGNNTLRKVKTDKADARKIARYGLDNWAELRQHTPMDTIRMQLKTLNRQQSLYAKTKTMMKNNLIALLDQTYPGVNALFDSPVREDGSQKWVDFATAFWHVDCVRNMSLTAFAERYRKWCKRHGYNFSQSKAVEVHTGAQDLIAMLPKDALTKTMVRQAIDALNAVSASLERLKAEMQALAAQLPEYPVVMAMHGVGDSLGPQLMAELGDVARFTHRNAITAFAGVGPGADQSGTHEAKSTRVSKSGPPELRRALFLVMDCLLKTQPQDDPVYRFMDKKRAEGKPYLVYMTAGANKFLRIYYGRVKEYLASLEEN

SEQ ID NO: 337192 - protein, 344 aa, unidentified
MKRIAVDLAKSVYQVAESVQVGRVDRRKRLDSGAFAQYVQEQLEPVEWVMEACGTAHHWGRLMQEKGHRFVLLHPRYVRPYRRRNKTDRNDCDAILEAACCQEIRPVPVKSMQQQQVQQLHKLREGWKKSRVQRINLLRGILREAGVDAPNGIKPFLRQACELVEVRALRGALQVVLAEINLYEQSMRECEEQLARWHADDEIVHKLDEVSGIGLLTASALKTAVGKPERFASGRHLSAWLGMTPNEYSSGERRRLGRISCKGNVYVRTLLIHGARAALLAAKRCKARTPERLTHLQRWALDTAERIGHNKAAVALANKLVRICWAVWCHERQFSGNWHSIKPA

SEQ ID NO: 337193 - protein, 466 aa, unidentified
MGKSSTSEDEKTVGGRDRVRKGLEPKHPDAAGIDVGSRVHYVAVPPDRDEQPVRRFGCTTPELHEMAKWLRACDIRTVVVESTGVYWIPVVQVLEEYTLEVLLVDARHVRNVPGRKTDVQDCQWLQELHTYGLLSPAFRPSQEILPLRSYWRHRAELVGYGAQQIQRMHKALEQMNVQVQKIVSDLSGQTGMRIIRAIVQGERNPVRLAQLRHASVKHDEETYVKALTGTYRTEHVFALRHAVELYDTFQEKIAECDREIASYMQSLQGPNEGETIGTKPPKKRGRFRRKNQPHFDLREELYRFTGVDLTQIDGIDAMTAQTVISEQGIDMSRFPTEKHFTSHLGLCPNNRISGGKVLRSRTRKVQSRAAKALRVAAQSLHRSRTAIGAFYRRLRARLGAPKAITATARKIAIQIYRMLKYGKDYIDQGEQAYQEQYKERLTKNLAKQARKLGLQLLNAQTGQLLS

SEQ ID NO: 337194 - protein, 377 aa, unidentified
MKNVRFVGLDVHAETIAVAVAEAEGEVRSLGVIPNRAESVGRLIRKLGKPEQLRVCYEAGPTGYVLYWQLTQLGVKREVVAPTLVPVKAGDRVKTDRRDAAKLARSYRAGDLTAVWVPDAAHEALRDLVRARWAAKRDQLRARHRLSKFLLRHGRRAPEGVNAWTDKHLQWIKSQVHFAQRAQEITLDDYLHEVDHVAERIARLERSIDAAIESLPVKMRAVIEALQSLRGIAQLSAVSIMAEVGEVSRFEHPRQLMGYSGAVSREHSSGERIRRGAISKTGNAHLRRIVIEAAWAYRHRPAVGKTLAARQRHSSAAVTELAWKAQQRLHQRYVRLMGRGKSKQQTITAVGRELLGFIWAIGTHVERDVKVPLRQAA

SEQ ID NO: 337195 - protein, 344 aa, unidentified
MNFTRCGLDIAKQVFQVHGVNEHGVVKGRKSLSRAKVLEFFAQLPPCLIGIEACGSAHYWARELTKLGHTVKLMAAQYVAAYRKRAKNDANDAEAICEAVGRPNMRFVAIKTDEQQAVLMVHRARTLTVANRTAQVNQIRGLLGEFGLVVPKGVGRLRHELPGILEDAENGLPVLAREVLAGLLEQLREADTRIGGYDRQIRALAEASEPARRLMRVESIGAQTATALVATVGDPHVFKNGRGFAAWLGITPRQHSTGGKEQLGQITRQGDCYLRTLLVHGARSYLRVVDKKTDAKSDWARRLKQRRHVNVAAVALAAKHARIAWAILAHGTEYRPVGPQTAAA

SEQ ID NO: 337196 - protein, 413 aa, unidentified
MERIIERCAGLDVHKSSVTACVRIPDEDEALHQEIREFATTTRGLLLLRDWLASFEVRLVGMEATGVYWKPIYYMLEDDFELWLLNARHLKNVPGRKTDVKDAEWICQLVEHGLVRPSFVPPKEIRELRNLTRYRKAQIEERTREVQRLEKVLQDAGIKLSSVATRVLGASGRAMLDALVGGTTDPEVLAELARGRLRSKLPALRDALQGSFSSHHALMVGKILAHVDYLDESIGDFSAEIERVIAPFSEKVELLDTIPGVNRRTAETLIAEIGVDMSQFPTHRHLASWAGMCPGNEESAGKRRSGKTRKGSKWLRSALTESARAAARSKGTYLAAHYARLRGRRGSKKAAVAVGHSILVIAYYVLERSVPYEELGEDYFDRQRSGEAYTKRLVRQLERLGHKVALESLPQSV

SEQ ID NO: 337197 - protein, 402 aa, unidentified
MNCVGIDVSKGKSMIAVMRPFGEVVVSPFEVRHTANELSELAGLLKSLDGETRVVMESTGNYHAPVAWLLHDAGLYVSVVNAMLVHDYGNNSLRRAKTDKKDAVKLANYGLDHWLTLPRYIPEEDTRLMLKICYRQYQQYSKVQTMLKNNLISLLDTTFPDANRLFTSPPRADGSEKWVDFVATFWHCECVCGRSEKAFTTQYQKWCRKHGYNFSEDKALDIYASACRHFGVIPKTDTAKLLVEQAISQLQTTSSALAALKQEMQSLAASLPEYPVVMGMFGVGPTLGPQLMAEIGDVRRFHSKKALVAFAGIDAPPYQSGQIDVRSRSISKRGSASLRRTLFLVMSVILQCAPIDEPVYQFMDKKRSEGKPYRVYMMASANKFLRIYYASVKAYLESLEHD

SEQ ID NO: 337198 - protein, 412 aa, unidentified
MEVVYPCCCGLDVHKKSITACVLWAEAKGKSRKEKKRFGTFTHDLLQLADWLEQCGVTHVAMESTGVYWKPVWNILAEQFEVLLVNAQHIKAVPGRKTDQKDSEWIADLLQHGLLRGSFVPPQPIRELRDLTRYRVSLVQEINRIANRIQKVLEDANIKLASVATDALGASGRAILEAMLAGEQDAARLAEMSKGLLRNKIPELKLALEGRMTEHHRFLLRQLFEHLRFTESKRSEIEQEIDKRMRPFEDKVTRLCTIPGVDRVTAWGMLAEMGMNMNQFPSSGHLASWACLCPGSFESAGKRLSGKMRKGNVSLRRCLSQAAWAISMMKNNYLSALYRRIAARRGAKRAIMAVAHALLEIAYHMLKRKEDYRELGADHFDRIDVNRIRRSLVRRLERLGHKVTLEPLAQTA

SEQ ID NO: 337199 - protein, 342 aa, unidentified
MCGFIQPTRKGEVMGNVTTIGIDLAKNSFSVHGVDGEGAVVLRKTVSRGRLLELLVRQPPSLIGLEACSGAHEWARRLVEFGHCVKLMAPRFVAPYRKNGKNDGNDAEAICEAVSRPSMRFIPIKTTEQQAVLCLHRVRQGFIEERTATINRLRGLVAEFGFVLAQSSAVVRREAHGLLEHLPPHAARAGADLLEHIRVLDTRVREYERSIEAHARESRAAQRALECSGVGPITASAIAASVGEAREFKNGRQFAAWLGLVPRQHSTGGKPRLGRITGRGDPYLRTLLVMGARSVLQRAPGKSDPLSRWALAVRARRGYHRACIAVAAKNARVVWAMLNQAE

SEQ ID NO: 337200 - protein, 381 aa, unidentified
MPDGIRWVGLDVHARESTFAVFDQATSEVVTRRVVGRPHELLPWLRGVERPARMVYEAGPTGYGLARRALAEGIEIAVCAPGKTERPPADRVKTDKRDAIRLARLLAAGELTLVRIPSVEREQLRDLVRCREDIRVDLMRARHRIGKFLLRREIYWEGTGETWSRKHRSWLTSVRFADHASQATLADYLHAHDVLIARRDQVEAELAKLAFSVPCAHTVARLRCLRGIDTLSALGLCAEIGEWERFDHPDQLSAYLGVVPSEHTSGAQRRLGSITKAGSTHARRLLVEAAYHYRRGPAVGEALERRQRGQAPEIINISWRAQRRLNARWRQLKDTRRKPGGIVAVAIARELAAYCWEIATCPTALEPTPTPTTRRRLTNSR

SEQ ID NO: 337201 - protein, 366 aa, unidentified
MTSVPSTAELIHLGMDTSVSEIVVAVLRPGQEIPVVDRIPGDEESVRRLIGRFPDRRLLSACYEAGPGGYELHRLLTSMGVACDVVAPSLIPKGSSDRVKTDKRDSVRLALTHRAGLLTPVRVPSPAEEAVRDLVRARGDLLDDRKRMQQRLNAMLLRHGRVWRGGAKWSYAHRAWVDRQVFDEPALAEAFSLYRGGLEAREAELAAAGARLASWAGREPLAGPVARLGGYRGIAQLTGLTLAAEVVDWRRFASARAFMGFAGLIPTEYSSGSRTRRGHITKAGPEGVRTALIEAAWAYRYRPAIGATLRRRQAGLPPDTLARSWKAQQRLHAKYAKMTARGKPPGVAVVAVARELAGFVWAEMIS

SEQ ID NO: 337202 - protein, 331 aa, unidentified
MVVGIDISMDDFHACIKVRTESGKVTIKGTRTFKNTYDGFEGFLRWVMDRKKEGYVLSFVMEATGVYYEDLAYFLYSSKEQVSVVLANKIKNYAKSLNIKTKTDKVDSKVIAGFGIERKLDEWKPMSPVYKELRDHCRELLSIKKEMNRARNQLHAMIRSHNKSKSIIKLKTDQIKFYEKAIKSIEKELHKIVDRDRQLKEKLRKLQTITGIGFETSVILASETNGFALFKSIRQLVSYAGLDVEFKESGKFKGKTRITKKGNSRIRQALFMPAMSATRYNEPIKALHARICERNPDIKKKGIVAGMRKLLIYTYVIWKKDMEYDRNYEWS

SEQ ID NO: 337203 - protein, 366 aa, unidentified
MEVRKGKGVTRYVGIDLGKRTYEVAIIGQGGKVTKSNGKTFSANRQALYKKLRPGDKVALETGNMAFIMAKEIQAAVGCKVHVLSSHQLPLIYGSMKKTDKEDSLKLARMVEYFPEERLPIVPVPSDQEIMRRKLIAAYERAHQSRNRAINKLHALFLSQGITTKVRSDLCTGEQRKEAIKELSGLEREEAEYLVSCLDLHEQRIEMLDKQMKKESSQDEVIQRLQSVPGVGPITAFAFVSRVAAERFENASQVSNYLGLVPRVYISGEMVRYGRITKRGNGYIRALLVQSAWALTRSKAGGKLKERYEYMTGVKSKSKKKTIVAIARRLAEVLYVMMRDGTKYESRPFMSKEEAVKELARLALSA

SEQ ID NO: 337204 - protein, 342 aa, unidentified
MKHYVGLDVSQRETAVCVVDETGRPIFEGRAKSNPGALAELIRRKAPFAERIGFETGAMSSWLWHELRRIDLPVVCIDARHAKAALSVRMNKSDENDARGLAELVRIGWYREVKVKSAESQQVRSLLVTRSRLIEIRRAIENQIRAMVKEYGLLFDRAIGSMFRRKVAELVDAEHPLKDVIAPLLSIHEQVCGEQEKLDKRIAALARADETSRRLMTVPGIGVVTALTFRHTIDDPSRFRSAATVGAYLGLTPRRKQSGESDTNGKTSKWGDRLLRTYLFEAASVLLHRTKKWCTLKAWGLRLAKRIGMKKAKVAVARKLAVILHCIWVDGTSFEWGAQKTA

SEQ ID NO: 337205 - protein, 403 aa, unidentified
MRLYVGLDWASSEHAVCVVDEQGAVQAQFRVAHSAAGLAALHTQLRPFGEPAELPVAIERPSGVVVDTLVEAGFPVIPIHPNVVKASRPRYHAAASKSDPHDAYLLADLLRTDGHRFRRLQRPSDATRALRALVRGRDDLVATRVMLANQLRALLDSFSPGAALIFAAVDSPIALAFLARFPTPQSAAHLGEKRLAAFLARQSYCGRRPVAELLERLHAAPVGHAAEGEADAKGELVRTLVGVLTPLVAQLQQLTAAVEHAVATHPDGAVVMAFPRAGRINAAQILAELGDDRARFATEAQLAAEAGVAPVTYASGKHRGVGFRWACNKRLRQAITCFADNSRHSAPWAAAVYYRARARGCDHPHAVRILARAWVRVLWRCWYTTTPYDPTHHGGVRRLLHAA

SEQ ID NO: 337206 - protein, 370 aa, unidentified
MNDLIRIGIDTSKSVFVLHGVDAAEQPVLRRKLRRRQMPEFFAKLAPVQIGIEACGAAHYWARELMALGHEVRLLPPQYVKPYVQRGKNDAADASAICEAMSRPRMRFVPVKSADQQAALMLVGVRDQLVARRTQLSNTMRGYAAEFGVTAAKGLDKIEPLLARIACEPGVPEQAKALFALLGEEFAALKPKLRKLEAELLAWHRHNELSRRLAEIPSVGPVGATLMTMKVADPHAFRGGRDFAAWVGLTPKDHSTAGKQRLGVITRAGDETLRRVLVVGATSLIQQVRKGRGNPSPWLTALLRRKPPKLAAVALANKTARIAWKLMVSGERYHRQQEASGLVPPTGSLAPGARRQGRVAPPAAVACGQP

SEQ ID NO: 337207 - protein, 387 aa, unidentified
MPEQFDSHNAMAAFDHDSTLVVALELSGKSWQAGAVVPGVARRPRRRLEPRDIAGLLKAIERWKAEAAGASREVRRVALTYEAGRDGFWIARDLLARGIEVQIMHPASIPVARPGRRVKTDRIDLDMLLRTFLAWLRGEPRVCSMVRIPSEAEEAMRRPGRERERLVGERIQLENRIENLLCLHGVADFRPRLKKAAERLDELRSFAGAPLPAQTMAELRRLMARHRLLSEQLREIEAERDRVARVAHPDGAERMIQHLAQIVGLGLETATLLVREMFCRPFRDRRAVAGFAGLTGTPFQSGGMAREQGIGKNGNPRVRCIMMQLAWRWLRFQPQSALAQWFAARTDGAKGRIRTVMIVALARKLLVALWRYAGTGEVPAGARIAAA

SEQ ID NO: 337208 - protein, 387 aa, unidentified
MQKPHDNSKASPAAFIQDNTLIAVIELSLSNWLVAGLIPGVSREPLKKLEPNPEDLLKLLHGWRDEAIKAGRPITRIAVAYETGRDSFWLARWLRERGIDAHVIHATSVAVSREHRRAKTDRLDTAMLKRGFLGWLRGERGHCTVAIVPTMEEEDAKRPHREREGLVHEQTRAVNRMKSALIQFGVRNFNPKLRKASVKLETVRTPEGKSLPPNTIAALRRDMERLKIIKEQIKAIEQARLQQFEQKPEALANRMVYLLVRIYGLGLETADLLAHELLSRTLRDRKAVARYAGLTGSPDESGSKRREKGLSRSGNARVRKIMIQLAWRMVKFQPDSALVQWFKQRTESAKGSRKPMIVALARKLIIALWRYANDGVIPEGFRLHSAA

SEQ ID NO: 337209 - protein, 340 aa, unidentified
MKLYGAIDLHSTNSVLVVIDEEDKIVYQKRLPNELALILQELSVYQSRLEGIVVESTYNWYWLVDGLMEQGYKVHLANTAAIQQYEGLKYTDDHSDARWLAHLLRLEVLPEGYIYPKAERPVRDLLRKRSQLVRQRTMNLLSIQNLMTRNTGSSMTANQIKGLDKPQVEGLLPDADLSLAVQANWSVMCSADEQVERLEQRVTERVKLRAQFSFLKTVPGIGQILALTIMLETGDIGRFATVGNYASYCRCVGSQKISNGKRKGSGNTKNGNKYLAWAFVEAANFAIRFNSKIKSFYQRKKAKTKAVVAIKAVAHKLCRACYHIMKDRVAFDVTKAFGQK

SEQ ID NO: 337210 - protein, 415 aa, unidentified
MALKIVYKICCGIDVHKTFVVACIASTNDKGVTSYESHRFSTYTSGLKTLLQWLLNRNCKDVCMESTGKYWIPVYNILENDCSIVLAHPKYVKAIRGKKTDKKDAKWIADLFKHDLVVGSFMPPADIRQLRELMRYRFKLTCFQSSEKNRLQNCLTVSNIQLGNVVSDTFGKSAQAILDKLLENPADTSLDLEPLIYKSLKKKLPELRDAIDGYITPEQVVKLKVIKAHYESLESRKAELEELILAIAAPYQQELAILQTAPGIRSDFTAIGIISEIGTNMEAFPSAKHLCSWAGLTPTNNESAGKKKSVRVSKAGCYIKPLLVQCANAVVTSKKHPEIRNRYLRLKKRRGHKKAIIAIARMLLTALYHMLKNGENYNAELYRKSDLPPADWEITVEQAIIIARNQGYKIKSATA

SEQ ID NO: 337211 - protein, 356 aa, unidentified
MNKTILNTGKGNYNRKIQDYDHYIALDWSQVNVALARCTSKQTIPKVYEFDSNVKAIKDYLTNLKGHILLTIEETTTSHWLYVELIDHVGRIIICDPYRNRLLSDGPKTDKIDAGKLCQLLRGGYLKEVYHSCESDFKLRQLVSAYEDLVKSGVRIQNQRHAVYRAMGYRYTSKNAPALKDRISDDRSMRFISDWQDSCIEHYLEEKASFESHIEQVICGNKIIKGLKSLPGIGSISALKIHATVIQAQRFPSKGHYLSYCGLVMHEKMSGNRSYGKRRPRFNRRLKSVYKMAAHRAILGKNNPVYEYYEELIDKGLTEKQATLMVARYLAKVSLGIMKNGTKYEPYRWRENKTVA

SEQ ID NO: 337212 - protein, 413 aa, unidentified
MRVIRKRCLGLDLHKKQITAHLRVHQGSDLEPLGTDRQFKTMPEDLERLRDWTREQQVTDVVMESTSVYWMHLYDLLEGTTKPAVVNAAHVKKVPGRKTDVSDAQWLSELHAHGLLRLSFVPPKDVRDLRALTRYRTKLVATRTATRNRTIKLLETAGIKLSSVVSDSFGRTGRAILDGLSEGKDTAAELAANARGTLRNKIPELQRALQHPLSDHQRELLGMLLRAFDSVDAHIAEVELKLTERTESRADVIAKLDPIPGINPLAAITLLAETGFDMSVYRNSGHLTALAGLAPGNAISSDKRRRISVRKGNHYLKRICVQIAWAASRKKDSFLRMRFLRLKGRIGQNKAIVALARQILVLIFQILSADKPFKDLGPNFYDARDPDRAAQRYVKRITALGFVVTLVKNKSEA

SEQ ID NO: 337213 - protein, 359 aa, unidentified
MRTQSNKVNFNGENIYVGIDVHLKSWAVTIYTEHLHHKTFSQPPVPILLWKYLDENFPGGNYYSAYEAGFCGFHIHFELEKLNIKNIVVNPADIPTSQKEHVHKNDSYDSKKIARSLRAKELTGIHIPLIETLENRSFVRSREMLVKDLVRFKQRIKSFLYFYGIAYPPEFEKSSCHWSKRFLKWLKEISLNTQNGNEALSLLIREVEQQRLLLLEVNKKIHSLAISDKYIKEMELIRSVPGIGLITGLTFLLEIENIERFSNTDKLACFVGIIPTCHSSGETSNNGEMTFRGQIHLKKGLIESAWVASRIDPALTHSFIKLCKRMEPNKAIIRIARKLLNRIYYTLKKKHKYEYGMVK

SEQ ID NO: 337214 - protein, 383 aa, unidentified
MKITMPEVSRIIGLDLAKKSFVGCILSGEGFLQKRMFSGKMTQDEEGWKYIQSRINTDDLVLMEAGTSSFSLARYLIAHSAAKRIEVLNPGMLRVIWMSQRKSDKSDAVKIACIARDMAMEAWPTIPIPTEQEQAERSTINSYVFTKKQETQLVNRLYGLFNSLGYPEIKRSIIRDNPEGRRQLAQELLSNHRLALYDAEMMMDQLDLVQLQVDARLESLRKICLAHPRQALSWLSIPGIGLVNAATLIAYIGDGSRFSNPHQLLNYAGLVPKQDQSGDLDKHLGITKRGNRAIRRNIVQGAWVVTTLEPTCPITKYAYRKKKEGKQKQKVAVAVANKMLRIGFSLLKSGDLYRPMMENGVGKLKEKLRTYKLQALMKTILED

SEQ ID NO: 337215 - protein, 410 aa, unidentified
MEVLHPRCCGLDVHKETVVACVRLMIDGKTVKETRTFATTTASLIALSEWLTETKCTHVAMEATGVYWKPVWHILSDGGFELVLANAAHIKNVPGRKSDVKDADWISDLLAHGLIRPSFVPDPPTQEMRTFLRTRKQFVHEKSSHILRIQKTLEDANIKLDSVITDIMGLSGRKMIEALIAGETEPAKLARLADRRLKASQETLRQALRGRVTKSHRFLLRLHLGHIDALDAAIAELDREVDAGIAPFRTAVEQIITTPGVKALAARTILSEIGTDMSRFPTSGHLISWACICPRNDESAGKRRSSRIRKGSPWLKTTLVQCAWAATRTKGTYLQAQFHRIRARRGPKKAIMAVAASILTAIYHMLKDGTLYADPGPNHFDARTKERQKTRLLRRLADLGYAVELVHPTL

SEQ ID NO: 337216 - protein, 332 aa, unidentified
MMAQSKLVVVGIDVAKDKVDACIRSLSQRQTFPSTPDGRRALIRWLRKHKVGKAAMEASGGYERDWAKALREAGIEALIVDPKRVRHFARSAGRLVKNDPIDAEMIARFAETFVEAKGQAYDAARERLVQIVNARQALLDVRTSLHNRSEHSAQDVVQKMQARLLKSIADEVAKLEAAIAAMIKATPHFAELAEIIESVPGLAEITSAGLIAAMPELGQVSNKTAAALLGVAPYDNDSGKHRGDRHIQGGRRKVRNLFYMPCMGAATRHNPMLKAFYDRLIAKGKEPKVALTACMRKLIVILNVMIARGEKWDATRYEVSDPARLPPSACAA

SEQ ID NO: 337217 - protein, 319 aa, unidentified
MQCIGVDVSKQILVTYDGERERVFPNRKGLPELAAFLDHGREVLIVFEATSTYSRNLEALCRERGLPMVKLNPRLIPNLREVSNKRGKTDQTDAELLYRYGAEWGGGEAREPQAVDRLTRAISVQLAIYRVIQKARVAYQGLFEALSQDPATPKGLLAELTGMITSLKEKERECIARAQELIAEEEKAAASFQALLSIPGVGPITALTLLALFRRYPDTNRRQIVALAGLDPIEHRSGSAVHKKPRISKRGSGELRKRLYEATLPAARFNPAVKEIYRRMKERGKPEKVARIAAARKLLLIAHAIYKSGESYRAPQEAT

SEQ ID NO: 337218 - protein, 346 aa, unidentified
MENIALDVHKHYTWARVENREGQQLYASRLAHGRGCIKNFVQRWTPGSPVAVETVGNWYWVVDEIEAGGGKPQLVNARLAKLMIGNVNKSDKLDAKGLNMLQRTGTLPTVWIAPSGVRDARELPRTRMVFSRQRTQLKNRVHSTLSKYGYVVDEVSDAFGKRGRQIIEELSNKLPPHTKQALDHVLDQLDEVMENLKAIEADMIQVFAPCPQTSWLQSLPGVGQILAVVIWTEIGSIERFNRAEQLASYSGLVAREHSSGGKFHYGAIRRDVNVYLKWAFVEAANSAILNRERCDYQHIGRLYQRIKPRRGHNRAKVAVARHLSEASFWMLKKGEPYREPVLSTQR

SEQ ID NO: 337219 - protein, 339 aa, unidentified
MSIVMGFDQHRGQITGEWIDTDTGEVQRTRVAPADRAAVRKFLERFRGRELEVALEATTGWRFVVEELRRIGAAVHLAEPAETAGLRGPKKRAKGDRADARHLRELLMIKRLPESWIPPDHILDLRARVRLRHTLSEQRGEWQQRIQATLYHHGCPQRRQLMTGDGREWLASQPLPAAARETVTIALAMIDALEVQIAPLDKELRAYARRQVGCKALMAHYGIGELTAVTILAELGDCTRFSSSRQAVRYAGMDITVHQSDQRRSPGHLSRQGPPALRWALFEAAQQTRRRTTSPDRGYYEQAAERIGGNRACLSVARKLLKRSYHTLRERGEEALAPA

SEQ ID NO: 337220 - protein, 345 aa, unidentified
MTVYIGVDFHARAQTISYLTTEEGEIRRLQLDHGQPNEVRSFYQQFAGQQVVVGFESSGYAAWFEELLEELGCEIWIGHATAIRLFARRRQKNDRRDADLILDLLVRGDFPRIHRYSAASREVLQQLRYRQRLVKMRTMIVNSLLFMASSRGLSLRTQLKSRRGLERLQQLALPQPLTDQRDELCQLLLELKTKVDKVEEWLAAKAESDVRVKRLRTHYGIGPLTGLCLVHTLECPERFANPRKVTAYVGFDPVEDSSGERRRIGSISKQGSRLLRFYLVEAGQIAIRQDQDLARVYQRVLVRRGHAKAKVAVGRRLLVRAFIMLRDEIDYAEFQRRGVAARSSR

SEQ ID NO: 337221 - protein, 346 aa, unidentified
MTIVETTRPITGGVDTHLDVHVAAALDGNGGTLGVESFPTTTVGFAQLHAWLSTFGAVVRVGVEGTGAYGAGLARYLRGRDLEVIEVDRPNRQQRRRAGKSDTVDAVEAARAALSGRASGIAKTADGNAEAIRALLIAKRSGRDTRIMCLNQIRHLGFTAPDALRERLRGVPRRRLAHTAATLRPCSGTDVVTHATKLALQTLGRRVVDLEETTERIDQQLETLVRTTAPSLLALEGVGIDTAAILIVAAGDNPQRLHSEAAFAHLCGVAPIEASSGKTTRHRLNRGGNRQANHALWRIVFTRMSSDERTRKYVARRLAEGRSKPEIIRILKRYVAREVYKYLRHD

SEQ ID NO: 337222 - protein, 351 aa, unidentified
MSHKTAATVARTIGIDTGKNTLHLIGLDDQGAIVLREKIARGRIAARLANVPRCLIGIEAGMATHYVARELGALGHDVKQVPPAYSKPFRQGHKNDFRDAHAIAEAVQRPSTRCVPVKTDDQLDLQALHRVRSRLVGQRTAVINQIRGFLLEHGIAVRQGLRFLRQQLPDILAKRSDVLSPRMIRIMEDLSGDWRRLDERIEHITKEIEVLADTDVNCGQLMTVPGIGPIVASAMVAAIGNGAAFARGRDFAAWLGLVPKQMSTGDRTILGRITKRGNRYLRMLFVQGARAILLRPKSWVKHSFGPWLTTAARRLHRNILTIALANKLARIALSVLIQGRSYETRIVPAAA

SEQ ID NO: 337223 - protein, 347 aa, unidentified
MKRIAVDLAKSVYQVAESIHVGRVDRRRRLDPEAFRRYVQEQPEPVEWVMEACGTAHYWGRVAQARGHRVVLLHPRYVRPYRRRNKTDRNDCDAILEAARCADMHPVPVKSHEQQQVQQLHNLREAWKKTRVQHINLLRGILRELGVAAPSGTQAFLRQACELIERPEVCALRGSLQMVLAEISLCEQSMRDSEEQLARWHADDDIVHKLDEVSGIGLLTASALKTAVGKPERFASGRHLSAWLGMTPNEYSSGERRRLGCISCKGNTYVRTLLIHGARAALLAAKRCQTRTPERLTQLQRWALQTAERIGHNKAAVALANKLVRICWAVWCHERRFSGDWQSARPA

SEQ ID NO: 337224 - protein, 368 aa, unidentified
MEHDITAYVGLDVDKDSIAVAVAAPGRAAPRFVGTTGPRLAELTKALSHLGKPAQLHVAYEAGPCGYTLARELISRGYRCEVIAVAKTPRKPGERIKTDRRDALSLARYLRAGELTPVTIPDACDQALRDLSRAREDAVRARLKARQQLKAMLLRHGLRYEGKTSWTQAHERYLGQVSFEYPAQDIAYAEYRTAVRDANDRVERLTQALRKQTDGWRFAPVVNALMALKGIDFVTAVTLVAELGDLTRFAHPKELMSYLGLVPSEYSTGESRSQGKITRAGNSHVRRVLIESAWSYRYSPRMSRDRVVRCEAQPKAVRDLAWQAQLRLCSRYRRLTARGLHQNKICVAIARELAAFVWDLARHVPLER

SEQ ID NO: 337225 - protein, 409 aa, unidentified
METIYERVGALDVHKAQVTACVRVPGPSGREPQLAEFSTTVAGLVALRDWLAAYRVTHVAMEATGVYWQPVWHILEDDFELTLCNARHVKQVPGRKTDVSDAQWLCQLMEAGLLRGSFVPPKPQRQLRTLTRYRKTQIAERQREANRLHKALEDTGIKLDCVATDILGASGRAMLDALVAGTTDPEILADLAKGKLRAKIPALREALEGRFEAHHALVIGAILAHLDFLDEQISRLSDAIEEQLGPFAAGVELASSLTGVARRTAEVMVAEIGVDMSVFPTAGHLASWAGRCPGNDQSAGKRRSGRTRKGSKWLGIALEEAALAATRTKNTYLAAQYKRLRPRIGHGRALGAVKHSILIAYWHMFTTGETYRELGGDYYQRRNPERATKRLIAQLQELGHIVNLEPAAA

SEQ ID NO: 337226 - protein, 444 aa, unidentified
MHYQKVLKMPESIPYLSVGFDVGADFTWMSIMLPNGILIGKPFKIIHSDPQSRELAISKIKEAQEMYSLESRCFLESTGIYHIPLLCFLRDKGFDCAVINPIITKNSTNMNVRKLHNDKFDSKKAAKVGLDASLKASIVPDDAIIDLRNLVRDYYYFKDLQSAIVLKLHAELKVSFPAYLNVFSKVTTQTSLKLLEAYPLAADMLAAPKDELVETIRSTARFGETYALARYDAICTAAKDAAVFGRALPSNALRIRLYIKMYREYQAHLDSILEELHQAVGKLEGTPDYDRISFIQTLHGVGFLSAVVLIAEMGSFDLFSSPKKLYAYFGLDPGVNDSGKFHGDRVHMSKRGSSLARRILHMVAINNLKVDKATKTPVNPVIYDYYTRKCAIKKKSVAVGAVMHKICNIIFAMLRDNKPFELITPEEHRERYAAEHPESVNTAA

SEQ ID NO: 337227 - protein, 319 aa, unidentified
MTDGAEKGPTIFVGVDVCKAWLDVAVEDEPGVARLANTSAAWEAWLSAQPSQQRLHVVVEASGGFEEHVSLGCEARGVPHSIANPRRVRQYAQAAGRLAKTDAIDAAVLAAFGRAIQPRLHKRPSDACQRLRALVARRGELIAMRTAEKNRLKASGEARLRVDVARHVAWLNGEVAELERRIRAAVREEKTLRRKAEVLATVKGVGPTTVATLLAFLPELGQLDRRRIAALVGLAPYANDSGPSRGRRRIYGGRAQVRTALYMAAMVACHHNATLRAVYRRLRDANKPAKVAITAVARKLLTILNAMVRNDTPWRLAAT

SEQ ID NO: 337228 - protein, 342 aa, unidentified
MKIMAGIDLHSNNAVVALMDETGRRLSHKKLPCDLPSILQVLDGYKSQIVQVAVESTYNWYWLVDGLEDHGYPVVLVNTAKIKQYDGLKHTDDVSDAYHLCELMRLGILPGSYLYNRQTRPVRDLLRRRMLFVQLRTSLILSFKSLNERTLGQRVLLRKVKSMSVEEAQSLFTAPADQLLSGEQIALMGHFQKSIAKIEQHILEVTKDWAIFQRVQEIPGIGRILGLTIALETGEPARFAGAGNFASYCRAVKSLRQSNHKKKGENNRKCGNRYLAWAFVEAAHFAVMHDDRSRQFYDRKKKKTNPVVATKALACKLAKAAWHVMREDVPYDPQRVFGGPKS

SEQ ID NO: 337229 - protein, 341 aa, unidentified
MQITTIGLDIAKNVFQVHGIDAVEKVVVRKQLQRSQVIAFFAALPPCLVGMEACASSHYWARELTKLGHEVRLMPAKDVKAYVKRNKNDAVDAEASCEAVRRPTMRFVRPKSAEQQGRLMQHRARDLLMRQQTQVINALRAHLAELGIVAAQGREGLKQLLAIIADERDERLPIDARASLIVLAAQLQALHTMIGSIEKRLTVQHRANEASKRLQSIHGIGIIGASAIAATVADPKAFRSGRDFAAWIGLVPRQDSTGGKQKLGPISKQGDRYLRRILVVGAHSVLRRAKHNPEKYPWLTQLLARRPFKVVAIALANKMARIAWALLASGGHYRPRLAAAA

SEQ ID NO: 337230 - protein, 349 aa, unidentified
MYYVGADLHKEQTWFYIMDQNGTKIDSKSISNSPDSLKSYFATIPTPFTLAVEATYNWYFFIDMAEQFAQTAYLANSYELKAFAKRHKKTDKIDARLIADILRKGFLPTVFIPDQSIRSLKELLHYRINLVRDRCRNIFRLKNTLDKLGADSSGDFTTKKRLWEIPVDSFAERCHYIISGYIGRIVALNQHIHNMKTYLKNELLEDKEIQNLITIDGLDYFSAALIKSEIADINRFASFNRLCAYAGLAPRVSQSGDKEAHHGALMVNRRKNLQWILLETVFHFIKATPERQARYEELKGRKGANTAKVIMARQYLKIIYHVLKEQRPYYREEVKRPKVFCQIQSVATA

SEQ ID NO: 337231 - protein, 345 aa, unidentified
MYFIGVDHHKQSSTMTVLDDDGREVRTAKLLNVEADIAAFIRESAPDGFQAVLEAGRSSYVMLDFLRELGGEVRLANPYELKAIAHAQIKTDRRDSKLLARMLRTGMIPEIYQRELANREAQRVMRQRAFWTRLQVEVKNKVRVLLAQQREAVRLGVETRKESLFGPKGLEYLGPVELRDKDRRLMQELVAALRELEAHKKKSDGMVEALYQELPAAQLIDTVPGFAKTLSVMVAVEIGDIRRFWRVEKLLSYAGVVPSTHGSGEKTYQGHLKQGNIWLRWALIEAVHPATKSDPGLYIYYHRLASRKGANIAKAATARRLLTIIYRILIEERRYIPYLSKTSAA

SEQ ID NO: 337232 - protein, 378 aa, unidentified
MSEITRGTMSAIVRVGVDLAKQVIQVHGVDRAGRRVVGRTLKRDQFCAWAAQLPPGCVLAMEACSSGHHWARRLRAMGLDARLIAAHLVSPYRMEGKSGKNDATDAAAICEAASRPSMRFVPVKNCEQQGVMSLHRTREGFKEERTACINRIRGVLAEFGLVFGKSPKVLRARLADVIEDASNELSTTARLVVQRAFEHWRELDEHMRWCDSQVGQHVRGSAQAKRAAKITGIGELGASAMVAGVGEFKQFRSGAQFGAWLGIVPSQNSSGGRASLGRITKRGDDYLRTLLIQGAKSAVMSAGKRDDPTSRWLVQLTARVGWQKACVAMANKNARILWAVMTREQGFEPQHVSVKPQAKVPLKERTVAPAQSAVTCPA

SEQ ID NO: 337233 - protein, 371 aa, unidentified
MSESKGITYAGLDVHKSGINVAVILPGSKQVDEEWQLVNDARSRARMVRKLERLGGERVCVCYEAGPCGYALQRELRDAGLECTVVAPSLIPAKPGDRVKTDSRDARKLAELFRAGLLTEVHPPTVEEEAVRDLTRAREDAVHDLLSARHRLTKMLMRHGFVFRQGTNWTQRHRAWLKGVRFEVRELQEVLDNYLLGVEQVEERLKHLHDRLVAVAQSERYADRVGWLGCLRGVDTVTAMTLLAELHDISRFTNARELMSYLGLTPSEHSSGGRTRRGSITKAGNGHVRRVLVEAAWNYRHRPAVSAHLARRRKAQPAQIIAIADRAQQRLYRRYYRLKEGHHKHHNVVTVAVARELVGFVWSILQHGKAA

SEQ ID NO: 337234 - protein, 343 aa, unidentified
MGNTITIGVDLAKSVFQVHGVDAEGSIVVRRQLRRRQVVPFFEKLSPCLVGMEACATSHHWARAIEQLGHRVRLMPPRYVKAYVKNQKNDAADAEAICEAVSRPTMRFVEIKTTEQQSVLILHRTRQMFVRQRTTLINAIRAHLAEFGIVAQIGRNGVDVLLRIIGEHEDSRLPEVARSCLRALVAQLHLVKRQILEADRRILAWHRSNETSRRLDSIPGVGPLVATALVASVPNPQAFKSGRDLAAWIGLVPKQNSSGGKERLGGISKHGNRYLRMLLTVGALAVIRYAQTHGTAHRPWLARLLERRPTKVAAIALANKIARMAWVIMARGERYREPTLQTT

SEQ ID NO: 337235 - protein, 370 aa, unidentified
MKSIIYIGMDVHKNSYSLCAIYGKTGEILGETKISSDIKLIEKFINNAKKKINEDVDVLAGYEAGCLGYSLYWQLKEKGIACNILAPTTMQRSAKNKVIKNDRRDAQMIATNLANGSYKAVYVPHDHDVEIKEYIRMMNDFKDESKKVKQHINAFVLRLGYRYGGKSRWIPAHIKWLRGLELNSMYKEILDEYLSQLEELTEKIERFQHKLEELSQKDSYREKIGELRCFKGIDTTAAMTLHVEVSDFNRFPTAPAFASFCGLTPGEDSSGEKNKRLSITKQGNSLVRTTLVECAQVLVRGTIGKKGKKVKSKQLGQDVKVIDYTDKAVLRLQKKYHQMILRGVNKNIAVTAIARELACFVWGVETGHIA

SEQ ID NO: 337236 - protein, 397 aa, unidentified
MYIVGIDIAKRKHEAAVIDGEGAVIIKPFSFTNNCSGYNRLLAMLAKAKLPLDEVSFAMEATGHYWLALFTRLQKEGFRVQVINPVQTNSIRSFYIRQAKTDPRDALLIAEVIRFGHFSESTLHPENIYELRELCRGRHAIVSMQADVKRKVVALLDQVFPEYETAFTNLFGDTSMAILQTCPTPKELSEMRLEELCHLIEVSSRKRFRMAKAQELQELARNSFGFAMAGDVFSTMIRLYAKHLVFLKQQVQEMDRKIAEIMDTLDTPITTITGIGPTLGAYILSEIGDINRFSSAAKLAAYAGIDPTMRQSGEYNGVRNRMSKRGSPYLRHAIWLAASSAVLHDPALKLYFQKKRDEGKPYMASVGHACRKMVSIIYAVMRDNKAYTPCIPNEISA

SEQ ID NO: 337237 - protein, 323 aa, unidentified
MNKDIKYFGIDISHLVFDVTDSNGNYYQFKNNGSGFKKFVKLLDFASHCVMEATGYYHYQLAYHLLESGIKVSVENPLAVKRYIQMRLSKIKTDKSDSKLISEYAQQVELKLWKGNTKVELECLQITRALVIYTKQSTMLKNKLHGEAVLGEPSKAVVRSLKRLLKQLGNEVKALEDRLLMLVKQAHQDVLTRLQTIPGIGPKTAIMLVVLTGGFERFNSAGQLCSYAGLTPVIRQSGSSVKGRARISKIGNEKLRSLLFMCSFNACKVNKACRDLYERLVAKGKSKKLALIAVCNKLLKQAFAIAKSGLIYDYSYRSTLVKN

SEQ ID NO: 337238 - protein, 349 aa, unidentified
MAMTIVEAPPGITGGVDTHLDKHVAAALDPLGRLVGTESFDADAAGYKALLVWLEDFGEVTKVGIEGTGSYGVGLSRFLRRKGIEVVEVNRPNRQSRRNQGKTDSLDAVEAARAAISGRASGVGKTKDGPVEAIRVLVVAKRSARQARVKAIVQMRHLGFTAPDQLHSRLKGLSVTALVAEGAKLRATKSADTVTAATKASLSSLAHRIQGLDLEIAELDEKIESLLLATAPDLMARFGVGPDTAASLLVAAGDNPERLHSEAAWAHLCGVSPVPADSGKNAGHLRRHTGGDRQANSALWRIAMVRIAHDPETTQYFERRVKEGRTKRDVIRILQRYIAREVYRYLPRG

SEQ ID NO: 337239 - protein, 399 aa, unidentified
MLAVGIDISKSKSVAAILNQDGSMHTSPFEFHHTQPELDAFIKHILNSNQSATILMENTGHYHYPVLKAFREAGLPVCMVNAYQIKKFGDMDLRKAKTDKKDAVRIARYALEKSYSLVPYTSMEQKYEDLKFLARQYNQRMLTLKTNKVFLLNLLDETMPGITNILPLTTRTPETSLSVLFINRFKSYDRIKKMGKSRFLDAFEKIARKSRNRQTKTYGLAIYEAALRNITTRGENEYTLAAQDQCLELVCESQKAADSIILKMQTLAETLPEYTVLRSMAGVGDRLGPLILAEIGDIRRFHSGKALNAYAGNDAPPYQSGTFESHNRHISKRGNAALRKYCFEVMQALKLTRPQDDPVYLFLLKKEQEGKPYNVAKMAGVNKFLRIYYARAMETLKQQ

SEQ ID NO: 337240 - protein, 315 aa, unidentified
MTTSSGKFVGIDVAKDKLDIAVLGEKKESQVTNDEKGITSLVKKMQKLGPALIVVEATGGYQRSVVLGLYEAGLPVAVVNPARVRQYARACGLLAKTDKLDAFNLAEFGKQVKPRRFEAKSEAGRYTSALLVRRRQVEEMLKAEKNRLRTVHADMRSSLERMIQVLKEEIKHLEKELDRFMKEHEDWQEQEQILCSAKGVGRVTAATLLAELPELGKLDRKKIAALVGLAPMNSDSGKKRGYRKTKGGRIEVRSVLYMSTLVATRYNPLIKAQYQELLRRGKVKKVALTACMRKFLTILNAMMRDRVPFRQMAPA

SEQ ID NO: 337241 - protein, 433 aa, unidentified
MGLIVPTTIHPEREDQPLPYEWFVGIDWGSPQHQVSVLDRDRRRVGERVVDHDGASLARLADWLWTLSAGQPQRVAVAIEVPRGAIVEGLLERGFHLFALHPKQLDRFRDRHSVAGAKDDRRDAFVLADSVCTDQPSFRRLQLDAPQFILLRELSRAEETLLEEFRRSANRLREQLHRFYPQMLQLCSAADEPWLWDLITLAPTPAHAMLLSEEQVQRVLKAHRLRRLKAPAVLACLQAPALPVAPGTAEAAQAHCGFLLPCLRVLAEQLLACSQQVSTRLRTMAAEPGAGESPSDVAMVQSLPGVGRKITAWLCAEAAQPLAERDYQVLRTHGGVAPVTKQSGKRRQVVMRHGCNPRLRHALYHMARVAMQRDAHFSSVYAALRAKGQRHGQALRNIGDRLLRILMAMLRHRTCYDTSRIRCEPVVQMGQKM

SEQ ID NO: 337242 - protein, 341 aa, unidentified
MTSIIGIDLAKNTFSVCALNSRGKVLYNKKFSRKKLAIFIKTTEVSFIAMEACGGAHHWARMAETAGHKVKMIHPKYVKPFVKTNKSDEADAHAICEAALRESIVSVPIKQIWAQDVLVLHRVKTRLTKNRVALSNEIRGFLLEYGVPIPIGTSQFKKKVAIILGENPDNLTQLFLGELRDLIVEFDEIQEKLLIVKTKILEFAKSHEICKKLQKIPGVGPMISTAIVAAAGSGSNFSNGRHFAAWLGLVPKHTGTGGKTKTTSISKRGDKYIRSILIQGAHTVVNWAKKNDTPQRKWVNEKLRSKHRNNVAVAIANKNARIIWKILVTGEDYKQSIAYCA

SEQ ID NO: 337243 - protein, 341 aa, unidentified
MEEYIGLDVSMKETAVSIRRDGKRVWRGKCASDPKLIAELIRKRAPAVKRVVFETGPLSVWFYHAFRAEGVPATCIDARHAKAALDMAPNKTDANDADGLAHLAEVGFFREVRVKGFDSMLTRTLVAARTRLVRITTELSNQIRGIMKTFGLLVPAGKGSIFEKNVRRLLADQDGLASIVLPMLEAWRGIRTRAAELGRQLVADARQSQACRILMSIPGIGAITATSFATAIEDPDNFRKSRSVGAWVGLTTRRYQSGEVDYDGHISRRGDRHLRSLLYEAASVILTRSSTGSSLRTWGLQLRERIGFKRAAVAVARKLAVIMHAMLKAGEFFDPQAGATA

SEQ ID NO: 337244 - protein, 343 aa, unidentified
MSIVILGVDLGKNACSVVGVDAAGAVIVRRSMRRQTLIDYVAKLPACVVAMEACCGAHHLGRLFAAHGHEIRLMSPEYVRPYVKAQKNDDRDAEGIAEAASRPTMRFVDLKDQEQLDIQTLHRVRSRLVAERRSLTNQLRAILLERGTIFPVGRRKLELGIDAMLADEDTTLSPRLRQLVGELRAEWRELDARIEALNGEFVELAHNNAAARRLTSIPGVGVLNATALIAAVGNASSFAKARDLGAWLGLVPRQHTTGGKPRLLGISKRGNTYLRTLLIHGARAALPSLARSETPLGRWLTGMIERGVHRNAVVVALANKLARIAWAALRKDATFEGGYPVAA

SEQ ID NO: 337245 - protein, 416 aa, unidentified
MPEEGEPVHYYLGVDWADQTHAVWVVDERGTKITARTVPHTAEGLSEWGRELDEWRAQGIELWAAIERPEGRVVDFLLDHGVVVYPVNPKALDRARDRFRQSGAKSDPFDARVLADFLRTDHASFRALQPSSEAAQELKLLTEDCQRQIRQQTRLVNQLTATLKAYYPRGLEVAELTTALAREFLQAYPTPAAVAGLTERQWQRWARAHRLSEARTQELWAVLQRPQLPVPAHVVRAKARLLQTLLTELGVVVAAVAAYRQAVEDFFAALPAAQWIRTLPIGEHGITAPTLWARLGDAPGRWESFQHLQAHAGAVPVTVKSGKQHVVHFRFACDKMLRYVVDQVAFLSLRSSEWARAYYDQQRARGHEHREALRALGAKWLKIIFILWDRQVPYDEQYHLATMARQQLRQRSKKIA

SEQ ID NO: 337246 - protein, 343 aa, unidentified
MKLQVLGIDLGKTVFHLVGLDSTGRVVIRKRCSRRQLLTFTANLQVQLIGMESCSGSHFLGRVLREQGHEVRLMPAQYVKPYVQTNKSDYIDAEAIAEAVQRPRMRFVPIKTEEQLDLQALHRVRERWVMRRTAVVNQIRGLLLERGFTLPKGRRYVDEALPRILEDAELPLSGSFRLLLAQLKLELEQLTARVEQLDVVILERAKEDEGCQRLTAIPGVGPVTATALIAAVGNGSAFRKGRDLAAWIGMVPRECSSGGKQKLLSISKRGNAYLRRLFVQGARSVMQQRHRQAPGLSCWLAQWLARRHQNVAIVALANKLVRMAWAVLCKNERYRAPVLAVST

SEQ ID NO: 337247 - protein, 354 aa, unidentified
MDNIKYIGLDVHRDTISAAVLNGSGRLIQQSVLMTRAAAILDFIDGVRGTLHVTFEEGTHSAWLYDLLSRRVEKLVVCNPRRNALLKSGNKGDAIDARKLAELLRAGLLSAVYHGETSALEVQQLARSYAMLTEDTTRVMGRLKAVFRGQAIACTGRKLYGHHRNEYLAALGVCALRRRAERLYLQLDALQLLRRQARHDLVVECRKHTAAKWLQTVPFLGPLRAAVLIARVQTPHRFRTKRQFWNYCGLALETRDSAEYRVIDGQLERKKRPALIRGLNWNYNHELKNVFKGAANAASVGQGEFRKFYLGLLKKGMRPEMARLTLARKIAAIALKIWKKGEPFDAEHLKSQAA

SEQ ID NO: 337248 - protein, 313 aa, unidentified
MKKTICGVDVSKAKLDACIEPEHRFASFNNDTAGTAELAAFCREHAVELLVMEASGGYERRAFVELWEKGISCALTNPRNVRRYAEAMGILEKTDRIDSSVIARFADAKNLAPTPLPSQAQQRLKALVARLRQVTGDLTVQKQRRASLLDNLEILASLDEVIALLKRQSRSLEGEIASMIDDDPLWAKLAETWREMKGIAGRTVARLHAELPEIGTLSNKAIAKLTGLAPIANDSGKRKGKRPTRGGRDGVRSILFLVAAIAARYDKSLGEFRDRLLKAGKEKMVVRIALARKLLVRLNAKARDARIEYANAT

SEQ ID NO: 337249 - protein, 428 aa, unidentified
MDELDRNRLEEFRQLRQEVRHSEEYLVVGIDIAKDQHHAFFGTATGKTLLKRLVFSNDYEGFRKLLDQAEALRVRHGLKKVVYGMEPTANYHKPLGEYLITLGRTVVLVSGVTVKQNRESLDGRWDKHDVKDSANVADLISQGKCLYYEYPPAGIRGLRGLLSLKRRLKKQEHGYRVRIRNHLIAQYFPEMDRDYERLGAEGLSIMKWCFPPSQMTELDVDLFIQRVTPRRIRMEKRQRLEGVWEKAGETIGCDGVPGVEHEARVMVEGLKQIRERIKETEGKIEDLCKQFPQYQFLSTIPGFGPDVSSKVLGAIGDPDRFENGKQVLKLAGLDLSADRSGKGSDKAIPQISKRGKADLRYALYQAAFIASTKNRDFMRYFTNKLRGREREKGIQTKMWVKLSAKMLLIAWTLMKKKEAFDPAYLSAE

SEQ ID NO: 337250 - protein, 339 aa, unidentified
MPLYVGLDLHSNNNFMAVINKQGKRVDHKKLPNDPELILEVLRSHRAKIGGVVVESTYNWYWLVDALMEAGYAVHLANPSAIQQYSGLKHADDQHDAFWLAEMLRLGILPEGFIYPREERPIRDLLRKRRHLVKLRTSLIISLQNIISRNCGVQFKGSDVKRLKEDRVSPLLEGNEDLALAGKASKETIDYLTRQIQRIEATIVKRIELRESYRYLLTLWGVGKILALTIMLETGPISRFAQVGNYVSYCRKVPSQWTSNEKVKGKGNKKNGNKYLAWAFSEAAEFARRHHAEARAYYNRKMQKTNFMVAHSALAHKLARAAYYIMKDQVPFMPEKLFG

SEQ ID NO: 337251 - protein, 299 aa, unidentified
MIIIGVDYHPSFQTIAFLMEETGEYVEQELNHSDGEAERFYRKLKEKGVSSVRVGMEATGHARWFERLLAELGFELWIGDPAEIKAKRVRKKKTDREDARLMLKLLLENRFPRIWVPSPENRDLRQLLWHRHRLVQMRTRIMNQLQAVAMNEGYRWKKKLFSEKGHPGVGPITGLAYVLVIGTPGRFPCGKQIGSYTGLIPCEDSSAGKQRLGHISKQGNTLLRFLLVEASQAAARCNPDWRRRYAHLRMRREKRIAKVAMARKLAVRLYWMWRNNWQYSQLVEFGSHAGKLGTVHGVK

SEQ ID NO: 337252 - protein, 403 aa, unidentified
MNSVGIDISKGRSTIAVMRPFGEVVISPFEVRHTDSELSELARQLKSLNGETRVVMEATGNYHAPVAKLLHDAGLYVSVINAKLVHGYGNNDLRRVKTDRKDAVKLANYGLDRWLTLPRYVPEEDTRLLLKNCYRQYRQYSKVQTVLKNNLISLLDTVFPNANRLFSSPIRGDGSEKWVDFVAEFWHCRCVSEKSEKAFTNKYQRWCRKHGYNFSEAKAHTIHAEACGHIDVIPKSETTKLLVEQAVAQLRATSTALAALKHEMQALTSMLPEYPVVMDMFGVGPTLGPQLIAEIGDVRRFYSKKALVAYAGLDAPPNDSGDVTGRHKSMSKIGASSLRRTLFLVMSVYLQTAPLDEPVCQFMDRKRAEGKLYRVYMMAFANKFLRIYYATVKAYLESLEHTA

SEQ ID NO: 337253 - protein, 367 aa, unidentified
MKYYVGLDLHSNNTYLGIIDQEGKRLYRARLRNFINLILAEVEPYKEDIEGLVVESTFNWYWLVDGLREAGYKVHLANPAAIKQYEGLKYSDDSHDAFYLAELLRLGLLPEGYIYPRKEREVRDLLRKRLMLVHQRTAHILSLQSLYNRLSGQKISVNVIKQLKEEDIHELFSSPHVILSAQADLSTIDFLTRKIKEIEERVLTTIKLLPEFKKLKTVSGIGNILALTISLEAGDIARFPKVGNFASYCRCVPSKHMSNDKKKREGNRNNGNKYLCWAFVEAANFAKRYCPYARSFYQRKSAKTNPIIALKALAHKLARASYFVIRDRVDYNPLKAFGQIKNGCGSEPTKRLDPEPYDPIGHLPQPQ

SEQ ID NO: 337254 - protein, 359 aa, unidentified
MRKSIRGSVEVEKPAITVGIDLGDRFSRYCVINGDGEVIEEGRIQTNGAALERHFAGEPRQRIAMECGTHTPWVSRLLQGMGHEVLVANARKVRAITGSESKNDRNDAEKLARFAAYDVRLLSPIQHRSPERQRDLNLLQARDTLVRARTMLVNAMRGLVKSAGQRLPKCSTESFARTVPTTIPAGMEPALTPLLEQVAGLTEQIRKMDQQIEALGKQYPEVVRLRSVPGVGPVVAAAYVLTLDSPGAAGKSRAVGAFLGLRPRQSQSGECDPQLRISKTGNSYLRRLLVQAAQYVLGRFGPDSELRRWGLKLAASGAKRGKKRAVIAVARKLAVLLHHLWRSGEYYRPFPNGTQVFTP

SEQ ID NO: 337255 - protein, 304 aa, unidentified
MIIIGVDFHPEFQQIASVDTESGEFEERRLQHREEAERFYRELGSRGVAVRVGMEASGRARWLEHLLKELQFELWIGDAAEIQTKRVRKQKTDRQDAQLILKLLLEDRFPRIWVPDAENRDLRQLLWHRHRMVQARTRIMNQLQAVALNEGLRCKKKLWRERGRQQLESILLLPWASRRRSDLLQLLDRLSPTIAELTDAIEQEAEKRPEARRLMSHPGVGALTALAYVLIIGDPERFRCGKQVASYLGLVPLEKSSGRRRRLGHITKQGSSILRFLLVEAAQATVRSDPNWRNKYFHLAMRRT

SEQ ID NO: 337256 - protein, 449 aa, unidentified
MKDQKTISLPVLHSHAAGIDAGSRSHFVAVGQDKDDVREFGVYDKDLRDCALWLKSCGIETVAMESTGSYWQNLYDVLIASGFEVLLVNGAHTKHMKGRKTDVQDCQWIQYLHSVGLLTGSFLPDIDTEELRTLYRHRDFLRKQAAKYINKMQKCLRLMNFRLDVVLNDITGVSGQAIIRAIIYGESDPVILAGLANSRVRKSKEEIARALSYNGRKDYMYELADCFSIYHSYMDKIDACDGEIAKLMHSQIVKLGKPQTDPPQLDKPKQKKKNSPKIPLEKLSWQRNNEVNLMSIKGVSHSTVLAIDSEVGLSIGKFPTAKQWTSWLRLSPNNRKSGGKVLSSHVPKGSNRVATALRMAAESVGKQKDAPLYPFFQRILQRKGRCAAIIATARKLAVIIWNMLYKKEAYKPYDTAKIESQIRDRQIKKINKLLSVFDIKLSEINFALC

SEQ ID NO: 337257 - protein, 330 aa, unidentified
MKNLYCGIDISKDFLDYAFCWDVDKKILNTSKVENSIKGIKELIKVLAKEADGAALWVCFEHTGNYGLLLAHLLEVHNVKFSMVPSLDIIKSSGLTRGKSDPVDARRIALYIATNAYKLTPTVLPSAEILKIKNLLSIRNHYVKTRTQFKNALKSLQLAGKNCDLKMEIRTYEKEILRFDGLIKKIESQILGIIKSNELVLKNYNKICQIIGVGPLTAASFIVVTNNFTAFENPRKFSCYSGIAPFEYSSGTSVKGRTKTSHYRNKEMKSMLFHAANTAINNDMQLRTYYNRKLAEGKHKMTVINAVACKIIYRVFAVVKRDEPFVKFSI

SEQ ID NO: 337258 - protein, 461 aa, unidentified
MQPSVPDARPTPNADRTGDFDWYVGIDGGGATHQVCVLDAAGQRVAECAVAHSGAALTAFGAWLRELAGPSLARVAVGLETPHGGPVALCLEAGAAVFAINPKQLERFRERLSAAGAKDDRRDAYVAASALRTDRAVFHQVRLDDARLVAVRELSRMGEELREEATRLSNQLRAQLERYFPQVLTLVPAADEPWVWGLLTEAPTPAAAARLTEKRLTRLLREHRIRRVSGAEVRAALQGPALPAVPGLVAAVSGHVTLLLPRLELVTRQSRRCAANLEAALTALSALTAADEAPQPDRGRDDAGAGAGTTPNAAGPGGPPPAAGPDLGTVVRVLRSLPGVGVGVAGVLLAEASAALLTADYHALRTHSGTAPVTKQSGKQRLVVMRYACNHALRTALFHWARVSIQHDTGARQYYATLRGRGHSHARTLRSVSDRWLRILTALLTTGTPYDPARFAAAATP

SEQ ID NO: 337259 - protein, 349 aa, unidentified
MTQQRISYAGERVYVGVDVHKETYTVTCVCHKQIVKTATVPAEPASLAASVLQWFPGAMLASAYEAGFAAFVLHRALTQVGITNIVVNPASMAVAANDKVKTDRRDSKRLAIDLADGRVRGIYVPTEGEELARLLPRTRAQIVDHRATIARQIKAKLHQFGLIAPASRRMISNRYLREIAAWSLPPELRVSLTLLAEQWRFGTRQLIEIRRLLRTPAAAQAELAHVYRSVPGIGAVVARTLATELGDMTRFANERALFSYTGLTPSEYSSGASVRRGHISRQGSGRVRHLLIETAWRALPRAMVLQEIFDRIAATRGKKRAIVAIARRLTGRIRACFRQGTTYAVGTYA

SEQ ID NO: 337260 - protein, 348 aa, unidentified
MRYIGVDLHKTNFVVCFLNEDETYRLETFPLSKAGIERFIEQLNATDAVAVEVTQNIYYFYDQIKASVARVVLVDTYRFAVIAKSKKKTDKADALALARFLKLDHLPEVPVPSERVRQLRHLLQARETLVGLRTKLKNLGHAALTRNGIALSRSAFASRIARERLQKRDDLSSADGVILRSALRQIDELDKEVEQLEAEIVRLGKTMKGIKRLLQLHGMNLLSAISLLAEIGSIELFETSKHLVAYSGLATSVRQSNQTSKQGHITKQGRKRLRTVAIRAVLSMVNRTHTPLMSFYQKKKREKGSGKAICATARKLLTIIFVMLKKELDYWYLEERLYNRKLRLLNAA

SEQ ID NO: 337261 - protein, 465 aa, unidentified
MKRRPRRHRAKPASGPSLLERINPNAAGIDCGSTEHYVAVPADRDPTPVRAFQTVTADLHRLADWLQACGVTTVAIESTGVYWIPLYEILEARGLDVVLVNAQHVKNVPGRKTDVLDCQWLQQLHSVGLLRGSFRPTAAIAALRAYLRHRETLVQSAATHVQRMQKALLQMNLQLPTVLRDLTGLTGLRIVRDIVAGQTDPAALAQHRDPRCHASEAELQAALTGHYRPEHVFVLQQNLELFDAYQRQLAACDAAIEAHLQTLTAQARPPAEPLPRARKRKKPRANEPRFDIRTPLHQLTGVDLSQLDAIGPYSALRLLGEIGPDMSRWPTEKHFTSWLTLAPHNKISGGRLLSSRTPPAANRAAAILRMAAMSLGRTETALGAFYRRLAFRVGKAKAITATARKLAILVYRTLRDGLVYRDPGAAAYDAQHRERVVRRLRQRAANLGFVLVDRGTGERLETAVS

SEQ ID NO: 337262 - protein, 312 aa, unidentified
MAMLSFCGIDVSKDRLDVVVLPEGWFFSVSNDTAGWAELVVRLRPLTVSAIGLEPSGGYERGIIRALLAAGMSVRRINPNKLRQFARARGVLAKNDRLDARLIAEYVAIMPTRVVQRDAAVERLAEIVTMRRQLCDEHVAAENQAAHLEDAMLRRLSKRRQTRLEADIRLLDKRLAEMVAANVALAQRYELLTSMPGVGPVLAFTLIALLPELGKMTRKQIAALVGLAPYDFDSGKLKGHRSIYGGRMPVRNVLYMAALSASRYSPALKAFHNRLADADKKSKVIIVAVMRKMITTLNAMLRDNAAWQPQSA

SEQ ID NO: 337263 - protein, 352 aa, unidentified
MPKRTRVVIGGVDTHGRTHHAAVIDQQGRLLDHREFAATSGGYRQLLGWLRRHGRLGAVGVEGTGSYGAGLTRYLLDCGVAVVEVDRPDRRTRRQRGKSDPIDAEAAARAVLAGTATAPAKRRDGIVESIRALRAVRSGAIKARTAAINQLKGLLVTAPTPLREDLDQHSTAALVATCARLRPDEAVLADPVQATKAALRVVACRIHQLDEEINQADQRLATLVGRAAPRLLKLHAIGVDHAGQLLTTAGDNPERLRGEAAFAHLCGTAPIPASSGTTHRHRLHRGGDRDANRALHLAVVVRMRWCPRTRAYAERRTKQGRSKPEILRCVKRYLTREVYHALVADFEALHAT

SEQ ID NO: 337264 - protein, 316 aa, unidentified
MTKAVTEITLGVDVSKDELVICDWDTEDIITLENKDSAIKDWFEALYGPLRIAIEPTSSYHLAFVEQAHALGFEVYLINPRQLAHYRQAVDVRNKTDPLDAWLLARYLAHESDSLRPFKPQCAKAQQLWSLLKRRATAVRARTQLKQSFAETKLPIKALLGEIQRVLDRIDQRMLELIRKLGWWADYQRCLSMPGIGKLNAAALVTVFHGGAFAGADAFVSFIGLDVCVRESGKFKGKCKLSKRGEAEIRRLLYCATQGAQSYQPFAIFYQKQLDKGHPKIGAKCNLARKLARIAFALITNQQSFIKQENTYSLSP

SEQ ID NO: 337265 - protein, 307 aa, unidentified
MFVGIDVAKDRLDVHVRPAGETFTVGRDGEGIEDLVGRLSKMAPALVVLEATGGFETIVAAGLAAAGLPVAVVNPRQIRDFARATARLAKTDALDAAVIAHFAEAVNPPARPIADEQSRLLGELMARRRQLIEMIGAESNRRRMLTVRRTLKTVDRVLATLKAQLEQIDDDIDSAVRGTPAWREAEDLLISVPGIGPRIARTLIAELPELGRLGRREIASLTGVAPFNRDSGTLRGRRTIAGGRPVVRAALYMSILVSIRRKLPLALTYHRLRAAGKPAKVAIVACMRKLVTILNAILRDRKPWANA

SEQ ID NO: 337266 - protein, 434 aa, unidentified
MLFIGDDWAEGHHDVVVQDEAGKTLARRRLPEGVDGLARFHEVVAFCLGEDGEPDAAQVMVVIETDRGPWVNALAAAGYRVFPVNPKQAARHKETVAVSGKKDDFFDAAGLADMGRTRRHQIRELAADSDVAEAVKIAARAHQKLIWERTRHLLRMRSALREYFPAALEAYADLTLAGADALELLGKAPEPASAARLTVTQITAALRRARRRGDLAQRARDIQAALRVPRLGQPAVIAEAYGASVQAGAAMITALNEQIKIMEARVSELFHRHPDAGIYLSQPGIGDITGARMLGEFGDAPGRYASAKARKNYAGTSPLTIQSGKKKTVHARYIRNRHLIDALHAQAFAALTASPGARAYYDELRAREIGHEAALRRVAGRLTGVLHGCVTTGREYDEATAWSHRDTPAQAAKPPDNPPRPPSFPAPYPAGRQR

SEQ ID NO: 337267 - protein, 355 aa, unidentified
MLYSGIDLHRDNSMITTINDSGTIINQQKLPNEESSILDYFFSMGNEHRAVVEATANWYWLSDLLNDHGIELVLAHAKYLKAISYAKVKTDKVDSQTLANLLRIDMIPAAHQIAPELRGLRDLMRARLKIVSKNTSCQNSIHRLLGKYNQTIPDNKKLHDLSTLDTLNNLPLPVEASFQMEIHKEQMRLLCRQINDLEKSIHPKLIPNPDIQRLLWIPGIGKILAFTIYLEIDGIDRFPDVNKFYSYCRLVPGADNSNRNAKHKSGNKDGNRYLKMAFTEASIRAIQYFKEIKAFYQSKERRKHKAIAKTLVAQELAKTCYHVLSTKTDFNNSFKGKTLSRQKSMQWPRLASLSA

SEQ ID NO: 337268 - protein, 312 aa, unidentified
MEKLSYGGIDVSKDRLDVVVLPEGWFFSVSNDTAGWAELVARLRPLAVSAIGLEPSGGYERGIIRALLAAGLSVRRINPNKLRQFARARGVLAKNDRLDARLIAEYVAIMPTRVVQRDDAVERLAEVVTMRRQLCDEHVAVENQAAHLEDAMLRRLSKRRLVRLEADIRLLDKRLAEMVATNAAFAQLYALLTSMPGVGPVLAFTLIALLPELGKMSRKQIAALVGLAPYDFDSGKLRGHRSIYGGRMPIRNVLYMAALSASRYNPALKTFSNRLAHANKKSKVIIVAVMRKMITTLNAMLRDSAAWQPRSA

SEQ ID NO: 337269 - protein, 422 aa, unidentified
MNTTPVSYAAFIGIDWADQKHDLWLQPSDGATPEHSPLEQTPAAIQNWLNQLRQRFGGRTVAVGIELSRGPLIYALMHCEFLVIYPINPKSLARYRQAFRPSGAKDDRSDAYLLCLFVQTHHTDLTAWKADDVQTRTLAGLVERRRHWVDQATVLQLRLRAVLKAYYPVVLELFGDHLGTAMACHFLQKWPDQSSLQKAKPTTLRQFFHIHHSRSEQRIEERLQTIQQAQPLTQDEGVIVPHRMDALIASKLLLTLQNQIGELEHQIAKVFAIHPDAFIFEGLPGAGATLAPRLLVAFGSDREKFPSAKNIQQLSGIAPITVKSGQSECHFFRMTAPKFLHQTFWEFAKCSLVSCAWAQAVVTYLMKEKGLNFNAAVRALAFKWIRIIWRLWKNRQRYQEDIYLESLRRKKSRYLPAPVSGE

SEQ ID NO: 337270 - protein, 388 aa, unidentified
MPAAETPVAYLGIDVGKSSHSACALDAGGGVAFRAELANRPDDIDRVLERAGSGALVVVDQKRNIGALVLARAHAHGNPCAYLPGYAEKQARGMFPGIAKTDAIDAEVIARTALGAPRALRPAPEEPEGTASLRILSSQREFASSARTRAKNRLRATLLEADPALEGAVDPSSRWQVSMLAEFGGAAGCSAAGWRRFSSAARRAGAPAAGARRLWEALLASSRSGRRLPAGEDVAVRILAREIASLDADIEELDSLVADSLAGDEVYECLLTVPGIGPKTAAALVTSIDISAFRGHDELASYCGVAPSDRRSGSSIRSTSPQHGGNRQLKNLLIFSCNSLIGTDNRFGRYYGECRERGMRHSKALKAVARKRLKVIYAIMRDAVPYAA

SEQ ID NO: 337271 - protein, 357 aa, unidentified
MLSSDVKYIGLDVHQSATTVAVRNSTGKLVIESIVETKASTLLDFLHGLRGELHVTMEEGTWAAWLYDVLKPHVREVVVCNPRRNALLKEGSKDDRVDARKLSELLSSGMLRAVYHGENGLRPLRELARTYEVVSKDSQRVMNRVKALYRSWGIACAGTQVYGQRYREQWLNKIPHAGVRRRAELYYQQLDGLLVLRHTVRGEFLAESRKQQAVKVLRQIPFIGPLRAAQLVALIQTPYRFRSKRQLWTYSGLAVVTHGSGEYRYVDGQLQRSKKPQQVRGLNQNHNHAMKEIFKSVALSAALRAGPFKDFYEGLLAKGMEPELARVTLARKIAATTLTLWKKGERFDAGYVKSQAA

SEQ ID NO: 337272 - protein, 361 aa, unidentified
MTAAATAPTPETSTGPDVVIGVDTHKHTHMAVALSANGGLLGSLKLEAKRSGYQELIRWAAEFGSRPVFAVEGTGCYGAGLCRALQTAGLEVVEVNRPDRSTRRRLGKDDTIDAEAAARSYIAGRATVIPKAGDDLVEMIRMLKVAKDSATDNRTAALNQLHAIVVTAPAALRERLQRFKGKELVECCSGLRSGDISTPLAAAKMTLRTLARRIQQLDQELKDTVAQLDRLTMQHCPELRNTYGIGVDISATLVVAVGDNQERLKSEASFAALCGVNPLPASSGKVVRHRLNRSGNRQANCALHRIVICRLQRHQQTREYVERRTAEGRSMKEIIRCLKRFVAREVFGILRGGPAVRTAAA

SEQ ID NO: 337273 - protein, 411 aa, unidentified
MHHRQNYLYVGVDLHKEQHTAVIINCRQEKLGEIQFENKPSAFSKFLLEVETYVCDGITVVFGLEDVGGYGRALAKYLVDHEQVVKEVNPALSFLERKSQVMIQKNDSWDAECVARILVNKFEQLPNVNPNDLFWSIQQLVSRRNALVKAQSALKNQLHIQLNHHYPSYKKFFSELDGKTALAFWQQYPSPSCLEGANIKQLTAFLLDVSNNTCSVKKASDILKLVKEDGQTMKEYQEMRNFLVRSIVREIEFKKKEMKYIERELKQLVNLLDYQLETMPGIELVTASALIAEIGDVRRFPNANKLARFAGIAPVYFGSGGKGKTHKSKQGNRALHALFYNLAVQQVQVAKGSKLPRNPVFHAYYQKKLKEGKTKGQALVCIMRRLVNIVYGMMKYKTAYELPVVEEKEEV

SEQ ID NO: 337274 - protein, 361 aa, unidentified
MTPKARTLVGLDVHAAKIVAVVLDGETGELQTFAMGGESAGAAGFCAGLPRPVRVAYEAGPTGYGLARELSKRDVACVVAAPSKIPRAAGDRVKTDRRDAEHLVRLLLAGKLHALRVPGDEEEALRDLVRAREAVRVDLMRARHRLSKLLLRHDIRFDDGTAWTQRHRDWLATVTLPWPAAQATPLDARGAIDALTHRREQLEREIIALLPTSPWQLQVGRLRCLRGVDTLTAVGLCAEIGDFERFARAEQLMSYVGLVPCENTTGQQRRLGSITKTGSGHARRLLVEAAWHYRTRPSVGRGLTDRQGDQPAEAIAVAWSAQQRLHRTWTRLEARAKRRTIIAVAAARELAGFCWAVTQIE

SEQ ID NO: 337275 - protein, 364 aa, unidentified
MIELSQKSWLVAGIIPGVEHQPLKKLEPGEDALSTLLDRWRKEANKAGYKVERIAVAFEAGRDGFWLARWLRAQGIEAHVIHAASVAVSRERRRAKTDRLDTEQLKRAFLGWLRGERDHCKMAAIPTFAEEDAKRPSRERESLVGEQGRIVNRMKATLARLGIRSFNPKLKNAAGSLEDLRTAEGEPIPPNTLTELHRDLERRRLVIEQIRQIEAARLERLRRTPKAKPNAMVLLLARVIGVGIETADMLVQEVLSRNLRDRRAVARYAGLTGSPDESGSKRREKGLSRAGNARVRRGMVQLAWRFLQFQKDSALAQWYRVRTEHARGSRKKMIVALARKLLIALWHFARDGVVPEGVLLRPAH

SEQ ID NO: 337276 - protein, 414 aa, unidentified
MEQIHDRVAGLDVHRDSVVACVRATGPRGGAVADRERFGTTTAQLSHLKGWLTDRRVSLVALEATGVYWKPVYYALEHRFTVWLCNAHHVKNVPGRKTDLSDAEWLADVVAHGMIRPSFVPPPAIRELRELTRYRKSQIDARVAEVQRLEKVLQDACIKLTSVASKVLTQSGRAMVEALIVGQRDPAELAELALGKLRPKIPERREALDGHFGPQHAVAARRIGDHVDFLDASIAALTEQIDARTEAYRGVFQLLLPVPGFDRLTIDTVIAETGADVSRFPSPGHLAKWAGVCPGNHESAGKRRPVGVGPGNRWLRRALIEAARAAARTGGSYFGAQYRQIAKRRGPNKAAVAVAHSLSDLIWHLLSTGECYQDLGNDYFQRRRDPERETTRLVRQLEQLGYRVTLTATPPPAA

SEQ ID NO: 337277 - protein, 320 aa, unidentified
MTTSSQPLTLAVGIDVSKASLDVAFSDARPELTLPNDEPGHQALVRTLQAAAPQRLVLEATGGYESTVVATLLAAALPAVVVNPRQVRDFARATGQLAKTDKIDARILARFALAINPPQRSLNDAEMQALNDVLARRRQLLDMQTAETNRLKQTRNERVRTSIQEVLKVLQSQLGEVDVDLDDHIRRCPAWLEKVTLLTSVPGIGRAIALTLLAELPELGSISRQQVAALVGVAPFNRDSGVYRGQRRIAGGRSVVRHALYMGALVASRCNPVIASHYKNLRARGKTGKMALVACIRKMLVILNAMLRNKQPWRKVAMEA

SEQ ID NO: 337278 - protein, 431 aa, unidentified
MSKFLYKPTVGIDVSADFSVVAILSPDGEIYRKPFKIKHNRDGFDYLVDQIKKAEEEFNMKTGIFMESTGVYHLTLFHFLKDKFKTFIFNPLIANNNKNSGIRKVKNDKSDAISIAKIGKFQSVKCSSIFDVEIYTLKSLCRNYYKLTDTKSTYKKKLSTDLRVIFPGYNSVFSNITCKTSLTILKQYTSPQAILDADRDILIKIISNNSRKGVKYSENLYEKLILIAQQALYIGIKSSSLFVKITNTISLIETLETQLQCLLKEIHSLIKSCKLPGTFIKNIQLIYSIPGIGELTAITIMSEIGDINGFLKPKHLIAYFGIDPSVNQSGKFNSDRNKMSKRGTRFGRRALYAAALASVRTNKNSEPINEVLLKYYKKNLKGKKKKVALGAVMNKLIKYIFSVIKNQNPYEIRDPRIHEKMYLQNKLKTAA

SEQ ID NO: 337279 - protein, 324 aa, unidentified
MIDAILGIDVSKNTLDVSISSCTKVRTKSFANSSDGWHHLLDWLITQKIQRVHACLESTGRYSLGIACALYEAGHVVSIINPAQIRDFVRTKLGRNKTDGIDASRIREYCELFKPSPWAPPSDAHRRLGELQTIRSGIIAGLTEWKNRKNSGIVDAQAQALADATISHFTSQLGAVDKAIALTIDNDSDLRSKRDLLLSISGVGDTLAGVVLAELPGPDVLRSSGEVVAYAGLNPRQHQSGTSVDRATRISKIGNVVLRAALYMPALSAMRYNPAIMALVTRLKSRGRLKPKQIVVAAMRKLLVLCFGVLKTGKPFDPAIAMGC

SEQ ID NO: 337280 - protein, 368 aa, unidentified
MEKSITYVGLDVHKNSIAVAFADEYGAEIRSYGTIGPDPESLDKVARRLVSQGKEPRFVYEAGPCGYKIYRHLRQQKFECMVAAPSLIPKKSGDRIKNDRRDAMMLARLYRSGELTPVRVPSAEDEAMRDLSRARGDAKKAERKARQQLGAFLLRHGFRYSGLSHWSLAHWRWISDIKMDHEAQQFTLQEYVDTVRCCTERVDRITQQIRLLVGKWRLGPVVEALQALRGVSLVVAATVVAELGDLTRFDNPRQVMAYLGLIPSQHSTGEKIKLGPITKTGNGHARQMLTEAAWAYRLPARVSRRLLDRQQKLPEKVRQVAWKAQVRLCARYSRLLARGKPSQLVITAIARELAAFMWAIARTVEVSA

SEQ ID NO: 337281 - protein, 357 aa, unidentified
METAYDGRQVVGMDLHRRRSVLVRMTEDGRRLGTARITNSPAELRAQIARAGRSPKVVLEAAYGWYWAADTLAAAGAEVHLAHPLGVKAFTCRRVKNDERDAADLADLLRMGRLPEAWIAPAGVRDLRELTRYGAKLVGLRTSCKDQVHGVLAKLGVPVTCSDIFGVAGSAWPGGLGLPQPYAGKVTSLRQLTGELSTEITMLSDVIGDLLAGDRGYQVIQQLPGIGPVLAAVIIAEIGDVARFRSPAQLCSWAGLTPRHRESDVKVTRGHVTKQGSRLLRWALIEAIQRARADTVTGAVKEAIIARRGKEAKNIAKVAAARRLLTLVFYGLRDGQIRCLSRPPEDAPPLTSTTRAA

SEQ ID NO: 337282 - protein, 345 aa, unidentified
MKITTVGIDLAKNVFQLHAVDERGRAVLRKQLRRDQMTAFFANLPPCLIGMEACASAHHWARTLQKFGHTVRLMAPQFVKPYVKTNKNDVADAEAICEAVGRPNMRFVPIKSVEQQAVLSLHRVRQGFVRARTAQGNQIRGLLGELGLIVPKGIVNVAKRVPTVLEAAGEELPASFRQLIERLTKHLKELDRQVDELEAQIKAWHRASELSCKLEKIPGIGPLGASALVASIADANSFDNGRQLSAWLGLVPRQDSSGGKPKLLGISKRGDVYLRTLLIHGARSAIVAAQRKTVNTNVWLAKLLDRRHPNIAAVALANKNARTVWALLAHGREFRADYAPEVSAA

SEQ ID NO: 337283 - protein, 338 aa, unidentified
MEFYSGIDLHSSNSFVGVINEQDKRLFKKKLPNDLSTILQALDPFKENLQGVVVESTYNWYWLVDGLMENGYKVHLANPSAIKQYEGLKHTDDKWDSFWLAHLLRLGILPEGYIYPKETRSVRDFLRRRLIYVKHRTTHINSLQSLFSRALGMRISTKNIYKLKEEEVKELFNDPNLVTIVKHSLDTINFLKKKIKEIEKDILGQVKLRKEFILLKTIPGIGDILALTIMLEVGDITRFKKVGNYSSYCRCVKTSRISNNKSKGKGNSKNGNKYLSWAYVEAAHFAKRFCPEAEKFYHRKIAKTLEVVARKALANKIARASFYIMRDQVAFDVKKLFA

SEQ ID NO: 337284 - protein, 316 aa, unidentified
MTDNSMICAGIDVGKSHLDIAIHPGDARLRVAYDAAGLKRLDAFLQEHDVTRVGFEASGGYEWRLMVHLRGKKRPAARLQPAQLRYFARSRLQRAKNDRLDAMLIAVFTASLETLPVLPDARFDRLSAELTYLEQIEQQIALVKTFAETAVPYIVKRRHAREIARLETCRNAHMLQLEKLVRGDPDLARRLDLLVSIKGIGMRSALCLVIRMPELGHAGRNQIAALAGVAPYDDDSGKHRGRRRIQGGRERLRKSLFMCAFTASRHNPDLAAFYKRLRGNGKEHLCAVIAVARKLVILANTILSRQTEWTPKYVKG

SEQ ID NO: 337285 - protein, 345 aa, unidentified
MNITTVGIDLAKNVFQVHGVDARGKVVLRKQLRRGQVAEFFVNVPPCLIGMEACASSHHWGRTLGRFGHTVRLMAPQFVKPYVKTNKNDAADAEAICEAVGRPNMRFVPIKSIEQQAILSVHRVRQGFVKARTAQANQIRSLLGEFGLVIPQGIRHIAQRVPALLEDASNELPLAFRQLIERLTAHLKDLDQQVREFERQIIAWHRSSELSRELERIPGIGPLAATALVASIADARSFDNGRQVSAWLGLVPRQSSSGGKSTLLGISKRGNVYLRTLLIHGARSAILAAKRQSECKNVWLANLLNRRHANIAAVALANKNVRTVWALLAHGRTFQADYVPTRMAA

SEQ ID NO: 337286 - protein, 340 aa, unidentified
MNVTTIGIDLAKSVFQLHGVDAQGEVVFRRKLRRSAVLDFLRELRPCLIGLEACATAHFWAREIGALGHDVRLIPPTYVKPYVKRQKNDAADAEAVCEAVTRPHMRFVPIKSAERQGVLMLHRTRDLLMRQRTMTLNAVRAHLAEFGIITAQGPHKLLTLIRAIRTGEVPGLPRIARIALESLAMQLDVLTDEIRKLERQLMLWHRADETSQRLKTIPGVGVITATALAASVPDPGVFKSGRQFAAFLGLVPRQNSSGGKDRLGRISKMGDGYLRRLLVVGATSVVRRANSNTSVTGAWVRCLLERKPARVVTVAVANKTARIAWAILARGETYRAPMTA

SEQ ID NO: 337287 - protein, 312 aa, unidentified
METKFVGIDVGKLTLDFDCLPISTPQQFANDADGIVALVDLLKGSGVERIVIEATGGYETAVASALAVAKLPVVVVNPKQVRDFAKATGSLAKTDRLDAKLLALFGERIMPPLRTLPDEAQRALADLLDRRSQLVAMRAQEKARLATVTAIARKNVQQHIVWLDKCIAKLEGDLEERLRKSPVWCEKATVLGSAPGVGQVTTFALLARLPELGQLNRQAIAALVGVAPFNDDSGTRRGARYIRGGRADVRCALYMATLSAIAHNKPIKEMYERLTASGKPFKLAMTACMRKLLTILNAMLKKNQTWKIQPSS

SEQ ID NO: 337288 - protein, 402 aa, unidentified
MNCVGIDVSKGKSMIAVMRPFGEVVVSPFEVRHTANELSELAGLLKSLDGETRVVMESTGNYHAPVAWLLHDAGLYVSVVNAMLVHDYGNNSLRRAKTDKKDAVKLANYGLDHWLTLPRYIPEEDTRLMLKICYRQYQQYSKVQTMLKNNLISLLDTTFPDANRLFTSPPRADGSEKWVDFVATFWHCECVCGRSEKAFTTQYQKWCRKHGYNFSEDKALDIYASACRHFGVIPKTDTAKLLVEQAISQLQTTSSALAALKQEMQSLAASLPEYPVVMGMFGVGPTLGPQLLAEIGDVRRFHSKKALVAFAGIDAPPYQSGQMDVRSRSISKRGSSSLRRTLFLVMSVILQCAPIDEPVYQFMDKKRSEGKPYRVYMMASANKFLRIYYASVKAYLESLEHD

SEQ ID NO: 337289 - protein, 335 aa, unidentified
MGIDVPKATSTVTCVGQRRMVKTATVPADPARLAVSVPRWVPGATLSAAYEAGFSGFVLHRTLTQAGSTTIVVNPASVAVAANDTVKTDRRDAQQLAIDLADGRLRGLSIPTEAEELARLLPRTRAQIVAHRATLTRQSKAKLHQFGLIPPGSRRLMRRRYVREMAAWSLPPELQASLTLLAEQWRFATRQLLERRRRLRRQAQAQEQIEKVYRSVPGIGEVVARTLATELGDMSRLTNERARFSDTGLTPSAYSSGASMRRGHLSRQGVSRLRPVLVETAWRALPGDPILHALFERMAAPRGKQRAMVAMARRLIGRIRACCRHGTTYAVGTAG

SEQ ID NO: 337290 - protein, 362 aa, unidentified
MTKSTTIIAFDQHAATTVAAVLCPGQRTPALHALTSENSTILRFVDRVHRQGRVRCCYEAGPCGFELQRALTAHGIFCEVIAPALIPRRPGDRVKTDRRDAGQLAVLYRAGTLTPIHIPTEQEEAARDLLRCREDIRVDLLRARHRLSKFLLRHGRRFTATKKAWTKRHAAWLQAQCWPLPALEQTHRAYVRAVDEALGRLQAVETELRDLLTLEPLRSRIERLRCFRGIDDLTALTVAAELGDARRFPSAPRVMAFTGLVPSEHSSGSKHARGAITKTGNAHLRRVLVESAWHYRHHPFLGRALRLRQRGAPTPVIDQAWHAQQRLHRRYRRLAARGKPKQHIVTALARELSGFLWAALTQ

SEQ ID NO: 337291 - protein, 371 aa, unidentified
MKKSITFVGLDVHKNSIEVALADAGREGEVRHYGAIDGDMDAFGRLLRKLVSTGKELRFVYEAGPCGYEIYRYLTAKGFDCAVVAAPAGDPTKGVRKRIKNDRRDAMTLARLHRAGELTYVFVPREDDEAMRDLTRAREDASNAQRVARQQLTGMLLRLGFRYSGKKSWSLAHIRWLSGIKMPTPAQQVVFQEYIHAIKETTDRLERLTRQIEELAPAWRMFPVLRAYQALRGVCLIVAATVIAELGDLTRFDNPKHVMAFLGLIPSEHTSGERTRRGGITKAGNGHARRVLTEAAHAYQFPARVSRALLERQEGLDKTILDIAWKCQVRLCSRFRRLMTKGKNRKTVVTATARELIAFMWAIAKQVPISV

SEQ ID NO: 337292 - protein, 523 aa, unidentified
MASTRSSKRSRAAAEFLQKPRGIIHPRVQQVGPDHFGIVSVDCAKARCKWMLTDFYGTILVPPTEVANNRVELDAAVARCRAAMIQHALGDAIVAIERTGRYHHPVKNAFARAGFETRIVHPYATKQFRQPANPDNKTDDTDLAAIARAAVNGFALVENPLPEAWRQLQLCIRHRRDLVRKTSALACQIREHLDAAMPGYAAYFADKLWDSNVAFCLVRQFGSATVLLQQGLTGLCHYLRQQKVRFQQRTLDTVLAWAQSAAAPDPAAELHRQIALAYHDDRQRKTEEILVLERNIAHRLAQTPYILLLSFPGINVVSAADYAGEMGPIENYANPRSITGRAGLFPSRYQSDRVDHADGPLVRRANRALRAVIMGIADNLILCNQRFRMLAAAWKAAGKDPRLSHVKVACRFCRMSFHMVAGRQVFRHPSLRERGYILDKLLAFHLEHQTPYQQSLRDLNLAFTQIPAKEHAAEAQPLIDRQRTARRGRARGPQHIGEILAIVLARLGVGALPSTPSGDQDLP

SEQ ID NO: 337293 - protein, 412 aa, unidentified
MQDILTCAMGLDIHRDVIVACLAKGELGTDPEIEIRSFSTLIPEMRKLRDWVLEAECRYVAMESTGIYWQPIYEMLEPCFDGQISILVVNARHMKNVPGRKTDMRDAQWIATLLRAGLLKGSFIPDKTFRELRHLTRYRKSIVRDITAQKNRIDKFLQSSGFRFTAFLSDAFGASGRNIIRHLMEYGNISREALDRCLKTQTRKRIDEILIALNGSLSEHQRGFLRMIFGHLEALEQHRHTVEDAITKEITKHEEALSLLCSIPGIDVTAAAAIIAEIGTDMSAFPDSQHICSWAGLSPGNNESAGKRKSAHINKGNPYLKSMLCEVGWVISGKRSLYLSGWYWRIKQRKGAKRATIALARKLLALIYTMLKTGSPYNEDCFEIRRKQSERKRASRMVNELQKLGYFVVAPG

SEQ ID NO: 337294 - protein, 397 aa, unidentified
MATIGIDIGGRSHAVARCREGLARADREVLRVSQSRAGFAALDTWLERQAEPVSLVTMESSGHYWMPLASHLRRQDVPVAVVNPLSAKYFARSRLARTKSDPADARSLAEMGMRDQPAARDPLAGAELRQAARFAMTLVDEQAKVCQRLIRLVELGFPELGELFDDPTCRTAREVLRIAPTARAATKRRTTTLANANAGPGHRRLGQTKAERLQAAAADSIAVPELDAEVAFEVGILLDQYDLLERQIEVADARVAGLLDGETARRLRTIPAVGPAIAATFLAEIGDIDRFSDFDQLLAFAGVHPAERSSGRKGSNPETAWHMSKAGNSHLRAAAYRMAAVVGVQHNPVIRAHYERKRAAGKSKMNALGHCMRKALSLVWGVWRNGQDFDPNWGLEA

SEQ ID NO: 337295 - protein, 466 aa, unidentified
MSAGGLEMNRKRSKSKAERTLPVMHPNAAAIDVGATMHMAAVRADRATEPVRSFGTFTADLHRLVDWFTECGVETVVMESTSVYWIPIFELLDARGFTVFLVNARDAKHVPGRKTDVSDAQWLQRLHSHGLLRASFRPKGQIAELRAYVRQRERLLEYAASHIQHMQKALTEMNLQLHHVVADITGTTGLRIIRAIIAGERDPEVLARLRHYGCHSSAETIAKALTGSYRTEHLFALEQALALYDVYHEKASACDGRIEAVLKGLSIDRARSGSKELPTPRRHRTDQPNALAFDVRAALFRLLGKDITMIDGLGPYLSLKLIAECGDDLSSWPSAKHFTSWLGLAPSNKISGGKILSSRTRRSGGRAAALLRLAAVTVGRTDTALGAFYRRLSARIGKAKAVTATARKVAVLFYNAVRHGMEYVDPGASAYETRYRARIVNNLHRRAKAFGFVLQPMEPTPNIVVS

SEQ ID NO: 337296 - protein, 412 aa, unidentified
MVELIVERPAALDVHKARVTACVRIPDEHGHREEHIAEFATTVRGLLGLRDWLAARRVEQVVMEATGVYWKAPWAILEDEFECLLVNARHVKQVPGRKTDVSDAAWLCRLAEAGLLKASFVPPKPVRQLRHLTRYRKTQIQERAREVNRLHKALEDAGIKLDCVAADVMGKSGRDMLDALVAGTTDPDVLAELARRQMRKKIPQLREALAGHFDAHHALWIGAILAHIDFLDEQIDRLTDAIEEQIRPFAAAVELLCGVVGIQRRGAQCILAEIGADMTRFPSARHLASWAGQCPGNDQSAGKRRSGKTRNGSKWLDFALEEAGTAAIRVKANYPAAQYQRLKPRRGHKRALGAVKHSLICAIWHMLSTGETYRDLGPDYLTNRDPERQTKRLVKQLERLGHHVTLQEAAAA

SEQ ID NO: 337297 - protein, 437 aa, unidentified
MISVGIDISKAKSMVCILRPYGEVVVSPYEIKHTELEVNGLVARILSLDGEVRVVMEATGAYHLPLLASLKQAGLFVSVINPLVMKKYASTALRKGKTDKMDSVRIANYGIDNWFKLADYSAPEEIYAQLRMLGRQYAHYITMKIEGKLVLTDLLDRTMPGIKKLLSGKRSEEPTKDKLSDFVDEYWHYDNITKKSEPRFVSDYCRWAKKKGYQANEAKAKAIYAMARAGIPTLPSGAPSTKMLTLEAVRILKEVNRTLETILTQMQALATTLPEYQVVRAMKGVGNVLAPRLIAEIGDVRRFHSGSALVAFSGIDSPPYQSGGFTGTQRKISKRGSSLLRKTGYEVMKCLKTIKPTADAAVYLFMLKKEAEGKPKKVAKIAALNKFLRIYFARVMEVIRKLRLTNPGIGQRLYNLWPALLHPKSNTHIFETCREIT

SEQ ID NO: 337298 - protein, 430 aa, unidentified
MQEKQTDVTKELNYAAFIGLDWSDKKHDVYLHVCATGEEESKVIASTPEALDEWILQLRERFESRPVAICLEQARGVLVYMLMAHDFITLYPINPAMSAKYRQAFTPSHAKDDPTDARIIMELLLHHRDRLTAWKPDNVQTRTLARLCEERRAAVNLRTKLVQKLNAKLKMYYPQALALVGEDLSSTLACDFLQKWPALAEVKKAKPAKVRAFYYGHNCRSESLIQERIQLATTAKAATTDEAVLIPLVASVKMLSRLIGDLNPSIKGFDEQIKALFAQHPDAAIFGSLPGAGDALAPRLLVAFGSDRNRYSSAAEVQQFSGIAPVTERSGQRQWVHRRWQCSKFTLQSFHEFAQHSMGWSVWAKAYYQFYKSKGKKHNTIVRSLAFKWIRIIFACWKEHRPYDEARYLETLQRRGSPLCQHLGLPALVA

SEQ ID NO: 337299 - protein, 345 aa, unidentified
MTVYIGVDFHARAQTISYLTTEDGEIQRLQLDHGQPQEVRRFYQQFDGQQVVVGFESSGYAAWFEEMLEELGCEIWIGHATAIRLFARRRQKNDRRDADLILDLLVRGDFPRIHRYSAASREVLQQLRYRQRLVKMRTMIVNSLLFMASSRGLSLRTQLKSRRGLERLQQLALPQPLTEQRDELCQLLLELKTKVDKVEDWLAAKAESDVRVKRLRTHYGIGPLTGLCLVHTLECPERFANPRKVTAYVGFDPVEDSSGERRRIGSISKQGSRLLRFYLVEAGQIAIRQDQDLARVYQRVLVRRGHAKAKVAVGRRLLVRAFIMLRDEIDYAEFQRRGVAARSSR

SEQ ID NO: 337300 - protein, 394 aa, unidentified
MFIVGIDIAKRSHMVRVIDSEGRTVCRPFSIRNSCSGYNALLERLRKLTNHKSEFLFAMESTAHYWLALYTRLRKEGYQVVVLNPIQTDAMREMLMEENKTDEIDTLVIAETIRFGRYKASSVPQEKLLALRELCRNRFYLIDMGSDLKRKITALLDQVFPEFESQFSSIFGKTALAVLRQYPTPEKLSRAQTGKLTEVLQAASDGRFGEWKARQLKELARDSFGIPDCEGAYSALLLLYLGQFQSLQDAAAVLEKRIAELFSQFDSTLTSITGVGPVLGAVILSEIRDISCFASADKLAAYAGLNPKVKQSGDMKSSTVHMSKRGSPYLRRAIWMAGAIAVQFDPMFKAYYEKKSAEGLRYMNIIGHVSKKMTAVIFAVMRDNKIYKPVLPAV

SEQ ID NO: 337301 - protein, 433 aa, unidentified
MHDVHEEPLFVQRVAGLDIAKAGVEVTIRVPSGTSPGRRQQETRTFGTSRRELESLADWLRSWGVTKAGMEATSDYWKPVFFLLESRGLDCELYNAGQVRALPGRPKTDRADSVWLAKITERGMIAPSFVPPEPIRRLRTCTRYRRHLTQARTAEKQRVEKLLEDGHLKLSSVISDIHGVSGRDMLDAIAAGQRDPRALAQLARGSMRGKIARLEEALDCSFFTDDHAGVLAMMLAVIDHYTTQIQALTGTIEKLAEPWLHQIGQLDAVDGIGIICAQDIIAEIGTDMTVFPTAAHLVSWAKWSPQVRQSAGKRKGSNATGRGNPYLGAALGEAAIGASHTRSFLGARYHKLIRRMPKKKALVATGNSMLTIIHALLSDPAAIYTDLGADYYDQRMHARRQARNHVRNLERLGYKVTIQAINTDTGELPAAAG

SEQ ID NO: 337302 - protein, 354 aa, unidentified
MKRSTKYVALDVHQATTLASVREESGRVIARSILPTDGPALTEFFRGMRGAIHVAIEEGTQAQWLHDLLAPHVDRLIVCDRRGQPRQGNKDDRHDADALSEQLRRGGLRAAYHGGGTGAGLKELTRCYQNLVEDTTRVMLRLKAVFRARAIQTPGRAVYRPARRAEWLAQLPPGGARVRAEALWAELDALVALRPKAKTAMLATAAREPGWAVLRTIPCFGPVRVALLLATMQTPWRFRTKRQLWAYAGLAVVTRSSADYVLVDGQAVRRRREPLTRGLNRNHNRLLKHVFKSAATAARARPGPLQDLHRALVARGLREPLADVTLARKLAALTLRLWKKGERYDPTQLTQQAR

SEQ ID NO: 337303 - protein, 377 aa, unidentified
MTKVRFVGLDVHAETIAVAVAEPNGEVRALGVIPNRPESIHRLVKKLGPPEQLRVCYEAGPTCYVIYWQLTELGVRCEVMAPTLVPIKAGDRVKTDRRDAQKLARSYRAGDLTPVWVPDAAHEALRDVVRAREAAKKDQLRARHRLGKFLLRHGRRPPTGIRAWTQRYLAWVKRDVHFEHPAHEATLLDYLHEVEHVATRIERLESAIDQAVTTAPAAMRAVIEALQGLRGIAQVSAATIVAEVGELSRFARAPQLTGYSGLGAREDSSGDRRRRGGITKTGNAHLRRVVVEAAWAYRHRPAVGAALRKRQATLSEDVKAIAWKAQHRLHTRYRRLLGRGKCQQQVVTAVARELLGFIWAIGVTAETEQRTRLSRAA

SEQ ID NO: 337304 - protein, 370 aa, unidentified
MDHTSTLFVGLDVHKDTITVAYIASEPGAEAVSYGTIGTRHSDLDRLIRKLQSKGKRLVFVDEAGPCGYWLYRYLRRKKLRCFVVAPSLIPKRPGDRVKTDRRDAIALARLMRSGDLTAVYVPEVEDEAIRDLARAREDALKDLKAAKCRLKAFLLRQDIGYTGRANWGPAHLRWLAEVVCPTPAQQIVFQEYVRAVDEHHERLDRLEVELQDHAKAWRLYPVVEAIQAMRGVAFTVAITVIAELGDLTRFEHPRQLMSYLGLTPSESSSGPRRHQGAITKAGNTHARRALIEGAWSYRYPAKVSRHLQLRLETLPKAAQDIGWKAQVRLCKRYRRLTARGKNPNQAVVAVAREMAAFIWAIARDIPIAA

SEQ ID NO: 337305 - protein, 368 aa, unidentified
MSVYVGIDVHRKRSQVAVIDQDGEVLANRNVPNGVEPILGVIGGLPAGTPAAFEAAFGWGWLVELLEDYGFSPHLVHPLRCKAIASARLKNDKVDAAILAQLLRADLLPEAWIAPPQVRQLRALLRHRVQLVRLRTLLRNRIHAVLADHGHGRPGGCWSGPGRAWLAALDLPAASREVIEDGLALIDALQVPIDRLDWEVHQHARSDPRVKVLAQLPGVGPFTALVILAEVGDITRFGSARKLASWAGLTPTVRGSDRVAHYGHISKQGSVWLRWALCEAAQTAKRHPDFAASYQAIARRRGKKIATTAIARKLLVRAWHLLAGAGTTASHDQATPGPARAVITSRRGHQAPGELAKPHEQAMPRSMT

SEQ ID NO: 337306 - protein, 404 aa, unidentified
MATRPQIWVGIDVGKHAHHACGVDETGKTVFSQKFGNDQAAIEALIARAGQAADHVRWAIDLTSPMALLLITVLLAADQTVTYVPGRVVNSMTGSFRGEGKTDAKDARVIAQSARLREDLNQVVMPDELVVGLTQLTSYRTDLMADWVAGINRLRALLGSIFPALEAAFDFANRTPLTLVAGMCTPAEIRTAGIDGVTTYLVDNGAWKPGIAKTAAAALDAAGGQSLSLPGEADTAMLVKRIARKLLDLDREIKDTDKLITTRFREHPWAAIIESLPGMGPGLGAEFLVGTGGELANFVSAGRLASYAGLVPVPRDLGRVSGNLHPPKRYNRRMRRVFYMAALSSLRYDNGPSRRFYDRKRGERLIHTQALLALARRLVDVLWALLRDGREFSLDPPVPTAAAA

SEQ ID NO: 337307 - protein, 367 aa, unidentified
MKKVSTVAAKQSRNISQQKLTIGLDLGDRNSWYCVLDEAGQIQLEQRVRTTAKALSEVFGAMRRSRIALEIGTHSPWISRLLSELGHEVIVANARKVRLIGESRKKDDRLDAQTLARLARIDAQLLYPVKHRSAQAQADLMMVRARAGLVRARTGLVNTARGLAKSYGERLHGCNVRNMSPEKAESLSPELQAALEPLLNAIESLSERIVEYNDGIENLAQQSYPQVALLKQIKGVGTLIALTFLLTLEDPHRFHKSRDVSGYLGLQPGRRNSGQSEPQLHISKEGDPYLRTLLVQGAQHILGPFGVDCDLRRWGLKLAERGGRNGKKRAIVATARKLAVLLHHLWVSGEAYDPLHNSNRVTVAAAA

SEQ ID NO: 337308 - protein, 379 aa, unidentified
MTATARRLESTVTGETLFMALELGSTTWKLAFATTRAVRPRIRTITAGSLSQLRTEIAVAKTRLGLAADTAVRSCYEAGRDGFWVHRALVAEGIHNVVVDPASITVDRRARRTKTDRIDATALITQLMNAAAGDRRGWREVHVPSVQAEADRQLQREWEAVRDDRTRLRNRIQALLATQGVYLDLSGHFVDHLRDVRLWDGTALPAELVARLERDWTQLQQVEDRRTQLTRLRQTRVADDRTDVVATQTRQLAELRGIGVNGALTLTTELFAWRGFRNGREVGASIGLTPSPYRSDQRVVEQGVSRCGNRRVRALSIQLAWSWVRWQPDSALTRWFHARFGDHGRARRIGIVAVARKLMIALWRYVETGTVPDGAVLNG

SEQ ID NO: 337309 - protein, 316 aa, unidentified
MSAPQCFVGIDVAKAHLDIALRPTGERWAVGNDDAGIAALVERLQALQPTLVVLEATGGYQRAVVAALAAARLPVAVVNPRQARDFAKATGQLAKTDALDARALAHFAEAVRPPPRPLPDAQADELRALLARRRQLVAMRTAEQNRLGNAPPRLQPDIQAHITWLNSRLAALDDDLDTTLRTSPVWREREDLLRSVPGIGPVCTRTLLLDLPELGMLSRQRLATLVGVAPLNRDSGTLRGSRTIWGGRAHVRTALYMSTLVAVRYNPVLKAFYERLCTKGKAAKVALTACMRKLLTILNAMVKHHTPWQVQEVPNA

SEQ ID NO: 337310 - protein, 334 aa, unidentified
MKQLFIGLDVHKKTWAVTIQEDHLILKRFTIDADADLLIGYVTRHFPQHQVQCCYECCCCGYHIYHSLTAAGWEVLVVNPGDIARGNKQVTTKTDKVDSAHLARELQAGRLKGIYIPNHKQEQFRSLFRRRNDLVKSLRRIKCHIKSMLLYYGIVLPETYDNVNWSKDMIQWVYKQRWSYAPATEAMKSRLEEYLFLRKQYLHVGNELRSYARKHFKKDYYLLRSVPGIGPLTAIGMLAEVGDIRRFRNIDHLSSYIGLVPSLHSSGEKTYSRGITYRSKNLLRSYLIKGAWIAAKKDEELMQYYQERKGCDHRKIIIKMAAKPEKLTKQCKID

SEQ ID NO: 337311 - protein, 298 aa, unidentified
MSQNDFKTSETMQPQEASPVKHQMSVLGIAIAKRLFHIVGMHERGQIVLRKRLARNALMPFIAALPPVLIGLEACGGAHYWARRFREHHHDVKLMASQFVKPSSKSNKNDMRDAEGIGEAVTRPTRRFVPTKEVAQHDIQALHRVRERLRGARTALVHERHGLLHAYGMVVPTGVSKFRQTVVGKLETDKAKLTPLSQEMFGKLMDEFAALEKQLAYDQEQLDALATTHPACQRLLTMPGIGPFTATALVAAVSDARAFKNGRQCAAWLGLVPRQHSTGGRNAYSASANAGRSISHTL

SEQ ID NO: 337312 - protein, 347 aa, unidentified
MKYYVGLDVSLKETSICVVDGSRRVVKEGRVVSEPETIGVWLLGLGLDFELVGLEAGSLAPALYDGLREQGLPVVCLDARHLKNATTAMPVKTDRIDAMNIAWALQAGWYRTVHVKSRDTHKLRALLRSRAMLVKTRTTLDNHLRGILKAFGLKVGRIAVGRFEDRVRELISDIAVLEETAEAILRVRSEVAARLADLHRQVLAVAKSDPVCRRLMSVPGVGPVTALAYRTAVEDPSRFTKASLLGAHFGLTPRKYASGETDRNGRITRCGDRMVRSLLCEAATVLLCRVRSWNWLRRWGMQVAQRRGMRRAQIAVARRLAVILHRLWTDGTEFQVSGAGIGGAAAA

SEQ ID NO: 337313 - protein, 352 aa, unidentified
MMIIGCDFHPRFQQISFLWEETGECGQRRLMHTVEAEQYYRSLGGTKVRVGIEATGSYGWFRRLLSELGHELLVGDATQIRASNPRRQKTDKRDAEHILGLLIQDRFPAIWQPPAENEQLRQLLLHRSRLVRLRTRVTNQLDGIAKNEGLLVPGGWSGKRRMAIEALPLPGWYGERRKDLLGLLDRIEERIAPLNKAVSQAAANNVEACLLMTHPGVGPVVSLAFVLAIGNWQRFPRGKQVGSYFGLIPAEESSGDKRRLGHISKQGNTLVRWLLVEAASTAQRYDASWHRQYVRLSMTKHHGVAKVAIAHKLAVRLYWMLRSGEDYQHVRERGSHARQSECPGGRSRRPIE

SEQ ID NO: 337314 - protein, 402 aa, unidentified
MHQVEHVIIGVDPHKLSATIEVVDQREKLLGSGRFTTDRAGYAAMLTYAKAWPDRTWAVEGSNGAGRPLAQRLLEDGERVVDVPAKLAARVRLFDTGHNRKTDARDAHSIAVVAVRTTTLRVLQLDGELEALRMLTDRREALTRRRVQTVDRLQALLAELLPGQAKRDITTGQAKAMLATVRPRDIAGRTRRRIAVEELAELIAVEAKIKKATAELKTIVLARGSHLMDLHGVGPVVAARVLADVGDVARFADRNRFASWTGTAPLDASSGEQSRHRLSRAGDRRVNHMIHIAAISQLRLDTEGRAYYSRKRAEGKRPLEAIRCLKRRISDAIFRQLVADAAAAQRPDIEAGPGGHREATQESSAAGSHPHTGTSDQPLPGPAPTTLRRPLTPRKRQLDPIS

SEQ ID NO: 337315 - protein, 340 aa, unidentified
MEGIAVIGLDLAKLVFQVHGIDTQGTVVVRRRLSRTKLVPFFADLPHCLVGMESCASANHWARELAALGHEVRLIPPRYVKPYVKRSKNDASDAEAICEAVTRPTMRFVGAKSPEQQGVLVVHRTRLMLTRQRTQIGNAIRGHLAEFGIIAPIGRQGLDRLIAVIGDESDLRLPACARTSLAMLVDQYQLVVANLLEADRAIRADSRSSELGRRLQEIPGVGPLVASALVASVPDPHMFKTGRCLSAWLGLVPRQHSSGGKERLGGITKAGDTYLRTMLFVGAMAVIRHAERYGTRKPWLIKLLSRRTPRVAAIALANRIGRIAWALMTSGERYREPAVA

SEQ ID NO: 337316 - protein, 335 aa, unidentified
MKQQAIKYLAFDVHQATVVATLRDEQGKAVMRATVATEAKAILALVKSAGPRVHVAFEEGTQAQWLHDLLIDHAERVIVCNVRGRSETTNKSDRIDADGLSELLRLGALKSVFHGAPEILTLKELVRCYIALVEDSTRVMLRIKAIFRARAIPTPGVSVYRGSQRKQWLAKLEGGARIRATSLLTQLDMLLELRPKAKAAMIGAARRQPGWKVLRLIPFLGPVRTALILAIMRTPFRFRTKRNIWPYAGLAVVKRSSADQEFKNGRLQRSKKAPITRGLNLNHNPPLNSVFKGAATAAASTPGPLCDYYEASLARGVKEDLARITLARKIAAVAL

SEQ ID NO: 337317 - protein, 391 aa, unidentified
MLPARLREQNESVKFLVKGDSMSVRRILAKTINTDLEYEAIGIDLAKNCVSVALLTTDGEVVCIDRLDYSELEKSAQVLCPTTFAMEPCTEMNYLVQKLEAWGHRCLVIGGKNVQNYVENHYSGQKTDLNDAQALAFLAQDTQLRTIKAKDMEQRKYASLTTLREQYIKQYRQTIVSLKGICQAWGLNISKGISGKARLKDLIENHAAFPEELKESLVDMVTHAQTAQKALNKITKTLEELAKNDKLCQLIRTIPGLGLICSCRLRATIGDIKRFKNPKDFPAYYGLVPRSIATGHNEKKGRITHRGDKTMRSLMVQGAGSVINMATRGKLKSKQLTKWILKKQKEKMPWGKLVCAVAAKLLRIVRAVLISSKPYNPQIAGVAKCSLPKGT

SEQ ID NO: 337318 - protein, 455 aa, unidentified
MPRAKGARATTMPVIHAHAAGLDVGATFHVVAVSPDCADQPVRTFRSFTEDLQRLADWLQVVGVTTIAMESTGVYWIPVFEILEAHGFEVLLVNARDVKTVPGRKTDVNDAQWLQQLHQFGLLRGSFRPSDAMVRVRAFVRHRETLVSAAGTQIQRMQKALMQMNVQLHHVVTDITGVTGLRILRDIVAGIHDPARLALHRDGRCKQTPETIRQALVGNYRPEHLFALRQTLELYDVLQAKIAETDAAIAAALTTLPLPEAASAAPLPAVRHTKGKNEPHFDVRRALFALIGADLSQIHGLGPYTVLRMVTECGTDMTKWPTVKHFTSWLTLCPGNKISGGRVLSAKTRRSSNRVAALLRIAAVNVGRMQTALGAFYRRLAARIGKAKAVTATARKLAVLFYNAVRHGLQYVDPGVDHYEARYKQRVIENLERRARQLGLQVIRPASLPQTTGVS

SEQ ID NO: 337319 - protein, 342 aa, unidentified
MKQYVGLDVSQRETAVCVVSETGQLIFEGKAKSDPGVLTNLLRKHAPLAERIGFETGAMASWLWHELRRVDLPVVCIDARHAHAALSVRMNKSDQNDARGLAELVRVGWYREVKVKSEESQKIRAILVARSRLVSMRRDIENQVRSLIKECGLLFPRAVGQQFRNQVSELLGEDHQLLSVIAPLLSIHEHICQQQSKFDDEVRRLAKSDETTRRLMTVPGVGVVTALTFRHTIDDPSRFRSASTVGAYLGLTPRRNQSGETDISGKISRWGDRLLRTYLFEAATVLLYRTKKWSSLKAWGMKLARRIGMKKAKVAIARKIAVILHCIWVDGTSFDWGHAQPT

SEQ ID NO: 337320 - protein, 434 aa, unidentified
MKKIRENCAGIDIGAKKIFVAIESSTVKSFDTFTESFELARDYLLSNGIKSVAMEATGVYWTILYDLLEASGLEVWLVDGRQTRQVPGRKTDVKDCQWIQELFAHGLLNKCFVANDDLKKIRTYQRQREDHIRSASMHINHMQKSLTQMNIRLKEVLSQLHGASGLNIIKAILSGERDSHKLLSLCHKSIIENKADLILKSLNGHYKEEYLFTLQQAYDAYCFYQDQIRSCDEKIEAYFKERNKGKDIPRETNRKSIRHNKPKVDNLGGHLKDLYSGKDATKLPGITDYTWLQIYAEVGNDLSKWPTEKHFTSWLGLAPKQHQSGKMNKKRFKKHKPKAGLIFRQIAVSLIESKKIGLGTFGRKIRSRRSPMVAIKAVARKLAVLFWRMMMKGMDYVDQGIEYYQIKMNENKRKWVEKNAFELGLVITDSQAIT

SEQ ID NO: 337321 - protein, 364 aa, unidentified
MKRKVYVGMDVHKETNRIANLTSNTKEIVKEQQIKHNEVQIKKFVNKLKSEWNEIHSCYEAGVTGYPLYRYLKSLGVNCILVAPGKIPRQSSDKIKTDKRDAIKLAKLLRSGELESIHVPSEEDEAVRDYLRSRDSLRLDLGRNRQRLMKFLLRKGITYSATKYWTVSHNKWLNNLQFNNEILQETFNDYYSRVRVQEENLKAMDKRIQEIAESEPYREKVGILRCFRGVDYLTAMFLLCEVCDFKRFKTAGSFMSFLGLVPGEYSSGSKRKQTGITKTGSPRLRRILTEAAWQHRFPGTGSKIVTARRSGQPALVVALAEKASLRLHKKFRNLQQRGKTPQVMITAVSRELSGFLWAAMNLVA

SEQ ID NO: 337322 - protein, 386 aa, unidentified
MQADANQTESSVAVRTDLAAIFVSLELSRSKWLITSLSPGAGEKMSKFVVPGGDVSALLERFEHLQRKASARSGRSFRIVSIQEAGLDGFWIHRVLEDSGIESYVVDPASIAISRRRRRAKTDRIDGETLVRALLAHKRGEPRVCAMLHVPTPDEEDSRRLVRERKALINERIRHVNRIKGLLFSQGVSGYEPLNRDRRERLEALMTGEGRPLPKALKAQISRELARLELLIEQIGDVEEARDAVLAEAEHSTRGPALLLNLRGIGPEFAAVLWSEGLSRRFDNRRQVAAYAGLAPTPWQSGQISQDQGVSKSGNPRLRATLIQVAWLWVRHQPTSALAAWFKARVSQNGGHRKKSTIVALARKLLVALWKYVNAGVVIEGAVVRT

SEQ ID NO: 337323 - protein, 441 aa, unidentified
MAMRRRDEEVVFPHAAGIDVGALSHWVAVPRDATEDPVREFGPMTDDLNAMADWLVASGVDTVALESTGVYWIPVFEVLEQRGLKVWLVDARQMKYVPGRKSDIQDCQWLQKLMSLGFLRAAWRPEGDVCVVRAVARQREILLAEQASWVQRMQKSLVQMNIQLTEVLTDVMGTTGQAIIRAIVAGERDPKALAKHRNRRVKASAEEIAKALTGNWRDEHLFVLCQALAMYDDIARHLTECDSKLQALLRALGQCNVDLGKAPRTGSKLRDQFDARQILANWAGVDLTRINGLGLTAVMKILSELGPDLSRFATVKHFCSWLGLCPGTKISGGKVLCAKTKHSANRVRQALKMAAMSLSHSDSALGAFYRRLCSRMDKPRANTAAAHKLARMVYFMLTRGEDFVDQGQQRYEEQQRQRSIAALKRRAAALGFDINPTPAPA

SEQ ID NO: 337324 - protein, 405 aa, unidentified
MDIIVDKGCGVDVHKETVVACIMGTGIKKEIRTYTAMTNDLLRLRAWLQETGITHVAMESTGVYWKPVFNILEDSFEVILVNARHVKNVPGRKTDVQDSEWLCKLLRSGLVKGSFIPPRDIRELRDLTRYKRKLIQAIVAKKQRVEKVLEDANIKLSSIASDTFGASGKRIIEELIKGELEVEEMAELSKGRLRQKRGDLQEALVGEVREHHKFMIKTSLKHIRAMEKILSEIERRIQEKIDRHYKEEYALLQTIPGVKGEASTLIAEMGVDMERFPSEEHLSSWAGMSPGNNESGGKKKPGSTTYGNKCLKTMLTEFGWVASKTKDTYLRSKYHSLVGRRGKKKALVALGHKILIMCYHILKYRCAYKELGVDYLDKRRKDKIARSYIRRLNHLGYEVTLKEAV

SEQ ID NO: 337325 - protein, 349 aa, unidentified
MYYVGVDYHKCYSVATVLDADGRMLARRRLDNRLEAFREFLRPYDKTDLAAVVEATRSWGIAVDILEQLADKVILANPGEVKLIAKGRISTDKVDSLALAKLLRVGWIPEAYLRPRANREQQLILRVRCFLVQLRTRVKNRIHDLIDRQDEPIRAAATGFSDMFGKKGMAWLKSLELGHACGTLLDRLLAAYDALDTQVRQSDRLVGELFAADEDCQLLVKTPGIGTFFAVLIKTEVGRIERFASSARFCSYAGVVPSTESSGGKVWHGRIIKQSNRWLRWALVEAVIPATVADAGLRAHYEYYRRTKGSKVAKVVTARRLGCIVYRVLKERKPYYEQPAQSHGYRQAG

SEQ ID NO: 337326 - protein, 368 aa, unidentified
MEDSITTFVGLDVHSESTAIAVAVVGREAPRFVGTVASRFAELRKALGKLGEPSSLFVVYEAGPCGYGLVRELREAGYRCEVVAPSKIPRKPGERVKTDRRDALKLASLARAGDQTTVSVPDARDEAMRDLCRARVDAVRARLKARQQLKAMLLRHGRRYSGKTSWTAAHERYLAEVSFDHPAQNIAFTEYRQAVSEADVRVRRLSEAILHEIERWRMLPVVRAVMTLRGLDVIAAATVIAELGDLRRFAHPRELMGYLGLVPSEYSTGEKRRQGGITKTGNTHARRMLVEAAWNYRFSPRLSRLLQVRQQEQPAAVRQIAWRAQLRLTRRYRHLTARGMPHNKVCVAIARELVGFVWDLGRQIAPNP

SEQ ID NO: 337327 - protein, 354 aa, unidentified
MRMVAGVDCHKDSHSIAFVDAVGKLVRTLTIGTTEAGYQEAIVAATALGDVRWGLESTGCYGSMFAQVLTALGFTVYEVPGSYTKRHRKQESRRGKSDPIDAKAIAEVVLREADRLPLYRMAVEREAIRLRYEQRDRLVRERTQAINRLRSAGLRLDLRDLPADLTSKRALKHLTNDLEQRGGSSAMIEALLDDCFDAIDDIIRIAGRIRRIERVLSPLMRRIAPELLEMHGVSTVTAAGLVGHAGDMRNCRNADAFAMRSGAAPIPCASGRRQGVRVNVGGNRQLNRLLYSIALVQLRSRDHAGRKYFDRKRSEGKSSKSALRCLKRQLATIVYYRLIAAQPRLLHELASIAA

SEQ ID NO: 337328 - protein, 382 aa, unidentified
MQSIDNVNPTIHLAIELSASSWLIAARVPGSEKPYLHRIDGGNTAALLALISSLRARVARRLDAAIEVICCFEAGRDGFWLHRLLTAHGITNYVLEPTSILINRRARRAKTDRLDAIGMLRVLAAYLRGDRQSCSMVRVPTPEEEDAKRIHRERENLVQERLRIENRIEALLFTQGIRKRPSLRSWERDLANLRTGDGREMPRHLRAELNRLRRRLVTILELIREVEAERDELVVTTPQDRTSRKIVALCRIRGLGENFAAVLTREVFYRSFGNRRQIASYVGITPMPYQSGGMDRDRRISRAGNPRARTTMIQLAWLWLRYQPGSELAEWFRKRVGTLAGRTRRIAIVALARKLLIALWRYVETGVVPAGVEIRTETVVAA

SEQ ID NO: 337329 - protein, 436 aa, unidentified
MASHCQFYDYKSQEVILLSFKILKNNCCGLDVHKTWIFACIGITDSNKRTEYKQARFSSFTKGLQELCDWLAKYHCNDVCMESTGKYWIPVFNILEKNNIWVTLSHPKYTKPQKGNKTDRKDAKWICDLYMCGMVKPSFIPPVDIRELRDLVRYRFKLTCMITSEKNRAHNCLTVSNLKLDDVFSDIFGKSSRSITEQILQHPGETFDVTPFVDGRCKTPIQEIQAAVDGAISAEQAVKLRQCLNHIDELEVHKAEIEREIFRLSDKYKEILALIRTVPGFDKNPLTAIQVLSEIGGDMSVFPTAKNLVSWAGCCPRNDQSNRKIKSTRISRAGSYFKPVLVQVANALIKSKKHPEFTTRYRRIKARRGHKKAIIAICRMILTAIWHILTDLKPYTPEGFLESRPVNESKILTTSQALNLLKQRGYIIKDEAVPVS

SEQ ID NO: 337330 - protein, 421 aa, unidentified
MKKINSSVIEKKPESKEGKKAAKTIEVTNKSEDMLKKKGKAEEKQKRLGVRILLQKLEEAKEAPKVKEVLYDETVAYYIGVDIGDKKSHYCILDKGPDIAAKGSFTTTLSEFESYFKAIPRSRIALEVGTHSPWISALLEKLGHVIVVANPRKIGGGKKRRKNDKLDAEYLARQVKSDPKMLWPIQHRGVEARNALVLLRARHALVCTRTKLVSAVRGFVKSSGQRLPRCSAESFHKIERIHVPDALRDMLEPLFTQIGMLTEQIKKYDAEAKRMCRNAHPETKQLQQVKGVGDITSLGYVLTIENPDRFAKSRDAGAYVGLIPGQYESGDSRPQMRITKTGDRFLRQLLVQSAHYILGPFGEDSDLRRHGLKIAARGGKSGKKKAAVAVARKLAVLLHRLWVTGEVYEPLRNSEPKEKAA

SEQ ID NO: 337331 - protein, 337 aa, unidentified
MSPHVTRLGPYGKKEREMKEGNYVGIDISKETLDVLVCPTGEIAKFANDNAGIGHAINWLKKVSPELIVMEATGGLEMPLYISLAEAQYRVAVINPRQIRDFAKSTGQRAKTDKLDAAILARYAMSIKPEPRSCPEQILLQLKSRVVRRQQIVDMMATEKNRLGSSHDPVTREEIKVHIAWLKERIDSIDKDIKKKLDENTGWQEKAKLLMSVPGIGPVLAATLIAQLPELGKTNRCEAAALVGVAPMNHDSGGHKGQRSIIGGRGRIRGALFMGTLSAIRFNPVIKVFFERLTAKGKTTRVAMIACMRKMVCILNAMVKHNKPWDCHVLNTQIVTI

SEQ ID NO: 337332 - protein, 338 aa, unidentified
MIVIGVDVHKHSLTAVAVEEAGRMLDEKTVAAADGELVAWASGLSGERLWALEDCRQLTRALERELLAVGEQLVRVPPKLMAPERRAGRVRGKSDPIDALAVARAALREPRLSRPRPDEQPFRDLKLLVDHRDDLVDERRRAQQRLRWHLHQLDPSFAVPAKALDRPLHLDRVGRWLARRPAEVQVRVARELVVRCRSLTRTIVELDRELEQRTAQTAPALLELPGCGALTAAKLLAEVGPIGRFQTDAQLARHSGVAPLEASSGRVQRHRLDRGGNRQLNCALYRIAITQARYHPAALAYLERKQAEGKSRREAIRCLKRQLVRVVFNTLKASPALT

SEQ ID NO: 337333 - protein, 314 aa, unidentified
MANKRILGFDVSKAWVDVAEAGASPIWRLANTPQAIADFLDATGPVGLAAFEATGGYERNLQGALRAVGIPFARVHPNRIVAFRTRRGVKAKTDRIDARLIADFAALEIDRCGLAPLMEGEPALREMVARRRQLVEALHAERCRMALARSTAVRASLDGVVAALRSALDALEADILATLAAREELAEMARHLRSLSGVGPVTVMTLLGELPELGRLSNKQIASLTGLAPRTRASGTRTWRATTGHGRPGVRLVLFNAARSAIRHNGPMKAFYQRLVTENRRPGKVALLAVMRKMLVILNAIARDKTDWNGAKTA

SEQ ID NO: 337334 - protein, 443 aa, unidentified
MTPMTQPPISINDGNFLDGSASASDLKAILVGIDWADEKHAFELLSPDGQRHAGSILQDPQAIAEWIAFWQKKCCSVQFHICIETSHGAVVNALREHPQVTIYPVNPNALANYRKAFAHGGGKNDPVDAKLILQYLQHYRDQLRPLSCDLPLTRELDALCKDRRGLVQQRVDLANELSAVLKAYFPAVLRTKPSALYAKFVVRLLQKYPTLELLQKAGRHKLRKHFFGYGTKARIEERIEILMTATPLSTDEVLLRASSRRVQAICGQLESLNKSICGYDAEIKRLVASHADYVVVSSLPGAAYKTQARIIAALGDDRSRYGNASALQAATGIAPLTTQSGQMRFVSSRWACSKFIKQTFHEYAALSINQCEWAKAYYQLQISKGKSTQMARRALAFKWERIIYRCWQNREAYDDARYVERLRVTNSPLIKLMDEMRSDGTSA

SEQ ID NO: 337335 - protein, 402 aa, unidentified
MNAIGIDVSKGKSMVAIMRPFGEIVSTPFEIKHTTSDIKSLVELINSVEGESRIVMEHTGRYYEVLAHQLSEANLFVSAVNPKLIKDFDNDSLRKVKSDKADAVKIARYALDKWQNLKQYNVMDELRNQLKTMNRQFGFYMKHKTAMKNNLIGILDQTYPGVNTYFDSPARSDGSQKWVDFASTYWHVDCVRKISQNAFIDHYQNWCKRKKYNFRKSKAEEIYGRAKELVPVLPKDDITKLIIKQAVDQLNSASETVESLRTLMNETASKLPEYPIVMAMKGVGPSLGPQLMAEIGDVTRFTHKGAITAFAGVDPGVNESGTYEQKSVPTSKRGSSALRKTLFQVMDVLIKSKPQDDPVYQFLNKKRAQGKPYYVYMTAGANKFLRIYYGRVKEYLASLPES

SEQ ID NO: 337336 - protein, 419 aa, unidentified
MRNSNTKKLKRISEQTLLVTVDIGKVKHTGYCRFPNGTEGKPFEFFNSRNGFEELWWRVCQAKRSINLAEVVVGFESTGPYAEPLLHFLRKRDVRLVQVNPLHTKRLKELQGNSPNKTDQKDPKVIADIIELGHALTVIIPEGTVAELRRLTQARERSIQRMSMLMSQLQDLVFLIFPEFITVMKDITIKSTQYLLKNYPRPQDIVEQGIDGLAQILKKVSRGQLGKERAEALYQAAVESIGIGEGRESIVLEIREIVFSIESIEKFVKEIEKHMSKHLKDVPYSRCILSIKGIGEITAAGLIGEMGDFKNYKTISEVIKHAGLDLFEISSGKHRGTRRISKRGRPLLRKLLFFASINVVRKGGILHKQYQHHLEKGMPKMKALVAISRKLLSIIFALVRDHSVYIAEYSKTQQLKEAA

SEQ ID NO: 337337 - protein, 354 aa, unidentified
MNKKKIIVKSTKDNSYPDIIDQFDHYLALDWSMINMSIARLSKKMKHPVIIDVPADLNNLKDYIKNLSGKKIMTIEETTTSQWLFVELVNYLDKIVICDPYRNRLLSDGPKTDKIDAGKLCLLLKNGLLKEVYHTTDSLYDLRMLVSAYDDQVRAGVRLLNQKSALYRAEHKSHKKDALLDGNEIKNFVITRIEEGIESYREKKDDYEKEFDKISRQNKTLRNLKTIPGIGPISSVTILSIVIDGRRFKSPNHYLSYCGLVNHQKLSGGRSYGKRKPRYSRRLKGIYKSAAIRAVSHENPIRDYYDYLITEKKLTEKNAVNSTARYIAKVSLGIMKSGKKYKPYKKGFKAKEAA

SEQ ID NO: 337338 - protein, 381 aa, unidentified
MRFVGIETDAVLVRPTKFTEDAPGYDRLFGLLGTPADTLVALEATGHYWKNLFAVLVTRGFAVALLNPLRTRRFADEELARTKTDAIDARGIARFAAQKRPAPTRLPDRATEELRELVRLRDRLVQDVGDRLRQLHRLVDLGFPEFTRHVKSLDSELATAILHDYPTAAAFRNVSARRLAGLRYDGRHKVGDDLARALLAAATRSVGQHHGAAYRLQVRYACEDLDLLRRRLRTLERDIERTLDDHEIGTLLTTIEGIGPQTAARLIAELGNPAEFRSAAALASYVGVIPAIRQSGTWTSSRAGLHPLGHAALRAALWMPVLTAVRKNPWLRAYYQRLTARGKLPKVALIAAMRKLLIAVYTVAKTRRPFVSQRAPQEARA

SEQ ID NO: 337339 - protein, 340 aa, unidentified
MNATTYGLDVAKRVFQMYWVDAQTGEIANRRFGRDDLIAFFAQRPAGRVALEACGSAHWWARKIRALGHEVVLLHAQFIRPFVQTNKTDAADARAIWTAVQQPGMRTVAAKTEDQQTMLSLHRMRSLLVKFRTMQVNQLRGLLYEFGATFRAGRLAGLTEIRERMAELEDTLPRPIVLNLQDQLRRINAFEDDISQLEKRIGAWQKQEAACRAISEVPGIGRLTATALVATVGDAKTFKSGREFAAFLGLVPRQNGTGGKVRLGSISKRGDPYLRTLLIHGARSVLCHAKVPTAWQKGIQERRPGNVVAVALANKMARIAWAILAHESSYEKNHVSVRAA

SEQ ID NO: 337340 - protein, 342 aa, unidentified
MTYYAGLDVSLEETAICVVDATGAIVKEVRAASMPDALDDALKRLDLPLERVGMEACSLTAWLHDGLTNAGWPAICIETRQANAAMKTMPNKTDRNDARALAQIMRTGWFRQVHVKSRQSRLQRSLLVARRTVLNHMRSIENVVRAITREDGIKLGTPSRKDFAARVREMAGNEPELMAMIEPLLAVLAAMIEQLARLTKQVLDVVKSEATCRQLMTSPGIGPLTALTYRATIDRPDRFDRSRDVGAHLGLTPSRYQSGETDIVGKISRCGDELARTALYEAAHTLLVRSKKWSTLRVWGLAVAKRRGMARAKVAVARKLAVILHRMWLDGTDFRFGKEALA

SEQ ID NO: 337341 - protein, 344 aa, unidentified
MDNHTQYSGFAGVDLAKKVMQIHFVTGDGEITDKQVKRAEFLDFFRNRTKCLIGMEACGASQDWARKLEAMGHEVHLMSPKAVKPFVSGQKNDYNDAIGIYKAMFNGVRRVPVKSTEIRDLQTLRRIRSQVTKDKVKEINHVRGLLAEYGIVMGKSITAFNKGISSALESLKERGDVSPLVAEELQTTVESIKTKIERQKRLDREIEQLARGCKNYENFLKTPGVGPFTAAMLCVLLCDPAIFANGRQFAAYIGLAPRSRGSGGKNFIIGIPSKFNCDSESRAVFVECAQALTRYKNKSPWIEGILRRKPKKVAVIAIANKLARQVWAMANKGESFKQMTILTA

SEQ ID NO: 337342 - protein, 403 aa, unidentified
MILDQQDIDVFIGLDVGKSGHHAVALDRSGKKLFDKALPNDESRLREILGSLSGHGKVLLVVDQPATIGALPVAVAQAAGATVGYLPGLAMRRIADLHPGQAKTDARDAAIIAEAARSMPHTLRSMAMDDETLAELGVLCGFDDDLAGQITATSNRIRGLLTQIHPALERALGPHLDHPAVADLLTRYPTPAALKTAGRGHVRARLKKHAPRAAERLTDAIFNALGEQTVVVVGTNAAGVVLPKLAEQLLSLRHQRDAIAAQVEILVEAHPLHKVLTSMPGIGVRTCARILTEVTGKHFASAAHLASYAGIAPVTRRSGTSIRGEHTSRRGNKKLKRALFLSAFAALHHPPSRAYYDRKRAEGKRHNQALIALARRRSDVLFAMLRDGTLYQDPEQRNLPAAA

SEQ ID NO: 337343 - protein, 523 aa, unidentified
MVTRTKKRKSTGSRKRFIGKPTGQIQQRVQAVGPEHFGIVAVDCAKRRSKWMLCNFYGKVLVEPTTVEHTSGGLRTMTEYVADACQAEGLTDTIVAVEMTGIYHKPVQRAFRKAKFDTRIVHPFASHHYRRPLHPDEKTDDNDLEAIFQAAVKGYGLATLPVGEVYQSLQAVSRHRHNLVKQRARLMIQIRRLLHQTMPGFADLWEDDKLFHKSIALAVALKFSSADAIRQASVDGIASHLKKTKVRFQTRTIERIVAWAGTAAEPSELATMHTRQWQQLNEVRQLLGQQIVAAEQEMAGFLVKTPYVLLLSATGINVVSAARLAGEAGPIEHYASPRAINGRAGLFPSRYQSDEVDHADGSLVRQCNRKLRGAAMLVAENLIKCHPHYRGLSALWTQQKIDPRDRRCRIANRAMRMVYQLVGGRQVWRGKGVDREYLLAKLQEFHRVHKTPLEQSIRDLHEAFAWLPKSAYAAEAKPLAELARKKHRGPKPIGDLLVPLLIRLGVVSAEDIESNTSEARSSA

SEQ ID NO: 337344 - protein, 356 aa, unidentified
MNKSNKLDFTGQPIYVGLDVHKKSWSVSILSQQCEHKTFTQPPEVDKLVYYLRRNFPGAQYHSVYEAGFSGFWIHDQLRERGIDCIVVNPADVPTKDKERTKKRDPVDCRKLARSLRNGEIEGIYVPCRSKLEDRTLIRTRQSMVRKQTRCKNQIKAILFFYGVVIPEEREMGHWSRRFIQWIEQIRMERASGDIALKAHLEELNHLRQLIASLNRAILRLARTEEYRPAVNLLKSVPGISTLTAMILLSELGEVTRFPSLDELSCYVGLIPDTQESGEKENVGGMTQRRHSQLRWLLIEASWVAVRKDPALLMAFQEYCKRMRKTKAIVKIARKVLNRIRYVLKNQAEYVPCVIQ

SEQ ID NO: 337345 - protein, 350 aa, unidentified
MLIIGCDYHPAFQQIAFVDTATGDCGERRLEHREEAEKFYRELAARGMKVRVGMEASGQARWFERLLAELNFELWIGDATVIHAKRVRKQKTDRQDAQLILGLLLEDRFPQIWVPSWENRDLRQLLWHRHRMVQARTRIMNQLQAVAINEGLRCKKRLWGESGREQLEAFRLAPWASRRREDLLKLLDGLNPTIAELTQAIEQEVEKCPEAQRLRTHPGVGPLTALAFVLIIGRADRFQCGKQIASYLGLVPLEDSSGNRRRLGHITKQGSSMLRFLMVEAAQVTVRNLPEWRSQYLHLTIRRGRKIAKVAMARKLAVRLYWMMRKEWDFGKLTKFGSHAGQPGTGDGVK

SEQ ID NO: 337346 - protein, 416 aa, unidentified
MNAVGIDVSSRKSTVAVLRPLGEVVCLPFDVTHDIAGLASLVEKLKALDGETRVVMEHTGRYYEAVAKALHEAGFFVCAVNPLLIKEYGANSLRRVKTDKADAVKIARYALDNWADLRDFTPMDAIRYDLKTLNRQFQLASKQRTASANNLIALLEQSFPGIRKCFDSPVRSDGTQKWVDFAHSFWHVDCVRKQPFAAFCERYRKWCKRHAYLFKQSNAEEVYALAKRAVVLTPKSKVVKVLVQEAANQLISISRSVEVYRAEMDRLAAMLPEYPVVMAMYGVGKSYGPQLMAEIGDVRRFERKQALVAFAGIDPMPNQSGDKNVRSNKSSKRGSPYLRKTLFNVIRTYLQCAPQDEPVFQFLNRKRAEGKPFYVYMLAAANKFLRRYYAKLRDYFASLDTLQPVAPIPTILKATL

SEQ ID NO: 337347 - protein, 326 aa, unidentified
MKKSNENKLVGIDVSKKTFDVYCLDVKGQTVQRQLPQSSKGYRTLAGFIGEDAICVMEATSTYHLPLAQWLYDHGIRVVVENPLKIKRFSQMHLQRHKTDKADAKMIYEYGIIIVTKNVVLWRPQSTRIQELQQCDSLSQRLNKELTAITNTHEALAQLSIVNAEVTRIVSSTTEQLKDALKQLDKQMQALIKEHYYENYKLLMSIPGVGSKTSVMLICQTDNFTKFDNVKKFLSYIGMSPRTYESGTSVKGKGHITKVGNGRLRSLLYMCSWTAKRTNPQCVDVYEKMHTKGKPEKVIKIAIAHKLLRQVFGVIKHQQPFSMQLA

SEQ ID NO: 337348 - protein, 395 aa, unidentified
MFIVGIDIAKRSHEAIIIAEGGQVVRKAFSFRNNCTGYNLLLEQVRRLTLVKSQIVFAMESTAHYWLALYARLLKDGYAVMVLNPIQSHSLRELYIRKAKTDARDSLVIADLVRFGRCKASNVPQDKILALRELCRSRAYLVDMAADLKRKLIALLDRIFPEYESLFDSVFSKASIAVLSKYSTPQKVKNANLRKLTDLLMENSNGHFGEWKAHQLKEAACSSFGIDDSGGVYSTLLGMFLEQILSLTAQADSLEKQISVFFQEFNNPLTSIPGVGTVLAATILSEIGDITRFSSADKLLAYAGLDPSVKQSGEFKSNQNRMSKRGSPYLRRAIWLASTVAVHRDPMFQTYYEKKISEGLHYMNVIGHVSRKMTAVIFAVLRDGQPYQPILQSAG

SEQ ID NO: 337349 - protein, 411 aa, unidentified
MDKVYDKCCGIDVHKKLIVACFRKGSKQELRNFGATTRELLELANWLQNGGCEMVAMESTASYWKPLYNILESSELKAMVVNASHMKAVPGRKTDTKDAEWIAELLQHGLLKASYIPDKQQRELRELVRYRKSLVSERTRELNRLQKMLEGANIKLSGTVSDINCMSARNILEYLLTGEFFDEAKYDEMYKKKIIAHNLKASKEQLIDDLNGVMTPLQRRMMKELLSHLDELNVHINNLEDEIDNFMKPEEKQATQAIQDVTGIGKNSSQAIISVIGTDMSRFPTAGHLAAWAGLCPGNNESAQKRKTGKMRKGNALLRSTLVVCAHSATRNKNSYFYAQFMRISSHRGKKRAYVAVAHSMLIAIYHILKDGVVFKDLGADYYNQFNMERKINAYLKKLKALGWEVPVVAA

SEQ ID NO: 337350 - protein, 391 aa, unidentified
MSMYFIGIDISKYKHDCCIISAADQKVVSKVTIKNNKAGFNELLTIIHSLANPADIRIGFESTAHYALNLELFLENSLLTFMEVNPVLISEYKKSKTLRRTKTDSVDCESIARWLMTVEYKPHSKGFYHAYSLKSLTRLRDKLIRQRSFYLVKITNVLDHTFPEFKPFFNERLSKTALYLLENYGSAEKMARMNSASYEKLRSLSRGKFSPQQFLRLKELAANTVGVNNSIFDVELNSLLSLYKSLVKEINTIEKEINKLIEEVHPHYMSVPGIGPLSAAVIYSEYGDISNFTNPGQMLAFAGIEPGINESGTESHGGKMVKRGSSQLRYTLINCCLPLIRFDMTFATYYAKKRGEGKPHRVAITHVAKKLIRVIYALERQDIDFNAQKLR

SEQ ID NO: 337351 - protein, 356 aa, unidentified
MLHSGIDKHKDNCFIVTVNDQGTVLKEARVKNSTAALTAYFTSFGPAEKHRAVVESTTGWYWLDDLLTSLGIELILAHAKYLKAIAYAKVKTDRVDAHTLAQLLRLDYIPRAHKIRLEFREVRDLTRARLRLVYKRTGCYNSIHRLGEKFNCDHLIDADKQVIPEDLPALVKEQIQCHVAQITLLNTQITRLEKLVQDRLIESEDVHRLLWVPALGPVTAFSLYLEVDGIERFETEKKFFSYARVVPGADNSNKTRHHKSGNKDGNKYLKIALSEAATHAIQFYPEIRRFYQKMYRRSNEAIARTLVAKEMARIVYHILKEKSNYRGFKGQPIERQKKLVWPLRAAFAPHAAQLPA

SEQ ID NO: 337352 - protein, 354 aa, unidentified
MTASYDYHIGVDYHKSYSHLVVQDSSGKTLRSGRVKNDRQSLGGFLERYRENSHAVIEATRNWMVMYDWLDDICDDVVLAHPLKVKAIADAKIKTDKIDATVLAHLLRADLVPEAWAPSEKSRELRVALRERMFYVRLRTMTKNRIVTVFDRYPEQTAQLKKLGDLFGKAGRIQLAEVNVSDIDRIQIDRGLAFIGDINERIKQSETTIRAMTKANANVKLLKTIPGIGEFFARLIDAEIDDVSRFRNAKKFAAYAGLVPSTYSSGGKTYHGKIIKQGNKWLRWAFVEAVAPAIASDAQLRAQYEQLKIRGTNKARVAIARKLLTIAFQILRDQRAYEPRGTTTEGASTISRLS
